United States Patent Application Publication US 2019/0348154 A1 - sequence listing, part 3

SEQ ID NO: 5826 - DNA, 1167 bp, Escherichia coli
atgctggtactgaagcagcaactgaaagaggcccgtattccacaggcggtggtggcgagagctgtcgatgtttctgaggccacgctggcccagattgtgaatcataacgcgtggccccgcaccagccccggagaagtgcgccggcgtcttgcgtcctggctggaaagtcaggggattgatacaacgaagagttttgatgctgtacagggcgcggccacgccccgtacagcgggtaccacagataaaacgagcctcagtgaggaagagaatatgttactcaaaaaacaggtgttatttccagcaaccaaaaaagcgtttggtcttttccgtgacccgttcgccgacgaagccatgcagggttctgatgatgtgttcaccaccccggacattcgctacgtgcgtgaggcgctgtaccagacagcccgtcatggtgggtttatggccgtcatcggtgagtccggtgcgggtaaatccacgctgcgccgcgacctgactgaacgtatcaaccgcgagaatgcgccggtaattgttatcgagccatacatcatcgctatggaagacaacgatgtgaaagggaaaaccctgaaggcagcagctattgccgaagccattatcagtaccatcgcaccactggaaagcatcagacgcagtcaggacgcccgttttcgccagttgcatcgcgtcctgaaagacagcagccaggcggggttcagccacgttctggtgattgaggaggcccacagtctgcccattccgacactgaaacacctcaaacgcttttttgagctggagtccggtttcaaaaaactgctgtccatcgtgctgattggccagccggaactggcgacaaaactgtctgaacgcaatatggaagtccgtgaagtcgttcagcgctgtgaggtggtcgaacttctgcctctggacaataaccttgaagaatttctgacgttcaaactgcaacgggccggtaaacagctgacggacattatggacgccggtgcagtggatgccatacgtgcccgcctgagcaatccgggaagtcaccgtaaaaatatggtcagcctgctgtatccgctggccgtcagtaacctggtaatagccgccatgaatctggccgctgaaatcggggttccacaggtcaacgctgacgttgtcaaaggggtttaa

SEQ ID NO: 5827 - DNA, 270 bp, Escherichia coli
atgaaatccaccacaggtatcaaccagcaaatcagcaaagtgcagtcagccattatggcgcttaaggcgacgaacacggatgtacaaagcatcaccatcaggggtaacaaacctgtcatccgcgtttcccggagtgcgcattgcatgcgcatgcttgagcagggaaaggcctgttatctgtataccggacatgaccacaggggatatttccgtcagggcgttttcgaactgcacggctgtcgcgtcgtgtggccggaatctttgtggtaa

SEQ ID NO: 5828 - DNA, 531 bp, Escherichia coli
atggcaaaaagtacaaaaggtgcaaaacgtatcaaggccgcagcagcactctgggtgccggggacacgtgaagaggtcattgagggaatcagactactcggtgacgcacaacgtgaactggtcagggctgaaacagaaatgaatgacgccattggcgatatcaccgcacgttatgccccgctcaccgagagcctgaaaaaacgcatggccgaactgcagtccggtattcagacatggtgtgaggcacaccgtgatgaactgaccggcaacgggaaggtgaagttcgctaacctcaccaccggcgaggtgcagtggcgaaaccgtccgccatcagtcagtatccgtggggcggataatgttattgaattactgagacgtctggggcttgagcgctttattcgtgtaaaagaggaaataaataaagacgctatcctgaatgaaaaagaggccgtgaaaaatattcccggtatttccattaaaagcgacattgaggatttttcaataattccttttgagcaggatgtgcagtaa

SEQ ID NO: 5829 - DNA, 195 bp, Escherichia coli
atgatatttaaatgtattcagtgcgagagggatataacagccctgcgttttcacagcgccatcgccgtgatgtccggtaaataccacatccctgcggtacgcgtcaccctggtctgcccgtactgcagccagcatttttcggcagacgtgcccgtcatggaattctcccgccctgacagggaggactcgcaatga

SEQ ID NO: 5830 - DNA, 273 bp, Escherichia coli
atgattaccccacaggaagcacgacagcgcacccgaacccttgttgaacactatgtcaacgagtgtgaatgccgcgacctcaccgatgtgaagcacgtcctgacggcgctaatcagcatgaccgctcaagccattgtggcgaccaacggaaaggcggctgccctgcaggtactggtgaacacactaacccacacggcagcgcatgaggtgccgtaccggatggaaaccactgcagaaggcggcctgcacatcaccgtcagccggaagcactga

SEQ ID NO: 5831 - DNA, 297 bp, Escherichia coli
atgacacggaacaccatactcacccgcaccgccctctaccgtctggccctgcagcgtttcgggccggacgcacaggccctgaaactgacagaagaggccgctgaactggcggccagtgctgcccgcaatctgaacggacagggcagcgaaagcgacctcgcggcagagctggcagacgtggaaatcatgacagagcaattgcgccttcaggggatggaccggctgattgacttccacaaacagaaaaaactggaacgtctggctgcacgactgggcgtgatttacacgaacgagtaa

SEQ ID NO: 5832 - DNA, 216 bp, Escherichia coli
atggctgacatactcagggaaatcaccgcatggatactgattcttactggcctggcgacatgcctcagtgcgggggcagccctggctgccctgctgatgcacataacaacacagtggttatgggaaaagcttaaagcagcatacagcctgaaagagctgtccgacgctgtccgggcatggaaacggcagaaaaataccggagatacagaacaatga

SEQ ID NO: 5833 - DNA, 684 bp, Escherichia coli
atgacagaccagaataaacacattgagaaactgaaaaagttgctggcgctggccgcatccggcaacccgcacgaggccgctctggcactgcgccgagcccgtaaactgatggatgttcacggcatcacacattccgacattgctatgagtgatattgatgaaaccatcagtcactactggccgacaggcagtctccgtccaccgcgctacatgctgggcctgatgaacatcatccgcgaggtatttggtgttaactccatcattcaccccggcacgcatccgtctgtggggttctacggcaaccgggaacgtgcggcactggctgcatacacctgggaagtgctggcccgtcagctgaaaaaggcgcgtcagcagtatatcagtgcacagaacaaaagaataaaaaccgccacccgcaccagccgtggagaccagtttgccgaaggctgggtgctggccgttatcagtgaaatacagtcctttgccctgaccgatgatgagcgtgaactgatgcagcagtggctggaacataaatacccgcagacgcaaaccaccagggcgcgtaaaccgggaagaagccgcaatggcgacgcctcgcgctatgcggggtttcgtgaagggcagaacgtcagactgcaccgcccggtcagtgggcaggaacaacagaaactggaggccagatga

SEQ ID NO: 5834 - DNA, 231 bp, Escherichia coli
atgattacgctatcaggtaaaagccggaaattaaaagcctgccgaatatctgccagatacctttttgcccgcgccttttttaagaacgtcaggccggggatcacaattggtgttattgccggacgcgaacaggttgaaaaatacatgtcaggtgcatggtggaataacgaccctgtcattgctgcccgtaatattcatatcgaatggggaggtattcagaatgactactga

SEQ ID NO: 5835 - DNA, 207 bp, Escherichia coli
atgactactgaaaccattgtctgttttcttttctggtatatgtacgcaggatcatgcagcgcaagacttcatcgttccctgggctatggcaggcactacgacaccgcgcattacatcctgtacatgaccgccgtcatgttgttctggccagtcaccctgccagctgcaaccgacattgttgccgacagactgaaaaaaaggagatga

SEQ ID NO: 5836 - DNA, 450 bp, Escherichia coli
atgcagaaaaaacgcctgatacagcttatccatattgcccgtaatgaactgggtatggatgaagacacctaccgccagatgttacaggggctgaccggtaaagcctcaaccaaaggaatggataccacacaactaaactgcgtgctggaatccatgaaaaagaaaggctttcgcgttaaaccagccagaaaagccagctccggtttaccgctggataaccatccgcagtccaggaaaattcgtgcgctatggcttgaaatggctgctgccggcattgttcgtgaccgttcagaaaatgcattagcgaggtggatcaagcgggaaacgggcatcagcgccctgcgctggctcagtactgaacaggcaagcagtgttattgagaaactgaagaagtggcagcgcagagctgcgggagtcaaacatgagcgacctgaatcagtttcgaagtaa

SEQ ID NO: 5837 - DNA, 390 bp, Escherichia coli
atgagcgacctgaatcagtttcgaagtaaggggccggaactcctggtggaactggcacagcatacctctgagaccgttcgcgagattattgatattgagcccgaagttgccgaccagattggtcaggccgtcgcgaaccgaatgatgcaggtctggggcgggcaaaacgtttatttcccgatgggcatggtatggaaggtcagtcagcgcgaccgggaaatcttcagggagtttaacggacgcaaccaccacgaactggcccgcaaatttggtgtttcgcttcagtgggtctacagcgtggttaagcgggtaagaaaagaagaactggatcggatgcagggcaagctatttgctgatgaacccgatgcagatacggagaaaaaagagtaa

SEQ ID NO: 5838 - DNA, 651 bp, Escherichia coli
atgatttctggcgcaccatctcaggattcgctgttaccggacaaccgccacgcggctgattaccaacaattacgcgagcggctcatacaggaactgaatttaacgccgcagcagttacatgaagagagcaacctgatccaggccggcctggattccataagattgatgagatggttacactggtttcgtaaaaatggctaccgccttacccttcgcgagctgtatgccgcccccacgctggcggcatggaaccagttaatgctcagccggtcgccggagaacgcggaagaagaaacgccgcccgacgaatcatcctggccgaacatgaccgaaagtacccccttcccattgacgccagtacagcacgcctacctgacgggccgcatgccggggcagacgcttggcggcgtgggttgccacctgtatcaggagtttgaaggccattgtctgacggcgtcgcagctggagcaggccatcacgaccttgctgcaacgccacccaatgctgcatatcgcctttcgccccgacgggcagcaggtctggctaccgcaaccttactggaacggcgtcaccgttcatgatttacgccataacgacgctgaaagccgccaggcctatctggacgcactgcgccagcgcctgagtgattag

SEQ ID NO: 5839 - DNA, 267 bp, Escherichia coli
atgctgccgcagcatagcgatattgaaatagcctggtatgcttcgatacagcaggagccgaatggctggaagaccgtcaccacacagttctacatccaggaattcagtgagtatattgcgccactgcaggatgctgtagatctggaaatcgcaacggcggaagaaagatcgttgctggaggcatggaataaatatcgggtattgttgaatcgtgttgatacatcaactgcacctgatattgagtggccgacttcacctgcagagtaa

SEQ ID NO: 5840 - DNA, 237 bp, Escherichia coli
atgtctcgactaatcactttacaggactgggctaaagaagaatttggggacttagcaccaagtgagcgagttctgaaaaaatacgcgcaagggaaaatgatggccccacccgctataaaagttggtcgctactggatgattgaccgaaattcccgttttgtaggaacgcttgcagaaccgcaactcccaataaacgcaaacccaaaactccaacggataatcgctgatggctgctag

SEQ ID NO: 5841 - DNA, 240 bp, Escherichia coli
atgttcagaatcatttttcctaacacctggtacgtcgaccaccacggcactccctgcaaaatcctgcgttctacccacaacaaagttcactacatccgaaaaggcagaacatgtatcgccagcatgttccgctttaatcatgactttgaacctgtgaataaagctgatgcagatcggatagcagaagagatcgaaacggcagaacacattaagaagttacgtgccatacgcaggaaatag

SEQ ID NO: 5842 - DNA, 219 bp, Escherichia coli
atggcagacatcattgattcagcatcagaaattgaagaattacagcgcaacacagcaataaaaatgcgccgcctgaaccaccaggctatatctgccactcattgttgtgagtgtggcgatccgatagatgaacgaagacgcctggccgttcagggttgtcggacttgtgcaagttgccaggaggagatcgaacttaagaacaaacaatggggactgtga

SEQ ID NO: 5843 - DNA, 216 bp, Escherichia coli
atgacacctcagcaagaaaacgcccttcgcagtattgcccgtcaggctaattatgaaatcaaaaaagccagacagcagtttccggataaaaacgtcgatgacatttgccgtagcgtactgaagaagcaccgcgaaacggtaacgctgatgggattcacaccgactcatttaagcctggcgatcggcatgttaaacggcgtctttaaggaacggtga

SEQ ID NO: 5844 - DNA, 681 bp, Escherichia coli
atgacaccggacattatcctgcagcgtaccgggatcgacgtgagagctgtcgaacagggggatgatgcatggcacaaattacggctcggcgtcatcaccgcttcagaagttcacaacgtgatagcaaagccccgctcaggaaagaagtggcctgacatgaaaatgtcctacttccacaccttgctggctgaggtttgcaccggtgtggctccggaagttaatgctaaggcgctggcctggggaaaacagtacgagaacgacgccagaaccctgtttaaattcacttccggcgtgaatgttactgaatccccgatcatctatcgcgacgaaagtatgcgcaccgcctgctctcccgatggtttatgcagtgacggcaatggccttgagctgaaatgcccgtttacctcccgggatttcatgaagttccggctcggtggtttcgaggccataaagtcggcttacatggcccaggtgcagtacagcatgtgggtgacgcgaaaagatgcctggtactttgccaactatgacccgcgtatgaagcgtgaaggactgcattatgtcgtggttgagcgggatgaaaagtacatggcgagttttgacgagatggtgccggagttcatcgaaaaaatggacgaggcactggctgaaattggttttgtatttggggagcaatggcgatga

SEQ ID NO: 5845 - DNA, 786 bp, Escherichia coli
atgagtacagcactcgcaacgctagccgggaagctggctgaacgtgtcggcatggattctgtcgacccacaggaactgatcaccactcttcgtcagacggcatttaaaggtgatgccagcgatgcgcagttcatcgcattgctgatcgtcgccaaccagtacggccttaatccgtggacgaaagaaatttacgccttccctgataagcagaacggcatcgttccggtggtgggcgttgatggctggtcccgcatcatcaatgaaaaccagcagtttgatggcatggactttgagcaggacaatgaatcatgtacgtgccggatttaccgcaaagaccgcaatcatccgatctgcgttaccgaatggatggatgaatgccgccgcgaaccattcaaaactcgcgaaggcagagaaatcacggggccgtggcagtcgcatcccaaacggatgttacggcataaagccatgattcagtgtgcccgtctggccttcggatttgctggtatctatgacaaggatgaagccgagcgcattgtcgaaaatactgcatacactgcggaacgtcagccggaacgcgacatcactccggttaacgatgaaaccatgcaggagattaacactctgctgatcgccctggataaaacatgggatgacgacttattgccgctctgttcccagatatttcgccgcgacattcgcgcatcgtcagaactgacacaagccgaagcagtgaaagctcttggattcctgaaacagaaagccactgagcagaaggtggcagcatga

SEQ ID NO: 5846 - DNA, 297 bp, Escherichia coli
atgaacgcttattacattcaggatcgtcttgaggctcaaagctgggcgcgtcactaccagcagatcgcccgtgaagagaaagaggcagaactggcagacgacatggaaaaaggtcttccacagcacctgtttgaatcactctgcatcgatcatttgcaacgctgcggggccaacaaaaaagccattacccgtgcgtttgatgacgatgttgagtttcaggagcgcatggcagaacacatccggtacatggttgaaaccattgctcaccaccatgttgatattgattcagaggtataa

SEQ ID NO: 5847 - DNA, 207 bp, Escherichia coli
atggttcatcaacattacggaacgcagaccgttaatcgcggtgcggtcatgccaggaatgctggtcaaacacaaagatggtacctggactgcatcagctaatttacgcggacggctttatctgcatcgcggcatcgagcgcacttatacccgtgatttgctcgtggaagtttttctcgacggacgcggcaacggcctgaatcactaa

SEQ ID NO: 5848 - DNA, 378 bp, Escherichia coli
atgaaagttttattatccattaagcctgagtttgcagaaaaaatattgaacggaacaaagcggttcgagtttcgtaaaggtatattcaaaaatccgcaaattagcaccgttgttatttatgccacgatgccattaggtaaagttgttggtcaattccgtattgaatcaatactaagtgacgaaccggaatctctttggaaaaagacggaaaaacacgcaggtatttctaagcaattttatgactcatattattcaggtagagaaaaggcctacgcaataaaaattggtgaagtggaaagatataaagaaccaattcctatctctgctctaggtagtaatattaagccaccacaatcatatctttacctacctgcgtaa

SEQ ID NO: 5849 - DNA, 1062 bp, Escherichia coli
atggatactttaaaatatgagaaattctctgattttgatcacaatgacccattttttgactctttaaaaaaagattataaagagtttcctctttggttagaaaaaaaagccagagaaggagaatcagcttatgtgctctatgatgacaagcataaaatcgaaggttttatgtatctaaaagaaaatgatgatgcaaatgacattaatccagcgctcccaccaggacgtcatctaaagataggaacattcaaatttgaatctaaaggcacccttcgcggacaacgatttctaaaaaaagcgtttgaccatgcattttcatcaaaatctgatgatatttatgttactgttttcgacaaacacgtccatctaataaaacttttccaaacgtacggattttacattcatggtgaaaaagaaacacataacgggaaagagtttgtatatgcgaggtctttgcatgagccttatggtgatattttattagattaccctcgaataatgacatcaagggccaacaaatatttactggcgatttatcccgaatatcacactagactattccctgattcaaaacttgtaaatgaatcaccagatattgtcaaagatatatcccatgctaacagcattcataaaatttacatatgtggaatgcgttctgtgatgggaatgaaaagaggagatatcattgtcatctatagaaccggagacaaaaaagggccagctcgctatcgttctgtagccagtacattatgtgtagttgagagcgtaaaaaatatttctgaatttttaagcgaagatagttttgtagactattgtattcgttttagcgtattttctgaagatgaactcagaaaaatctataaagaacgtcgataccctttcattataagattcacatacaatctgtctttgccaaagagacccaatcgtgctattttaatagatcatgtggggctaaatggttcgcgtgcattccgatggagtcactttaaactcacaaatgagcagttcttaaagatcatcgagttaggcaagataaatgaaagttttattatccattaa

SEQ ID NO: 5850 - DNA, 486 bp, Escherichia coli
atgagaaatgacggtcaacaattagggaagcctactgccaaccatcccaaatacttcaagattgacgttcttgatatagaagtgagtgccgggccgggagtcatcaaccgtgagtttgtagaagttctacgctcggttgagtactcgtttgacgatgctcgtcacatgttcgatggtaggaaggcagaaaatatccgcatcattaacgtacgcggtgacagcatgtcaggaacgattgaacctggtgatcttctattcgttgatatcacggttaaatctttcgacggtgatggtatctatgcgtttctgtacgacgacacagcccatgtaaagcgcctgcaaatgatgaaggataagctgctggttatctctgataacaaaagctactcaccgtgggacccgatcgagaaagatgagatgaaccgggtatttatcttcgggaaagttattgggagcatgccgcagacgtataggaagcatggatag

SEQ ID NO: 5851 - DNA, 228 bp, Escherichia coli
atgacaaatcaaaccattcaactcgcaatcagtattacaggtagtcaaaaacgactggcagatctatgcggtgtagcccagcccactgtttggcgttggctacacggtggcggaattgatgcccgctatgtaatgaaaattgtctcagccactggtggaaagattaaaccagcagatattcgtcccgacctcgcaccattgtttaacgcgagtaattctgccgcctaa

SEQ ID NO: 5852 - DNA, 540 bp, Escherichia coli
atgcaaccacttacataccaacagactagcggatttagcccgactgcggtgataaatcgttctcaaacaaaacaggcgccaggccacgaaaaaatccgtgatgccgttcgcgcctggtcggctgcagataatcaggatgttgttgccgcactcattgtgaatgagtatcgggagcagggcggcggcaccatcgattttcctgatgatgtcagccgtgcacgccagaagctgttccgcttcctcgataacaaattcgattctgaaaaataccgaaataacgtgcgtgaactgaccccggcaattctggcggtactaccgctggaatatcgcggccacctggttgagcaggatagcttcatggctcggctggctgaaatggaaaaggaactcagtgaggcaaaacaggctgtcattctcaacgcaccacgccaccagaaactgaaggagatgagtgaaggcattgtgtcgatgtttcgtgtggacccggatctggctggtccactgatggcgatggtcaccaccatgctgggggcaatatga

SEQ ID NO: 5853 - DNA, 1005 bp, Escherichia coli
atggcgaaagccggtctgcgcgaacagaaccgactttcaggtgcaaatcgtaacacactcattgcgggaggaattatggcaaacactgctgagatattcaattttccagtgccggatgtggcacaaaaggagccgcgcgtggcagatctcgatgatggttatacgcgcattgcaaatgagttgctggaagctgtgatgctggccggattaacacagcaccagcttctggtcttcctggctgtcatgcgcaaaacatatggctttaataaaaaactggattgggtgagcaacgagcaactttccgagttgaccgggatattgccgcacaagtgttctgctgcaaaaagtgttctggtaaagcgtgggatttttattcagagcgggcggaatatcggcattaataatgtggtcagtgaatggtcaacattacccgaatcaggtaagaaaaataaagtttacctgaaagaggtaaatttacctgaatcaggtaagaaaagtttacccaaatcaggtaaaggcgtttacccgaatcaggtaaacacaaaagacaaactaacaaaagacaatataaaacctttttcgtccgagaattctgacgaatcctctgaccagccagaaaacgatcttcctgtggtgaaaccggatgctgcaattcagagcggcagcaagtgggggacagcagaagacctgaccgccgcagagtggatgtttgacatggtgaagaccatcgcgccatcagccagaaaaccaaattttgcagggtgggctaacgatatccgcctgatgcgtgaacgtgacggacgtaaccaccgcgacatgtgcgtgctgttccgctgggcatgccaggacaacttctggtccggtaacgtgctgagtccggccaaactccgcgacaagtggactcaactcgaaatcaaccgtaacaagcaacaggctggcgtgacagccggaaaatcaaaactcgacctgacaaacactgactggatttacggggtggatttatga

SEQ ID NO: 5854 - DNA, 303 bp, Escherichia coli
atgacgggcaaagaggcaattattcattacctggggacgcataagagcttctgtgcacaggacgttgccgcggtaacaggcgcaaccgtaaccagcataaatcaggctgtggctaaaatggcgcgggcaggaatcctggtcgttgatggtaaggtctggcgaacggtgtattatcggttcgctaccagagaagaacgggaaggaaaggtgagcgcgaatttgatttttaaggagtgtcgccagagtgccgcgatgaaacgggtattgagggtatataaaagaacatcaatgggtacacaatga

SEQ ID NO: 5855 - DNA, 333 bp, Escherichia coli
atgaacccttatatttatcttggtggtgcaatacttgcagaggtcattggtacaaccttaatgaagttttcagaaggttttacacggttatggccatctgttggtacaattatttgttattgtgcatcattctggttattagctcagacgctggcttatatacctacagggattgcttatgctatctggtcaggagtcggtattgtcctgattagcttactatcatggggatttttcggccaacggttggacctgccagccattataggcatgatgttgatttgtgccggtgtgttggttattaatttattgtcacgaagcacaccacattaa

SEQ ID NO: 5856 - DNA, 1527 bp, Escherichia coli
atgaaaaaagccatagcatatatgcgattttcatcaccaggtcagatgtctggtgattcattaaaccgccagagaaggcttattactgaatggctaaaggtaaatagtgattattaccttgataccgtaacgtatgaagatttggggttaagcgcattcaatggaaagcatgcacaatcaggagctttttcggaatttttagatgctatagaacatggttacatattgccagggactacattgttagttgaaagtctggacagactttcaagagaaaaagtcggtgaagcgattgagcgtctgaaattgattttgaatcacggtattgatgttataactctttgcgataatacagtctataatatagactcattgaatgagccatattcattaataaaagccatacttatagcacaaagggcaaatgaagaaagcgagataaagtcaagtcgggttaaattatcatggaagaaaaaacggcaggatgcactggaatcaggcacgattatgacggcgtcttgtccgagatggctctcattggatgacaaaagaacagcttttattccagaccccgacagggtgaaaacgattgagctaatttttaaactcaggatggaaaggcgatcattgaatgcaatagctaagtatttaaatgatcatgctgtaaaaaatttttcaggaaaagaaagtgcatgggggccttctgtaattgaaaaattattagcgaataaagctctgataggtatatgcgtaccttcatatcgtgcaagagggaaagggataagtgaaatcgctggctattatcccagagtcatatcagatgatttgttttacgctgtacaggaaattcggttggcaccttttggtattagcaatagtagcaagaatcctatgctaataaatctacttcgaacagttatgaagtgtgaggcttgtggtaataccatgattgttcatgcggtatctggacgtttgcatggctattatgtttgtccgatgagaagattacatcgatgtgacaggccatcaataaaaagagatttggttgattataatatcattaatgaattgctttttaattgtagcaaaattcaaccagttgaaaacaagaaagatgctaatgaaactttagagttaaaaattattgagcttcagatgaaaattaataatttaatcgttgcattgtctgtcgcgcctgaagttaccgctatagcagagaaaataagactattagataaggaattacgaagggcttcggtatcattaaaaactttgaagagtaaaggggtgagttcacttggtgattttcatgctattgatttaaccagtaaaaatgggcgagagctatgtcgtacacttgcctataaaatattcgaaaaaattataattaatacagataataaaacctgtgatatctattttatgaatggcattgtttttaaacactatcctttaatgaaagtaatatccgcccagcaggcgataagtactcttaaatatatggttgatggtgaggtttatttttga

SEQ ID NO: 5857 - DNA, 498 bp, Escherichia coli
atgtcgccatcattacgcaaggctattgctgctgctattggtggtggggctgttgccatagcgtctgtgctcatcactggtccgagtggtgacgatggcctggaaggtgtcagctacataccatacaaagatatcgttggcgtatggactgtatgtcacggacacaccggaaaagacatcatgctcggtaaaacgtataccgaagcagaatgcaaagccctcctgaataaagaccttgccactgtcgccagacaaattaacccgtacatcaaagtcgatataccggaaacaacgcgcggcgctctttactcgttcgtttacaacgtgggcgctggcaatttcagaacatcgatgcttcttcgcaaaataaaccagggcgatatcaaaggcgcatgtgatcagctacggcgctggacatacgctggcggtaagcaatggaaagggctgatgactcgccgtgagattgagcgtgaagtctgtttgtgggggcaacaatga

SEQ ID NO: 5858 - DNA, 444 bp, Escherichia coli
atgagcagagtaaccgcgattatctccgctctggttatctgcatcatcgtctgcctgtcatgggctgttaatcattaccgtgataacgccatcgcctacaaagagcagcgcgacaaagccgcatctactatcgctgacatgcagaagcgtcaacgtgatgtagcagaactcgacgccagatacacaaaggagcttgctgatgctaacgcgactatcgaaagtctacgtgctgatgtttttgctggtcgtaagtggctgcgcgtcaaagcagtctgtccggacatgcataaaaccaccgccgcctccggcgtggatgatggtgccagccccagacttactgacaccgctcaacgggattatttcgttctcagagagcgcatcgaaaccgtaactaaccaattgaatggtctgcaagagtatgtgagatcacagtgttcatattag

SEQ ID NO: 5859 - DNA, 375 bp, Escherichia coli
atgtctcaatacgctcaagccgctttaaatgcttatcaattggttgctcataactcaatgtctcctcgtgatgcatgggaggctgctgtcgctgaggttacagaaagcgaatcggcaagaaagaagggatgcccaagggcaacgtttctcgctctggcggatagcggttatctgaagaatgtaaaacaacatcatggggagaaaaagatcggtaagttgtaccaaagggcaattgaagttgcgaatctgattcttgatttacccggaattagcaaagctgagctagttgataaaacttgctataaagacaggcaagggtcttatgacattgctctaactctcgctcagcacggattactccagcgtcctcaataa

SEQ ID NO: 5860 - DNA, 183 bp, Escherichia coli
atgagggacaaacccgcgaataataaacgcggtaaaaacccggtgtgcatcgtttttgattattcccgcacactcgcgcagaaggaattccccgtcgggctacggtcatggttaatgcaggaatacggcgacgatacagcgcataatgtgtcaggcttgaatacctttatcgaatcccggtaa

SEQ ID NO: 5861 - DNA, 549 bp, Escherichia coli
atgaaggttaataaaaagaggcttgccgaaattttcaacgtggacccgcggacgattgaacgctggcagtctcagggactcccttgcgcctccaaaggtagtaagggcattgaatctgtatttgatactgccatggcaattcagtggtatgcgcagagggaaactgatatcgaaaacgaaaagctccgcaaagaactggacgatttgcgtgcggcagcggagtcagatttacaacccggcaccattgactatgaacgctaccggctcacaaaagcgcaggcagatgcgcaggaactgaaaaatgcccgtgaagacggagtagtgctggaaactgaactgtttaccttcattctgcaacgtgtggcacaggagatttcggggatacttgtgcgtgtgccgttgacattacagcgtaaatatccggacatttcaccatcacaccttgatgtggtgaaaactgaaatcgcgaaagcctccaatgttgcagctaaggccggtgaaaacgtgggcgggtggatcgatgatttcagacgcgcagaaggcagctaa

SEQ ID NO: 5862 - DNA, 345 bp, Escherichia coli
atggctttggcccgttcccggggcattgatattaccgtggtgacggataaaaactgcaatatagcgcatgtcgatgatgataagcgtcaggagaaacaacatctgctgaatgatgctgttgaaaagctcaataagatgggtatcgctacgaaattggttaatcgtgtccacagcaaaattgtgattgaggatgaagaactgctgtgtgtcggatcttttaactggttcagtgctgcacgggaagataagtatcaacgatacgatacgtctttggtgtaccgtggcgaaggcgtaaaaaatgaaataaaggcaatatatggtagtctggatcaacgtcagctttaa

SEQ ID NO: 5863 - DNA, 1107 bp, Escherichia coli
atgaataaaacaataacggcgcttgctatcatgatggcttcatttgccgcaaacgcgtctgtattaccggaaactcctgtgccatttaaaagtggtaccggagcaattgataacgacactgtctacattggtttaggtagcgcaggtacggcatggtacaagctggatacacaggccaaagataaaaaatggacagcgttagctgcattccctggtggaccaagagatcaagcaacctcggcatttattgatggtgatctgtatgtgtttggcggcattggcaaaaatagcaagggcttgactcaggtatttaatgacgtacacaaatacaaccccaaaaccaatagctgggttaaattgatgtcgcacgcgccaatgggcatggcgggccatgtgacttttgtacacaacggcaaagcttatgttactggcggtgttaaccagaatatcttcaatggctattttgaagatctcaacgaggctggaaaagattcaaccgctatagataaaatcaacgctcactattttgacaaaaaagcagaagattatttcttcaataagtttctgttgtcttttgatccctcaacccagcaatggagttacgctggcgaatctccctggtacggaacggctggtgcggcggttgtgaataaaggtgataaaacctggcttattaatggcgaagccaaacccggattgcgaacggatgccgtatttgaacttgatttcaccggtgataatttaaaatggaataggcttgctcccgtctcatcaccagatggcgtcgctggcggttttgcggggataagcaatgattctcttatatttgccggaggggccggattcaaaggttcacgagaaaattaccagaacggtaagaactatgcgcatgaaggcctgaaaaaatcatatagcactgatattcatctttggcataacgggaaatgggataaatcgggtgaattatcgcaaggtcgggcctacggagtatcattgccctggaataatagtctattgattattggcggtgaatctgcaggcggcaaagcggtgacggattcagttttgatctctgtgaaggataataaagtcacagtacaaaactaa

SEQ ID NO: 5864 - DNA, 717 bp, Escherichia coli
atgaaaaaggctaaaatactttctggcgtattattactgtgcttttcgtccccattaatttctcaggctgcgacactggacgtacgtggtggatatcgtagtggaagccacgcctatgagactcgactcaaagtcagtgagggatggcaaaatggatggtgggcaagcatggaaagtaatacctggaataccattcatgataataaaaaggaaaatgccgcactcaatgatgttcaggttgaagttaattacgcaattaaacttgatgatcaatggacggtacgcccgggaatgttaacgcattttagcagcaacggcacacgttacggaccctacgtaaaactgtcctgggacgcgacaaaagatcttaattttggcattcgctatcgttacgactggaaagcttaccgacaacaagacttatccggtgatatgtctcgtgataacgttcatcgttgggatggatatgtcacttaccatattaatagtgatttcaccttcgcatggcaaacgacgctatacagcaaacagaacgattatcgctatgcaaaccataagaaatgggcgacggaaaatgcatttgttctacaataccatatgacgcccgatattacgccatacatagaatatgactaccttgaccgtcagggtgtttacaacggcagagataatttatcggaaaacagttatcgcattggtgtgtcatttaaactgtag

SEQ ID NO: 5865 - DNA, 396 bp, Escherichia coli
atgcaactaatcttatctatatatcatgtgatatgttctgtaacaagtaaaatcaacataaaaaattcagcaaaatttaatattcgttcaactagccgtctcacatatgacattattagtcaactccatttaccacaaaatggctatttcatggaacgcagtaatttcttagtggctattatcaagctaattcttaggtccctagcgattattcctggctggttcgtcagtttaggtcatgagattgttacattcctttttatcctggagatatgggggaacgcaggcgacgctttttcatctacatccgttggtaaatatggctttggtcactacgacttaaaccctcctcaatcacagctactcgccgggcgatatggcaaacaaactaattga

SEQ ID NO: 5866 - DNA, 843 bp, Escherichia coli
atgtctatgccattaagcaatgcccttcagagtcaaattattacagataatcacttccttcatcatccaaaagtcgacagtgagttaacacgtaaacatgaacgtggacgcatggatacggaaaatatctatcttccgcctcttgctcgtggcaataaccataattacgatggaaaaagcgttgtcgaaattagaaaacttgatattagtaaagagtcctggccatttaattatgtgacagaaacatgcagagaattcaatggtattacaacaacaggacgtatgctctatcgaaacttgaaaatcacctcagctttagacgaaatatatggtggtatatgtaaaaaggcgcatgctgccacagagttagcagaaggattacggctaaatttatttatgaaaagccctttcgatcctgttgaggactatacagttcatgaaataacattaggccctggctgcaatgttccaggttacgccggaaccacgataggatatatttcaactcttccaacttctcaggcaaaaagatggaccaatgagcagccaaggattgatatctatattgatcagataatgactgtctcaggggtggcaaactcttccggattcgcccttgccgcattacttaatgctaatattgagttgggtaatgacccaataattggtatagaagcctatcccggtaccgcggagatccatgcaaaaatgggatataaagttatcccgggtgatgaaaatgcaccactcaaacgtatgactctgcaaccgtcatctcttccagagctgtttgaattaaaaaatggtgaatggaattatatggtgatgctgccaacttactga

SEQ ID NO: 5867 - DNA, 1260 bp, Escherichia coli
atgaataaccattttggtaaaggcttaatggcgggattaaaagcaacgcatgccgccacgctgtttttcccgatggcgttgattttgtatgattttgccgcgtacctgtcgacggacctgattcagccggggatcattaatgtggtccgtgattttaatgccgatgtcagtctggccccggcagccgtcagtctctatctcgcgggcggtatggcgttacagtggctgctggggccgctttccgacaggattggccgcaggccggtgctgattaccggggcgctaatatttacccttgcctgcgctgagacaatgttcacaacgtctatgacacagtttcttatcgcgcgtgcaattcagggcaccagtatctgttttattgccaccgttggttatgtcacggtgcaggaggcgttcggccagacaaaagggatcaggttgatggcgattatcacctccatcgtactgattgcgccgattatcggcccgctttccggcgcagctctgatgcactttgtacactggaaagtcctttttgccatcattgcgattatgggttttatctcatttgttggcttactgctggcgatgccagagacggtgaagcgcggcgcggtttcatttagcgccaaaagcgtcttgcgcgattttcgtaatgtcttttgcaatcggcagttcctctttggtgcagcaaccatctctttaagctatatcccaatgatgagttgggtggctgtctcgccggtgatcctgattgacgcaggcggcttaacgacctcgcagttcgcctggacacaggttccggtgttcggcgcggtgattgtcgcgaatgccatcgtggcgcgtttcgttaaagatccgaccgaaccgcgctttatctggcgtgccgtacccattcaactggttggcctcgcgctgttgattatcggcaatctgctgtcaccgcacgtatggctgtggtcggtgctgggcaccagtttgtatgctttcgggattggtttgatcttcccgaccttattccgctttacgctgttttccaataacttaccgaaagggaccgtctccgcatcgctgaatatggtgatcctgatggtgatgtctgtctcggtcgaaatcggccggtggctgtggtttaacggcggtcgcttgccgtttcatctgttagccgtcgtggcgggcgttatcgtcgttttcaccctggcgggattgcttaatcgcgtgcgccaacatcaggctgccgagctggcagaggagcagtga

SEQ ID NO: 5868 - DNA, 300 bp, Escherichia coli
ttgctgggagttcttacacttgctcgcgatattcaattggccattgtcaacaagatgacgcaggttttgattggtgatatctatttacgtcagcaatgcgatgtgttttggctcggctataccatcagtcccgcttatactcgccagggatatgcaattgaagcaattaccgccacgattgactggataaaagagaacggtttttcactcatcaaagccggtgtgaatccggaaaataccctttcaaaaaaattacttatcaggattggcttcaatttttcgagcatcgaagatgggtga

SEQ ID NO: 5869 - DNA, 261 bp, Escherichia coli
atgtcacaacatgaacagttctgtcaggcttgcggaatgccgatgtcggcaccagatgcacacagtgccagtgatcaatattgtgcgtactgcagcgacagcaacggcaatctcaaaccctgggaagaagcggtatcaggtttagccagcttccttgattcctggcaaaaagtcggcccggaggaagcacataagcgtgcaaaacgttatctgacggcaatgcccgcctgggctcataaagcggagagtgatttgagctga

SEQ ID NO: 5870 - DNA, 1122 bp, Escherichia coli
atgtcattttctgtgcaggaaaccctgttctcgcttttgcagcacaatgcgatttcaggacacgaaaacgctgtcgctgacgtcatgctgtgcgaattcaggcgtcaggcaaaagaggtctggcgagacaggcttgggaatgtcgtcgcgcgctacggtagtgataaacccgatgcgctgcgactgatgatttttgcgcatatggatgaagtcggttttatggtgcgcaaaatagagccttctggatttttacgctttgaacgcgtaggcggtcctgcgcaggtcactatggctggatccatcgtcaccctcaccggggacaaagggccagtcatggggtgtatcggcattaagtcctaccactttgccaaaggcgacgagcgcacgcagtcaccttctgtcgacaaactgtggattgatattggtgccaaagacaaagacgacgctatacgaatgggcattcaggtcggtacgcctgtcactctgtataacccgccgcaactcctggcaaacgatctggtgtgcagtaaagcactagacgatcgtctgggctgtactgccctgctcggtgtagcggatgctatcagtactacggagcttgatatcgccgtttatctggtggcttcggtacaggaagaatttaatatccgcggcattgttcccgtattacgccgtgtaaaacctgacctggcgattggtattgatatcactccatcgtgtgacacccctgatttacacgattattccgaggtcaggattaatcagggcgttgggatcacctgcctgaactaccatggtcggggaacgctggccggattaatcacgcctcctcgcctgatacggatgttggaacagacggctcttgaacacaacattccggtgcagcgagaagtggctcccggcgtgataacagaaaccggttatatccaggttgagcaggatggtattccctgcgccagtctctctattccttgtcgctatacccattctccggcggaggttgccagcctgcgtgatttgactgattgcatccgcctattgaccgctctggcaggtatgtcagcagcacatttccccgttgagcctgattcaggcactacacaagaggcacatccattatga

SEQ ID NO: 5871 - DNA, 279 bp, Escherichia coli; identical to SEQ ID NO: 4856

SEQ ID NO: 5872 - DNA, 1314 bp, Escherichia coli
atgtttgattacatcctgtctctcggcggtaccgttttcgtccctatcatcatgatcgtgattggccttatcttccgcatcccctggctgcaggcgattaaggcaggggtaacggttgggattggttttgtcggtatgggactggtgatcgtcatggcgatcgacagcctcagtccccctatcaaagtgatgattgagcgtttcggcctggccctgcatgtctttgacgttggcgcaggccctgcctccggcgttggttatgcgacagccattggcgccatgattatcccagttatttttcttctcaatgtcgccatgctggtcacccgtctgaccaaaacgatgaacgtcgatatttacaattactggcactacgccattacgggtacggtggtccagcttatgaccggtagcctgatttatggtgtgctgggggcaatctgccatgcggcgctatcgttaaaaatggccgactggacggcaaaacgggtacagaacatcgtcgggctggaaggtatttcgataccgcaaggctacggttccagttcagtaccgcttttcgttctacttgatgctatctatgaaaaaatccctttcatgaagggacgcaatatcgatgctcaggagatccagaaacgctacggcatggtcggcgatccggtgattatcggcgtagtgctcggtctgatttttggcctggcggctggtgaaggctttaaaggttgcgccagtctgatgattaccgttgcggcaatcatggtgctgttcccgcgcatgatccgcctgattgttgagggcctgatgcccatctccgacggtgcaagaaagttcttccagaaatatttcaaaggacgtgaagtgtatatcggtctggatactgctgtgacgctggggcatccaaccaccattgctgtcggtctgctactgatacccattatgttaattctggccagcattttaccgggcaacaaagtgttacccctcgcagacctgccggtagcaccgttctttatctgtatggctacggttatccaccgcggagacctggtcaggacgttgataagcggggtcatcgtgatgattaccgtcctgctgatcgccacccagttcgcgccttacttcactgaaatggcgctcaaaggcggtttcagttttgccggtgaaagtgcgcaaatctcagcgttgtccgtgggcaatatgttcggttggtcgatttctgaattgatgtcgcttgggattattggcgttgtcgtggcggtcggtattgtcgccagcgtcgtgctgttcttacgtaaacgtgaattatcggaataa

SEQ ID NO: 5873 - DNA, 1005 bp, Escherichia coli
atgtttatcgtggaatcgtatgctgtcgccataataatgtgttttattaccatgatttgctggggttcatgggcgaatacaactaaacttgtcagcaataaaaaatgggagttccctctattctattgggattattcaattggattattgctgtgttctttgttatttgccttcacgctgggttctatgggcgaagccggtcgcagttttatacctgatattcagcaggcgagcagcagtagtctgatgtcggcaatactggcagggattatcttcaatatttccaatattcttctggtcgcttctattaatcttgccggtatggcggtagcttttcctgtgggtgtggggctggcactggctctgggtgtgatcaccacctatatcggcaatccgcagggcgatccgctcattctgttcctcggtgtcgcctgcgttgtgatcgccattatttttaccgcgatagcctatggtcgtgtcacgcaggaggcggataaatctcgccgtaataaaggtctcattactgccattctggcgggtatcatcatgggatggtttttccgcttcttggcggactccatgtctgacaatttcagccagcctgccagcggtctgatgacgccttactcagcacttgttctgtttgccgtggggctgttcttgtcgaactttgtccttaacacgctggtcatgaaaaaacctatttcaggagaaccggtcaacgggaaaatgtatttttccgggagcttacgggatcatgtttgcggctggctgggcggtatgatttggtgtgtcggtctggcattcagtctgattgcgtctggtcaggcggggtatgccatttcctacggtctgggacagggggccacaatgattgccgtgatctggggagtcttcatctggagagaatttgccagtgcgccagccggaaccaataaactgctgctgaccatgtttatttcatacattgtgggtattgttcttattatcgccgctaatcaataa

SEQ ID NO: 5874 - DNA, 255 bp, Escherichia coli
atgaaaaatggaatcgatgtcagcgtcattatccctgcttacaacgccgctgaaaccagcgttagtttggttactaaaatcctcagtgaaccccacttggctattgaacttatcattgtcgatgacggttctactgatgaaactggcaacgttcttcgtcaaatccacgatgatcggctcattctcattgagcaggccaatcaaggtgtctatgccgcccgaaatgctgctctagccttgcaccaaggagaatag

SEQ ID NO: 5875 - DNA, 2076 bp, Escherichia coli
atggatcttgtagatagtgtcgaagcaggtaagctgacgatcagtgaattgattgatgccctggcgaaagataaaaattactcagcttccaagtgggatcagcgataccgtgaatttacgaccttgctacaacaaacctcaactttttctgaacctgaaacggatggtttagtcaagaggctctggtatgaacgcgataacggtattgccagtattcgccagggcgttccatccttagcagaatatcagcaaagcctgccactgcttagagaactaactgaacgaattcggcaacagccggatgaagaaacttaccaatatgttggcaatgcactacaacaagctaaagaaaacggacttctcaagcgtatgtataggagtttgagaaatcgcgtctttgccgcgttctcgccagaaaactacaccagtactgtggatgagaatgcttttagtaaagcagcagaattcctaaatcagcacttccatctcggtctggcactgaccggaaattggttacagaaaaactatgaattgaaacaagccatacacgcccaatctcctgacacagatccttattacgtgaatatggccatctggcatctctatgaattgctccgtgaacgcgataatgaacaaaagcaggagaaaatagcgagcactacattcataaccagcaatgagcccatcgagaacaagatcatcctacattcaccaactaacgtgatcttctttggcccccctggcactggcaaaaccttcaggttgcagcaaaaaatgaaagagtacacttctcatgctgttccagctgatcgtgatgcctggctggattctcgccttgaatcgttgaattggatgcaggttataacgctggtgctgctcgatcttgggaaacgagccaaagttcgccaaattattgaacatatgtggtttcaacgtaaggcattattaaacggtcgtaatggcaacctatcgaatacagcctgggcagctttgcaatcctatacagttcccgagtcgttaaccgttgattataagaatcggcgtgagcctgccgtatttaacaaaacagataacagcgaatggttgctagttgattcacagctcgagcaagtggaggatttggtagagctctacgccgaacttaaacgaggccctaaatctgccgaagccatccagcgttttgcggtggttacgttccaccaatcttacggctatgaagaatttattgaaggtatacgcgctcgctctgacgagagtggcaatatctcttatcccattgagccgggtatctttatgcgcctttcccaacgtgccaatgccgatccaggacatcgctacgccattttcattgatgagatcaatcgcggtaacatatccaagatctttggtgaactaatctcactcattgaagtagacaagcgtgcaggcatgcccaatgcaatgagcctacaactggcttatagcggtgatcacttcagcgtacccgccaatgtcgatatcatcggagccatgaatacagcggaccgttctttagctctgatggacacggctttgcgccgtcgctttgactttgtcgaaatgatgcccgatctctctttactgagtggagctaaggtgaaaggcatagagctcgagtcgttgttagagaaactcaatagccgcatcgaggctctttacgatcgtgaacatacgctggggcatgcgttctttatgccggtaaaaaatgcactcgatgccggtgatgaagaagctgcgtttaaacaattgaagatcgcattccagaaaaagatcattccgcttttacaggaatactttttcgatgactggaacaagatccggttggtgctggcagacaatcaaaagcaagacgacaacctgcaattcgtgattgagaaaaccgacgatctcgatacgctttttggtaacaaccatggtttacgacaccatgatcagcaatcaacagcttacgaactcaaagatttcgatcaagagatctggaatattccacaggcttatcgttcaatttatcagccccagcagactccccttgatgagcaggctgtaaatcatgggtga

SEQ ID NO: 5876 - DNA, 1287 bp, Escherichia coli
atgggtgaagttatctccgtttttgaatatgacctattggggagtgacaaagcggcttcagttggcgcaaaactggtgcctccactggtctttaattatttagaagcgcttagcttggcaagtaatcaagggagccagttcctcaaactcacctctcgctcaggcttcaaattgcttcaggttcaaaactacgcggggatgctttcaacacctcacggtttccagcttgagatactgcccaaggttggtaaaaacctcacagcggctaatgcacgtcaaacattactgacgatgctaagccatttgcctgggtttcgacatattgaaactcagcaagccactcttcaggctcagcgtatgcctttgcttgagatttttattcaccagtttttgcatagcgttagccaattacttaaacaaggtttacgctccgactatgtgagcgagcaaggtaatctggcttttatgaagggcaagctgatgctttctgcacagctgcgacataacgcggtgaatcgccataagttttgtgtcgattatgatgactacatgcctgattgtgcagccaatcggctcttacactccgcgctagataagcttcttagtctaaagctgtcatcagagaatcaacgctggctttacgaactgcgctttgcgtttgacggtattccacttagccgggatattgaacgtgatataaacaacttacgcctcgagcgtggtatggctcattacaacgagccaatggcgtgggcgcaattgatcctgagaggaatgagtccgagtgctttgcagggaaacaccaaagcgatatcacttttgttccctatggaagcggtatttgaatcctttgtggcacagaccctaccctacgaattaccttctcatctcaaagtaataccacaagcggctacttattctcttgtgaagcacgggtctaacgattgctttaaacttcggccggatttgttgattcagtcacgtcgaccggtacaaaccaaattggtgatggacacaaaatggaagctaataaatagcaactcccaaaaaacaacacagtatgggctagcgcaagccgacttctatcaaatgtttgcctacggtcaaaaatacctaaatgggattggcgaaatgtacttaatctatcctgcgcatgatcaatttaaccaaccgatacagcagcattttgctttctctaaaacattaaaactatgggttgttccgtaccagataacagcaaaccgcggggagaggatgatgtgggtgaaggatgtgtccagtatataa

SEQ ID NO: 5877 - DNA, 1740 bp, Escherichia coli
atgaaaatgggaaaaattgcagttactcctaataatgataaagcagccagccactctaaagatgaaaatttagccacaaatacaattaagaaaaacgtaaaacctaaatatggcgatgcggcatttttagagtacactcgactaatagttaaccacccgaattattttggaatgccagatccctttggggaaaaaggtgagattcaatgggaagctccatcaaatagggcatcggggaaatttaaacacactcatcaacggcgctatgaatggtggaaaaataaagccagaagtattgggatagaccctgacactgaaaaagcatggattagtaaaacagctaaactaattcatccacttggagttaaaccatgcaagaaatgcggtaaagaaatggaattatcttactcctacccaaatgagcatttcttttctcgggttaggaaacttaattatatagatgagacttttgagctatctcaaaatgaacacatagttgatttgttgactcgtttagatgatagatttggtgaaagaatatatttagatttaccacatttattttctacaaaatccatcacgattccagatatttcaagcaatctcgaagcatggattgagtatctaaaagaacaatacatacctcaagaatcacgtatgcttagccctggagccatggcaaatcctccagatcgttttgatggatttcattcatttaaccgctgttgtcgctctattgctgataaaggaaggaccaaagaaaatcttaaatcttatgttactgacagaagagttttcgaatattgggtggatggtgattgggtagctgcagacaggctaatgggccaagttagaacaaataatatatttattaacgaggaatgtttgaatgccggaaatggtggtttacatccaactccttgccaagcagatcacattggcccaatctcactagggttttcccatcgcccacaatttcaactactttgcaaatcatgtaatagtgccaaaaacaatcgtatgtatttaagtgatataatctctttattagaagctgagaatgaaggtcatacggttatttcatggttcgcagaagaagtatggaatcgactaaaacactctgtagatgatagtgaaaaagccttaagactaagtaaaatactacgtgataatagacatacatatatgaatcttcttaaaaaaataatggatgaaggttattatactttccttgcaagtcttttacatcttgaggtagccaattataacccaatatttgagggattatgcatttcaaatcatttaactcattataaatcattaaaaaaaataaaacgtgaatcaaaatatgctgctgtgcaaaaaacaagacgaatcagaatagcatttacttcattgaatgattatcatagaaaagaaaatcggaacgcatttattgtatcaaatgaattatctgagaagtttttctctgaagctatggataatttaaaatcattaagtgaaattacatcttgcttagatgaaaaaatatccggaataatatctgagaattcagattcaaaaaatgaatttcgaacaatcattacagatctacgagaaatagtgacaaacaataaagaaaaattcaacttgatattaaaatatctaatatcagggatgagcgaaataggaaaagaactggaatcatattgggaaaatgatcgttatgttcgctcaatcccagaagaatttatagagtaa

SEQ ID NO: 5878 - DNA, 1191 bp, Escherichia coli
atgactaaaagtgaaacatttatgattcccaatcacaaggcagcaaagctaagtgaattggatatgatgattgttaactcagtaccgccaggtggcaactggaaaaatattcctttagatgtaccgtctaaaagaatagagcaaattagggatagttatgcacaaggaaaaggaagccgttcaacatactacggtagattacttccagatatgcctgcatatactatcaatacatattttaaccgacctgggaatggttgccatattcactatgagcaagatcgtgttctatcccagagagaagctgcaagactacaatcgttcccggatgattttattttcttcggaggtcaaacagcaattaatacccaaatcggtaatgcagtgcccccatttttagcttttctgattgcgaaagaaatagagaaggcgataggtaatactggttattatatcgatttattttccggagctggagggctgggactaggattcaaatgggctggatggactccattattggcgaatgatattgaagaaaaatatctacaaacatattcaaacaatgttcacaaagaagttttatgtggcagcatttctgataatgaaactttttcaaaaatagcagataaaatatcaggatttaagaaattatattttgataaacaattatggatacttggtggacccccatgccagggattttctacggcaggaaatgccagaacaatggatgatccaagaaattcactttttatgcattataaatctctcttaaatgagataaaaccaaacggttttatttttgaaaatgttgctggtttgttgaatatggaaaaaggtaaggtctttgaaagagtcaaagaagaattctcatcaaccatgaaaactatgaatggatggatattaaactctgaacattatgcaatccctcagcgccgaaaaagggttatattggttggttcaaacgaccctttattttcaattgaacctccacaaaaattaacagaagataaggaatcttgggtatctgtaaaggatgcattatctgatctgcctcctttgcaacatggtgaagatggaagtggtaaatattatatccatcaccccgaaaatgactatcaattattcatgagaggtaatattactccttcagaatattatgaaaggaatataaagccctctttataa

SEQ ID NO: 5879 - DNA, 1623 bp, Escherichia coli
atgaaacatatccatttaattaattcactgtccttggacgagacaacaaaattcactaaaaaagcgacaggtaaatactatacagatccaaaaatagctcttttgatgatagagaagttattaccattgataaattcctgtgataaaaaaagttataatgtcgcagatccattttcaggggatggtcgacttattacattgcttattaaacaatggatgataaatggttttccagatgtagagtggaatgtttatctgttcgatatagaaaatacaggcctcacttatgctaaaaatgcgttgtctgaacttaagttagcaggtgcaaatattaacattactataaaaaatagtgatgttttttatgaatttaaaaaatatgttgattattttgattgtgttataaccaatccgccttgggagaatataaaaccagattctagagagctcgatttttttgaaccatctatgaaatcgatgtatatagactctcttcgtgagtttgatgattatttgtcaagagtattgccatattctcagccgaagcgtaaatttgctgggtgggggactaatctttcacgtgttggtgcagaacttagcttagaaatatgtaataaaaatggattggtagctatagttatgcctgcatcttttttcgcagatgaacaatcgtacatattacgtgaaaagttttttaattcagggaggattgattgcataaattattatccagctgaggctaaattattcggcggtgctgatgtttcttcatgttcttttatttttaataaaggtgaatcccttaatgataatattcaacttagtgtgtatgataaaaacttaaatattaaatcactaggtttttttgatttgtctagtatagattctcaatatcttagcattccggtatctcaaggtgttcatgccgttcatttgttaagaaagctgcaagagggatacccaacatggggtagtctggaaaaaaatggagagatatgggcaggaagagaaatagatgaaactggtagtagtgactggacacaaaaaagtggcggcggattattattcattaaaggaaaaatgattgggaggtataattttcataatgagaagagcttaagaataacgaaaaaaattgataaggttctatccaattctaatttcgtaaggattgcatggcgtgacatttcacgcccgagtcaaaaaaggcgaatgattgcaacgataatacctcctaactctttggcagggaattcattaggggtggtctattataaaagtggttcgcaagattcgctctttagtttgcttggtattataaactccctttgttttgaatttcaattaagaagctttttagctactggtcatgtatcattgtcagccttacgaaaaactgcaataccgtctgaaaaaatattattacaacattctgaattaaaacaacttgtgatttcttgcatagagggatgttgtgatgctgagttgaaaattgaggcttatgttgccaaaaatatttacaaattggatttgaatgaatttaataagcttctgtcttcatttgataagattgagttagctgaaaaagaaagtttattgaggatttttcaacattatgactaa

SEQ ID NO: 5880 - DNA, 426 bp, Escherichia coli
atgatgtctgggttcaaacgcactcaacgtgattatcctctatcctttaaaatagccgttgttgagaaggttgaaaaaggcgagatgacttataaacaggccggctgcagttatggcattcaggggcgctccaccgttcttgtctggttgcgtaaatatggccggcttgactggagccccggacttcctgaccaggtaaagaggagactgcctgtggctctggcgactgtcccgctgacacccgagcaaagaatcagggaacttgaagaacagcttgagcaggcgagccagaaaactgagttttttaattatttatcaataacctgttcaatgactaatggttataactgccaccagaatgcgcaggctgagtggataaacggaatcctgaaaatgagtttttactctcgcgtcctgcagagctga

SEQ ID NO: 5881 - DNA, 156 bp, Escherichia coli
atgatgtcagataccacactctcccgcccggaggtggtcagcgggcatacggacgttatctattccacctcagtctgccacattctggctgtacgaaagagtacactgttgccaatcgacacaattatccggcatcaagtaagcgatatcagttaa

SEQ ID NO: 5882 - DNA, 177 bp, Escherichia coli
atgaaatcattaaccacggaaacagcgctggatattctgattacgtggctgcaggacaatatcgactgcgaatcgggaattatcttcgacaacgatgaggataaaacagattcggcagcactgttgccctgtatcgcacaggccagggagggtatccgtaccctgcgccaacagtaa

SEQ ID NO: 5883 - DNA, 489 bp, Escherichia coli
atgaaactggccctgacgctggaagccgacagcgttaacgtgcaggcgctgaacatggggcgcattgtcgttgacattgatggtgttaatctcgctgaactgattaacatggtctgtgataacggctactcccttcgtgttgttgatgaatctgaccggacctcagcagactgcacgccaccatttgttgcccttaccggcatacgctgcagtaccgcacatatcacggaaacggacaacgcctggctgtactcgctgtcacaccagaccagtgacttcggtgaatcagaatggattcattttaccggtaccggttatctgttacgtaccgatacgtggtcatacccggttctgcggcttaagcgcctggggctgtcaaaaacgttccgtcgtctggtcgtcacactcatccggtgttatggtgtcagtctcattcatctggatgccagtgccggatatctgccgggtttacccactttcgactggtaa

SEQ ID NO: 5884 - DNA, 204 bp, Escherichia coli
atgttgtccaaacaaatcccgcttggcatctacgaaaaagcgctccccgccggggatgaacttaatcaagctatattgttgaataataagtatatatttaaacacctccctataaatagcccccaatatagcccccaaggtgtagttgttatacatggaggtatattgaactctgttgaaatattctctgtaatggttcagtga

SEQ ID NO: 5885 - DNA, 651 bp, Escherichia coli
atgtcattaccgatgttgcaagtcgcgctggacaaccagactatggatagcgcctacgaaaccactcgcctgattgccgaagaagtcgacattatcgaagtaggcaccattctttgcgtaggcgaaggcgtgcgtgcggttcgtgacctgaaagcgctgtacccgcacaaaattgtgctggcagacgccaaaattgccgatgcgggcaaaatcctttctcgcatgtgcttcgaagccaacgctgactgggtgaccgtaatttgttgtgcggatatcaacaccgccaaaggcgcgctggacgtggcaaaagagtttaatggcgacgtgcagatcgaactgaccggctactggacctgggaacaggcgcagcagtggcgcgacgcaggcattgggcaggtggtttatcaccgcagccgtgacgcgcaggccgcaggcgtggcgtggggcgaagcggacattaccgcgatcaaacgtctttccgatatgggcttcaaagtcaccgtcaccggtggtctggcgctggaagatctgccgttgtttaaaggcattccgattcatgtgtttatcgctggtcgcagcatccgtgatgcagcctctccggttgaagccgcgcgtcagttcaaacgttccatcgccgaactgtggggctaa

SEQ ID NO: 5886 - DNA, 1326 bp, Escherichia coli
atgacgcacgataatatcgatattctggtggtggatgatgacattagccactgcactattttgcaggctttactgcgcggctggggctataacgtcgcgctggcgaacagcgggcgacaggcgctggagcaggtgcgggaacaggttttcgatcttgtgctttgcgatgtgcgaatggcagagatggacggcatcgccacgctaaaagagatcaaagcgttaaatccggcgattccggtactgattatgaccgcgtactccagcgtcgagacggcggtagaggcactgaaaaccggggcgctggattacctcatcaagccgctggatttcgataacctgcaggcaacgctggaaaaggcgctcgcgcatacgcacagtatcgacgctgaaacgcctgcggtgtctgccagccagttcggtatggtcggtaaaagcccggcgatgcaacacctgctcagtgaaatcgccctcgtcgcgccatcggaagccacggtgctgatccacggcgattccggtaccggtaaagagctggtcgccagggcgattcacgccagtagcgcacgtagcgaaaaaccgctggtaacgctcaactgtgcggcactcaacgaatccttgctggaatctgaattgttcggtcatgaaaaaggggcgtttaccggagccgacaaacggcgagaagggcgctttgttgaggcggacggcggcacgctgtttctcgatgagattggcgatatctcgccgatgatgcaggttcgtctgctgcgtgcgattcaggagcgcgaagtgcaacgtgtcggcagcaaccagactatctcggttgatgtccggctgattgcggcgacccatcgcgatcttgccgcagaggtgaatgccgggcgttttcgccaggatctctactatcggctgaacgtggtggcgattgaagtaccatcgctgcggcaacggcgggaagatattcctctgctggctggccattttcttcagcgctttgccgaacgtaatcgcaaggcggtaaaaggctttacgccccaggcgatggatctgctgattcattacgactggccgggaaatattcgtgaactggaaaacgcggtggaacgggcggtggtgctgctgaccggggaatatatttccgaacgcgagctgccgctggcgattgccagtacgccgatcccgctggtacaaagtcaggatattcagccgctggtggaagtcgaaaaagaggtgattctggcggcgctggagaaaacgggcggcaacaaaaccgaagccgcccgccagttagggatcacgcgcaaaacgctattggcaaaactgtcgcgttag

SEQ ID NO: 5887 - DNA, 1377 bp, Escherichia coli
atgcgttttatgcaacgttctaaagactccttagctaaatggttaagcgcgatcctccccgtggtcattgttgggctggtggggctgtttgcggtgacagtgattcgcgattatgggcgcgagactgccgccgccagacaaacgctgctggaaaaaggcagtgtacttatccgtgctctcgaatccggctcgcgcgtcggaatggggatgcgcatgcatcatgcgcagcagcaggccttactggaagaaatggccgggcagcctggagtacgttggtttgcggtcacggatgaacaaggaacaatcgtgatgcatagcaactccggcatggtgggaaaacagctttattccccgcaggaaatgcagcagttacatccgggagatgaagaagcgtggcggcggatcgatagcgcagacggcgagcctgttctggaaatttatcgccagtttcaaccgatgtttgctgctggaatgcaccggatgcgccatatgcagcagtatgccgcgacaccacaagcaatttttatcgctttcgacgccagtaacattgtgagtgccgaagatcgtgagcagagaaacaccctgattatcctcttcgccctggcgacggtcttgctggcaagcgtgttgtcattcttctggtatcgccgatatctgcgctcgggccagctgttgcaggatgaaatgaagcgcaaagagaagctggtggcactggggcatcttgcggcaggcgttgcccacgaaatccgtaacccactttcctcgattaaagggctggcgaaatactttgccgaacgcgcgccagcagggggagaagcgcatcaattggcgcaggtgatggcgaaagaagccgaccgtttaaaccgcgtggtaagcgagctgctggaactggttaagccaacgcatctggctttgcaggcggtggagctcaacacgctgattagccactcattacagctggtaagccaggatgcaaacagccgggagatccagttacgctttaccgccaacgacacattaccggaaattcaggccgatccggacaggctgactcaggtcctgttgaatctctatctcaacgctattcaggcgattggtctgcatggcgtgattagcgtgacggccagcgaaagcggcgcgggcgtgaaaatcagcgttaccgacagcggtaagggaattgcggcggatcagcttgaagccatcttcactccgtacttcaccaccaaagccgaaggcaccggactggggctggcggtcgtgcataatattgttgaacaacacggtggtacaattcaggttgcaagccaggaggggaaaggcgcaacgttcaccctctggcttccggtcaatattacgcgtaaggacccacaaggatga

SEQ ID NO: 5888 - DNA, 750 bp, Escherichia coli
atgtcaaaaaaatatcagccattgcttataactcattatatgtcaacatgggtcactataacggaagcagttgagatcactaccaaagccataaaacaaaaaattactcctagcgatatttatcgtcatgccttgagtggcaacatcctactatcggtctatttccagtctccagtgatacttaagaagatacaaacttttaatggaaaaataaaattcaggcagtttgtgggagacctacttgataaactatgcatgcttgacagggacggttttatttatggtcaaaatttaagactctgtacagaagccagatatatttgtcctgtgcaacaaattatagatacccccctgttacgcaaactcaaccagtttcgtacgtttgttcgtaatgtccgcccgggtgatgaactggatgtccaggcacaagttagtgaaaaaaatttaaccccgccgccgggtaacagcagtggcaaccttgagcaacagatagccagtacttcacagctaattggatctctgctcgccgaagatatgaacagcgagcaagcggcaaacatagcacgtggatgggcctcttctcaggcttcaggggtaatgacagactggttaagccgcttcggtaccgcaagaatcacgctgggcgtggatgaagatttcagcctgaagaactcccgtgacggcaaccctcgaaaatggcgattcgatgcaacaaacagtgaactatgtgccgaacgtcacgaatgctga

SEQ ID NO: 5889 - DNA, 2022 bp, Escherichia coli
atgaaaatgacacggctttatcctctggccttggggggattattgctccccgccattgctaatgcccagacttcacagcaagacgaaagcacgctggtggttaccgccagtaaacaatcttcccgctcggcatcagccaacaacgtctcgtctactgttgtcagcgcgccggaattaagcgacgccggcgtcaccgccagcgacaaactccccagagtcttgcccgggctcaatattgaaaatagcggcaacatgcttttttcgacgatctcgctacgcggcgtctcttcagcgcaggacttctataaccccgccgtcaccctgtatgtcgatggcgtccctcagctttccaccaacaccatccaggcgcttaccgatgtgcaaagcgtggagttgctgcgaggcccacagggaacgttatatggcaaaagcgctcagggcgggatcatcaacatcgtcacccagcagccggacagcacgccgcgcggctatattgaaggcggcgtcagtagccgcgacagttatcgaagtaagttcaacctgagcggccccattcaggatggcctgctgtacggcagcgtcaccctgttacgccaggttgatgacggcgacatgattaaccccgcgacgggaagcgatgacttaggcggcacccgcgccagcatagggaatgtgaaactgcgtctggcgccggacgatcagccctgggaaatgggctttgccgcctcacgcgaatgtacccgcgccacccaggacgcctatgtgggatggaatgatattaagggccgtaagctgtcgatcagcgatggttcaccagacccgtacatgcggcgctgcactgacagccagaccctgagtgggaaatacaccaccgatgactgggttttcaacctgatcagcgcctggcagcagcagcattattcgcgcaccttcccttccggttcgttaatcgtcaatatgcctcagcgctggaatcaggatgtgcaggagctgcgcgctgcaaccctgggcgatgcgcgtaccgttgatatggtgtttgggctgtaccggcagaacacccgcgagaagttaaattcagcctacgacatgccgacaatgccttatttaagcagtaccggctataccaccgctgaaacgctggccgcatacagtgacctgacctggcatttaaccgatcgttttgatatcggcggcggcgtgcgcttctcgcatgataaatccagtacacaatatcacggcagcatgctcggcaacccgtttggcgaccagggtaagagcaatgacgatcaggtgctcgggcagctatccgcaggctatatgctgaccgatgactggagagtgtatacccgtgtagcccagggatataaaccttccgggtacaacatcgtgcctactgcgggtcttgatgccaaaccgttcgtcgccgagaaatccatcaactatgaacttggcacccgctacgaaaccgctgacgtcacgctgcaagccgcgacgttttatacccacaccaaagacatgcagctttactctggcccggtcgggatgcagacattaagcaatgcgggtaaagccgacgccaccggcgttgagcttgaagcgaagtggcggtttgcgccaggctggtcatgggatatcaatggcaacgtgatccgttccgaattcaccaatgacagtgagttgtatcacggtaaccgggtgccgttcgtaccacgttatggcgcgggaagcagcgtgaacggcgtgattgatacgcgctatggcgcactgatgccccgactggcggttaatctggtcgggccgcattatttcgatggcgacaaccagttgcggcaaggcacctatgccaccctggacagcagcctgggctggcaggcgactgaacggatgaacatttccgtctatgtcgataacctgttcgaccgtcgttaccgtacctatggctacatgaacggcagcagcgccgtcgcgcaggtcaatatgggtcgcaccgtcggtatcaatacgcgaattgatttcttctga

SEQ ID NO: 5890 - DNA, 1578 bp, Escherichia coli
atgaattcttcctttgaatctctgattgaacagtatcccttacccattgccgaacagttgcgccactgggcggcccgttatgcctcgcgaattgccgtcgttgatgcaaaggggtcgttaacctacagcgcgcttgatgcacaagttgacgaacttgccgcaggtctgtcatcactgggtttgcgttcgggggagcatgtaattgtgcagcttcccaacgacaacgcgtttgttaccctgctgttcgccttgttaagactgggcgttatccccgtgctggcgatgccctcgcaacgggcgctggatatcgacgcgctgattgagctggcgcaacccgtcgcttacgttattcacggggaaaaccacgcagagctggcccgacagatggcgcacaaacacgcctgcttgcgtcatgttctggtcgctggagagaccatgagcgacgattttacgccgctcttctcccttcacggtgagcgacaggcatggccgcagcctgatgtttccaccaccgcgttgttgttgctctcaggcggcacaaccggcacgcccaaactcatcccgcgccgacatgccgactatagctataacttcagcgcttctgctgaactgtgcggcatcagccaacagagcgtgtatctcgccgtcctcccggtggcgcataactttccgctggcctgccccggtattctgggaacgcttgcctgcggcggaaaagtggtgctgaccgacagcgccagctgtgatgaggtgatgcctttaatcgcgcaggaaagagtgactcacgtcgccctggttccggcgctggcgcaattatgggtgcaggccagggagtgggaagacagcgacctttcgtcgctgcgcgtcattcaggcaggcggcgcccggctcgacccgacgcttgctgagcaggttatcgccacctttgactgtaccctgcaacaggttttcggtatggcggaaggcctgctctgttttacccggctggacgatccgcatgccaccattctccacagccaggggcgcccgttgtcccctctggatgaaatccgcatcgttgatcaagacgagaacgacgtcgcgccgggcgaaaccgggcaattgttaacgcgcggcccttataccatttcgggctattaccgcgcccctgcccacaacacgcaggcctttaccgcgcaagggttttaccgcacaggcgacaatgtcaggctggatgaggtggggaacctgcacgttgagggacgcataaaagagcagatcaaccgcgccggagaaaaaatagccgcggctgaagtggaatcggcactgctgcgtttagcggaagtgcaagattgcgcggtggtcgccgcgccggacacgctgcttggcgagcggatttgcgcgtttatcatcgcgcagcaggtgccaactgactatcagcagttgcgtcaacaactgacccgtatggggctcagcgcgtggaaaattcctgaccaaatcgagtttctggaccactggccgctcaccgccgtcggcaagatagacaaaaaacgcctgacggctctcgccgtcgaccgttatcgccattctgcccaataa

SEQ ID NO: 5891 - DNA, 804 bp, Escherichia coli
gtgacgcaatctgcaatgtgcatcccgctgtggcccgcccggaacggcaatactgcgcatctggccatgtgccctttcgctggcggcagcagtagcgcgtttcgccactggcaagctgagcaactggctgattgcgcgctttctctggtgacctggccggggcgcgatcgccttcgccatctggaaccgctcagaagcattacacaactggcggcactgctggcgaacgagctggaagcatccgtatcgcctgacacgccgcttttactcgccgggcacagcatgggggcgcaggtggcgtttgaaacctgccgacttctggagcaacgggggcttgcgccacaaggactgattattaccgggtgccatgccccgcatctgcattctgaacgccagctcagccatcgcgatgatgccgactttatcgctgagctgatagacattggcggatgttctcctgaactgcgggaaaaccaggaattaatgtcgctgtttcttcctcttctgcgcgctgatttttacgccaccgagagctatcactacgactcgcccgacgtctgtccgccgctgcgcacgcctgcgctgttattgtgcggcagccacgatcgcgaagcctcctggcagcaggtcgatgcctggcgtcagtggctgagccacgttacaggcccggtggtgattgacggcgatcacttctatcccattcaacaagcccggtccttttttacgcagattgtccgccattttccccacgcattttctgcaatgaccgcgtggcaaaaacagcccagtacttcagaaaggtga

SEQ ID NO: 5892 - DNA, 9492 bp, Escherichia coli
atggataacttgcgcttctcttctgcgccgacagcagattccattgatgcatcgatcgttcaacactacccggactgcgaacctgtcgcggttatcggctacgcctgccattttcctgaatcgccggatggcgaaacgttctggcaaaatctgctggaaggtcgtgaatgcagccgacgctttacgcgcgaagagcttctggccgtcggtctggatgccgccatcattgacgatcctcattatgtcaatatcggtacggtgttagacaacgccgactgcttcgacgccaccctgtttggctattcgcgacaggaagcggagtcgatggacccgcagcagcgcctgtttttgcaggcggtctggcatgcgctggaacatgccggttatgcccccggcgccgtcccccataagaccggcgttttcgcctcttcccggatgagtacctaccccggtcgcgaagcattgaacgtgacagaagtcgcgcaggtaaaaggtctgcaatctctgatgggcaatgataaagactatattgccacccgcgccgcgtacaaactcaacctgcacggcccggcgttatcggtacagaccgcctgctccagctcgctggttgccgtgcatctggcctgtgaaagcctgcgcgcaggcgaatccgatatggcggttgccggcggcgtggcgctctctttcccccagcaggcaggctaccgctaccagcccggaatgattttctctcctgatggtcactgtcgtccctttgacgcctcggctgagggcacctgggccggtaacggtctcggctgcgtggtgctgcgtcgcctgagagacgcgctgctgtcaggcgatccgattatctcggtgatcctctccagcgcggtcaacaacgacggcaacagaaaggtcggctataccgccccttccgtcgcagggcaacaggcagtcatcgaagaggcgttaatgctggcggccatcgacgacaggcaggtaggttacattgaaacccacggcaccggcacaccgctgggcgacgcgattgaaattgaagcgttacgcaacgtctatgcgcctcgcccgcaggatcagcgctgtgcgctcggttccgtgaaaagtaacatgggccatctggataccgcggcgggcattgccggactgctgaaaaccgttctggcagtcagtcgcgggcaaattcctcccttactgaattttcacacccccaacccggcgctgaaacttgaagagagcccctttaccataccggtgtcggcacaggcatggcaggacgaaatgcgctatgcgggcgtctcctcctttggtattggcggcaccaactgccatatgatcgtcgcctcgctgcccgacgcgctcaacgcgcgcctccccaatacggatagcggcagaaaaagtaccgcgctgctgctcagcgccgccagcgacagcgcgttgcggcggctggcgacggattatgccggggcgctgagagagaatgcggatgccagctctctggccttcacagccctgcacgcgcgccgtctcgatctccccttccgcctggcggcgccattaaaccgtgaaaccgccgaggcgctcagcgcctgggccggtgagaaatcgggggcgctggtttacagcggccacggcgccagcggcaagcaggtgtggctgtttaccggccagggctcgcactggcgcactatgggtcaaacgatgtaccatcactcaacggcgtttgccgacacgctggatcgctgtttttccgcctgtagcgaaatgctcacgccgtcactgcgcgaagcgatgtttaaccccgattcggcgcagctggacaatatggcctgggcacagccggcgattgtcgcgtttgaaatcgcgatggcggcgcactggcgtgctgaaggactgaagccagacttcgccattgggcattccgtcggtgaatttgccgctgccgttgtctgcggacactatacgattgaacaggtcatgccactggtttgtcggcgcggcgcgctaatgcagcagtgcgcaagcggcgcgatggtggcggtatttgcagacgaagacacgctgatgccgctggctcgccagtttgagctggatctcgccgccaacaacggtacgcaacatacggtattttccgggccggaagcccgtctcgcggtattttgcgccacgctctcgcagcatgacattaactatcgtcgcctgagcgtaaccggtgcggcgcactccgctttactggagccgatactcgatcggttccaggacgcctgcgcgggactgcacgcggagccggggcaaataccgattatttccacgctcaccgccgacgtcattgatgagtcaacgctcaaccaggcggattactggcgccgacacatgcgccagccggtgcgttttatccagagtattcaggtggcgcatcagctcggcgcccgcgtttttctggagatggggcccgatgcccagttggttgcttgcgggcagcgcgaataccgcgataacgcatactggatagccagcgcccggcgtaacaaagaggcgagcgatgtcctcaatcaggccctgctccagctttacgctgccggcgtcgccctaccgtgggccgacctgctggcgggcgatggacaacgtatcgctgcgccatgttatccgtttgatactgaacgttactggaaagagcgcgtctccccggcctgcgagcctgccgacgcagcgctgtctgccgggctggaggtggcgagtcgcgccgcgacagcgctcgatctccctcgcctggaagcgcttaaacagtgcgccacgcgactgcacgccatctacgtcgatcaactggtacaacgctgtaccggctatgccattgagaacggcgtggacgccatgaccatcatgcaccgtggacgtctgctgccccgctaccagcagctactccagcgcctgctgaataactgcgtggtcgacggcgattaccgctgcaccgacgggcgatacgtccgcgcccgccccattgaacatcaacagcgggaatcactgctgacggaacttgccggttattgtgaaggttttcaggctattcccgacaccatcgcccgtgccggcgatcggttatatgaaatgatgagcggcgcggaagaaccggtggcgattatcttcccgcaaagcgcctccgacggcgtggaagtgctgtatcaggaattcagctttggccgctatttcaaccaaatcgccgccggggtattacgcggcattgtccagacgcgtcagccccgccagccgttgcgtattcttgaagttggcggcggaaccggcggcaccaccgcgtggctgctgccggaactcaacggcgttccggcactggagtaccatttcaccgatatctcggcgctgttcacccgtcgcgcccagcagaaattcgccgactacgattttgtgaagtatagcgagctggatctcgaaaaagaggcgcagtctcagggtttccaggcacagtcttacgatcttatcgtggcagcgaacgtgattcacgccacccgccatattggccgcacgctcgataatctgcgccccctgctcaagccgggcgggcgcctgctgatgcgcgaaatcacccagccaatgcgtctgtttgacttcgttttcggcccgctggttcttccgctacaggatctcgacgcccgcgaaggtgagttattcctcaccaccgctcagtggcaacaacagtgccgccacgccggattcagcaaagtggcgtggctaccgcaggatggcagcccgaacgccgggatgagcgaacatatcattctcgccacgctgcccggtcaggcggttagcgccgtaacattcaccgcgccatcagaacccgtgttggggcaggcgctgacggataacggtgattatctcgccgactggtctgattgcgcaggtcagcccgaacagtttaacgctcgctggcaggaggcatggcgtctgctttcacagcgtcatggcgacgctctgcctgtggaaccgccccccgtcgccgccccggagtggctggggaaggttcgcttaagctggcaaaacgaagccttttcccgcggtcagatgcgcgttgaagcccgtcatcctgctggcgagtggctgccgctatcgcccgccgcgcctcttcctgcgccgcaaacgcattatcaatggcgctggacgcccctcaacgtcgccagcattgaccatccgcttacctttagcttcagcgccggtacgcttgcgcgcagcgacgagctggcgcaatacggcatcattcacgatccgcacgcctcttcacgactgatgattgttgaggagagcgaggatacgctggccttagcggagaaagtgatagcagcgctcaccgccagcgcagccggattgattgtggttactcgccgcgcgtggcgagtcgaggaaaatgaagcactctctgcatcccatcacgcgctatgggccttgcttcgcgtcgcggccaacgaacagccggaacggttgcttgccgccatcgatctcgccgaaaacaccccgtgggaaacgctgcatcaagggttgagcgcagtctcactatcacagcgctggctcgccgcacggggtgacaccctttggcttccttcactgtcgcccaatacgggatgcgccgctgaattaccggcaaacgtgtttaccggcgatagccgctggcatctggtgaccggagcgtttggcggattaggccgccttgccgtgaactggctcagagaaaaaggggcgcgacgcatcgccctgctggcgccgcgcgtggatgagtcatggctacgcgacgtggagggcgggcagacgcgcgtctgccgttgtgatgtgggcgatgccgggcaactggccacggttcttgacgatctggcggccaacggcggcattgccggagcgattcatgccgctggcgtattggctgacgcgcccttgcaggagcttgatgaccaccagctggctgccgttttcgcggtaaaagcgcaggcggcaagccagctgttgcaaaccctgcgcaaccacgacggacgctatcttattctctactcttccgctgccgccaccctcggcgcgccgggtcagagcgcccatgcgctggcctgcggctacctggacgggctggcccagcagttttccacccttgatgcgccgaaaacgctctctgtcgcctggggcgcatggggagaaagcggtcgggcggccacgccggaaatgctggcgacgctcgccagccgaggtatgggcgcgttaagcgatgccgaaggctgctggcacctggaacaggcggtgatgcgcggcgccccgtggcgactggcgatgcgcgtttttaccgacaaaatgcccccgttacaacaggctctgtttaacatcagcgccacagaaaaagccgcaacgccggtcattcctcctgctgatgacaacgcctttaacggcagcctgagcgatgaaacagcggtgatggcatggctgaaaaagcggattgcggttcagctaaggctgagcgatccggcgtcactgcatccaaaccaggatctgttgcaactcggcatggactcgctgctcttccttgaactcagtagcgatattcagcactacctgggtgtacgcatcaatgcggaacgggcgtggcaggatctgtctcctcatggactcacgcagcttatctgttctaagccagaggcgacgcctgccgcttcgcagccggaagtgttgcggcacgacgccgacgagcgttatgcgcccttccctttgacgcccattcagcacgcctactggctggggcgaacccacctcattggctatggcggcgtcgcctgtcacgtcctgtttgagtgggataaacgccacgatgagttcgatctcgccatactggagaaagcatggaaccagctcatcgcacgccacgatatgttgcgtatggtggttgatgccgacgggcagcagcgaatcctggcgacaacgccggagtatcacatcccgcgtgacgatctgcgcgcgctttccccggaagaacagcgcatcgcgctggaaaaacggcggcatgaactgagctatcgcgttttgcctgccgaccagtggcctctttttgagctggtggtcagcgaaatcgacgattgccattaccgtctgcatatgaacctcgaccttttgcagtttgatgtgcagagttttaaagtcatgatggacgacctggcgcaggtctggcgcggtgaaacgctggcaccgctcgctattaccttccgtgattatgtgatggctgaacaggcgcgccgacagacatcggcatggcacgatgcctgggattactggcaggaaaaactgccgcaactgcccttagcgccagagctgccggtggttgagacgcccccggaaacgccacacttcaccaccttcaaatcgacgatcggcaagacagaatggcaggccgtgaaacagcgctggcagcagcaaggcgtcacaccgtctgccgcgctgctcacgctgtttgccgccacccttgagcgctggagccgtaccacaacatttacgctgaacctgacgttcttcaatcgccagccgatccatccgcaaatcaaccagttgattggtgattttacctccgtcacgctggttgattttaacttctcagcgccggtgacgttgcaagagcagatgcaacagacccaacagcgcctctggcaaaacatggcgcacagtgaaatgaacggtgttgaggtgatccgtgagctgggccgcctgcgcggatcacaacgtcaaccgctgatgccggtagtgtttaccagtatgctggggatgacgctggaaggcatgactatcgatcaggcgatgagccatctgttcggcgaaccctgctatgtattcacgcaaacgccgcaggtctggctggatcatcaggtcatggagagcgacggcgagttgatgtttagctggtactgcatggacaacgtgctggaacccggcgctgccgaggcgatgtttaatgactattgcgccatcctgcaagccgtcatcgccgcccctgaaagcctgaagactctcgccagcggcatcgccaggcacattccccgccgacgctggccgctgaacgcgcaggcggactacgacctgcgggatattgagcaggcgacgctcgaataccccggcatccggcaggccagagcggaaataaccgaacagggcgcgttgacgctggatatcgtgatggccgacgatccttcgccatcagcggcgatgcctgatgagcacgaacttacccaactggcgctgccgttgcctgagcaggcgcagcttgatgagctggaggcgacctggcgctggctggaggcgcgtgcgctacaggggatcgcggctacgctaaatcgtcacggcctgtttaccacgccggagatcgcccatcgctttagcgcaatagtacaggcgctgtccgcgcaagcgtctcaccagcgtctgctgcgccagtggctacagtgtctgacggaaagagagtggttaatccgcgaaggtgaaagctggcgctgccgcattccgctcagcgagattcctgagcctcaggaagcgtgcccgcaaagccaatggagccaggcgctggcgcagtatctggaaacctgcatcgcccggcacgacgccctcttctccgggcagtgttctccgctggaattgctgttcaacgagcagcatcgcgttaccgacgcgctgtatcgcgacaaccccgccagcgcctgtctgaatcgctataccgcgcagattgccgccttgtgcagcgcagaacggattctggaggttggcgccggaaccgcagccactaccgcgccggtgctgaaggccacgcggaacacgcgacagtcgtaccacttcacggacgtctccgcgcagttcctcaatgacgccagagcccgtttccatgatgaatcgcaggtgtcttatgccttgttcgacatcaaccagccgctggatttcaccgcccacccggaggcgggttacgacctgatcgttgccgtcaatgtgctccacgacgccagccatgtcgtccagacgttgcgcagattaaaactgttgctgaaagccggcggacgtttgctgatcgttgaagcgacggagcgaaacagcgtattccagctggcgagcgtgggctttattgagggattaagcggataccgcgatttccgccgccgggatgagaaaccgatgctcacccgctccgcatggcaggaggttctcgttcaggccgggtttgcaaacgagctggcgtggcccgcgcaggaatcgtcgccgctgcgccagcatctgctggtagcgcgttcgcctggcgtaaatcgcccggataaaaaagccgtgagccgctatttacagcagcgctttggcaccggtctgcccattttacagatccggcaaagagaagcgttatttacgccgctgcatgccccgtctgatgcgccgactgagccagccaaacccacgccagttgccggggggaatccggcactggaaaaacaggtggctgaactctggcaatcgctgctgtctcgccccgtggcaaggcatcacgactttttcgaactgggcggcgacagcctgatggcgacaaggatggtcgcgcagctaaaccggagagggattgccagggctaaccttcaggatctgttcagccattcgacgctgagcgacttctgcgcccatctacaggcggctacgtcaggagaggacaacccgatacccctttgccagggcgacggtgaggaaaccctgtttgtcttccacgcttcagacggcgatatcagcgcctggctgccgctcgctagcgcgttgaacaggcgcgttttcggcctgcaagcaaaatcgccgcagcgctttgccacgctcgaccagatgatcgatgagtatgtcgggtgcatccgtcgtcagcagcctcacggcccttatgtgctggcgggttggtcgtatggcgcgtttcttgcggcgggcgccgcacaacgcctgtacgccaaaggcgagcaggttcggatggtgttaatcgatcccgtgtgccgacaggatttctgttgcgaaaaccgggcggccctgctgcgcctgttagccgaaggacaaacgcctctggcactgcccgaacatttcgaccagcagacgcccgacagccagcttgccgactttatcagcctcgctaaaacggccggtatggtgtcgcaaaacctgacgctgcaagcggcagaaacgtggctcgacaacatcgcgcatctgctgcgtttactgactgagcatacgccgggcgaaagcgttccggtcccctgtctcatggtgtatgccgccgggagacccgcgcactggacgccagcagaaaccgagtggcagggctggataaacaacgccgacgacgctgtgattgaagccagccactggcaaatcatgatggaagccccccacgttcaggcttgtgcgcaacacattacgcgctggctttgcgcaacctcaacgcaaccggagaacacgttatga

SEQ ID NO: 5893 - DNA, 5448 bp, Escherichia coli
gtggaaatcggcgaaacgtttgattttcagctgacgctcttgccggacaatcgccaccgcctccatgtcaatattgacctgctgattatggatgcctccagctttacgcttttcttcgatgagcttaacgccctgctggccggagaatcgctgccggctatcgacacccgctatgatttccgctcgtatttgctgcaccagcagaagatcaatcaaccactgagagacgacgcgcgcgcttactggctggcgaaagcatcgacgcttccccccgcgcccgtcttgccgctggcctgcgaacccgccacgctacgtgaagtccgtaatacccgacgccgcatgattgtcccggcaacacgctggcacgcctttagcaaccgggccggcgagtatggcgtgacgccgacaatggcactggcgacctgtttttctgccgtgctggctcgctggggcggcctgacgcgtctgctgcttaacatcaccttattcgaccgccagccgctgcacccggcggttggcgcgatgcttgccgacttcaccaatattcttctgctggataccgcctgcgatggcgataccgtcagcaacctggcgcgtaaaaaccagctcacgtttacggaggactgggagcatcgccactggtccggcgtcgaattactccgtgaactcaaacgccagcagcgctacccccacggcgccccggtggtatttaccagcaatctggggcgttccctctacagcagccgcgcagaatcgccgttgggcgagccggaatggggcatctcgcaaacgccgcaggtctggatagatcatctggcgttcgagcatcacggcgaggtctggctacaatgggacagcaacgacgcgctgttccctccggcgttagtcgaaacattgttcgacgcctactgccagttgattaaccaactctgcgatgacgaaagcgcctggcaaaagccgttcgcagatatgatgcccgccagccagcgcgcgatacgcgaacgggtcaacgccaccggcgcccccattcccgaaggcttgctgcatgaaggcattttccgtatcgctctgcaacagccgcaggcgctggcggtaacggacatgcgttatcagtggaattatcatgagctgacagactatgcccgccgttgcgcgggcaggttaatcgagtgcggggttcagcccggcgataatgtggctatcacgatgtcgaaaggcgcaggacaacttgttgcggttctggccgtcctgctggctggggcggtttacgttccggtttcgctggatcagcctgccgcacggcgcgagaaaatctacgctgacgccagcgtccggctggtgctcatttgtcagcacgacgccagcgccgggtcagacgatattcccgtccttgcctggcagcaggccattgaggcggagccgatcgccaacccggtagtacgcgcccccacgcaaccggcctacattatctacacctccggctctaccggtacgccgaaaggggtagtcatttctcaccggggagcgcttaacacctgttgcgatatcaatacccgctatcaggttggcccgcatgacagggtgctggccctctccgccctacattttgatttatcggtttacgacatttttggcgtactgcgcgcgggcggcgcgctggtgatggtgatggaaaatcaacggcgcgatcctcacgcatggtgtgagctgatccagcgccatcaggtcacgctctggaacagcgtcccggcgctgttcgatatgctgctgacctggtgtgaaggtttcgccgacgccacgccggaaaacctgcgcgcagtgatgctttccggcgactggatcgggcttgacctccccgcccgttatcgggccttccggccacaaggacaatttatcgcgatgggcggtgccaccgaggcgtctatctggtctaacgcctgcgaaattcacgacgtccccgcccactggcgctccatcccttacggttttccgctaaccaaccaacgctaccgggtggtggatgaacagggccgggactgccctgactgggtgccgggtgaattatggattggcggcattggggtcgcggaaggctatttcaacgatcccctgcgtagcgagcagcaatttttgacgctcccggacgagcgctggtatcgcaccggcgatctcggctgctactggccagatggcacaatcgagttcctcggtcgtcgcgacaagcaggtcaaagtcggaggatatcgcatcgagctgggcgaaatcgaaagcgcgctcagccagctggcgggggtgaaacaagcaaccgttctggcgatcggcgaaaaagaaaaaacgctggcggcatacgttgttcctcagggcgaggctttttgcgttaccgatcatcggaacccggcactgccgcaggcgtggcacacgcttgcgggaacgttgccctgttgcgccatctcgccagagatctccgcagaacaggtagccgatttccttcagcatcgcctgctaaaactgaagccgggtcacaccgctggcgccgatcctctccccctgatgaactcactcgctatccagccgcgctggcaggccgtggtggaacgctggttagcatttctggtgacacaacggcgactgaagcccgctgctgaaggttatcaggtctgcgctggtgaagaacgcgaggatgagcacccgcacttcagcggacatgatttaacgttatcgcaaattcttcgcggtgcccgtaacgaactgtcgttactgaacgacgcgcagtggtcgccggaaagcctggcctttaaccatccggccagcgccccgtatattcaggaactggcgacaatttgccaacagcttgcacagcgcttacagcgcccggtgcgcctgcttgaggtgggaacccgcactggccgcgccgcagaatcgctgttagcacagctcaacgccggacagattgagtatgtcgggcttgagcagagccaggagatgctgctgagcgcccggcagaggctcgccccctggcctggcgcccgtctgtccctctggaatgcagacacgctggcggcgcacgctcactcggcggacattatctggcttaataacgccctgcatcgtctgctgccggaagatcccgggctccttgcgacattacaacagcttgccgttcccggcgcgctgctctacgtgatggagtttcgccagttaacgccgtccgccctactcagcacgctcctgttaaccaatgggcagccggaggccttgctgcataacagcgccgactgggcggcattatttagcgcggccgccttcaactgtcagcatggcgatgaggtcgcggggttacaacgcttcctcgtacaatgtcctgacaggcaggtgcgccgcgatccccgtcaacttcaggccgccctcgccgggcgtctgccggggtggatggtgccgcaacggatcgtcttcctcgacgccttaccgctgacggctaacgggaaaattgactaccaggcgctgaagcatcgtcatacccctgaagcggaaaacccggccgaagcggatttaccccagggcgacattgaaaaacaggttgccgccctctggcagcaactcttatcaactggcaatgtcaccagagaaaccgacttcttccagcaaggcggcgatagcctgctggcgacccgtctgaccgggcaacttcatcaggcaggttatgaagcgcaattaagcgacctgtttaatcatccccggctggcggattttgccgccacgctgcggaaaaccgacgtcccggtcgaacaaccattcgtccactcccctgaagatcgctaccagccctttgcgcttaccgacgtgcagcaggcttacctggtggggcgtcagccgggctttgccctgggcggcgtcggctcacatttctttgttgaatttgaaattgccgatctggatctcacccggttggagacggtctggaaccgattaatcgcccgccacgatatgctacgcgccgtcgtgcgtgatggacagcaacaggtgctcgaacagacgcctcgctgggtaatacccgcacacatcctccatacgcctgaagaggcgttgcaggtgcgcgaaaaactggcccatcaggtactcaaccccgaagtctggccggtattcgatctccaggtcggttacgttgacgggatgcccgcccgcctgtggctgtgtctggataacctgttacttgacgggctgagcatgcagattctgttggcggagctggagcacggctaccgctacccgcaacagctgcttccgccgctgcccgtcaccttcagggattatctgcaacaaccctcgctacagtcgcccaatccagattctctggcatggtggcaggcgcagcttgatgatattcctccggcgcctgcgttgccgctgcgctgcttgcctcaggaggttgaaacaccgcgcttcgcccgcctgaacggcgcactggacagcacgcgctggcatcggctgaaaaaacgggcggctgacgcccatctcaccccgtcggccgtactgttgtcggtgtggtcaacggttctctctgcatggagtgcacagcctgagttcacgcttaaccttacgcttttcgacaggcgaccgctgcacccgcaaatcaaccagattctgggcgatttcacctcgctgatgctgctgagctggcatcccggcgaaagctggctgcacagcgcgcagtcactacagcagcggctgagccagaacctcaaccaccgcgatgtgtcagccatccgcgtgatgcgtcaactggcgcaacggcaaaacgtgcctgccgttccgatgcccgtcgtctttaccagcgcactgggctttgagcaggataacttcctcgcccggcgtaatctgctcaaaccggtctggggcatctcccagacgccgcaggtctggctcgatcaccagatttatgaatccgaaggcgaactgcgctttaactgggattttgtcgccgcgctgtttcctgccgggcaggtggagcgccagtttgaacagtattgcgcattgctaaaccgaatggccgaggatgaaagcggctggcaactgccgctcgccgcgctggtgcctcccgttaaacacgcagggcaatgcgcagagcgctcaccgcgcgtatgccctgagcactctcagccacacattgcggcggacgagagcaccgtcagcctgatttgcgacgccttccgcgaggtggttggcgagtctgtcacgcccgcagaaaacttctttgaggcgggcgcaacgtcgctgaatctggtgcaactgcacgttttgttacaacgtcacgaattttccaccctgacgttgcttgacctcttcacccacccttctcctgctgccctggccgattatctggccggcgtcgccacggtggagaaaacaaaacgacctcgccctgttcgccgtcgtcagcggcggatatag

SEQ ID NO: 5894 - DNA, 573 bp, Escherichia coli
atgctgattggctacatacgtgtgtcaacaaatgaccaaaacacagatttgcaacgcaatgcattaatgtgcgcaggatgtgaacagatttttgaggacaaaatgagcggaaccaagtcggaacgaccaggcctgaaacgcgctttaaagtgccttaaaagaggggatacattggtggtctggaagctggatcggttgggtagaagaatgaaacacctcattgctctcacagaagagctacgcgcaaaaggtgtcaattttcgcagtctgacggattcaatcgataccagcactccgatgggaaggttcttttttcatatgatgggtgcactggcagaaatggagcgtgaactgatagttgagcgcacgctggcaggactggctgctgcgcgagcacaaggaagagttggaggacgtcgcccgaaactgacgaaggagcagcatgagcagatcgcaagattgctccagaaagggtatgacagaaagcggctggcaattatctatgatattggactgtcaacgatctaccgctatcaccctgttgggactgtcataacgcaacctgaaatgtaa

SEQ ID NO: 5895 - DNA, 513 bp, Escherichia coli
ttgggggaaggctctgcattgcctgttggtgtaccggttccatggcccaccgccacaccgccagcaggctggttaaagtgcgacgggcgcgcctttacaaaagaacaatatcctgttctggccagagtctacccgaccctccgtcttcccgatttacgcggtgagtttatccgtggatgggacgacgggcgcaaagttgatacaggacgtaagttgctgtccgcacaaggggcaacgctgttaagaacagcaatgctggattattataaccaggacactacgggaacctcggggatagtcggcatgggattcaacaatgaagattccattacagaccttcgtgagggcagctttaaaatgccggacgggacaacattcagcgatcctgtcgtggcaatgtcagacaatggtatgcaggctactattctgacctctatcagaagcgggtatgcgaagggtatcactgtcagaccccgtagcattgcacttaattacattgtgagggcagtttaa

SEQ ID NO: 5896 - DNA, 615 bp, Escherichia coli
atgagtaacactgcagttctggatgaaaacggtatcgccactgtagcgggcgatatcactgtatatcactatgacgaggaaacccgggaatacacctcatcctctgtggagtatctcgcccttggggtgggtactccggcacattcgtgcgccgatgcaccgccggaggcaatttcgggttacgtggtttgccggactgccacgctgaacgggtgggagcatgtgcctgatcaccgcggcgagacggtatacagcacggagaacggtaaccctgttctgattacccaaccgggtgattacccggcggacaccaccacaaaacagccagccacgccatgggatacctggaacggtgaggcgtgggtaaccgatactgaacggcagcgagccgcagaactggaggttgccagacagcaacgccagcaacgggtgaaacaggcgatggcgtcagtcgatcttatcaacctcaaactgcgtgctggtcgcagtctgacaccagaagaaacggcaaaactgaacgccgtgctggattatatcgacgagctgaacgcactggatatcagcacggcacctgaaatcagctggccggaagcgccactggcacttgccagttga

SEQ ID NO: 5897 - DNA, 951 bp, Escherichia coli
gtgaatttccaacaactaaagataatccgcgaggctgcacgtcaggattacaacctgacagaggttgcgaatatgctttttacctcacagtcaggcgttagccgtcatattcgggaactggaggatgaacttggcatcgaaatatttgttcgacgaggtaagcgactgctgggcatgactgaaccgggcaaagcattactggtcattgcagaacgcattctgaatgaagccagtaatgttcgtcggctcgcagacctgtttaccaacgatacgtctggcgttctcactattgcaacgacgcatactcaggcacgttatagcttgcctgaggtcattaaagcttttcgcgaacttttcccggaggttcggctggagctaatccagggtacaccacaggaaattgcgacgttgttgcaaaatggcgaagctgatattggtatcgccagcgagcgtttgagtaatgacccgcagctcgtcgccttcccgtggtttcgttggcaccatagtttgcttgttccactcgatcatcccttgacgcaaattacaccgttgacgctggaatcaatagcgaagtggccgttaattacttaccgacagggaattacggggcgctcacgcattgatgacgcatttgcccgcaaaggtttgccggcagatattgtattaagtgcacaggattctgatgtcattaaaacctatgttgctcttgggcttgggatcggattagttgccgaacaatccagcagcgaacaagaggaaaagaatttaatccgcctggatacgcggcatcttttcgatgctaatactgtctggttgggactgaagcgagggcaacttcagcgtaactatgtctggcgctttctggaactttgtaatgcaggactgtcagttgaggatatcaagcgccaggtgatggaaaacagtgaagaggaaattgattatcagatatag

SEQ ID NO: 5898 - DNA, 918 bp, Escherichia coli
atgaacttcagacgcctgaaatacttcgtaaaaattgtagatattggtagcctgacccaggctgctgaagtattgcatatcgcacaaccagcgctcagccagcaggttgccacactggaaggtgagttaaatcaacagcttttgattcgcacaaaacggggcgttacgccaacaggcgccggaaaaattctctatacccatgcacgggccattttacgtcagtgtgagcaggcccaactggcggtgcataacgttggtcagtcattatcggggcaagtctcgattggctttgcgccaggaaccgctgcgtcatccatcaccatgcccttattacaggcggttcgcgctgaattcccggaggtcgttatctatcttcatgaaaatagtggtgcagtgcttaacgaaaaactgataaatcaccaactcgatatggcggtgatttatgagcattcccctgtggctggggtatccagtcaggctttgctgaaagaagatcttttcctggtaggaactcaagattgcccggggcaaagcgttgatgttaatgctattgcgcaaatgaacctttttctccccagtgattacagcgctgttagacttcgtgttgatgaggctttttccctacggcggctcacggcaaaagtcattggtgaaattgagtctattgccacgcttaccgcagcgattgccagcggcatgggcgttgcagtattacctgaatcggctgcgcgttcgttatgtggcgcagtaaatgggtggatgtcacgcattaccactccttcaatgagtctctctttgtccttaaatttacccgccagagcaaacttgtcaccacaggcacaggcagtgaaagagttgttaatgtcagtgattagttctccagtgatggaaaaaaggcagtggcaattggtgagctaa

SEQ ID NO: 5899 - DNA, 2148 bp, Escherichia coli; identical to SEQ ID NO: 5183

SEQ ID NO: 5900 - DNA, 654 bp, Escherichia coli
atgttgaattctacaacatcttcgggaaaaagaaccggcattttagcaattggtgcccatcctgatgatatagaattaggatgtggtgcatctctttcatattattctaatgaaaaagtatatattatatctgttgtcatgacacctggttgctgtggcgcagagtatattgatcgtcacaaggaatcacaagaagcattaaatatgttaggatgcaataaactaattcctctaaattttgaagataccagattatatttgcaaataaaagagatgatatcatctctggaatacataattgagaatgaaacgccccaggatgtggaaattactcgagtttacaccatgaataatactgacaggcatcaggatcacattgctgtttatcaggcatcaatggttgcctgtcgttatattcctcaaatactaggatacgaaacaccaagtacatgtctgtcatttttacctcaagtttttgaatctgtagatgaggtccattttaataaaaaaatattagcattacaaaagcataaaagccagattcatcgaagatacatacagccagaatacataattgcccaagccaaattccgaggacaacaggttagtcattctatgtgtgaaggttttgttgtccataagatggtgttgtaa

SEQ ID NO: 5901 - DNA, 1197 bp, Escherichia coli
atgaaaactttgttatttatcttcatgaccatagcaatgttgctatggtttttaagtacgctaagacgtaaaccctgtcaaaagaaaggctgtattgacgccattataccagcttataacgaaggcccgtgtctggcgcagtcactggataatctgctgcgtaacccttatttttgccgggtaatttgcgttaacgacggatccacggacaataccgaagcggtcatggcggaagtcaaacgcaaatggggcgaccgctttgttgccgtcacgcaaaaaaacaccggtaaaggtggcgcactaatgcatggactaaaatacgccacgtgtgatcaagtatttttaagtgatgcagatactttcgttccacctgataatgatggaatgggctatatgctggcagaaattgagcgcggcgctgatgccgttggcggaattccctccaccgcgttaaaaggggcaggtctgctgccacatatccgcgccaccgtaaagttgccgatgattgttatgaagcgcacgctacagcagtttctgggcggtgcaccgtttattatcagcggtgcctgcgggatgttccgtactgatgtattgcgtaagttcggtttctctgatcgtactaaagtcgaagaccttgatctcacctggacgttggtggcaaacggctaccgtattcggcaggcgaatcgctgcatcgtatacccacaggaatgtaacagtccgcgtgaggagtggcgccgctggcggcgttggattgtgggctacgcggtctgtatgcgcctgcataaaagacttttatttagccgcttcggtatcttcagtatatttcctatgctgttggttgtgctttatggcgttggtatttatctcactacctggtttaatgaattcatcaccaccgggccacatggtgtggtgttggcaatgttcccgcttatctgggtcggcgtagtttgtgttattggtgcatttagcgcctggtttcatcgttgctggttgttggtgcctttagcaccgctttccgttgtgtatgtattattagcttatgccatctggattatttatggacttattgccttttttactggacgcgaacctcagcgcgacaaacccacccgctattccgcactggtggaagcgtcaaccgcttattcccaaccttctgtcacaggaactgaaaaactatctgaagcttaa

SEQ ID NO: 5902 - DNA, 525 bp, Escherichia coli
gtgattattgatgaaagtgccggtgaggttgttatcggcgcgaatacccgtatttgccacggtgccgttattcaggggccggtagtgattggcgcaaactgcctgataggtaattatgcgtttattcgtcctggcacaataatcagcaatggcgtaaaaattggttttgccaccgaaattaaaaatgcggttattgaagcggaagcaacgattggtccgcaatgctttattgccgactcggtagttgcaaaccaggcatatttgggcgcacaagtacgtaccagtaatcatcgtctggatgaacaacccgtgtctgttcgaactccagagggaattatcgctaccggatgcgataaattaggttgttatatcgggaagcgttcacgccttggtgtacaagttattattttgcctgggcgaattatttctccgaacacacaacttggcccgcgcgtgattgtagaacgtaatttacctagtggaacttactcactccgacaagaacttatccgtacaggagattaa

SEQ ID NO: 5903 - DNA, 774 bp, Escherichia coli
atgataaagcatacgttattagtgccgtttttttttagtgcattgcccgcttatgccgggttaacttccattaccgcgggctacgattttaccgattattctggcgaacatggcaaccgtaatttagcgtatgctgaactggtagcaaaagttgaaaacgcaacgctgctttttaatctttcccaggggcgtcgtgattatgaaactgaacatttcaatgccactcgcggccagggtgcagtctggtacaaatggaataactggctgacaacccgaacgggtattgcctttgcggataatacgccggtctttgcccgccaggattttcgtcaggatattaacctggccctgttgccaaaaacgcttttcacgaccggttatcgctacactaaatattacaatgatgtcgaagtcgatgcctggcaaggcggcatatcactctatactggcccggtgatcaccagctatcgctatacccattatgactccagcgatgcaggtagtagttatagcaatatgatttccgtgcgtctgaaggacccgcgcggtgctggttatacgcaactatggctaagccgcggaacaggtgcttacacctacgactggacgccagaaacacgctacggcagcatgaagagcatcagtttgcaacgaattcaaccgctgactgagcaacttaatctcgggttgacggcaggtaaagtgtggttcaacaccccaaccgatgattataacggtctgcaacttgcagcccacctgatctggaaattctag

SEQ ID NO: 5904 - DNA, 966 bp, Escherichia coli
atgaaaaagaataagtactcaactcccttatggatgcttgccacgattcttgcgggtatgctctcccctatgcaatcagcggtgaatggtcaattaggtcactggttacaggatggtaatgcatgcgcagttatctcctttgccagtggtttagtcgtgatgttttttattattatggcgcgaaaagaaacccggcaacaatttgcggcaattccttctctgattaaaaaccgaaaagttcctctctggaactggtttgccggtctctgtggagcgatggtggtattttctgaaggcgcatcagccagcgcactcggggtcgcaacgtttcaaaccgcactgatctccgcgctattgctgtctggtttactttgcgatcgcgttggtatcggtgtcgacgagaaaaaatactttaccccttatcgcatcatcggtgcattatttgcggttattgctacgatttttgttgtgtcaccgcagtggcattctacctctttcatcttacttgccattcttccgttcttagctggtttgcttgcaggatggcagcccgctggaaatgcaaaagtagctgaagctacgggatccatgctggtttcaatcacctggaatttcatcgttggattttgtgttttaggcacagcgctagctattcgtgtcgcattagggcacgtcactgttcaattaccagatgtctggtggatgtatcttggcggcccgcttggactaatgtctatcggtttaatggccattttggtcagaggtctggggttactgatgctgggggttgcttcaacggcgggccagttactgggatcagtattgattgacgtattaattccatcgctgggcaataccgtttatctggtcacgatcatcggaacactgtttgcactggtcggtgcaattgttaccactattccggaatacagaacctcgaaaacaatgaagaaaatggaggtataa

SEQ ID NO: 5905 - DNA, 1035 bp, Escherichia coli; identical to SEQ ID NO: 5073

SEQ ID NO: 5906 - DNA, 858 bp, Escherichia coli
atgttaatagtcaatcttgatactcaccgtcccctcgtcctgcttcccggccgtgatcagcgtacgctggcgacctggttcagaaaatatccggaaatacaggttgtctcgcgtgatcgcagtggagtctatgcgacagcagcacgtgaaggtgcacctcaggccagacaggtggccgatcgatggcacctgctaaaaagtattggtgatgagcctgaacgaatgatgtacagacatatgcctctgatacgtcttgttgtcagagagttatcactgaagaaatcacctgagccagaaatatctgtgcctgtagcatcgctccgtcgtccggaacgccttaaacagcaaacccgcaaaaaacggcatcagcattggacagaggttatggccctgcataacaagggatgtagtttcagggaaatatcccgtattacaggcctgtcgcgagtgacagtcagtcgctgggtgcgttcaggaacattccctgaaatgtcaacccggcctccaaagcgagggcttctggacccatggagggagtggttaaaagagcaacgagaaagtggtaattataatgccagccggatatggcgggaaatggtggcccagggggggacaggcagtgaaaccatcgtcagggatactgttgccaaatggcgtaaaggctggaacccaccggttactactgccgcaagacttccttcagtgtcccgggtaagccgctggttgatgccctggagaataatcaggggcgaagaaaattatgcatcccgatttattagtctgatgtgtgaaaaagaaccggagttgaaaatagcacagcaactggtactcgagttctaccgtattctgaaaacctaa

SEQ ID NO: 5907 - DNA, 177 bp, Escherichia coli
atggctgattctggttcaactaaatataacgccagttttgaagaatggcatgaactgttaatggattatgcagagttacgcggtggaagtgccgctgatgctgaagcatggcgtgatgattatgaagcagggaaaacaccggtcgaagcatattgtgatgagtggggcgatgaatga

SEQ ID NO: 5908 - DNA, 360 bp, Escherichia coli
atgagcgagattaattatcaggaagggcatgaaaaggcagggcaggcaaaaccagtggcatggcgatatcgctacgtgaaaaaaggcgttacagactttcaggggaagcagtgggttggtgactggaaatatgtcccgacaaaagaggattgcaacgacaggccgagctatgagattcaggccttattcactgtcccgcctgtgccactgacaccagaaggattgattaaagcagtgcgtttctatgaacaggtaaagcgtgagaatccgccagtcgaaaccggagcatggaaagacgctgttgactgggtgctcaaagaggcttgccaggctgtaaacattggtaccaaaggagattga

SEQ ID NO: 5909 - DNA, 441 bp, Escherichia coli
atgaccacttttaccgacaaagaactgattaaagaaatcaaagagcgcataggcagcttggacgttcgagacaatattgagcgccgtgcttatgaaattgctctggcatcgctggaagcagaggcagttatgttctgtatatcaggacaaaatgtagattcagaagaacatgtatcaaccagcaaagcggttgttgatgcctgggttgaagaatggaatcaggttgacggaagtcctggcgaaccactgtacaaaactatgccactctactatcacgctgccttgccagcgccggtagtgccggaagaagcaactccggaaaacgtagaaatgctctctggctatgtttccacgtacaaattaaccgatagcgagcgcgatattgctgccgaaatatggaacgcctgccgcgccgctatgcttcatgggaaaggagagtga

SEQ ID NO: 5910 - DNA, 264 bp, Escherichia coli
atggcaactttaacaaaaaaagaacgggcatggttgaacgaattacaggacgttcttgatcgctgcccatcaccgaaaaaaattggtttttacaccattggcgataaaagcatttacctgtatgacctgcgccgcatggatgaaatcatggaggctcttgataatcgttcgtcaatggattggtgtgttgctgtccatgatatgaatgcagggtttgatgaaaagattttgttcccctcatcagttgaaagcactgcgggttaa

SEQ ID NO: 5911 - DNA, 168 bp, Escherichia coli
atgaccactattaccaaagaacgtattgaattgttcattaaaaatccgcttgaaaacgggcttacccgtggtgaacaaatggaactggcacggattgcgctggcatcgctggaagcagagccggttgtgttctggtttgaaaaatatcaagaaggggctacggcatga

SEQ ID NO: 5912 - DNA, 345 bp, Escherichia coli
atgacgacttttaccagagagcagttaatagctcacgcagaggagactattgaagcacagagactgtgcataccgggcacaatcgaccatgacatcatccgcacatataagatggatattgctgttctggaaatcgcactggtatcgctggcagcagagccagccggtaaattgcatgaatacaaaccagtgggatatcagcgtctggtcgatgagttaaccatgctggtaaagcagttaacctggcaactgaggaaagcgaagccagactgcaaattaccggataaggcgatgagttatctggagcggaacggactgataagcgtggaggatattttacgatga

SEQ ID NO: 5913 - DNA, 366 bp, Escherichia coli
atgactgaacgcatagaatttgttttgccttacccgccgacggtgaatacctactggcgacgtcatggcaatacgtatttcatctcggaagccggaaagcgttatcgccgtgatgtggcgctaattgttcgccagcagcggctgaaattaagcctgtccggaaggctggcgataaagattattgcagagccaccggataagcgccgccgcgacctggacaatatcctgaaggcaccactggatgcgctgacgcatgccggactacttatagacgacgagcagtttgatgaaatcaatattgtgcgcggtcagctcgttcctggtgggcggctggggataaaaatcacagaactggagtgcgcatga

SEQ ID NO: 5914 - DNA, 690 bp, Escherichia coli
atgaataaccagtatttacagtttgtgcgtgagcagctcattatcgccaccgctgatttgagtggggcaacaaaaggtcagcttgaagcctggcaagagaatgccatgttcgatacagggcgttacaggcgaaaaaaaatccggtaccgcgatgaagtgactggaaaaatgataacgcgggataatccaccaatcccgggaaagcaatcgctggcgaaggggacgtcaattcctctggtcagtccggttgagttttcgacatcatcgtggcggcgggctgttctgtctcttgaagaacatcataaagcctggttgttgtggtgttacagcgggagtatttgttgggaatatcagatcgcgataacacagtgggcgtggaatgaatttaatactcaatccggtaccagaaaaattgcagggaaaacgcaggaacgcctgaaaaaattaatctggctggcggcgcaggcagtaaaagcagaactttttggtggggaaggttatgaataccaggagctggcattactggcgggagtgacaactaaaaactggtccaaaacatttactcgtcactgggttgcaatgaaacacatttttcaccgacttgatagtgaggctttattgtttgtaatgagaacacgttcaaaacaaaaggcggcattttcaaagcaaagtgttgcaaaagtagattga

SEQ ID NO: 5915 - DNA, 468 bp, Escherichia coli
gtgagcagagtcgccgcgattatttatgctctggttatctgcatcatcgtctgcctgtcgtgggcggtcaatcattaccgtgataacgccatcacctacaaagaacagcgtgataaaaaagtcagtgagctgaagcagctgaccgccaccatcgctgacatgcagcagcgtcagcgtgatgttgctgcgctcgatgcaaagtactcgagagaattagccaatgcgaaagctgaaaatgaaactctgcgcgctgatgttgccgctggtcgtaagcgcctgcgggtcaatgccagttgctccgcagccgtgcgtgaagccaccggacccaccagcgtggataatgcaaccagccccagactggcagacaccgctgaacgggattatttcaccctcagagaacggttgatgacgatgcagaagcaactggaaggggcacagctatacattcgtgagcaatgtctcagataa

SEQ ID NO: 5916 - DNA, 267 bp, Escherichia coli
gtgaacgtagaaaacctaagtaacgcacattacatctataacgagatgaaagagctacagcgacagaaaggtatactggaaagtggtgcagggcttggtgtgacaatccagtctgcctatcaatatagtgcttttcttgaggccatacgcccgcatgcagttgctgaacttaacagccgtattgaggaaaagaaatccgcgctggttaatttgggtgcttccttctctatatacgagcataataaggcgggttggaaacccgcctaa

SEQ ID NO: 5917 - DNA, 540 bp, Escherichia coli
atggatattaaggataaaatcaataccattttgttatgtgacattgccatccacctaggtatcgaaactgatattgatccacagcttgtaaaatatgctgtgtcatctggtaatgattgggttatgaaggccgaatattcacatttggatgttgatgaaccaagtaaagaagatcgtgattttgttactgctgtcttgaatatgtaccgcggactttccaatgctttcaggaaacttagtgatgacgagcaaaaagaattagtccgtgaccatcatctaaaaatacatgatggggaaattcagctcccaggtttcgacggtcataatgaatgcgattacttcagtatcattgaggcatatcagaaaattgatcgcttccccgaacagaaacagcccattgccaatactcattcacgtacagaacatctctataacgcaatgcttgatgagtttaagaaaattgacgctgtaaatcgaagctgggatttatcgaaggaagaactggcatccattctttccacagctccacgcagtttctaa

SEQ ID NO: 5918 - DNA, 1758 bp, Escherichia coli
atggcaaaagtggctgacgggatccgctacgccgaacgtgttgttgcaggagaaattgttgctggcgaatttgtccgcctggcctgccagcgttttcttgatgatctgaagtacggcgaagagcgggggatttatttcagtgaaccccgtgcgcagcacatcctgaatttctacaaatttgtgcctcatgtaaaaggggcgctggcaggccagcccattgagttgatggactggcatgtatttatcctcattaatatttttggttttgtcattccgctggtcaatgaagagaccggggaagttgtcatgcgcagcgatggcagcggacgtccggtgatggtgcgccggttccggacggcgtacaacgaagtcgcccgtaaaaacgcaaaatcaactctgtcatcgggtatcggcctgtatatgacgggggcagatggtgaaggcggagctgaggtgtattcagccgcaaccacgcgtgaccaggccagaatcgtgtttgaagacgccaaaaatatggtcagaaaagcccggtcgacactcgggcggttgtttgatttcaacaagctggcgatttaccaggagcagagcgcatcaaaatttgaaccgctttcttcggatgcaaacaacctggatggtctgaacatccactgcgccattattgatgagctgcatgcacataaaactcgtgacgtgtgggacgttctggaaacggcaaccggtgcccgtctgcagtcccttttatttggtatcaccacggcagggtttaacaaggaagggatttgttacgagcagcgtgattacgccatcaaggtattgcgtggctataacagcgacgtggagggcgcggtaaaagacgactcctactttgcgattatttacaccctcgatgagggagatgatccgtttgatgaaacggtctggcagaaagcgaatcccggcctgggcatctgtaaacgctgggatgatctgcgtcgcctggcgaaaaaagcgaaagaacaggtctctgcgcgggtgaatttttttaccaaacacatgaatgtgtgggtcactgccgaatctgcctggatggatatgattaagtgggagaagtgcgaatacattgctccacaacatgagctgaaaacatatcccatgtgggtcggcgtcgaccttgctcataagattgatatctgtgcggcggcaaaactctggcgaaccgataacggacatgttcatgctgattttaaattctggcttccggaaggacggctggaacgatgctcgcggcagcaggcagaactttaccggaagtgggcggagatggataagctcatcctgacggatggtgatgttatcgatcatgctcagataaaaagtgacttactggaatggattggcggtgaaaacctcagggaactgggatttgacccgtggagcgcaatgcagttcagtctggcactggctgaagaagggataccgctggtggaggttccgcagacggtccgcaatctgtcagaggccatgaaggaaacggaatcactggtttatgccgggcgtttccatcacagcaatcatccggtcatgaactggatgatgtctaacgttactgtaaaaccggacaaaaacgacaacatcttcccgaataaatccacgccggaagccaaaatcgacggccctgttgcgctttttacagccatgagccgctttctggtaaatggcgggggcgtgaatgactttctgtccacgcttgatcctgatgaggacctgttaattctgtga

SEQ ID NO: 5919 - DNA, 162 bp, Escherichia coli
gtgaaacagcttattactgatatgaccgggctgatcggtttcggtttgctcactgctggcgtttatctgtatgcaggtctgccagcgtctctgatgctgtctggctgtttgttgctgctttatgcactggtggtgtccatgaggagaaaacatgcttcttga

SEQ ID NO: 5920 - DNA, 342 bp, Escherichia coli
gtgcctgagcctgaagtttttaactggatcccccgtgaggggatggagacgacacgaaagccatcagttattacggtaaagtttggtgacggatatgaacagcgacgggctggtggtctgaatgcggatctgaaaacgtttaaaccggtatttcgtgtcacagatgaatattcccgtgccgcgctggacagttttttatcccgtcatgccgggattcgtgcttttttgtggcgtccgccaaaacacaacaggactgtccgggttgtctgcagggagtggagcatttcggataatgccatgtataccgattttaactgtacctttgaagaggtcactcactga

SEQ ID NO: 5921 - DNA, 699 bp, Escherichia coli
atgcaggatatacagcaggaaacactcaatgagtgcactaaaacggagcaatccgcgctggtcgtgctctgggaaattgatctgacagaggtcggcggagatcgttatttcttctgtaatgagcagaacgaaaagggtgaaccagtcacctggcaggggcggcagtatcaggcttatcccattcagggaagcggatttgagatgaacggcaaaggagccagtgcaaggccaacgcttaaagtctctaacctgtacggcatggtcaccgggatggcggaagatctgcagagtctggtcggcggaacggtggtccggcgtaaggtttacgcccgttttctggatgcggtgaacttcgtcaacggaaacagtgacgccgatccggagcaggaggtgatcagccgctggcgcatcgaacagtgcagcgaactgagcgcggtcagtgcctcctttgtgctgtccacaccgacggaaacggatggcgctgtttttccggggcgcatcatgctggccaacacctgcacctggatctaccgcggcgatgagtgcggttatgatggcccggcggtcgcggatgaatatgaccagccaacgtccgatatcacgaaggataagtgcagcaaatgcctgagtggttgcaagttccgcaataacgtcggcaattttggcggctacctttccattaacaaactttcgcagtaa

SEQ ID NO: 5922 - DNA, 600 bp, Escherichia coli
atgtcgccggaggactggctgcgtgcacaaatgcagggggaggttgtggcactggtccacagccaccccggtggtctgccctggctgagtgaggtcgacaggcggctgcaggtgcagagtgatttgccgtggtggctggtctgccggggggcgattcacaagttccgctgtgtgccacatcttaccgggcggcgctttgagcacggggtgacggactgttacacgctgttccgggatgcataccatctggcggaaattgagatgccggatttttatcgcggggatgactggtggcgtaacggccagaatctctatcttgacaatatggaggcgactggtttttaccgtgtcgcactgacagaggcgcagccgggcgatgtgctgctgtgctgttttggttcatcggtgccgaatcatgccgccatttactgcggcgacggcgagctgctgcaccatattcctgaacaactgagcaaacgagagaggtataccgacaaatggcagcgacgcacacactccctctggcgtcaccgggcatggcacgcatctgcctttacggggatttacaacgatttggccgccgcatcgaccttcgtgtga

SEQ ID NO: 5923 - DNA, 573 bp, Escherichia coli
gtgaaaacgggggccgaagccatccgggcgctggccatgcagatcccggcgtttcgtcagaaactgagtgacggctggtatcaggtacggattgccgggcgggatgtcagcacgtccggattaacggcgcagttacatgagactctgcctgatggcgctgtgattcatattgttcccagagtcgccggggccaagtcaggtggtgtattccagattgtcctgggagctgccgccattgccggatcattctttactgccggagccacccttgcagcatggggggcagccattggggccggtggtatgaccggcatcctgttttctctcggtgccagtatggtgctcggtggtgtggcgcagatgctcgcaccgaaagccaggacgcccacagcgaccagcacggataacggtaagcagaacacctatttctcttcactggataacatggttgcccagggcaatgttttgcctgttctgtacggtgaaatgcgcgtggggtcacgcgtggtttctcaggagatcagcacggcagacgaaggggacggtggtcaggttgtggtgattggtcgctga

SEQ ID NO: 5924 - DNA, 288 bp, Escherichia coli
atgccaatggagtttgaatgggatgaaaacaaggccaaaagtaatcgggtgaaacatggcatccgctttgaagatgcggtgttattgtttgatgatccacaacatttgtcacagcaagaacgcatagaaaacggtgagtatcgctggcagacaatcggcctggtttacggcatcgtggttattctggttgcgcataccatccgtttcgaaagcggaaatgaaattattcgaatcatcagtgcacgaaaagcagatcgtaaagagaggaatcgctatgagcatggttaa

SEQ ID NO: 5925 - DNA, 303 bp, Escherichia coli
atgagcatggttaaacataaacgagggacctcctctacactcgatgtgcagcatgaggccgaactgaaggcgctggcgaataaatccgacgaagatattgattacagtgatatcccaccttccagcgatgagcaatggtctaacgccgaacgcggtaagttttatcggccattgaaaactcaggcttcggtgcgtattgatgctgatgtgatggaatggttgaagcgaccaggtaaaggctatcaaactcgcctgaacgcaattttacgtgaagcgatgctgcgcgatcagaacaaaaaataa

SEQ ID NO: 5926 - DNA, 1665 bp, Escherichia coli
atgttaaaacgtatcaaaattgtgaccagcttactgctggttttggccgtttttggccttttacaactgacatcaggcggtctgttctttaatgccttaaagaatgacaaagaaaatttcactgttttacaaaccattcgccagcagcaatccacgctgaatggcagctgggtcgcgttgttgcagacgcgtaacaccctcaaccgcgcgggtatccgctacatgatggatcagaataatattggtagcggttcaaccgttgctgagctgatgcagagtgccagtatttcgctgaaacaggcggaaaaaaactgggcggattacgaagcgttgccgcgtgacccgcgtcagagcaccgccgcagcggcagagatcaaacgtaattacgatatttatcacaatgcgctggcggagctgatccaactattaggtgcaggcaaaatcaacgagttctttgatcagccgacccagggatatcaggacggtttcgagaagcagtatgtggcttacatggagcaagacgatcggctctatgatatcgccgtcagcgataacaatgcctcctacagccaggcgatgtggattctggtgggcgtgatgatcgtcgtactggcggtcatcttcgccgtctggttcggtattaaagcctcgctggtagcgccaatgaatcgcctgattgacagcattcgtcatattgcaggcggcgatctggtgaaaccgattgaggtggatggctctaatgagatggggcaactggcagagagtttgcgccatatgcagggagagctgatgcgtaccgtcggtgatgtgcgcaacggggccaatgccatctatagcggtgccagcgaaatcgccaccggcaataacgatctctcttcgcgcaccgagcaacaggccgcttcgctggaagagacggcagccagcatggagcaactgaccgcaacggtgaaacagaacgccgagaatgcgcgtcaggccagccatctggcgttaagtgcttctgaaacggcgcaacgcggcggcaaagtggtggataacgtagtacagaccatgcgcgatatctccaccagttcgcagaaaatcgccgatattatcagcgtaattgacggcattgccttccagaccaatattctggctttgaacgcggcggttgaagcagcgcgcgcgggtgagcaagggcgcggttttgcggtggtcgcgggtgaagtgcgtaatctggctcagcgcagcgctcaggcggctcgtgaaattaaaagcctgattgaagactcggtggggaaagtagatgttggctctacgctggtcgaaagcgcaggggaaacaatggcggagattgtcagtgccgtgacccgcgtgacggacattatgggcgaaattgcttctgcttctgatgagcagagccgtggtatcgatcaggttggcttagcggttgctgagatggaccgggtaactcaacagaacgctgcgctggtggaagaatctgccgctgccgccgccgcgctggaagagcaggccagtcgcctgaccgaagctgtggcagtgttccggattcagcaacagcagcaacagcagcgtgaaacatcggctgtggtaaaaaacgtgacgccagctacgccgcgtaaaatggcagtggcagatagcggggagaactgggaaacgttttaa

SEQ ID NO: 5927 - DNA, 1362 bp, Escherichia coli
gtggaaaaagaaaatatcaccctcgatccgcgttcttcatttactccatcttcgtcggcagatattcccgtgccaccagatggattagttcaacgcagtacccgaattaaacgcattcaaaccaccgccatgttgttattattttttgcggcggtaatcaattatctcgaccgcagttcgctgtcggtagcaaatttaacgattcgtgaagaattgggattaagtgccaccgaaatcggcgctttgctctccgtgttttcactcgcttacgggattgcgcaacttccttgcggcccactattggatcgtaaaggcccacgcctgatgctgggactggggatgttcttctggtcactgttccaggccatgtctggcatggtgcacagctttacgcagttcgtgttggtgcgtatcggtatggggattggtgaagcgccgatgaacccatgtggcgtaaaagtcattaacgactggttcaacatcaaagagcgcggacgcccgatgggcttcttcaacgcagcttctaccattggcgttgccgtaagcccaccgattctggcggcgatgatgctggtgatgggctggcgtgggatgtttattaccattggtgtgctggggatttttctcgccattggctggtatatgctctatcgcaaccgcgagcacgtagaactgactgccgttgaacaagcttatctcaatgcaggtagcgtcaatgcccgccgagatccgctcagttttgccgaatggcgcagcctgttccgtaaccgcacaatgtggggaatgatgctcggattcagtggcatcaactacactgcgtggctgtatctggcctggcttcctggttacctgcaaacagcctataacctggatttaaaaagcacagggttgatggcggctatccctttcctgtttggggctgccgggatgctggtcaacggttacgttactgactggctggtcaaagggggaatggctccgattaaaagccgtaagatctgcattattgccgggatgttctgttctgccgcctttacgctggtcgtaccgcaagcgacaacatccatgacggcggttctgctgattggcatggcactgttctgtattcactttgccggaacatcctgctggggcttgatccacgtcgcagttgcttctcgcatgacggcgtcggtgggcagtatccagaactttgccagcttcatctgcgcctcttttgcgccgatcattactggttttattgttgataccacccactcattccgtctggcactaatcatctgcggttgcgtcaccgcagcgggagcactggcgtacatcttcctggttcgtcagccgatcaacgacccgcgtaaagattaa

SEQ ID NO: 5928 - DNA, 915 bp, Escherichia coli
atgagtcgttcacaaaatttacgccacaatgtgattaaccaggtcattgatgatatggcgcggggtcatatcccttccccacttccatcgcaaagtgcgctggcggaaatgtacaacatcagccgcactacagtgcgtcatattctcagccacttacgcgaatgcggcgtcttaacgcaggttggaaacgactatgttattgcgcgtaaacctgaccatgatgacggtttcgcctgtactaccgcttcaatgagtgaacaaaacaaagtgtttgagcaggcttttttcacgatgataaaccagcgccagttacgcccaggggaaactttttctgaactgcaactggctcgggccgcgggtgtcagcccggtggttgtaagagaatatcttttaaaattcggccgttataatcttattcaaagcgaaaagcgcggccagtggagcatgaagcaattcgatcaatcctacgccgagcagctgtttgagctacgcgaaatgctcgaaacacattcacttcagcactttctcaacctgcctgatcatgatccccgctggctgcaggcgaaaaccatgctcgaacgtcatcggctactgcgtgacaacatcggcaatagctttcgcatgttctcgcaacttgacagagattttcactccttactgctttcagctgccgacaatatcttttttgatcaatctcttgagatcatctcagtcatctttcattttcactatcaatgggacgaaagcgatcttaaacagcgcaatatcattgccgtcgatgagcatatgaccattctcagcgctctgatttgccgcagtgaccttgatgccacccttgcgctccgtaaccatttgaattcagctaaacaatcaatgattcgatccattaatgagaacacgcgttatgctcattaa

SEQ ID NO: 5929 - DNA, 2292 bp, Escherichia coli
ttgtcagaactactctctttcgccctttttctcgcctctgtgctgatttacgcatggaaagcgggacgtaacacctggtggtttgcagccacattaacggtgctggggctatttgtcgttttaaatatcaccctgtttgccagcgactattttactggcgatggtattaacgacgcggttctctataccttaaccaatagcctgaccggtgctggcgtcagcaaatacatcctgccgggtatcggcattgtgctggggctgacggcggtgttcggtgcgctgggctggatcctgcgccgtcgtcgtcatcatccgcaccattttggttacagcctgctggcgctcttactggcgctgggttcggtggacgccagcccggcatttcgtcagataacggaactggtgaaatcccagtcacgcgacggcgacccggactttgcggcttattataaagagccgtcgaaaactatccctgacccgaaactcaacctggtttatatctatggcgaaagtctcgagcgaacctattttgataacgaagctttcccggatctcacgcctgaactgggcgcgttgaaaaatgaaggcctggatttcagccacacgcagcagctgccaggaacggattacacgattgcgggcatggtggcttctcagtgcggcataccgctgtttgccccctttgaaggcaacgcctccgcttctgtttccagcttcttcccgcagaacatctgtctgggcgatatcctgaaaaactcgggttatcagaactatttcgtgcagggcgcgaatctgcgttttgccggtaaagatgtgttcctgaagtcgcacggtttcgaccatttatacggctcagaagagctgaaaagcgtggtggccgacccgcactatcgcaacgactggggattctacgacgataccgttctcgatgaagcgtggaaaaagtttgaagagctttcccgttctggtcagcgattctcactgtttaccctgacagtcgatacccatcacccggatggttttatctcgcgtacctgtaaccgcaaaaaatatgattttgacggtaagccgaaccagtcattcagcgcggtaagttgcagccaggagaatatcgcggcgtttatcaacaaaatcaaagcgtcaccgtggtttaaagataccgtcatcgtcgtctcttctgaccatttagcgatgaacaacacggcgtggaaatacctcaataagcaggatcgcaataacctgttttttgtcattcgtggcgacaagccgcagcaagagacgctggcagtgaagcgtaacacgatggataacggcgcgacggtgctggacattctcggtggcgataactatctcggacttggtcgtagcagtttatccgggcagtcgatgtcggaaatcttcctcaatatcaaagagaaaacattggcgtggaagccagatatcatccgcctgtggaaattccctaaagagatgaaagagttcaccatcgaccagcagaaaaacatgattgccttctcgggtagccatttccgtttgccgctgctgttgcgggtttcagacaaacgcgtggaaccgctgccggaaagcgaatactcagcaccgctgcgtttccagctggccgatttcgctccacgcgacaatttcgtctgggttgaccgttgctataagatggcacaactctgggctccggaactggcactttccaccgactggtgtgtctcgcaggggcagcttggcggtcagcaaattgtccagcatgttgacaaaacaacatggaagagcaagacggcatttaaagatacggtcatcgacatggcgcgttacaaaggcaatgtcgatacgctgaagattgttgataacgatattcgctacaaagccgacagtttcatctttaacgtcgccggtgcgccagaagaggtgaaacagtttagcgggatttcccgtccagagtcgtggggccgctggtccaacgcgcagctgggcgatgaagtaaaaatcgagtacaagcatccgctgccgaagaaatttgacctggtgattaccgccaaagcatacggcaataacgccagccgtcctattccggtacgcgtaggcaatgaagaacaaactcttgtgctgggcaatgaagtgaccaccaccacactgcatttcgataacccaaccgatgccgacacactggtaattgtgccgccggaacctgtctcaaccaacgaagggaatatcctcggacactcgccgcgtaagctcgggatcggcatggtggaaattaaagttgtggaacgtgaagggtaa

SEQ ID NO: 5930 - DNA, 681 bp, Escherichia coli
atggcgctacagcaggaatggaacggcaggcatcagcgcggtatggagtccaggctgaagcaggctcgtctgccgtgggtcaaaacgctggagcagttcgactttaccttccagccgggcatcgaccgtaaggttgtccgggaactggctggtctggcgttcgtggagcgcagcgaaaacgtgatcctgctgggacctcctggtgtcggaaaaactcatctggccatagctcttggcgtgaaagcggtggatgcgggacatcgggtactgtttatgccactggacagactgatcgcgacactgatgaaagcgaaacaggaaaaccggctggagcgtcagctgcagcaactgagttatgcccgggtgttgatcctggatgaaataggctatctgccgatgaacagagaggaagccagcctgttcttccggctactgaaccgtcgatatgaaaaagcgagcatcatactgacgtcaaacaaagggttcgcagactggggagaaatgttcggagatcacgtgctggcaacagcgatactggatcggttgctacatcactcaaccacgctgaatatcaaaggagagagttaccggttaaaagagaaacgtaaagctggagtgctgaccaaaaacacaacgccaatcagtgatgatgaaatggtgaaaagcggacagcatcagtaa

SEQ ID NO: 5931 - DNA, 234 bp, Escherichia coli
atgctggctgatttcacaccatcgggtatagcgcagccgggattatttgatgaaatccagccccgtaaaaacagtgaaaagttaatgaaaacactcgatgaactgaaccagtcgggaaaagggaaagtgtggtttgcggggcgaggaaccgcccctgaatggcaaatgaaacgggaaatgctatcgccttcgtatacaacacaatggactgagatccccattgcttcattctga

SEQ ID NO: 5932 - DNA, 393 bp, Escherichia coli
gtggacgatgaacggaaaaggaaaaaatacacactttatctgcatccggaaaaagctgcagactttcaaactttggaagcgatagagtccgttccgcgttctgagcgtggtgagctgttccggaatgcatttatttctggaatggcgttacaccaacttgatcctcgcctgcctgtattgctgacagccattttgagcgaggagttttcagcagatcaggttgtaaccttactcagtcagacgactggatggaagccttctcaggccgatatcagaactgtgttgactgaactcggtgcttcgcaatctgttgaaaaaatgcctccttctgctactgattcggtgcaggaggcaatgaatgatgtgcgtcttaaaatgaaaaaattattctga

SEQ ID NO: 5933 - DNA, 972 bp, Escherichia coli
atgaacgtatactgcgatgatggttcaacaacaatcaagttggcatggaatgataatgggaaaatctgtaagtcgttgtcgcaaaactcatttcgtcatggatggaaggttgacgggttaggaattcgccagacatttaactatgaactggatggtaaaaaatacacgtatgatgaagttagcaaccaatctattcttacgactcatattgagtatcaatatacggatgttaacctgttagctgtgcatcacgctttactgaatagtggattagcgcctcagcctgtatcattgactgtgactttgcctatcagtgagttctatacgaaagagtgtcaaaaaaatgaactcaacattcagcgtaaaattgagaatttaatgaggccgattcgtcttaataaaggcgatgttttcaccattgaacacgttgatgtgatgcctgaatcattgccagctgtgttttctcgtctggtcgtggataaagttggtcagttcgaaaaatcgctggtagttgatattggcggcactacgcttgatgttggtgttatcgttggtcaatttgactctgtaagtgccattcatggtaattctggcattggtgtgtcttcagttacgaaagctgcaatgagtgcattgcgcatggcatccagtgataccagtttcctcgttgcagatgaattgattaaacgtcgtaatgacccggactttgttcggcaggttataaatgacgaaacaaaaactgatctggtccttaataccattgagggggctattgccagtttgggggagcaagtagtcaatgagctcggtgatttccatcatgtgaatcgtgtttatgttgtcggtggtggggccccgttgatctatgattcgataaaaacggcatggcaccatcttgggcaaaaagtagtgatgatggagtcgccacagacagcactggttgaagctatcgcggctttcaaagaggagtaa

SEQ ID NO: 5934 - DNA, 645 bp, Escherichia coli
atgattactgtagttggtgggaacaaaggtggttcagggaaaactaccattgcatcaaacctggctattgctctcgcaaataaaggaagggaagtctgcctgttaaacggagatctacaacgaacagccgcaaaacatcatgcggaacgagaagctgcaggactgttaccagcaataacccttgttgagaaatttgataacctgacacaaacactacaggctctgaatgaaaagttcgatgatgtaatagtggatgtcgcaggaagaaactcaaaggaattcataacgagtggagttgtcgcacatcaaataattgcgccactacagtgttctcaaccagatctggatactcttacagaactagaacaacagatagacgcaatgcgtaaccttaacccggaacttaaggtttattgtttacaaagtatggcaacaaccaatccggttttgaggggaaatgagagaaaagaattccttgaatatcttgaagaattcccaacaattcaagtccttgattcagttatttgtttcagaaaagtctatcgcgattgcatgagcaacggcaccggtgtagtagaaacgaacaatacagcagccaaagcagaaattgaacatttaatgaatgaggtatttggcccatggtga

SEQ ID NO: 5935 - DNA, 276 bp, Escherichia coli
atggtgaagaaacccagccagcaagcattaaacagagctgcagttacggtagaacaagcagaggctctggctcagcgccttgcggataaaccatacggcgcgccggaaaaacccgaaccagaaaaacaatgtcggacgacaatctctcttggtgaaagcatgcttgtcacaatagaagatctggcattgaggaataaacgcaatggtaaagatccaaaaaatgtaagtgccatcgtcagagtagcccttgagcaatacttaaaaacactaacgtaa

SEQ ID NO: 5936 - DNA, 168 bp, Escherichia coli
atgactgtgcgggagacagaggaaaacattgaacaaatcttccctgagctttcgaacttaattgatattattaataaatggctttcccatggaaacattgatcctgaactggcacacttcatcatttatcttcttgattacctaaccaccacacacaaaagcatataa

SEQ ID NO: 5937 - DNA, 642 bp, Escherichia coli
gtgaatgcggacacctggacccgcctgcaggccttccgacatgctctggagctgacttcctgtgaggcttctctcaccgccgggtatgatcacctgaaggatttcccggccggttgcagcgagctggccagccagacgctgactgattatctgacggaagacggcagcaacctgtactcctgtattgtcggtatgcagtgggataatggtcctggcagatacggccacgtcattgccgaccctgccagggactatatcgacctaacccttgatcagtttccaggctatcataaccggattgtggcagagcccgttgagtccggcggacagctcgcggcagacctcaacagggagcctgccatcagtacagctgatggaatagtggccagcccatcagataaggttaattacattactgaacagaaaaatcgccagccaatggtgatcattacagaatgttacaagctgatcagaatgacggcaagatttataccaatgtgccagtcatctcaactcttccagcaccaggtattccctcgcttatttatcatttcagacgttggctcctgcagtttgttcaggaacaccttagatcgtttagctactgactggaaggtgacactgtccatcctgtcgctatag

SEQ ID NO: 5938 - DNA, 321 bp, Escherichia coli
atgacaggcactgctgcgcagacaccggtcatggatgtaatggaaataccagctgaaccgcaggtcttccagtcggggacacagagtacagggctggagcttgtggatacgtatctctggatcttcaaacactttattgaaggaaaggagttaaccagatcccttgcctgccaggtttatatcaagccctatagcgacaggatggacagtgtcaccttccagtcagtagctaaacgatctaaggtgttcctgaacaaactgcaggagccaacgtctgaaatgataaataagcgagggaatacctggtgctggaagagttga

SEQ ID NO: 5939 - DNA, 1170 bp, Escherichia coli
atgaatcagaagtggaagacgctaatagtttcagtattaacaccatcaagtattatatcagggattgcgttgatagttctctggggatatttcagtcgtctggatcgacttgatattttctttgatgtgatgaatattaaaagcatcttggtattggtttgttgtacaactattctatcattgattatgatcatttttattttttttataacatctttttttataccaatagttattccttatgatataaaaaatcttcctgcttacaataagattcagggtaattttttatctgtaatgatgttatctggcctcttccccatggcctttatatacgtgttatactgtgcatttgattttgaccagagtgttaaagataactctggctggttatctattttaagtataggagtactaatagttgttatttcagccataataaacacgaggtatcttgaatatgacttatcgtttaaaaataatagaatgaaactgttgagacgtgttcagatctatcttgtcattccgttgtctattgctttactggtgcatcttcaggtaattccactggagatggtttttaggaatattgaaacttcagataagagtattaatttcaaagtgatagctgaactggctttcatgtcatattttatttttattctgacaatacttcccggcctcatttatctaaaaatgaatccacagcataaactttctaaaagaattagttctgcatttgtcgcatccttgatgatattattagttatatcgactcaaataaccgtattaccagtaatttttacccattcagttattaagctctcaggtataagtgacttcaaaatacatagctacattattaaaacaagtgaatatccggaggagtttttttccaatgcagtatggggtaaaaaaaatataaaaccgggggaatattactctgtgcaggctgtttctatgtttacgacaaaccagtttattctcctttgtcccaaggatattataaggttttatcgggaaagctggaagttcgacctgcttaatgtagacttcgatacaaataccaggaagaaactccaggaagaagcagcatattgcgtaccaatttctgcaatatctgtaaaacgatgggatatgcctcttcagggctcgaaaccctcaaattag

SEQ ID NO: 5940 - DNA, 366 bp, Escherichia coli
atgattgatgtcttaggaccggagaaacgcagacggcgtactacacaggaaaagatcgctattgttcagcagagctttgaaccgggaatgacggtctcccttgttgcccggcaacacggtgtggcagccagccagttatttctctggcgcaagcaataccaggagggaagtcttactgctgtggccgcaggagaacaggtcgttcctgcctctgaacttgctgctgccatgaagcagattaaagaactccagcgcctgctcggcaaaaaaacgatggaaaatgaactccttaaagaagccgttgaatatgggcgtgcaaaaaagtggatagcgcacgcgcccttattgcccggggatggggagtaa

SEQ ID NO: 5941 - DNA, 825 bp, Escherichia coli
atgccagaaaatgaaaacctgctgctgagattgcgccagagcgttgatggatatagtcgaactcaacagaagctgggagagtttgtacttagcgatccggcaaaagttgtctacctgacgattaccgaactggcgcgtgaaagcggcaccagcgaggctagcgtcacacgtctgtgccgaacgctggggtgtaagggctataacgaattcaaaatggcgcttgcactcgatctccgacaagtacagtctgtagagtacggcggtgatgagattgacaatgtggtcaatgaatccgtgcaagcactacaggacacagcaaaattactcgataggaccttgctggaagcagccacgcttgcactgcatcaggctcagtcagtacagatttatggcgtagcagccagtgctattctgggggagtatttacattacaaactcctgcgtctggggaaacccgcacaattgttcagcgatatgcatcgtgctgccatgaacgccacaacacttagtaaaaacacgttcgtggtggcgatttccagttctggatccacgcgcgatctgctgcatgtcgtaaaactagcgcgtaagcaaggtgtgcgtgtactggcgctgagtaatacgccgcgcagtccgttagcttcgctgagtgatattcaactggtcgcggccaaaccggaaggccccttgagcgccggcgcgctgaatgccaaggtgggagttatgctgttggtagagttactcaccacatcgctgattgcgctggatcataagtacagcgatgtgagccagcaaactgccagcgcgaccctaccgctactgctttaa

SEQ ID NO: 5942 - DNA, 1557 bp, Escherichia coli
atgatgcaaatatttagcggcgcttcgtcaggcgcatggtttgaaaaagcgcagcggttcggcaaatcgttcatgctgccgattgcggtattgcccgcagcggggttgttgttggggattggtggggctctgtcgaatcccaatacgttgacggcctacccattcttgaatgtcgactggctgcaggcaatcttcacaatcatgaccagcgcaggttctattgtgtttgccaacctgtcggtactctttgcggtcggcgtcgccgtggggctggcgaaatcggataaaggcactgccgggcttgcggcattgctagcgtttctggtgatgaatgctaccatcaacgccttattaacgctaaatggaacgttggcgcacaagaaccccggttcagttggccaggggatgacgcttggtattcagacactggaaactggtgtgtttggtggggtggtgattggtctcgtcacctgcacgttacatagccgtttcaataaagtctcactacctcagtttctcggtttttttagtggttctcgttttgtacccattatcagctcccttgccgcgatagtagtgggtgcggttatgacggtggtgtggccgcatttccagaaactcatttttggactgggcggcctggtggatgcgacgggctatctggggacgctgttgtacggcttcatcctgcgtatgcttggtccactgggtttacaccatatcttttatttgccgttctggacgacggcgctgggcggcagtgaaatcgtcaacggccagttggttgaaggtacgcagcggattttctttgcccaacttgccgatccgaatacgcagcagttctacgcgggtaccgctcgctttatgtccgggcgctttatcaccatgatgtttggcctgcttggcgcatgtctggcaatgtaccatacggcaaagccggagaatagaaaggttgtcgccggactacttttgtcggcagccttgacctctttcctgacgggaatcactgagcctgttgagttctccttcctgtttgtcgcgcccgtattatacgtaattcacgccttcttcgatggtctggcgtttatggtcgcccatattttacatatcactattgggcaaaccttttcgggcgggcttatcgatttccttctcttcggcgtgttgcagggggaatctaaaacaaactggatgtatgtccccatagtgggaataccgtggttcttcctttactacttcactttccgctatttgattaaccgctttggctggctgacgccgggtcgtgagaacgtaaccctggttgaatccggccagcctcagagtgaacgcgcagcggcagtcattgccgggctgggaggcaaagagaatctggaagaggtggactgttgcgccacgcgcctgcgcgtgacggttaaagagagcagtaaggtagatgaagctgcgctgaaagtgaccggagcgcgtggcgtgattattcgcggcaacggcgttcaggtgatttatggccctcatgtcaccatcattaaaaacgaagtcgaagagattttatcgtaa

SEQ ID NO: 5943 - DNA, 690 bp, Escherichia coli
atgaaaactgtactggattccctgaaaggtaaattaatcgtctcctgtcaggctctggaaaatgagcctctacatagtccgtttattatgtcacgtatggcgctggcggcagcacaaggtggtgctgcaggtatccgtgccaacagcgtggcggatattagtgctatcaaagagattgtctcccttccgatgatagggattatcaaacgcgattaccctggcagtgaggtgtttatcacggccactctccgggaagtggatgagttgatgaccgttgagccggaaattattgccctggatgctactgcgcgcccgcgccctggtggtcagacgctggaagaactggtcacgcagatccgcgctcgctacccgtccgtacttctgatggcagatatagcaacagtagaagaggcggtgacagctgaacgtctgggttttgactgtgtgggcactacgctctacggctataccgcagaaactgccaggcatgtgctggcggaaaatgactgtggattcttacgtgaggtcctggcagcggtcagcgttccggttgtggcggaagggaacgtcgataccccggaacgtgccgcacgttgcctgacattaggcgctcataccgtggtggttgggggggcaatcactcgtccgcagcagataacgacacgctttatcgcggcgatcgcctcgtaa

SEQ ID NO: 5944 - DNA, 294 bp, Escherichia coli
atgattgcggcaattgtcgatgaactggcacctgaactgattaaacgtaatgctgttggatacgaaagcgcttcgcagttgctcatcactgccggagataatccccaacggctaagaatagaatcaggttttgcggtgctgtgtggtgtcaactcggttaccgtatcttctaaaaaaatgaaccgttaccgacttaatcggggtggggagcgtgctgcaaatagtgcacttcacatcatcgctatcggacgtttacgaactgacgataaaacaaaggaatatgtcgctaaatag

SEQ ID NO: 5945 - DNA, 1317 bp, Escherichia coli
atgaacgataaaaacatcattcagatgcctgatgggtatctgaataagactcccttgttccagtttattttgttatcgtgtttattcccgctatggggatgcgcagctgcattaaatgacatattaatcactcaattcaaaagtgtattttcgctaagtaactttgcttcagcattggtgcagagcgcattttatggaggttattttttaattgcaataccagcatcccttgtgattaaaaagaccagttataaggtggcaattttaattggcctgacgctgtatattggtggttgtacactttttttccctgcctcgcatatggcaacctacactatgttccttgcagctatttttgcgattgcgattggcctgagtttccttgaaactgcagcgaacacatacagttcaatgatcggtccaaaagcctatgccacattgcggctcaatatcagccagaccttttatccgattggtgctgcgtctggtattttattgggcaaatatctggttttctccgagggggaaagccttgagaagcagatgtccggaatgaacgccgagcaaattcacaactttaaggtgctgatgttagagaacacccttgaaccgtataagtatatgattatgattctggttgtggtcatggtgttgttccttttaacccgcttcccaacctgtaaagtggcacagacaagtcactataaacgcccgtcagcaatggatacgctgcgctatctggctagaaatccgcgctttcgtcgcggtattgtggcgcagttcctttatgtgggtatgcaggtcgcagtatggtcatttaccatccgtctggcgctggagttgggcgatatcaacgaacgtgatgcttcaaacttcatggtctatagctttgcctgcttctttattggcaagtttatagccaacatccttatgacgcgttttaatccggaaaaagtattgattctctattccgttataggggcgctgttcctggcatatgttgcactggctccaagtttcagcgcggtctatgtcgccgtcctggtaagtgttttgtttggcccttgctgggcgacgatctatgcaggaacactggatacagttgataacgaacatacagaaatggcaggagcagtcattgttatggctattgtcggtgccgcggtggttccggcaattcagggatatattgcagatatgttccactcactacagctttcattcctggtttctatgctctgctttgtctatgtcggagtctacttctggcgtgaaagcaaagtacgtaccgcactggctgaagtcacagcgtcctga

SEQ ID NO: 5946 - DNA, 468 bp, Escherichia coli
gtgctgcaagcggatgcgtacgccgggttcaacgagctgtatcgcaatggtgggataacggaagctgcctgctgggctcatgcccgccgaaagatccacgatgtgcacgtccgcatcccgtcagcactgacggaagaagccctagagcagatcggtcagttgtacgccatagaggcggatataaggggaatgccggcagagcagcggcttgctgaacgtcagcgaaaaacgaaaccgctgttgaaatccctggaaagctggttgcgtgaaaagatgaagaccctgttcttcggctctggccatggtggtgagcggggagcgctactgtacagcctgatcgggacgtgcaaactgaatgacgtggatccagaaagctaccttcgccatgtgcttggcgtcatagcagactggccggtcaaccgggtcagcgaactgcttccgtggcgcatagcactgccagctgaataa

SEQ ID NO: 5947 - DNA, 1182 bp, Escherichia coli
atgctgatggcgatggagccgatatgggagagtgattttcatacgctctcatatggcttccggcctgagcgcagtgtccaccacgctatccgcacggtgaaattacagctcacagactgtggtgaaacccggggacgctgggtgattgaaggcgacctgtccagttacttcgacaccgtacatcatcgactgctgatgaaggctgtacgccgcaggatcagtgacgcacgtttcatgactctgctgtggaaaaccatcaaggcgggacatatcgatgtcggtctctttcgggcggccagtgaaggtgtgccacagggcggtgttatatcgccgctattatcgaacatcatgctgaatgagttcgatcaatacctgcatgagcgctacctgagcgggaaagccagaaaagatcggtggtactggaataacagtatccaacggggccgaagtacggcggtcagagaaaactggcagtggaaacccgcggtggcgtactgccgctatgccgatgattttgtcctcatcgtcaaaggcaccaaagcacaggcggaagccatcagggaggagtgtcggggtgtgctcgaaggcagtctgaaactcaggctgaacatggataagactaaaatcacccatgttaatgacggctttatctttctggggcacaggatcattcgcaaacgcagtcgttatggcgagatgcgagtggtctcaacgatcccgcaggagaaagccagaaacttcgccgcatcgctgacagcactgttatcaggcaactacagtgaaagcaaagtcgatatggctgaacaactcaaccgaaaactgaaaggctgggccatgttctatcagttcgttgattttaaggccaaagtcttcagttatatcgaccgtgtcgtgttctggaagctggctcactggctggcccgcaaataccgtacaggtatcgcttccctgatgaggtggtggtgtaaatcaccgaaaccgggtcagagcaaaacgtgggttttatttggtaaaaccaatcacggcaagctcagcggcgaaatactgtaccggttggtggggcaaggcaagaagctgttccgctggcggctacccgaaggtaatccctatctgaggacggagaccagaaacacgtatacatcgcgctttacagaagtggcaatggcgttcgccagcatttaa

SEQ ID NO: 5948 - DNA, 354 bp, Escherichia coli
atgaaagcactggaaatggcatgggaaacccgtggtaagcccgtcggggtgatgttccacagcgatcaaggcagtcattatacgagcaggcagttccggcagttactgtggagataccggatcaggcagagtatgagtcggcgtggaaactgctgggataacagcccaatggagcgcttcttcaggagtctgaagaacgaatgggtgccggcgacgggctatgtaagcttcagcgatgcagctcacgcaataacggactatatcgttggatattacagcgcactaagaccgcacgaatataatggtgggttaccaccaaacgaatcggaaaatcgatactggaaaaaactctaa

SEQ ID NO: 5949 - DNA, 702 bp, Escherichia coli
atgagacgaacatttacagcagaggaaaaagcctctgtttttgaactatggaagaacggaacaggcttcagtgaaatagcgaatatcctgggttcaaaacccggaacgatcttcactatgttaagggatactggcggcataaaaccccatgagcgtaagcgggctgtagctcacctgacactgtctgagcgcgaggagatacgagctggtttgtcagccaaaatgagcattcgtgcgatagctactgcgctgaatcgcagtccttcgacgatctcacgtgaagttcagcgtaatcggggcagacgctattacaaagctgttgatgctaataaccgagccaacagaatggcgaaaaggccaaaaccgtgcttactggatcaaaatttaccattgcgaaagcttgttctggaaaagctggagatgaaatggtctccagagcaaatatcaggatggttaaggcgaacaaaaccacgtcaaaaaacgctgcgaatatcacctgagacaatttataaaacgctgtactttcgtagccgtgaagcgctacacctgaagtggtcaacaaaaactggccaccgagttagagttttttccagtatcgattttccgattcgtttggtggtaacccaccattatattcgtgcggtcttagtgcgctgtaatatccaacgatatagtccgttattgcgtgagctgcatcgctga

SEQ ID NO: 5950 - DNA, 369 bp, Escherichia coli
atgagcagaaaaacccaacgttactctaaagagttcaaagccgaagctgtcagaacggttcttgaaaatcaactttcgatcagtgaaggcgcttcccgattatctcttcctgaaggcactttaggacaatgggttaccgccgccagaaaagggctcggtactcctggttcccgcacggtggctgaactggaatctgaaattctgcaactgcgtaaggcgttaaatgaagctcgccttgagcgagatatattaaaaaaagcaactgtagattcaattggtcaacgcaacagttatgtgaaaacatggggttgcggaggttttttgaatgagacgaacatttacagcagaggaaaaagcctctgtttttga

SEQ ID NO: 5951 - DNA, 174 bp, Escherichia coli
atgtattaccctgtgacagactatatcgctcttgctctcattattagctttctttttctgacattatttatctgcctgttatgccttaaacatgagcgaataaaaaaagaaactatcaggcaaaaaaatgcacatattctggatcatggctggaatgcaactgaggtagcctga

SEQ ID NO: 5952 - DNA, 3888 bp, Escherichia coli
atgaataaaatatactcccttaaatatagtgctgccactggcggactcattactgtttctgaattagcgaaaagagtttctggtaaaacaaaccgaaaacttgtagcaacaatgttgtctctggctgttgccggtacagtaaatgcagcaaatattgatatatcaaatgtatgggcgagagactatcttgatcttgcacaaaataaaggtattttccagcccggagcaacagacgtaacaatcactttaaaaaacggagataaattctctttccataatctctcaattccggatttttctggtgcagcagcgagtggcgcagctaccgcaataggaggttcttatagtgttactgttgcacataacaaaaagaaccctcaggccgcagaaactcaggtttacgctcagtcttcttacaaggttgttgacagaagaaattccaatgattttgagattcagaggttaaataaatttgttgtggaaacagtaggtgccaccccggcagagaccaaccctacaacatattctgatgcattagaacgctacggtatagtcacttctgacggttcaaaaaaaatcataggttttcgtgctggctctggaggaacatcatttattaatggtgaatccaaaatctcaacaaattcagcatatagccatgatctgttaagtgctagtctatttgaggtcacccaatgggactcatacggcatgatgatttataaaaatgataaaacatttcgtaatcttgaaatattcggagacagcggctctggagcatacttatatgataacaaactagaaaaatgggtattagtcggaacaacccatggtattgccagcgttaatggtgaccaactgacatggataacaaaatacaatgataaactggttagtgagttaaaagatacctatagtcataaaataaatctgaatggcaataatgtaaccataaaaaacacagatataacattacaccaaaacaatgcagataccactggtactcaagaaaaaataactaaagacaaagatattgtgttcacaaatgggggaaatgtcctgtttaaggataatttggattttggtagcggtggtattatctttgacgaaggccatgaatataacataaacggtcagggatttacatttaaaggagcaggaattgatatcggaaaagaaagcattgtaaactggaatgcattgtattccagtgatgatgttttacacaaaataggccccggtactctgaatgttcaaaaaaaacagggggcaaatataaagataggtgaaggaaatgttattcttaatgaagaaggaacatttaacaatatataccttgcaagcggaaatggtaaggtaatactaaataaagataattcccttggcaatgatcaatatgcggggatattttttactaaacgtggtggcacgctagatttaaatggacacaatcagacttttactagaattgccgccactgacgatggaacaacaataactaactcagatacaacgaaagaagccgttctggcaatcaataacgaagactcctacatatatcatgggaacataaatggcaatataaaactaacgcacaatattaattctcaggataagaaaactaatgcaaaattaattctggatggtagtgtcaacacaaaaaatgatgttgaagtcagtaatgccagtcttaccatgcaaggccatgcaacagagcatgcaatattcagaagcacagcgaatcattgctccctggtatttctttgtggaacggactgggtcaccgttttgaaagaaacagagagttcatataataaaaagttcaattctgatcacaaaagtaataatcagcagacctcatttgatcagccagactggaaaaccggggtgtttaaatttgatacattacacctgaacaatgctgacttttcaatatcacgcaatgccaatgttgaaggaaatatatcagcaaataaatcagctatcacaatcggcgataaaaatgcttacattgataatcttgcagggaaaaatattactaataatggttttgacttcaaacaaactatcagtactaatctatccataggagaaactaaatttacaggtggcatcactgcacataacagccaaatagccataggtgatcaagctgtagttacacttaatggtgcaacctttctgaataatactcctataagtatagataaaggagcaaaagttatagcacaaaattccatgttcacaacaaaaggtattgatatctccggtgagctgactatgatgggaatccctgaacagaatagtaaaactgtaacgccgggtctccactacgctgctgatggattcaggctgagtggtggaaatgcaaatttcattgccagaaatatggcatctgtcaccggaaatatttatgctgatgatgcagcaaccattactctgggacagcctgaaactgaaacaccgactatatcgtctgcttatcaggcatgggcagagactcttttgtatggctttgataccgcctatcgaggcgcaataacagcccccaaagctacagttagcatgaataatgcgatctggcatctaaatagccagtcatcaattaatcgtctagaaacaaaagacagtatggtgcgttttactggtgataatgggaagtttacaacccttacagtggacaaccttactatagatgacagtgcatttgtgctgcgtgcaaatctggcccaagcagatcagcttgttgtcaataaatcgttgtctggtaaaaacaaccttctgttagtcgacttcattgagaaaaatggaaacagcaacggactgaatatcgatctggtcagcgcaccaaaaggaactgcagtagatgtctttaaagctacgactcggagtattggcttcagtgatgtaacaccggttatcgagcaaaagaacgatacagacaaagcaacatggactctgatcggctataaatctgtggccaacgccgatgcggctaaaaaggcaacattactgatgtcaggcggctataaagccttccttgctgaggtcaacaaccttaacaaacgtatgggtgatctgcgtgacattaacggtgagtccggtgcatgggcccgaatcatgagcggaaccgggtctgccggcggtggattcagtgacaactacacccacgttcaggtcggtgcggataacaaacatgaactcgatggccttgacctcttcaccggggtgaccatgacctataccgacagccatgcaggcagtgatgccttcagtggtgaaacgaagtctgtgggtgccggtctctatgcctctgccatgtttgagtccggagcatatatcgacctcatcggtaagtacgttcaccatgacaacgagtataccacaactttcgccggccttggcaccagagactacagctcccactcctggtatgccggtgcggaagtcggttaccgttaccatgtaactgactctgcatggattgagccgcaggcggaacttgtttacggtgctgtatccgggaaacagttctcctggaaggaccagggaatgaacctcaccatgaaggataaggactttaatccgctgattgggcgtaccggtgttgatgtgggtaaatccttctcgggtaaggactggaaagtcacagcccgcgccggccttggctaccagtttgacctgtttgccaacggtgaaaccgtactgcgtgatgcgtccggtgagaaacgtatcaaaggtgaaaaagacggtcgtatgctcatgaatgttggtctcaacgctgaaattcgcgataatcttcgcttcggtcttgagtttgagaaatcggcatttggtaaatacaacgtggataacgcgatcaacgccaacttccgttactctttctga

SEQ ID NO: 5953 - DNA, 1725 bp, Escherichia coli
atgaccctgccctctgaaaaaccagccacagatgtggctgcgcagtgcttcctgaatgcactgattcgtgaaaccacagactggaaactgacagaatacccgccagacgaattgctcatcccgctggatgagcagaaatcgctccatttcagagtggcttatttctccccaacccagcatcaccgctttgcatttcctgcacgtctggtcacggcatcaggcagttatcctgtcgactttaccactctctcccggcttattattgataagctacgccatcaactgtttctgcccgttcccctctgcgaaactttccaccagcgcgtgctggaaagccatgtccatacgcaacaggcaattgatgcccgtcatgactgggccgctctgcgtgaaaaagcgttgaattttggcgaggctgagcaggcgctgctgacaggacacgctttccaccctgcgcctaagtctcatgaaccgtttaaccggcgggaggctgaacgctacctgcctgatatggcaccccacttcccactgcggtggttttcggtggataaaacgcaaatcgccggtgaaagtttgcatctcaaccttcaacagcggctgacgcgatttgccgcagagaatgcgcctcagttactcaacgaattaagtgacaaccaatggctgttcccgttgcacccgtggcagggggaatatcttttgcagcaggggtggtgccaggcacttgttgctaaagggctgattaaagacttaggtgaggccggcacgtcgtggctgccgaccacctcttcccgttccctctactgtgccaccagccgcgatatgatcaagttctccctgagcgtacggctgaccaactccatccgtactctgtccgtgaaagaagtgaagcgtgggatgcgcctggcacgcctggctcaaaccgacggctggcagatgctacaggtccgcttcccgactttccgggtaatgcaggaggatggctgggccgggctgcgcgatcttaacggcaacatcatgcaggaaagtctgtttgccctgcgtgaaaatctgctggtggatcagccgaaaagccagactaacgtactggtctccctgactcaggccgcacctgatggcggtgattcgctgctggtttcggcggtaaaacgcctgagcgatcgcctcggtatcactgtgcaacaggccgcccatgcatgggtcgatgcatactgtcagcaagtgctaaagccgctgtttacggctgaagcggattacggcctggtgctgctggcgcatcagcaaaatattcttgtccagatgcttggggatctgccggtcggatttatttaccgtgactgtcagggcagcgcttttatgcctcacgcgacagactggctcgattctattggcgaggcgcaggcggaaaatattttcacccatgagcagttgctgcgctatttcccttattacctgctggttaactccacttttgctgtgaccgctgcgctgggggctgccgggctggacagcgaatcgaatctgatggctcgtgtacgagcatcgctggctgaagtgcgtgatcaggtgactcataaaacctgtctcaactacgtgctggaaagtccgtactggaacgtaaaaggtaactttttctgttatctgaacgatcataacgagaacaccattgttgacccttcggtgatctatttcgatttcgctaacccgctgcaggctcaggaggtctga

SEQ ID NO: 5954 - DNA, 1194 bp, Escherichia coli
atgtcaccagggatcgaagatacgccccaaaaaccactgtcctgctggccacttgcgttcagtgccgggcttctcggtatcggacagaacggtctgctggttgtgctccctgttctggtcatacagacaaatctgagtctgtctgtatgggctgccctgctgatgcttggctcaatgctgtttctgccatcgtccccgtgctggggaaagcaaatttcccgtactggcagtaaacctgtggtgttgtgggctctgggaggatatggcataagctttaccctgctagggctgggaagcgtgctgatggctaccagcgccataacaacagcggtgggactgggaatattaatcatcgcccggatcgcctacgggctgaccgtgtcggcaatggtgccagcctgtcaggtctgggcattgcagagagctggagaagggaatcgcatggccgctctggcaaccatcagctccggcctgagttgcggcaggctattcgggccgctgtgcgcggcagcaatgctggccattcatcctctggcgccactggggctgctgatggcagccccagtgctggcgctgctgatgctgctgcggttgcccggcacaccaccacagcccacaccggagtgcaagagcgtcagtctgaagcgggattgtctgccttatctgctttgcgcaatattactggctgcggcggtgagcatgatgcagcttggactttcgcctgcccttactcgccagttcgccacggataccaccgccattagccaacaggtggcctggctgttgggtctgtccgcagtagctgcgcttatcgcgcagttcggggtactccgtccgcagcgcctgactccggtggccctgctcctgagtgccggagtgttgatgagtggtggtctggctatcatgctctccgaacagctatggttgttttacccgggctgtgcagtgctgtcatttggagcagctctggcaacacccgcttatcaacttctactgaatgataagctggctgatggcgcaggcgcgggctggctcgctaccagtcacacacttggctatggactgtgcgctttgctggtgccgctggtatcgaaaacaggtgtcgcaatcgcgctgattatggcagcattatttgcaactatattatttaccattgtgtctgtatttatctggcattaccgtactatcaaataa

SEQ ID NO: 5955 - DNA, 381 bp, Escherichia coli
atgctgggagcggtggaacgccgcttcggcaacgagcttccggcgtctccagtagagtggctgacggataatggttcatgctaccgggctaatgaaacacggcagtttgcccggatgttggggcttgaaccgaaaaacacggcggtgcggagtccggagagtaacggcatagcagagagcttcgtgaaaacgataaagcgtgactacataagtatcatacccaaaccagacgggttaacggcagcaaagaaccttgcagaggcgttcgagcattataacgaatggcatccgcatagtgcgttgggttatcgctcgccacgggaatatctgcggcagcgggcctgtaatgggttaagtgataacagatgtctggaaatatag

SEQ ID NO: 5956 - DNA, 819 bp, Escherichia coli
atggctccggcgatggcaatactggatggcgcacagtcacagatgaagtcgctgtccactgatgcgcagacggcgaatgccgatccggcagatctgtcatcacagatagcgctgttgcagcagagtgtaaaagatctgacgcaggctgcgatcctgctaagcgcacccaaaggcgtggcgatcgccagcggagagcacctgcaactggcggcgtcgaaaaacctgatcgcgaacgcaggaaatcacgctgatatcggtgtcgtgaagaatatgtttatcggcgtgggtcaggcgctgagcgtgtttgtacgcaaagcgggtatcaaactgtttgccaataaaggggcgatctcggtacaggcacagaacgatctgatggaactgttggcgcagaaatcgatagagatcaccagtacggaagatgagattaaaatcaccgcgaagaagaaaatcacccttaacggcggtggcagctacatccggctggatgcctgtgggatagaggccggtacgccgggagaatataacgttaaggcgggatattacgggcgtaagccgaaggcgaagctgacgccggagctgatggcatttccggtgattaagtctgaggattttaatcagagctttattttgctggatgaaaatactgggcaaccacttattaattggccctatgaactagaactggaaagtgggctaaaaatgagtgggattactgatgaaaatggaaatacagaactaatatcctctgataaggaggaggtcgttaatattagtgtgtttgaacccgatgagtttttagacgatgaaattaattaa

SEQ ID NO: 5957 - DNA, 639 bp, Escherichia coli
atgaaattaattaagacatatagcgagaatataacatggcagataaatccgaaaagaaaaaagaaaccacaaataaatcagcaaaaaaaaacactaacgaagaagagcgaaaaattaactccagcaaaagacaccgcaccaaaacaagtgaatgtagatccagctataagattgaaacaaattcgtcaacttgtccgtaataataataaatccatcatgggagaggattatattatttgtcaaatctataaagaatctagatttaagcaatttgcaggtaagaataaacataatgcgaaaggcttaatgcaaatgcaacgaaatgcagtgaggcaggtttttaaatatcgacaacaaaaaataaaaggaagaatgactactgataaagagacaaatgaagctttcgctaatgctgatacattttataaatctgataaaatatttgatgaaaaagaaaatattaagattggcacagagtatttgcaatactggatagataaagaagcaacaattgaggaggcatatcggacatatcgtggaacagatgaagcatactattctgttataaaaccttgcgctgaaaaactggctaaagatcctgataacatacaaatactaatggagggaataggaagatag

SEQ ID NO: 5958 - DNA, 483 bp, Escherichia coli
gtgaaaacctgtcaattgaaaaaaaatgaaagtgtgcagttgctttcccttagaaccattgacggtgatacattatatctaaaattcagaaatgttatcaccggggcctttttagatactccaactaaaagttatgatttttttggagatgtggttctttctcagtgcataaatggttctcttatctttgcgctggaatatggttctccatatataaaaggttgtctggtaactggttgggaaaatgggtttaaaggtaagaactctcctgaaggcttttgtttcgcagagagaaatattcccgaagcggtatggtttggaaaaaacaatattttaattatcatccgaaaccaaatggatgttgggacatggaaagggaaatatattatctatgataatgcgaaaaagtcaggagaaagagcatactcatcagataatctaccatcaaaagatggttacataatttttgcattaaataaataa

SEQ ID NO: 5959 - DNA, 1215 bp, Escherichia coli
atgccagtccgacttaataccattcccgacgcagaaccctatcccgtaccgccagcccgaattaagtggctgacagctttattactgatgctgtctgtcggtgtggccctgacttcattattcgccagcgatgaactggcaaaaaacggcccgtatttctgggggctggcctgtggtgtgcctgcctttatctggtcactggttgcttcagttcgctggctgttttttatcacgcagtacattcggactgatgcctggaataagcgccgggaagaggtgattttgcaggaaacgcgccggggacgacgggcgttgcagatactcagtttttccgtacaaaccgcgctgaatggtgattccgttgcagaaactataacagcatttctggcacgtcagcaggtgttgaatacctacgctgacttgcgcggagaagatactgtgcgtcgcagcgtcatccctgtattaaccaataaaccggttaccggacgtctatccgaagttttttcccgtctgttcagcgatatcaggctgcaactgacgcggctacccgatgattttcatatcaacgtactactggaaattgatgcgccgctttcaggggcctccgtgagaactatctggcaggacgaatggcaaaaagccggactcccggaagcccgtctgttttcagccccggagccggggctggccgccgtggacgactggctggacaaccacattcaggaaaaggccgtactgctggtgatttccgtgcgtctggaaccgaagaacccggaacggacggcagaatccgccaccgcgctgttgctggcaaaccggttgacgcaaaccgcgctgacgccgctggccctgctgcatcgtcctgaatgtatcactgatacagagatgatggcgtcaggcattgcacaggcgctggactggatgccggtgcagccagatgccatatccggtatgtggactgccgaactggacagggaacagcgtgccgcgttgttaagcctgaaccagccgtttgctcaggaagccctgatgtacgagctggatgcctttctggggcgctccggaccggctgcgccgtggctgtccgtcgctgtggcaacgctggcggcaatacaatcacaacacccccaactgacgctcagcggcgttcagggcgggcattattcatgggcgaccgtggtgtcgccattcgtttcccctcaggaggcatcatag

SEQ ID NO: 5960 - DNA, 423 bp, Escherichia coli
atgactagagtagttattgctttattatttcttgccggatgtacttcgcaaatgaagtattccaatgtcgtcaggattaggaatgtatgttcctcagatattaatgtgtttattcctgagtatgtttttggaggtaatgttattaagcaacatcatatttacttacctgttaatgggattgatgttttgtcttatttttatactgaaaacatcaatgatggtttccaatatgaagaagcattcaccgtaaataaagatagctcgggtaattttgactatccgtttgttatcttatcatcaggacgtgaaaaaaaatttgggaaaaacgatctaattgaattatccagggacatttcaacaaaagacgataagaagcatggggttgtaaagtacatgatagatagtcagaatatttgcccatag

SEQ ID NO: 5961 - DNA, 1761 bp, Escherichia coli
atggacgacctgacccaacgctactttgaggccgaaatgcgctacctgcgtgaagcggggaaagaatttgcgcaggcttaccccgaccgcgctgcgatgcttaatcttgataaacccggcgcacgcgatccctatgtggagcgcctgttcgagggcttcgcttttttaatgggccgcctgcgcgaaaagctggacgacgatctgccggaactgactgaagggctggtcagcctgctgtggccgcactacctgcgcactattccgtcgctttccgtggtcgaactgaccacggatcaccaacaaatgaagcaaagtgatacgctgaaagagtttcaggtgctatcccgtcccatcggcgaacgcagaacccgctgcgtctacagcgccacgcgggatatcacgctgcatccgctggcgttgccggacgtgtcattgcaatatgaaccggacggacgctcggttatccgtctgcgctttgaatgcggcccgctggttggtgactggtcacagattgatttatcccgcctgccgctgtacctcagtgccgacagcccggtggcctgtgcgctgcaccgggctttaacgcttggtacgcagcagttctggctgcgtctgccagggcagggacgccgtgtgctggacgcgcacttttccccgatgggttttgatgacgatgaccgactgtggccgaaaggcgaatcggcgttcagcggctaccagttgctgctggagtatttcaccttccgcgagaagtttatgttcgtggcgctgaacgggctggagcaggttgcatggccggaggggataaccggctttgagattgacgtgttgctgaacgagaactggcctcacgacctgccgtttgacagcgataatatccgtctgcactgcgtgccggtcatcaacctgtttccgctggaagccgatccgttacacctttcgccactggaaaacgaatttctgctgcgcccgatgcgcattcaggacgggcataccgagatttattccgtcgacaacattatttcttcgcgccataccggcagtcaggcgtatgtgccattctccagctttcgtcaccggggcgggatgctgcgccacgatgcgccggaacgctattaccacacgcgggtaaagcgcggcccttccggcctgcatgacacctggctgattctgggcggcgatgcgtttgatactgaccggatgctggaggatgaaaccctgtccttaagcctgaccggtactaacgggcagcttccccgtaaagctttacagagcacgctgctcgatacgccagttcatgcctcacagaacgtcctgcgagtgcgcaacctgtgcgccccgacgcagccctgctatcccccggcgcgtgaccgcttccactggcgggtgctcagccaccttggttctaactttttatcgatgatggataacgccgaaattctgcgcggcacgctggcgctgtacgactggaccgaaagcgagatgaaccgccgtcgtctggcggcgattgtcgacgttcagcacagcctgatacagcgttttgaaagaggctttctgctgcgtggcgtggatattcaggtgacgctggacagtaacggctttgccggagaaggtgatatcacgctgtttggtgaactgctgcaccgcttcttcgcactgtatgccgatatccacttattcactcaactaaccttaattctgcaacccacaggaaagtgcctgcaatggacagagcatcacagccagcgcgtaccgggctga

SEQ ID NO: 5962 - DNA, 537 bp, Escherichia coli
atgtttcctattcgttttaaacgtccggcgctgctctgtatggcgatgctgacggttgttctgagcggctgcgggctgattcagaaagtggtggatgaatcgaaaagcgtggcctcagccgttttctacaagcaaatcaaaatactgcatctcgatttcttctcccgaagtgccctgaatacggatgcggaagatacgccgctttccacgatggtgcatgtctggcaactgaaaacccgcgaagattttgacaaggcggattatgacaccctgtttatgcaggaagagaagacgctggagaagaacgtactggcaaaacacaccgtctgggtaaaaccggaaggcacggcatccctgaatgtgccgctggataaagagacgcagtttgtcgccattattgggcagttttatcaccctgatgaaaaaagcgacagctggcgtctggtgatcaaaagggacgaactggaggccgacaagccgcgctcgattgaactgatgagaagcgacctgcgactgctgcctctcaaggataaataa

SEQ ID NO: 5963 - DNA, 327 bp, Escherichia coli
atgactaaaaatactcgtttttcccccgaagtccgtcaacgggcagtccgtatggttctggaaagtcagagcgaatatgactcacaatgggcgacaatttgttccattgctccaaagattggctgtacgccggagactctgcgtgtctgggttcgccagcatgagcgggataccgggggcggtgatggggggctcaccaccgctgaacgtcagcgtctgaaagagctggaacgtgaaaatcgtgaactgcgccgcagtaacgatatccttcgccaggcttccgcttattttgcgaaggcggagttcgaccgcctctggaaaaaatga

SEQ ID NO: 5964 - DNA, 888 bp, Escherichia coli
atgccactgctggataagctgcgtgagcagtacggggtcggaccgctatgcagcgaactgcatattgccccgtcaacgtattaccactgtcagcaacagcgacatcatccggataaacgcagtgcccgtgcgcagcgcgatgactggctgaagaaagagatacagcgcgtatacgatgaaaatcacaaggtatacggtgtgcgtaaagtctggcgtcagttgttacgggaaggtatcagagtggccagatgcactgtggcacgtctcatggcggttatgggacttgccggtgttctccggggtaaaaaggtccgtacgaccatcagccggaaagccgttgccgcaggcgaccgcgtaaaccgtcagttcgtggcagaacgacctgaccagctgtgggtggctgattttacttacgtcagcacatggcggggcttcgtctatgtggcgttcatcattgatgtgtttgccggatacatcgtggggtggcgggtctcatcgtccatggaaacgacattcgtgctggatgcactggagcaggcgttatgggcccgtcgaccgtccggcacggtccatcacagtgataaaggttctcagtatgtatcgctggcctacacacagcggcttaaggaagccggattactggcatcaacaggaagtacaggcgactcgtatgacaacgcgatggcggagagcatcaatggtctttacaaagcggaggtaatacaccgtaagagctggaaaaaccgtgcagaagtggaactggccacactcacgtgggtggactggtataacaatcgacgattgctggaaaggctgggccatactcctccggcagaagcagaaaaagcttattatgcttccatcggaaacgatgatctggcagcctga

SEQ ID NO: 5965 - DNA, 1458 bp, Escherichia coli
atgaatatccgtaccgggtgtggtatactcctctgtatggatatctccgctctcaacaccacgaatgacatcgaaaaactgcgtgctatggcacttgccatggtacaaaaagtcatgtcggagaatgccgaaaaagagcgggaattactggagaaaagccggcgcatccagcttctggaagaaatgctgaaactggttcgtcaacagcgttttggtaaaaaatgcgaatcgctggccgggatgcagcgttccttgttcgaagaggacgtggacgcggatatcgcagaaatctcagcaaatctggacaaactgcttcctcagaccggggacgaagacagaacaacaacacgtcctgttcgtaagcccttgccttcacatcttccccgtgctgaaaaggttatcccgccagctgaggaacgttgtcctgactgtgatgcccccctgcacttcattcgcgatgaagtcagcgagaagctggaatatattccggcacaggtcgtggtcaaccgctatatccgcccgcagtacagctgtccctgctgtgagaaagtgttcagcggaaaaatgccggcacatatctttccgaaaagtgccgttgagccatcggtcatcgcacaggtggtcatcagtaaatatactgaccatcttcccctgtatcgtcagcagcacattttctcccggatgggtgtggagcttcccgtcagtacaatggcggatatggtcggtgttgctggcgctgcactggccccgcttgcaaaattgttacgccacgagcttctgacacgggatgttattcatgcagatgaaacgtccctgaggctccctgatacccggaaaggcggtaaatcctgctccggctggctgtgggcttacgtcagcggagaaagaagcggtccgtcggttgtctgttttgactcgcagaccggacgggccctcagatatcctgaggcctggctgcagggctggcgtggtggcacgctggtgagtgacggatacagcgtgtacaaatctctggcggataatgaccccggtattacatctgcctgttgctggagccacgcaaggcgcggtttcgcaaatctgtataaggccagcagggagccccgtgcagccatggcgctgagaaaaattgcgggtctttatcgcattgagaaattcatccgtgaacgtcctgtggaaaaaatacggcaatggcgacaacggtactcccggccgatagtgaatgacctgtttgcctggctcaaagagcaggagccgtgctgtccgcccgacgggccactaaacaaagcgattaactatatcctgaaccggcgcgatgaactgagctgcttcctgggggacggagccgtgcccctggacaacaatatctgcgagcgtgccatccgtccggtcgtcatgggacggaaatcgtggttgtttgaaccgccccgggtttcctggagagtgttttatctgtga

SEQ ID NO: 5966 - DNA, 555 bp, Escherichia coli
atggacccgctttcatcccggtcagcgtatccggacttccggagagtcgggggacaactgcgactgcccccgctgacgaaccggtttcgttatatctgcccggtggtatccgactgtgctgccgggcagcgcaactggctgatgtattcagggcgcttcgccatgctgacacctgataacgtctggctggccgtgaaacccgtcgatatgcgtgccggtatcgacaccctgacacagtacgttcagaacgaacttaacgcagcatggcatgacggagctgcttttgtctttaccaacaaagcccgttcgcgtatcaaagttctccggtgggacagacatggcgtatggctgtgtacccgacgactgcaccggggaagcttccgctggccccggaaaggtgatgccacatggcatctcacaccggatgagtttcactggctcgtctgtggcgttgactggcaacaggtgaaagggcatgacctggcaaaatgggtctggcagaatgaatctgaactgcgccctggaaactcgcaaaatacactgctaacccaatga

SEQ ID NO: 5967 - DNA, 480 bp, Escherichia coli
atgaaaaaattagcgataatggccgccgccagcatgattttcactgtgggctccgcgcaagccacgttccaagcgagcgggacaacgggtattaccacactgactgtgaccgaagagtgccgggtgcaggtcggtaacgttaccgcgacgctcgcgcgaagcaagctaaaagacgacacggctataggggtgatcggggtaaccgctctaggatgcaacggcctgcagaccgcgttgcaggccgacccagacaactacgatgcgacaaatctatatatgactagccgcaaccatgacaaacttaatgtcaaactaaaagccacagatgggtccagttggacctacgggaacggcgtgttctacaaaaccgaaggcggtaactggggtgggcacgttgggatctccgtggacgggaaccaaactgataaaccgaccggtgaatacacactgaacctcaccgggggttactggacgaactaa

SEQ ID NO: 5968 - DNA, 174 bp, Escherichia coli
atgggtaatctgccagtgggaagtcgtggtttatataaaggtaaaaaacgcagcgccggtatgaatgaattacgtcatccgggaagcacacagatgacgcgcactggtcaggcgcatcgtggtggcgaacaccggctgaacacggggccaccggactggcagaccgtggaataa

SEQ ID NO: 5969 - DNA, 444 bp, Escherichia coli
atgaacgggagtataaggaagatgatgcgtgtcacctgcgggatgttactgatggtcatgagtggtgtgtcgcaggcggctgagctccacctggagagccggggaggttcaggaacgcagctgcgcaatggtgcgaagctggcgacggggcggattatctgccgggaggcgcacacgggttttcatgtgtggatgaatgagcgtcaggtggacggcagggcggagcgctatgtggtgcagagtaaggatggtcgtcatgagcttcgtgtcaggacaggaggagatggctggtcgccggtgaagggagaaggcgggaagggggtgtcgaggcccggtcaggaggagcaggttttttttgatgtgatggcggacggaaatcaggaaattgctcctggtgaataccggttttcggttggcggagcctgtgtggtgccacaggaataa

SEQ ID NO: 5970 - DNA, 2583 bp, Escherichia coli
atgcgtgatacttcttcagggcggatgagaacgggggtgacagggctggcgctggctgtgatggtggcctgtgtgatgtttcgtgcggagagtggtattgcgcgcacctactcctttgatgcggccatgctgaaaggtggcgggaagggggtggacctgaccctgtttgaggaaggtgggcagttacccggcatttatccggttgacattatcctgaatggttcccgtgtggattcacaggagatggcctttcacgcggagagggacgcggagggcaggccttatctgaagacctgtctgacccgtgagatgctggcgcgttacggggtcaggattgaggaatatccggcgttgttccgtgcatccggagagggtcgtggtgcctccgtggcggaggaggcctgtgctgacctgacggcgataccgcaggccacggagagttatcagtttgctgcccagcagctggttctgggtatccctcaggtggcactgcgtccgcagctgagggggattgcgccggaggcgttatgggatgatggcattccggcttttctgctgaactggcaggcgaatgcggggcgcagtgagtaccggggttacgggaagcgtgtcacggacagttactgggtcagtctgcagccgggaatcaacattggaccctggcgtgttaggaacctgaccacctggaacaggtcatccggtcagtcgggaaaatgggagagttcatacatacgtgctgagcgggggctgaacgggataaagagtcgcctgacgctgggtgaggattacacgccgtcagacatttttgacagtgtgcctttccggggtgcgatgatgagttctgatgagagcatggtgccttataacctgcgtgaatttgcgccggttgtacgtggcattgcccggacacaggcgcggatagaggtgcgtcagaacgggtatctgatacagagtcagacggtggcgccgggggcatttgccctgacggacctgccggtgacggggtccggcagtgacctgcaggtgacggtgctggaatcagacgggacggcgcaggttttcacggtgccgttcaccacgccggccattgcgctgcgtgaggggtacctgaagtacaacgtcacggcgggtcagtaccgttcatcggatgatgcggttgagcacacgtcgctgggacaggtgacggccatgtacggtctgccgtgggggctgacggtgtacggggggcttcagggagcggagcattaccagtctgcggctctggggcttggctggtcactggggcgtctgggggcggtgtcgctggacacgacgcactcccgggggcagcagaagggacatgattatgagaccggtgacacctggcgtatccgttataacaagtcgtttgagctgacggggacgagttttacggcagcgagttatcagtactcatcggatggttaccatacgctgccggacgtgctggacacctggcgtgatgaccggtacgcataccgtcacacggagaaccggagtcgccgtaccacgctgagtctgagtcagtccctgggtcagtggggctatgtgggactgaacggcagccgggatgagtaccgtgacagaccgcaccgtgattattttggcgcgtcatacagtacgtcctggaacaatatctcgctgtcggttaactggtcacgcaaccgcaacagcggcggctattacggtggctggtcgcgtacggaagacagtgtcagtatgtggatgagtgtgccgctgggacgctggtttggggggacggataacgacatcagtgccacggcgcagatgcagcgttccacgggacaggatacccggtatgaggccgggctgaacggacgggcatttgaccgccggctgtactgggatgtccgtgagcagatggtgccgggcagtgagagccatgctgacaccagtcgtctgaacctgacgtggtacgggacatatggtgaactgacggggatgtacagttacagcagcacgatgcgccagctgaacgccgggatgtccggcagcatggtggcccacagtgagggggtcacctttggtcagcggaccggggatacggtggcactgattgcggcaccgggcgtgagtggtgcgtctgtgggtggctggccgggtgtgagaacggatttccgggggtatacgctggccggttatgcgtcaccgtatcaggagaacgtgctgacactggacccgacgacgtttccggaggatgcggaagtgccgcagacggacagtcgtgtggtgccgacgaagggggcagtggtccgggccggattcaggacccgtgtgggtggtcgtgcgctggtgagtctggcccgtcaggacggaacgccgctgccgtttggtgcggtggtgacagttgagggcgaagcgggtcaggctgcgggctcagccggtgtggtgggagaccgtggtgaggtgtacctgagcgggctgaaggaaagcggtaagctgaaggcgcagtggggagagaacagtctgtgccatgcggattaccgtcttccggaagagaaggggcctgcggggatatttctgacccgtacggtgtgtatgtga

SEQ ID NO: 5971 - DNA, 798 bp, Escherichia coli
atgaaaatgcgggctgtggctgtgttcaccggcatgctgacgggagtgttatcagtgacaggtttgctgtcagcgggggcatatgccgccgggggagaagggaatatgtctgcatccgcgacggagacaaacgccagagtattctcgctgcatctgggggccacgcgggtggtttacaacccggcctcgtcgggggagacgctgacggtgattaatgaccaggactatccgatgctggtgcagtcggaggtgctgagtgaggaccagaagagtccggcgccttttgtggtgacaccaccgttgttccgtcttgatggtcagcagtcgagtcgtctgcgtattgtcaggacgggcggggagtttccgtcagaccgtgagagtctgcagtggatttgcgtgaaaggcattccgccgaaggaggatgacaggtgggcggaagggaaggacggggagaagaaggctgacaaagtctccctgaatgtacagctttcagtgagcagctgcatcaagctgtttgttcgtccgccggcggtgaaggggcgaccggatgatgtggccggcaaggtggagtggcagagggccggcaacaggctgaagggggttaacccgacgccgttttacatcaacctgtccacgctgacggtggggggtaaggaagtgaaggagcgtgaatatattgcgccgttttcctcccgtgaatatccgctgcctgcgggggcatcgggtaaggttcagtggaaggtgataacggattacggcgggaccagtaagcagtttgaggcagagctgaagggttga

SEQ ID NO: 5972 - DNA, 306 bp, Escherichia coli
atgagggagcgatatctgtatcttgctgacacccctcaggggatactgatgtccggtcaggtgccggaatatcagttctggttactggctgagatatcgccggtacacagtgagaaggttattaatgcgctgagggattatctggtaatgggatataaccgcatggaggcctgcgggcgtcatagtgtgtcgccgggatatttttctggtgcactgaagcggtttcagcgggtcagtcagacggtatacaggctggtgcctttttatttcccggaggcgggtcatgaagttcacaggggagagtga

SEQ ID NO: 5973 - DNA, 186 bp, Escherichia coli
atgttctttggcagcgatcacggcggcgagcgtggtgcactgctgtacgggctgatcggcacctgccgtctgaacggtatcgatccggaagcgtatctgcgccatattctgagcgtactgccggaatggccctccaaccgtgttgacgaactcctgccatggaacgtagttctcaccaataaataa

SEQ ID NO: 5974 - DNA, 1134 bp, Escherichia coli
atgcattcggaaaatattgcagcttacatcggactggatgtacataaagaaacgttggcggttgctattgctgcacctgaacggcttggcgaagttcgttattatggtacgattaacaacgaagcccaggctgtacgtcgattatttcagaaattgcagggactttacggaaacattctttcctgctatgaggctggcccctgtggttttgggctatatcatcaactcacagcgatgaatataaaatgccaggttattgccccttcccggataccaaaatcaccgacagacagaatcaaaaatgatcatcgggacgcaatttctcttgccaggttactgcgggctggtgaacttacccctgtctggatccctgacctgactcatgaagctatgcgggatctaatcagagcccgtgcagcagctaaacgagacagcagagttgcccgacagcgaattctgagcatgctattgcgaacagacaaacgttatgcagggaagcactggaccggcaaacatcgaacctggttagccaatcaatcatttagtcagccatctcaacagattgcttttcaacactattgtcagagtctggagcagattgaagatcgcatacttcaactcgaccaggaaatatcccgcctgttacctgagtggtctctgtgcaatctggtctgccagttacaggcccttaaaggtgttggtcagctaaccgcaataaccctggttgctgaactgggtgatttttcacgattttccagtcccaaacaactcatggcttttctgggactggttccaggggaatattccagtggaaacagcattcgtcccaggggaataacaaaagttggaaacagcgaactgagacgtctgctttacgaagccgcctggtcttatcgtacacctgcaaaagttggtgcatggcttatatattaccgaccggattctgtaacacaatattccaaagatattgcatggaaagctcaacaacgattgtgttctcgttaccgaagtctgacagcaaaagggaaaaaatcacaagtagccattacggcggtggctcgtgagttgactggatttatgtgggatattgcacttgctgcccaatcatcattcagtcagcagaagcaaaattaa

SEQ ID NO: 5975 - DNA, 327 bp, Escherichia coli
atgactaaaaatactcgtttttcccccgaagtccgtcagagggcgattcgtatggttctggaaagtcagggcgaatatgactcacagtgggcggcaatttgttccattgccccaaagattggctgtacaccggagactctgcgtgtctgggtacgccagcatgagcgggataccggaggcggtgatggcgggctcaccaccgctgaacgtcagcgtctgaaagagctggaacgtgaaaatcgtgaactgcgccgcagtaacgatatccttcgccaggcttccgcttattttgcgaaggcggagttcgaccgcctctggaaaaagtga

SEQ ID NO: 5976 - DNA, 510 bp, Escherichia coli
atgactcagagccgccgaccgtcgccactgcagcggagagtgctgattgtgctggctgcccttgatgaaaaacggccaggacccgtgctgacgcgggacatagaacgggtgctggagcaaagcggggaagccccggtctacgggccaaacctgcgcgcctcctgccgtcgtctggaggatgccggctggctgcgtaccctgcgcgctccgaacctgcagctggcagtggagctgacggacgccggccgggccgtggcacagcctctgctgcccgcaggcggcacttctgccactgatctggcggtggagctgaacggcataacgtatcaggcctgccgtggggattttgtggtgcgtctcgacggcagcacctgtctgcagttatggaataaagaaggcagggtggtacgccgggagggcgatccgctggaagtggcgcagtggctgcaggcctgtcacgatgcaggaatggaggttcgcgtacagataaatgaaagtgccgctccgtaa

SEQ ID NO: 5977 - DNA, 348 bp, Escherichia coli
gtgacttttgagcagaaaaaagcccgggccattgccctgatggacagcaaaaagatgtggcggagcaattatgcccctcctcttctgcgtattctctggcggctgggtatccggcttccgccattaccctttatgccgttctggcaggtcacggtgctgacggggggcttatggggcatttcctggggatgtgcaatgtggtttatctactgggggccgtcaggaatggtggcaggtgaggccattattataagtatcacgggggggtttttgtccggactgctcatggcctctttccactggtggcgcaggaaagttaaccggctgccaccatgggatgatgtgtaa

SEQ ID NO: 5978 - DNA, 291 bp, Escherichia coli
gtgaacggtcatgctcacctgctctacgcgctcaatatcgccgtgagaaccgcgccggacagctcggttaaggcgctgaaatacgccgctgcgattgaacgttcgctgtgtgagaaactttgtgctgatgtgaactacagcggactgatttgtaaaaatccgttccacctggaatggcaggtgatggagtggcgagaggaagcctataccctcgatgaactggctgattatctcgatttgagcgcctcagcgcgccgtagcatcgacgaaactgccacctgttcgaaatga

SEQ ID NO: 5979 - DNA, 261 bp, Escherichia coli
atgacgcgcaaatgggcttacagggcgattcgtcagggctggcccgaattctcacagtggcttgatgccgtgattcagcgtgtcgaaatgtacaacgcatcgcttcccgttccgctttcaccgcctgaatgtcgggctattggcaagagcattgcgaaatacacgcacaggaacttcacgccggaaactttcgcacagtatgtggctgatacgcacacattaacgtacgttttcgttccattggccctcaccccccgataa

SEQ ID NO: 5980 - DNA, 138 bp, Escherichia coli
atgggatttcattcctgcgccccgatgagttccgcgcctgatgtacatgtcgaagaaaacggccggcggggggaatacggcgcgctacctgggtcgttatcggggggtgagggccaatggaacgaaaacgtacgttaa

SEQ ID NO: 5981 - DNA, 876 bp, Escherichia coli
atgagaaagttcatccttatttctatgataacgttagctagtgttagtctgggagcctgcagacagaatgtcaccataaagcaggatgcgccagggcagaaagctttcctgactgacgggcagatttacgatttgcacagtggcaaaattatttctagcagcgagcttttggcggatcttgctaccgctcaacatcttattattggtgaaaaacacgataatgccgagcatcatcagattgagctttggcttattcaaaatttgctcatccagcgaccacaggggagtgtgttgcttgagatgttgacgtcagagcaacagccccgagttaaccaagttaaatgttggctgaaagataatcctgtggttcgagatagccgtgttcaggaactacttaactggcaaaaagggtggtcctgggagatgtatggcgacatcgtcatgcagctattacgtgggccttacccgctgctcaatgccaacattggccgggagcagatattggcactgtacaaaaaaaacgaatttcctaaaggaaaaaaatccactgcacctgtggtacaagaagctctgcgtgaaaccatcatatctatgcatgaaggcaaccttgaaagccagcaactgacgtcaatgctctctattcagcagcagcgggatcgctacatggcccgccagcttctgagtgccccggtaccgtcgttgttgattgcaggtggttatcacgcgtcaaaaagcatgggcgtaccgttacacatggaagatcttgccaccggcacccatccagtggtgttgatgcttgcagaaaaaggaatgaacatcacagtagatcatgctgactacgtgtggtttgtagcgccagatacaacaaaaaggtaa

SEQ ID NO: 5982 - DNA, 777 bp, Escherichia coli
atgatgaatattctccacttctcacagtcggtaaaatggagcagctggtttatctgttctctactgcttcatggactgattttccttgcgtttatctggcgtttttccgaagttcagcccgctatgtctcctgcaccggcgatcatgctgcaatgggcagaaattatagaggctccttcttctccactttcgcttccggtgggaatcgctcaacaggagtccgcagtgacagaagaaaagcaacaaactgaggacagacaacaacgtcctgtcactgaagacagtgatgcaaccattgaaataactaggaagaaaaagtcatccgatggagaaaagaaaaagacacgtccacctcgtaagataaaggctcaaaccagcgacagcaaccccacagccgtttccagtaatgctgcacctcaggctctggtcgaatcgtcccgtattgctgcgccttttaacagtgactcaacaaagcgagataattctgaggcatcttgggaaagcagagtaaaaggccacctaaaccgttataaacgttaccctggcgatgccagaaaacgtgcacgaaccggcacagccgtcgtgacttttaccgtaaacacggaaggcactattgtcagtagtttcttggaaatctcttcaggaaccttttctcttgaccgcgaagctattgctgttttagaacgcgctcaaccacttcccaaaccaccgcctgaaatattggagggaggattatttaaagtaaaaatgccgattacctttaagttgaaggagtaa

SEQ ID NO: 5983 - DNA, 2262 bp, Escherichia coli
atgaacgttataaaactggctatcggctcaggcatattattgctcagctgcggtgcttactcacaatccatcagtgaaaaaactaattccgacaaaaaaggagcggcagaattcagtccgctcagcgtttctgtcgggaagacgaccagtgagcaggaagctctcgagaaaacaggcgcgaccagttcccggacaacggacaaaaacctgcaatcacttgacgcaacagtgcgtagtatgcctggtacttatactcaaatagatcctggtcagggagcaatcagtgtgaatattcgaggcatgagcggatttggtcgtgtaaacactatggtcgatggtattacccagagtttttacggaacctctacctccggaacaacgacgcatggttcaactaacaatatggctggcgtacttatagatcctaacttactggtagcagttgatgttacacgcggtgacagcagtggctctgaagggatcaacgcccttgccggtagtgcaaatatgcgtactattggcgttgacgatgtaatatttaacggtaatacatatggccttcgttcacgtttctctgtcggtagtaatgggctgggacgcagcggaatgatcgcccttggtggaaaaagcgacgcttttacggatacgggaagcattggcgttatggctgctgtgagcggcagttctgtgtactctaatttctcaaatggttctggaattaacagcaaagagtttggttatgataaatatatgaagcagaaccccaaatcccaactgtataaaatggatatcagaccagacgaatttaacagcttcgaactttccgctcgaacctatgaaaataaatttacacgtcgtgatataaccagtgacgactattacattaaatatcattacacccctttttctgaattaattgactttaacgtaacggccagtaccagtcgcggtaatcaaaagtatcgtgatggctcgctgtatactttctacaaaacctcagcgcaaaatcgttctgacgcgctggatatcaacaataccagccggttcactgtcgcggacaatgacctggagtttatgctgggcagcaaactgatgcgtacccgctatgaccggaccattcactcagcggcgggcgacccgaaagcgaatcaggaatcgatcgagaacaatccgttcgcaccctccggccagcaggatatttcagcgctgtataccgggctgaaggttacgcgcggcatctgggaggcagatttcaatctcaactacacacgtaacaggatcacagggtacaagcccgcctgcgattcacgcgttatctgcgtgccacagggtagctacgatattgacgataaagagggtggcttcaacccttcagttcagctttctgctcaggtaacaccatggcttcagccgttcattggctacagcaaatccatgcgcgccccgaacatccaggagatgttcttctctaattcaggaggcgcatccatgaacccattcctgaagcctgaacgtgcagaaacctggcaggcgggttttaacattgataccagagatttactggtcgaacaggatgccctgcgctttaaggctctggcgtaccgcagcaggatccagaactacatctacagcgagtcttatctggtttgttctggaggtcgtaaatgcagtctgcctgaggtgattggcaatggctgggagggcattagcgatgaatacagcgacaatatgtacatctacgttaactcggcaagcgacgttatcgcaaagggcttcgaactggagatggattatgatgcaggttttgcttttggccgactctctttcagccagcagcaaacagaccagccaacctccatcgccagcacccactttggcgcaggggatataaccgaactgcccagaaaatacatgacgctggatactggtgttcgcttcttcgataacgcgttgaccctgggcactatcataaaatacacaggcaaggctcgtcgcctgtcgcctgattttgagcaggacgaacataccggcgcaataatcaaacaggatttgccgcagatcccaacgattatcgatctctatggtacttacgagtacaaccgcaacctgacactgaaactttcggtacaaaacctgatgaacagagattattcggaggcgctgaataagctcaacatgatgccaggtcttggtgacgagacccacccagccaattccgcgcgtggcagaacatggatatttggcggggacattcgtttctga

SEQ ID NO: 5984 - DNA, 1176 bp, Escherichia coli
atgaatattttcactttatccaaagcaccgctatacctgttaatttcactatttttacccacgatggccatggctatcgatccacctgaacgcgaactttcgcgatttgccctgaaaacgaattaccttcagtcccctgatgaaggcgtctatgaactggcgtttgataatgccagtaaaaaggtgtttgcagcagtcaccgatcgtgtaaatcgtgaagccaataaaggctatctgtattcgtttaattcagattcgctgaaagtcgaaaataaatacacgatgccataccgggcattttcgctggcgataaatcaggataaacatcagctctatatcggacacacccagtcagcgtccctgcgtatcagtatgtttgacaccccaaccggcaaactggtaagaaccagcgacaggttaagttttaaagcggcaaacgctgcagattcgcgttttgagcattttcgccatatggtttacagccaggattccgataccctgtttgtgagttatagcaatatgctgaaaacggccgagggcatgaagcctctgcataagctgttaatgctcgacgggacgacgcttgccttaaaaggcgaggttaaggatgcttacaaaggtacagcgtatggtctgacgatggatgaaaaaacacagaaaatctacgttggcggaagagattacatcaacgaaattgatgcgaaaaatcagacgctgctgcgtaccatcccgttgaaagatccgagaccacaaatcacaagtgtgcagaatctggcggtggactccgcttctgaccgtgcctttgtggtggtattcgaccatgacgatcgttccggtacaaaagatggactctatatttttgacttacgcgacggtaaacagcttggctatgtgcacacaggagccggagctaacgcggtgaaatacaatccgaaatataacgaactgtatgtcaccaacttcactagcggcaccatcagcgtagtggatgccaccaaatacagcatcacccgtgaatttaacatgccggtctacccaaaccagatggtgttgtcggacgatatggataccctttacattggcatcaaagaaggctttaaccgcgattgggatcctgatgtgtttgtggaaggagctaaagaacgtattctgagcattgatttgaaaaagtcgtga

SEQ ID NO: 5985 - DNA, 267 bp, Escherichia coli
atggtgaggtacttcgggttccttgccaaccgggtgtgtggagagaagctgccgcaggtgtaccgtgctctggggatggataaaccggaagcagtggcgaaagtgtgctatgcacaaatggtgaaacagttcctgagtcgtgacccgttcgaatgcgtgctgtgcggcggccggatggtataccgccgggccattgcggggctgaatgtatcagggctgaagaaaaacgcgcgggatatcagtctgctgaggtatatgccggcctga

SEQ ID NO: 5986 - DNA, 327 bp, Escherichia coli
atgactaaaaatactcgtttttcccccgaagtccgtcaacgggcagtccgtatggttctggaaagtcagggcgaatatgactcacaatgggcgacaatttgttccattgccccaaagattggctgtacaccggagactctgcgtgtctgggtacgccagcatgagcgggataccggaggcggtgatggcgggctcaccaccgctgaacgtcagcgtctgaaagagctggaacgtgaaaatcgtgaactgcgccgcagtaacgatatccttcgccaggcttccgcttattttgcgaaggcggagttcgaccgcctctggaaaaagtga

SEQ ID NO: 5987 - DNA, 321 bp, Escherichia coli
atgggcacgatggacccaacgtttaatccggtgatcaccgatgactctgcggcgtttagccagaaagcggtgcaggcgatggaaaaagagcgcagccagatgcagcttgacgacagctatcagctgctggcgcagatgacggactacaaagattcaccgtcctgcaaagaaaaacagcagtgttcgctgaccgaagccaaagacgcctttagggaaggtgcgaataagcaggtcatgtcttcccaagctgactcgttgattaaaatttcgcggatctgggccgatttttgtcccgcaaacacatcgaatcagcctatttag

SEQ ID NO: 5988 - DNA, 486 bp, Escherichia coli
atggcatttatctggaacgacgaaagccttgcgattctgcgggaaaacgcgggcatcctcacgacagagcagatagcgcaactgcttcacactaatattaccgccgtgcggaatatggcctatcggctgaaactgagccttcgggtgacggcgtataatcaccgacgcatagcgcaggttcaggcgctttatgcctctgagacgttgagtctcaaagagatcgcggcgaaaacggggctgacggccagtaccgtgcaatatatcgtgtacgtgaaatcaaaaaataagccctacgccaccacggaatatgtctcttttgaaacggagaacgccgttcattaccgcgtgcaaaaagaatttgtcgatacggaacgttccctgctggacaacatctctgataacacgcgatttcgtgaactgtatctgacggacggcactttttattgcgcccgcaatattaagtatgaggtttttatctcggagtaa

SEQ ID NO: 5989 - DNA, 486 bp, Escherichia coli
atgcgctggcataatgtgctgttactcgcggcggcgatcctgataagcgggtgtaaagaagaaaagctggcggtcggggcaccggccccggcgctggcggcgtttgatctgcaaggccaggagtcaggccttgaacgctggcaaggaaaggcggtgtacctgaatttttggtctgcgggatgcggggggtgcctagcggaaatggacacgctggaagcgctgagcaaaaaatggggcgataaagtggtggttgtggcggtcaataccgaccctgaaacggtcaggatcaacgatctgctggcaaaacatcagataacctatccggtggtgcgcgatcagctcaacattacccaggaacgttatcaggtgatcggcacgccgacctccgtactgattgactccgaaggacgcgttctggagctacaccagggtatgcgtaagccgtctgagttagaggccacgtttgcgcgcctggcggcgcgatga

SEQ ID NO: 5990 - DNA, 696 bp, Escherichia coli
atgtccgttacgcatatccctcaggtggcgatcgaaacccgccacttatacaaacggttcggtgacgttaccgccctggatgacattaatctgcgcattgcgcagggtgaatttgtcgccattatgggcgcttctggttctggtaaaaccacgctgatgaatattctgacgtgccttgatacggcgacggaagggcaggtgtttcttgatggcaccgatgccgccgcgctggatgaagaggggcgccgtcgctttcgcgccgagaaaatcggcctggtatttcagcagttccatttgatcccgttcttaactgcgctggaaaacatcatgctcgcccagcattaccacagcgtggtggatgaagcggcggcgaggaaggtgctggaacaggtagggcttgggcatcgtgtgacgcacctgccgagccagctttccggtggtgagcagcagcgtgtgtgtatcgcccgggcgctggtcaacgaaccgccggttattttcgcggatgaaccgacgggcaacctggatgaagagaatgagcagcgggtgctggatctgctcaccgatctgcatcgtcaggggcgcacgattgtgatggtgacgcacaaccctgcgcttgggcagtttgccgaccgtattctgcggctgcaacacggtaaatatctgggtgaggaggccaatcaacatgcgctggcataa

SEQ ID NO: 5991 - DNA, 1131 bp, Escherichia coli
atggccgctaaacgtaccatgctctggctgctggtgtggcgggcgctgcgtctgcgttttcagcgggtcagcgtggtgtttgccgcgctgatggtgggggcgaccatcgtgacggcgctttttgccgtctggttcgacattaacaccaaaatgagcgaagaactgcgcaccttcggcgcgaatttttacatcgggccggggcacggttccagtatgccgcagcaggagttgcagagcattctcgatcaggcgccgcaggggctggtgcatggcgccagtccgtggttgtacggcatggcgcgtaccgagctggaaaaagtggtgatggttggcgtgtggttcgagtcgctgcaaaaactggtgccgtactggcaggtcaccggtagctggattggcgttagttttgacgaccgtaatgcgatgatcggcgtcaaactggcggaacgcctcaacgtgcagccgggcgacagcatcacgctggtggatcacaatcagcgtaagaatttgcagattaaaggcattgtggagtctggcgatgcgacggacaacatgctgatcgtcagcctcgacgtggcgcaggcctggctgcatcagccgggcaaaatcagccacggcttgctgagcgtcagtaacgatgtcggccaggtggagaactatgccagccggttgcaggcgcagtatcctgacctggagattcgtccggtgcgtaaggtctctgcttccgaagggcaggtgctggataaaattaaaggtctgatgggactggtctcgatcgtgattctggcgctctcttcgctgtgcgtgaataccacgctgatggcgattgtcggcgagcgggcgcgcgagtttgcgctgcaaaaagcgcttggttccagcaacggcgatatcgtgcggcaaattctgctggaaaccagcatcatcgcgctggcggcggtggcgtgcggctgggtgctgggatatttgctggcgcaactgttgggattaacggtgtttaatgccgccatttcactgcgtctgccggtgttgcccattactctggtgttgtctttactggtcgccattctggcggcgattgttccggtgcgacgcgcggtaagcgtcgagcctgctaaagtgctgaaaggagagtag

SEQ ID NO: 5992 - DNA, 1284 bp, Escherichia coli
atgctgtggcggatgttacgacaatcctgggggcgcaatttacgccgcaaagtgctggcgataatcaccgtttttctggcctccagcctgatctcggcgctgctggcggtgtccattgatatcggcgacaaaatgtccagagagctgaagtcttatggtgcgaacattttgattgaacccgccggacaggctgcgctgcccgcgctgtttagtgagagcagtaatccgctttccggtcaggattttcttgatgaagccgagctgccgaacatcaaagatatcttctggcgaaacaacattgtcgggtttgcgccgatgctcggcggcgaagccagcgtggagggagaaccagtgcggattctgggcactttcttcagtcagccagtggatattcctgatgaagagggatatgagacggggcagaaaacggtcagcccatactggcaggtgaccggcgactggccgcaggaacccgcaggcgcagagccgcagaccttagtcgggcacgcgctggcgcggcaaatgggctggaaacccggtgataagctgacattacgtaccgaaggcgaagcagtgcaggtcaccgtcagcggtatcctctccagcggcggcgatgaagataaccaactggtgatgccgctaagcacggtacagcacctgctggggctccccggaaaagtgcaggcgattcgcgtctcggcgctgacggtgccggaaaacgaactgtcccgccgcgcgcgggaaaacctggacgcgctcaatgccgaagagtacgacctctggtattgcacggcctatgtgtcgtcgatcgcgcatcagctggaagaggcgatttccggtgcggaagtgcgcccggtatggcaggtcgcggcgtccgaaggggtggtgatcgataaaattcagttgctgatggcggtcgttaccgtcgcggcgctggtggcttccgcaatggggatcgcctcgctgatgaccagcaccattatggaacgcgccaaagagatcggtttgatgaaagcgctgggtgcgcgacagtggcaaattatgctgctgttctacctggaagcggcgtccagcgggctggctggcggtgcgctgggatgtattgccgggtgggggctggcgaaagcgattggcgtcatgctcttcgacgcgccgcttaattttgcctggattgtggtgccgtgcgtactggtgattgcggtactgattgcgttgatcggcacctggttcccggcccggcggattgcccggctgtatcctgtggaggtgctgtatggccgctaa

SEQ ID NO: 5993 - DNA, 1380 bp, Escherichia coli
atgagttactttttcgtcacgacgctacaggtctttttctgcattgcgcttctttccggtgttctctggagtcgaaacgatcctccctctttacgtccgctgacctggacgctgctgaccgggctgattgccggcgtgctggcgggactgtttattcacggcagccaaccggtacaactgctgctggttggggcggaggtcatggtatcgctgctgtttgtcctcagtttctggtgggcttcaacgcgtatccgctatctgtggcaggggattctgattttcggcgctgcccgccattgggcgctggaccctaatctgggcgggctgaccagtacgcatgtgctgaatactgacctgctgttaaacctgacggccgtcgttctcgcttttgcgatcctctgtctggcgggcgtactctgcgcgatgctgctgcggcgtattcgcggcctgtactggccgttaacgctgattctgctggtgatgatctggctgccgctgagcggcaacctgctgttgttgctgatgaaattacaggttgttccgctgggaaaatcactgctgagcttcgtggcgaaagtcacaaataacacggcgctgtataactgggcgggagccgcgctgctgctggccctggcgctgtgctggcttccggcgctgttgcgggcttttcgacagacgcgggaaaccgaagaaccgattgctcaccgtctggcgctggcgcagcgtcgcaacgctttgcggctgtggttggtcacaatcggctgcgcggtggtcgttatcgcaggccaactgtggtgggataaagtggcctcgcagccgccgcaactctctgaagccgtgcccgtaacgctggggagcgatggcatggtgcgcctgccggttgaacagcttcgtgacggtaaactgcatcgtttcgtctgggtggcggacgatggcaaagcggtgcgcttcttcgtgattaaccgctatcccgacaagctgcgttttggcgtggtgttcgacgcctgcctgctgtgcggcgatcagggttatgtcatggagggcaatcaggttatctgcgtcgcctgcggagtgcatatttttattccgtctatcggcaaggccggtggctgtaacccggtgccgattgaaaactggcacaatgatgaaaaagagctggtgatccccggtaaagaactggcgacaggggtgaactacttctcgacggtcatgactattaaagtgaccgatccggtcgatggttcaacgttgaccaatacctcagccgattacaaatacagctatggcggcaagacctggttcttctcgtcagaggctaactatgaacgcttccgtgaaacgccggagcagtttgttcctgccgacatgagggaggaataa

SEQ ID NO: 5994 - DNA, 528 bp, Escherichia coli
atgaccatgaagaaaaccctgattgccagcgcagtgatggccagcattttcattgcgccagccgcgtttgcttttaaagagtacccggcaggcgagcctgtcaccatgaatgaaatggagctggcggccgtttacctgcaaccgattgatatggaaccgcgcggcatgggcttaccggcagcaaaagccgatgttcaccttgaagcggatatccacgctgtagaaggcaataaaaacggctttggcgcaggggaatggatcccgtacctgaccatcagctacaccctggtcaacaacgacacgggcgaaaaacaggaaggcaccttcatgccgatggttgccagcgatggcccgcactatggcgcgaacatcaaaatgatgggcgtgggcaactataaagtgacctaccacattgaaccgccgtcaaaagccgggatgcatcgccatactgacagcgaaacaggcgtaggccgctggtggaaaccgtttgatgtgagctacgagtttaaatatgtcggtctgaactaa

SEQ ID NO: 5995 - DNA, 1941 bp, Escherichia coli
gtgcgtaacttccgtaactctttgttggttactctctttggcttgtttataagcatgagtgtctgggcgtcgacgaattatgcgcctttgattgaagatatcgagcaacgtcttgataaaacagcggaactttatcagcaacagcatgccgacgaggcgcgccgcacggtacaaatggcctattttgaggtgttcgagaacctggaagggccgatccgcatcaacatttccgcgcgcaaaagttacgagatggagagcgcattcggcgagatccgtcgaatgattggcgagaaaaaaccgctcgctgacgtccaggcgcgcattgactggctgaaagccgcactgcgcgaagtggaaccggtgctggatggcggacatcgtctggtggccgaagagcagcacaacgcgctgtccagggacgacattgccgttcactggcaggagagtttcaggacgatcgacgatctgctggcgcaggcggtcactgaatatcaggccgggaattacagcgttgccagtcagcacgttcaacaggcgcactatcagggctttaaaaactctgagatggagatgtccctcagacaaaaccgttctgcaaaagatgccgcctccattaaccaacaattctcatccctgattgcgctgaccgcgcaacctgaccatctcaacgatgtctcctatcaggtcactacgctgctacaggatatcgaggatatcttacccggcttgccaaccacccgtgacgatcagcaggttgccgcagcgcaaagcgcagacaacattccggcggcggacgagggaaataaccgcaccgactgggctgaggtgacgacgggaattaaccagagcattcaggacgcgatagcgcgctatcagggcggcgatgcgaagaatgcgattctggatatccaggatacctacttcgaccgcttcgaagccagcggcatggaaaacaaaatcggctctcgcgattcggcatttaaaaccacgctggaggcgtattttacccgcctggtcagtctgatgaaggccggtcagccggttgagcgcctgaatgcagaggccagcgcgctgacgcaggatctgcaaaaagccgtgacgatgctgggcgaaggcgaagaaacccagtggagtctgctgctctatagtctgatgatcatcgtgcgcgaggggctggaagcgctgctgattgttgcggcaatcgtggcctacatggtgaaaaacaaccatcaggataagctgccgcttattcgtcagtcggtaattgtggcgctgatcgccagcgtcatcaccgccgctatcttccagatgctgtttactaactccggcgccagccgtgaactgctggaaggcataacgatgctgattgccgtcgtgatgctgttctttatgagttactggctgctgtccaaagtggaagcgcgccactggaaagcctggctggaaggcaaactgtctcattccctgtcgcgaggctccctggtcggactatggctgaccagcttcctggcggtgtaccgcgaaggggcggaaacggtgctgttctattacgctctgattggcgatgcaaacacggtatccggccatatggcgattggcgccggttttgtgattggctgcgtggtgctgctgctcgcctggctggtgatgcgttactcagtggtgcgcctgccgctgaaacccttctttatgtttaccggcagtttcatgtatctgatggccttcgtctttgcgggcaaaggcgttctggaactggtggaaggcaaactgttccagcctacgttgattaacggcttccctgaaatcagctggctggggatttatccctacgtggaaacgttgttaccgcaggtcgtattgctgctcgcggcgctggtggcgctgtgggtgatgcggcgcaaaagcgcggttcccggggagacgataaaaaataacccataa

SEQ ID NO: 5996 - DNA, 762 bp, Escherichia coli
atgcgcaagggtaaaattattgttgcatcaatgatggtgctttgtgtccttatttttgttgcggcggcggcatggtttatgctgttccagggagaaatgacggagccgacagaggaggaaaaacaggcggcaattttacacgctgcgggcctgatgaaatcagagacccaggataaaaaatcagtcgaaacgctctatcatcgttatattattcaacgccatgttaatttagattccggcgaactggtggctggcagcagcgcggacaccgcgcggcagaagtgtgaaaaacttgcccctgaacgcgacccagcgcaggttcgtcagcgctgtacggtggcggatgtgttctttgtgaaagataaaaataatgaaattcagcaggttatcattccagttaccggtaagggtgcgaaatccatgatgcatgcgtttcttgctctggggctggacggtcgtacggtgagaaatctgtattattatcagcaacgggaaacgccgtttctgggggctagggtggaagacgccaactggcgcaaacagtggccagggaaacgattattagataacagcggacatcctgcattgaaaatagtacaggataaacctgaacatgccgatgaatataccgttgacggtatttccggtgcgacgttgacatcaaccggcgttgagaaaagtattaactactggatggggccgcagggatatggtcaattcttacagcgtcttgccagcgatcgaaataaccttaatctttga

SEQ ID NO: 5997 - DNA, 507 bp, Escherichia coli
atgctcagtaaactgcgccgctggctgcgtgaaggcgcgatcttactggttgtgctggctggcgtgataatcctgctggatgtctggcgttctccgcagatgccggccatgtttgacagcacgccgctgcatacgctggacggggaaaccgtaacgctggcgtcgatcagtgaagaacgcccggtgctgctctacttctgggcgagctggtgcggtatctgccgtttcaccacgccggatgtcgcccgtttgcagtcggaaggggagagcgtcatgaccatcgcgctgcgttccggtaatgacggggaggtttcccgctggttatcgcgtaaaagggtgacgttccccgtcgtgaatgatagcggcggtgagatatcacgaaactgggaaatcagcgtcacgccaacgctggtggtggtgtcgaaggggcaggtggtaactacgaccagcggctggaccagctactggggcatgaagttacgtctgtggcgggcagccatgttttga

SEQ ID NO: 5998 - DNA, 159 bp, Escherichia coli
atggagacgttgagcaccaatctgcaactcgcccggctggttggcgttcaggggacgccggcaaccatcattggcgacgagatgatccccggcgcggtatcgtgggagacccttgaggcggtggtgaaagaaaaactggcggtggcccatgctcagtaa

SEQ ID NO: 5999 - DNA, 351 bp, Escherichia coli
atgatctcgctcccatcagacactcgaatctcgctggttgccggcgttactgatatgcgtaaatccttcaacggtctgggtgaacaggtacaacatgtgctggatgagaaccccttctccggtcacctgttcatcttccgtggccgacggagtgacatgattaaaatcctctgggctgatgctgatggtctgtgcctgttcaccaaacgcctggaggaaggcctgtttatctggcctgcggtgcgtgacggtaaggtatccattacccgctcgcagctggcaatgctcctcgataagctggactggcgtcagccaaaaacatcccgtcttaacgcactgacaatgttgtaa

SEQ ID NO: 6000 - DNA, 426 bp, Escherichia coli
atggaacagaaaatattatccgcagaaccccgcagaacattttcaaatgagtttaaacttcaaatggttaaactggcttcacaactaggagcctctgttgcccgtattgccagggaacacgatatcaatgataacctcctgttcaaatggctcaggctctggcagaacgaagggcgtatatcgcggcgtcttccggtaacaacctcttctgacgctggcgttgaattattacctgttgagataacgcctgatgagcagaaagagcctatggcggctcttactccgcttttatccactccttcacaaagcacagtcagtgccagttcctgtaaagttgagttccgccacggtaacatgacgctggaaaatccttcaccagagctgctcacggtgttgatccgtgaactgaccgggagggggcgatga

SEQ ID NO: 6001 - DNA, 918 bp, Escherichia coli
atgcaatgtgaatttaaaggggtcatatcagcattacccactccttatgaccaatcccagcaaatcgatatggagagtcttcgaaaactgatccgttttaatatcgaacaaaatattaagggattgtatgttggaggctctactggagaagcatttcttcagaatgttgcagagcgagaaaaaattcttgaaacagtagccgatgaatcagatggaagactgacacttatagcgcatgtgggcggaatcagtacggcagaaagcgaggtacttgcaaaagctgcaaaaaaatacggatatcatgctatatctgctgttactccattttattatcctttttcatttgaagagcattgtatccattacaggaagattattgattctgcagatggacttccgatggtagtttataatataccggctcttagcggagtgcgtttttctttagatcagataaatgagcttgtcacaatacccagggtttgtgcattaaaacagacatccggtgatttattccagatggaacaaatcaaaaggaatcatccagagcttgtgttatataatggttacgatgaaatatttgcatcagggttaattgcaggtgcagatgggggaatcggtagtacatataatataatggggtggcgttatcttgaaatatttgaagcagtcaaaaacaatgatgtgattaaggcgaaggaaatgcaagtagcctgtaaccaggttattgacactcttattcagagtggtgtcctggcaggtataaaaactcttctttactatatggggattataaatactcctgtatgcagaagtcctttttctccggtaaaggaaaagaatctggatgtattatcaaaacttgcagagcgactgttcgaagaacatgacagaaacaaaaaaatgaaaataatctga

SEQ ID NO: 6002 - DNA, 876 bp, Escherichia coli
atgataacactggctgttgatataggaggaacgaaaatttcagcggcgttgatatctgatgacggttcatttttgctgaaaaaacagatatcaacacctcatgaaagatgtcctgacgaaatgacaggggctttacgtctactggtttctgaaatgaagggaacagcggagcgatttgcagtagcatcaacagggattattaataatggagtattgacagctctgaatccagacaatcttggagggctgaaagagtatcctctgaaaaatataatggaagatataactggtttaaatggaagtgtgataaatgatgcccaggcagccgcatgggcagaatatacagttttgccgaaagaaatttgtgatatggtttttataaccgtttctacgggggttggagggggaattgtagttaacagaaaattattaacaggtgtttctggattagccggacatgttgggcatatattgtccggagtaacggatacagaatgtggatgtggtcgtcggggatgcgttgaagcggtttcatctggtcgggccatcatgggggcagcaaaaaataaacttgcaggatatagcaccaaatatatttttgaattagcgagacagggatataaggaagcagaatttttgacagagcgttctgccagtactattgctgaattaatagtaagtttaaaattactgcttgattgtcaggttgttgttgtcggaggaagtgttggacttgctgatgggtatgttcagaaagtgtcgaaacatctttccatatattctgaaatttgtaatgtaatgctgtttccggcatatttcagaagtgactctggtcttattggtgcaactctttgggaccgggattgtattacttaa

SEQ ID NO: 6003 - DNA, 1473 bp, Escherichia coli
atggactcctgtattcagaaaaagcaggtttggtataagcatctttcacccagacagtggaagatattcggtgcggcatggacaggttatttacttgatggttttgatttcgttctgatatctctggttcttacagaggttcagcatgaattcggcttgacgacaatagaagcggcaagccttatttccgctgcttttatttctcgatggtttggggggcttgctattggcgctttatcggacaagatggggcgcaggatggcaatggttttaagtatagtgctattctctctcggaacccttgcctgtggtctggctcctggatatgcagtgatgtttattgctcgcattgttattgggcttggtatggcaggtgaatatggctcaagtgtaacatatgttatcgaaagctggcctgttcatctcagaaacaaggcaagtggttttttaatttctggattttctattgggggaggtttagctgcacaggtttatagcattgtagtaccactatggggctggcgttctcttttctttgtcggcatgcttccaatattatttgctttttatcttcgcaagaatcttccggagtctgatgactggcaaaaaaggcaacaagagaataaacccgtcagaacaatggtggatattctgtacagagaaaagaataaatacataaatattcttctgtcttgtattgcatttgcatgtctatatgtttgtttttcaggcgtcactgcaaacgctgctttaatcacagttatggcattgtgctgtgcggctgtttttatcagttttatatatcagggtatggggaaaagatggccaacaggcattatgttgatgcttgtggttatgttctgtttcctctacggatggccactgcaggcttttcttcctacatggcttaaggttgatatgcagtattcaccagaaactgttgctctcatatttatgctggcaggttttggctctgcagctggaagttgtataggtggttttatgggggactggcttggaacccgaaaagcatatgttatatcacttcttatcggtcagcttgttattatccccgtttttcttgtggaccgggactatgtatggttacttggccttctaatctttactcagcaggtttttggtcaggggattggtgctctggtgccgaaaataatcagtggttattttaatgtggagcagcgtgcggcaggactggggtttatttataatgtaggttcacttggtggagcatgtgcgcctattcttggtgcagttgttgcgtctcatacaagtcttggtacagcaatgtgttctcttgcttttatcttaacatttgttgttcttgtccttattggttttgatatgccatcacgtgtacagagatggatccatccagaagctgcgcttgaatatgatactgtcgatggaaaacctttttatggagcaagaaaaaagaatgttgcagaagaataa

SEQ ID NO: 6004 - DNA, 810 bp, Escherichia coli
atgattcattacagggagaatatatattctcttgataattatgagcgttacataactgacagttcgctatttgagaatactggcgatggcataatatatacaggtattgtgccccttattacagttgttgagcctgttgtatctaatcaacatagtgtgctgattatacctggaggtggatacaggaggattgtttatgaaagagagggacttgatgttggcagatggatagcaggtcagggatatacggcatttattctttcttacagaatgccctccgttaatggttattattcctttgcagatgcgaagaatgccctgaactttatttcttactgggccggaatgtcggagagaacatttaagagtgttggatgtatggggttttcggcaggtggtcatcttgctggatatattactcatctccattatgaggaagagacttctgtgcgtcctgactggatggctctgatatatccagttatatctcttgacaggagtattgctcatcagggatgccggaaacgtcttctggatgcaggtgaaagtgaatattcagccagtcttgaaaatagtgttacagagtatatgccaccagtctttattgtgcatgcaacagatgataaggatgttccagttattcattctctgagatattttaactctattcgggataagggacatcatgcagaagctcatttttttgataagggaggtcatggatttggtgtatccggaaaaaatggatatccgatagaaaaatggcaaagcctgcttctggaatggcttgcggaacataagtttcattga

SEQ ID NO: 6005 - DNA, 711 bp, Escherichia coli
atgaaaaaatattatccactattaactgtaattcttcttggtttacctttgtgctctcaggcattaactcttaatctacgtgggggatacagaagcgccagtcacgcttatgaaacgttgattcaggttagtcaggggtggaataatggttggtgggcaagttttgagtcaaacacctggaatacaattcacaacaatgaaaatgaattgtttgcactcaattataataaaatagatataaataaaacatataaaatagatgacaaatgggctctaatcccagggattcagacacaatggatgtcagcaggaagtcagtataacccttatctgaaaatttcgtatcaggcaacgccagatcttaatctggccttacgctatcgctatgactggaaagctttccgacagacggatttagatggcaacagggcgcgtaatgatcagcatcagtttgatggttatgtgacatacaaaattaatgattcatggttgtttgcatggcagaccacggtatatacgaaggttaataatttcaaatatgggaatcataaaaaaacagcaactgaaaatgcatttgttctgcaatataaaatgtcaccggtgttcaccccatatatagaatatgattacttggataaacaaggggtgtataaggggaaagataataaacatgaaaatagttaccgtgtcggtgttctgattaatttttaa

SEQ ID NO: 6006 - DNA, 1110 bp, Escherichia coli
atgaaagtgaaaaactttatatatcttcccttctgcttgtttattggaacgtcggtagccggagctttaccggaaattcctgaaccatttaaatatggtgtaggagggatcgagaatggtaaaatatatataggactaggaagtctgggaaataactggtatatgatagatacaaaccagagtgaaaaaaaatggactaagatagcgcaatggccgacagttcccagagagcaggcaacagctactattattgatggtaagatctatgtatttggaggaattggaaaagataaaagtggagtcataaccttacaaaaagatgtctattcctatgatattgctaaagataaatgggaaaaattgatgacccgtccccctgtatctcttgccggtcatgtttcttttatccataatggtcatgcggtatctactggtggtgtaaatgagaatatttttaatggatacttttcagatgtcgagttatcaaaagggaattccgcgctgacagagaaagtcaacagggattattttagtaaacctgctgatgattattttttaaataatcatataatttcttatgacccgtcaaaaaaccagtggaagaacctgggaacgactccatttccgggaactgctggttcatcggtgatttttgcagaacagcaaatttatatactgggaggggagagaaaaccggggcttcgttctgttagatcctggacgggggagctttcgcatgatcgaattaaatggtctgaacttccaccagtagcttcacccgagggggtgtcaggagcatatgcctctgttattgatggaaatatctttctggccggtggtgcatatttcccgggggcggcagaaaagtatagcaatggtgaatactggtctcataaaggactggataaagcctattcaaaagagatatatcagctaataaaaaatgactggaaaaaagttggttctttgccggaaggacttgcttatggtgtaagcctgccctggcagggggggatgctcattctggggggggagaaaaaagatggtaaagctgtttcagatgttatttatctgaaaaaaaatgacaaacaaataaagattgttaaataa

SEQ ID NO: 6007 - DNA, 936 bp, Escherichia coli
atggggtttataatgaataaagatagatctttaaatgaaatgatgttaagcttgtttaataaatcaactattgttgacttgtcaagtgagacaatatctgagagtaaatctctttcaggccgtatttatcaggatcctgaacataacggggaatttgaacttgatcgtgtattgacagatatttatgctcctcagttaattatttttttaccagataaaccaaatggaacaggaatattgattattcccggggggggctaccaggctgttatgttagataaggaaggtacagctcttgctccagagtttttatctcagggctatacattatttgttcttagttacagattaccatcgccagttgagggagaaaatataaacaaaacttttattgatgcaatatctgcaatgctttatattcgtaagaatgctgataaatggcatctacagcgtcatcgtattggtgtattaggattttctgctggggggcatatcgcctcaacgtttgtgaatcagatttgtgatttcaaacgttcttctgacagtaaagaacaagagattttcgctattcccgattttgtcgggttaatttatcctgtaatatcaatgaaagatgatgtgacacatccaggctccaggaagcaattactgggggacaatagtacctcagaaaatataatacaatatagtgcggatcttaatgtcacatcatgttttcctcctgtgtttttactccattgttgtgatgatgatcttgtgtcaattgaaaacagtctgctcatgtaccgtggcctaatagagaaaggcgtttctgctgaaatgcatctctatgagaaaggagggcatggttttagtattcagtgggccacagatctttctgttggaggatggataaaactgtttatggactggatgtattctcatggatttaaataa

SEQ ID NO: 6008 - DNA, 735 bp, Escherichia coli
atgtccgacaacaaaaaaaccgtgttacccgggctaacaacgaccagaaagcccattgttacaaaaaaactttcagaaatcgttgccgaagagcttgaaagaatgatccgccaggaggagataagggaaggtgaatacctgccttctgaacgtgaacttatggcattctttggcgttggaagaccatctgtcagagaggctttatcatctctcagacataaagggctaatccggtataacaagggagaaaaagccagtgtctgccgtccatcaccagaaaccatcattaatgggttatcaggcattgttaaagattttttatctacagctgatggcatcaaggattttgaaagactacgcatcttttttgaaaccaaccttgtaagatatgcagcaaaaaatgcaacgcctgaggatattcacaggcttgagaaggtgctcagtatccatcataactcactgagaacccccgaagtgtatgctcaatatgatattgaatttcatagtatacttgctgatatacctgacaataaagtattaaaaacaatacactcagcattttctgaatggctgataatggccaaacctctggaaaagaataaaatgacatatgaaaataacaaaaaaacccatcagcagcatattgaaatacttacggccataaaagagcatgattgtgataaagctgaacagctaatgtataatcacctttataaacgaattgaagcatcatag

SEQ ID NO: 6009 - DNA, 987 bp, Escherichia coli
atgtatcatcatgattttaatgaaaaaataggtttctggtatgtgatagccctcgcaggacagtctaatggtatggcctacggtgaaggtattcccctgccagatacactcgacaaacccgagtcccgtgtaaaacaactggctcgtcgaaaaacaatcacaccaggaggaaaagagtgtaaattcaatgagattattccggcagatcactgcctgcatgatgttcaggatatgagtggatatcaccatccggctgctgatttgcataaaggggaatatggttgtgtcggacagggattgcatatagctaaaaagttactgccatacatacctgagcaagcagggatattactggttccttgttgcagaggaggtgccgcctttactgttggagctgaaggtatgtatgtacctgatacaggggcaacagctgatgcaatgcggtggggcaccggaacagcactctatgaggacttagtagcccgggttaaggtagctctggaatataacagaaagaataaactgctatctgtctgctggatgcagggggagtttgatcttatgtcaccagattatgaaaagcatcctgacttgttttatcagatggtaacttctttcaggtctgagttatctgaatactcatctcagtgtgttggtaattcgtcagaaagagttccatggttgtgtggtgatacaacctggtactggaaggaatcttatcaaaaagaatatgattttatatatggacattacagacaacggactgatgatgaaatacattttctcagctttcaggatagtaaccgacatgaattaactaatgagccagaagaagatgccgatgatttatctgtcgggtatctggggtcatcatggaggacagaattaagctggacaacgtcacagagaagtacacattttaattcaatggccagaaggggagttattgctgaatgttatgcgcaaaaaataagaaattatttgtag

SEQ ID NO: 6010 - DNA, 846 bp, Escherichia coli
gtgattcgtgctgctggcggcgctggtgcactgtctgactggctgttgcgccatattaaatcctgccagtggccacacggtgattatcaccacagtgaaaccgtcattcaccgttatggtaccggcgcaatggtgttgtgctggcactgcgacaaccagttgtgtgaccagacctcagaatcacttgagcaacttgctcaccaaaacttgtcagcatggatgattgacgtcatccgtcacgcaatcagcggtacgcaggagagggagttatcgctggccgaattatcctggtgggcggtctgcaatcaggtggctgatgcgcttccggagtctgtattgtgtcgttcactgggattaccggtggaaaaaatccgctccgtataccgtgagagtgacatcgtaccgggagaacagactgccaccagcatactgaagcagcgcacaaaaaatattgcgctgccacttcacgtccaccagcaacagcccccactccaggaaaagacgttagtaagcatcgccgttgatccggagtctccggctcagtatctccagcgccagaaaccacaacgggaagagatgcctgtatacacgcgctgggtaaaaacgcagaaatgcatgacgtgcggtaatcaggcagatgatccgcatcacatcattggtcatggcctgggaggtatgggaacaaaggctgatgatttgtttgttattccgctgtgccgtaaatgtcataacgaactgcacgccggggtaaaagattttgaagaaaaacacggcagccagctgttgttgctgattcgttttttaatgcacgcgagaaattcgggtgtcctgaagtggaaagcatga

SEQ ID NO: 6011 - DNA, 363 bp, Escherichia coli
atgactgaacgcatagaatttgttttgccttacccgccgacggtgaatacctactggcgacgtcatggcaatacgtatttcatctcggaggccggaaagcgttatcgccgtgatgtggcgctaattgttcgccagcagcggctgaaattaaacctgtccggaaggctggcgataaaggtgattgcagagccaccggataagcgtcgtcgcgacctggacaatatcctgaaagcaccgctggatgcgctgacgcatgcgggagtgttaatggacgatgagcagtttgatgaaatcaatatcgttcgtggtcagccagtatctggtggacgtctgggggtgaagatttaccccataatgcattaa

SEQ ID NO: 6012 - DNA, 822 bp, Escherichia coli
atgaaactggaagatttaccgaaatactactccccaaaatcccctggcctgaccgatgcatcggcctcaacgtcaaaagatgcgctgagtatcactgatgtgatggccgcgcagggcatgacacagaatcgggctgagatgggtttttctgcgttcctggggaaaatgggcatcagtatgaatgacagggcgcgggcaacagaattactggcagattatgcactcagtcggtgcgatcgtgtggcggcgttgagaaaacttccggcagaaataaaaccggtagtgatgcgcattatggcttcgtacgcttttgaggattatgcccgcagcgcagcgagtaaaaagcagtgcccttgttgctatggggaaaaatttattgaaagcgtagtttttacaaacaaggtccagtatccggatggtaagccgccggtatgggcaaagtgtacgaaaggtgtgtattcgtcttactgggaagaatggaaaaaagtcagggaggtggtaaaagttgcctgtccggagtgtggcggaaagggtgaggtttccaccgcctgtaaggattgccgtgggcgtggtgtcgccattcatcgtgaagagtcggtaaaacgtggtatgcctgttatcagagactgccagcgttgtggtggtcgtggctatgaaagactaccatcaacggaggcatttaatgctatatgcgaggtgacaaaccagataacacgcgcgtcatgggaaaaaacagttaagaaattctatgatgcgctggtgacccggtttgatattgaagaagcatgggctgagcggcagttaaaaaaggtaactaggtaa

SEQ ID NO: 6013 - DNA, 336 bp, Escherichia coli
atgaagtggattgtgattgatacagttatccagccatcatgcggaatatctttttcagtcatatggagtaaaataaaattaataatctggtatcaatcggatgctttcttacctcctgaaagtatatttacactgactcacacaggcatcatgctcaataacaaagtgctgcctgtaaccatttacaacgtagtaccattcaataaaacattctggaatttaatcaaaaacagccaggaatgccctacaaatacagataacgtattgaatgaatgctttaataaccgttgcactctgcaaatatgtccttatgggctaaaacaacaaagtccataa

SEQ ID NO: 6014 - DNA, 189 bp, Escherichia coli
atggcatttaaacactatgatgttgtcagggcggcgtcgccgtcagatcttgcggaaaagctgacacataaactgaaagagggctggcagccgtttggtagtccggtggccataaccccttataccctgatgcaggcgattgcagcagaaggtgatgtggtggtcagtggtgcaactgagccggagtga

SEQ ID NO: 6015 - DNA, 216 bp, Escherichia coli
atgtaccagatggaaaaaatcacaacaggtgtgtcatacaccacgtcagcggtgggaacgggctactggttcctgcagttgctggacagggtttccccgtctcagtgggcggcaataggcgtgctggggagtctgctgtttgggctgctgacatatctgactaacctgtatttcaaaatcaaagaggaccggcgtaaggcggcgcggggagagtaa

SEQ ID NO: 6016 - DNA, 891 bp, Escherichia coli
atgaataaaaaatatgaactggttgttaaggggataaataattacggggataaggttactgttactgtgaagccggaaggtgacgggcaagcgtcgctgttgttgccagatgtggcgattagtcttgaccgtactgaaggtgccacgctggagttttacgaagctgaggcgaaaaagcaggcgaagcagtttttcatggatgttgctgccgggttatgtgaaggggatggtccgttgccggaaaagcgccccgtaattttagaggcgcaggatgtgttgataacctacaaaggaaagctaccgggaagaattacttgttctctgaagatgccgccgtcaacactgcggtcagaaaaagatgatgttgaatcacgtattgaaaaactggagagctacgtcgttgagctgaataagaaatggtcgatattggtgccttctggcgatgaaaagcagtttgctgcgtttgacgattattgtcggaaagtgatgagcagaaatctcgcagagtgtttcagtattcataatgataatttcagtgacccggaatgggagtgtaaccggccatcctttgttgtatccggtgatgctgggaaaataaccatctcagaaaatgggaaagtaacacctccatcgcaccagcacagtgaggagctcattgaatttgccattgattacctgaagaacaataaaaagcaggggctgatgaagcgcgttggccgttgcatgggatatctgcaggtagctgctgagattgaagcgctggccagtggtgctgataaggatgcaattgtgcgggaggctcttcttcgtgattttaatactccaccctttaaaaaagtgccggcttactggcttcatccggggctgacttatcttaaagtgcgtatttag

SEQ ID NO: 6017 - DNA, 534 bp, Escherichia coli
atgaacaccaaaatcaaatacggcctgtcggctgccgttctggcgctgattgccgctggtgcgcctgcgcctgacattctcgaccagtttctggatgaaaaggaaggcaagcacaccacagcataccgtgatggtgcaggtatctggaccatctgccgtggtgccatcatggtggatggcaaacctgtcgttccgggcatgaagttgtcgaaggaaaaatgcgaccaggttaacgccattgagcgtgataaagcgctggcgtgggtggagaaaaacatcagagtgccgctgaccgaaccccagaaagcggggatcgcgtcattctgtccgtacaacattggtcccggtaagtgtttcccgtcgacgttttacagacgaattaatgctggtgatcgaaaaggtgcctgcgaagcgattcgctggtggattaaggacggtggcagagactgccgtattcgttcaaacaactgttacggtcaggtatcccgtcgtgaccaggagagcgcgctggcgtgctggggtatcgacagataa

SEQ ID NO: 6018 - DNA, 147 bp, Escherichia coli
atgaaaaatggccttgaactgaaagcgcctgtaactgatgacatcagcagagcactggcttttgccattaagtgggtggcggtcggtgttgctgtgtccccgatgctgtatgggctggcaaaactggtcattgcgttgaaatcgtga

SEQ ID NO: 6019 - DNA, 132 bp, Escherichia coli
atgtcagacaaactcataacgctggcgaagatcctctgtgtaattgtcggcatttcattttcactaatgctggttgctctttttctttccatggcctggatgatgttgtcttcgtcggggttgctggggtga

SEQ ID NO: 6020 - DNA, 459 bp, Escherichia coli
atgctttccgcgtttatcgttattctgctggtggcctgtggtgcgctgtggatggcaacagaccattaccgtgataacgcgattacctacaaagcgcagcgcgataacaaagccagtgaactgaagctggcgaacgcaaccattactgatatgcaggtgcgccagcgcgatgttgctgcgctcgatgcaaaatactcgagggaattagccgatgcgagagctgaaaatgaaactcttcgcgctgacgttgccgctggtcgtaagcgcctgcggatcaacgccacctgtccaggctccgtgcgtgaagcccccaccacctccggcgtggataatgcaaccggcccccaactggcagacaccgttacacgggattatttcaccctcagagagcggctgatgacgatgcacaagcaactggaaggggcacaggactatatccgcactcagtgcctgaaataa

SEQ ID NO: 6021 - DNA, 510 bp, Escherichia coli
gtggctacgcagactgaagttgccaggcatttaagtctgaccgatcgccagcttcgcagattgcagaaattgccgggtgccccgatatcgaataagcgagggcaactggatctggatgcctggcgcgatttttacatatcgtatctgagaagaagtaaaaacgatgtgcctgatggcgatagcgaagacgactatgaggagaaattgcttattgccagatgggaactgacagcagaacaggctgttacacagcagttaaaaaatgaggtgtcaaaaggaaaacttattgataccgggttctgtatttttgccctcagcaagctggcaatggcgttatccagtacgcttgattccatccctttatccatgcagcgacagtttcctgatttaacaccgcgccatcttgaccatctgaaaacccttattgcgaagggggcaaatcagtgtgcgcgggcgggggataaattaccggatttactcgatgaatatatcagagcaacaactgaataa

SEQ ID NO: 6022 - DNA, 288 bp, Escherichia coli
atgtttacgccccagccatggaaaaaggtctttcagacatggcacatcccgaatcgtcgcctccacgtgagacttcataaaatcttcagcggcagaatccgtgggctgaaaaagcagactgtttcgggatttatgctcaataaaatacccgaccacccccagcaacatctttgtatagccaacacgggcagatttaatcagattaacagtccggatctgatcattccccatgctgttcatgatggcgatctggaacggcagcgttttccattctccctcaccatatga

SEQ ID NO: 6023 - DNA, 525 bp, Escherichia coli
atggaacgtgatggagcgcggcggcggaatttcattatccgcggcgctgaaaaacgtcagaccgtcacgggtccacatccccgtgttttcacagatccaccgcccgttgctctggtcaagctcagactgatggatcacgcagccatgatgttcacagaggtagaaaacgctttcggggctgtccttctcccatttaaggccaaaaggcgtggattcatcgccaaatttcagatactgctcctccccacagtgtgggcagggcacataaaaacgcatgaaatgcgccgactcgttggccgctttttcgatctggcaggtgcctttgattttaggcgtcgagccgcgaatggatttgggccatacagagccctcaatacgtttatccccaagcagggttggcgaaccctctttttcgacatccggttcgaacgaggaaagttcgtcatagcagaccacgtccacggatttttcacggtagtttttggcggcagcgccgcccaggcaccagaaacccacacccgatga

SEQ ID NO: 6024 - DNA, 474 bp, Escherichia coli
ttgaaaatatcattgatttctgcagtgtcagaaaatggcgtaatcggtagtggtcctgatatcccgtggtcagtaaaaggtgagcaactactctttaaagcgctcacatataatcaatggctccttgtcggaagaaaaacatttgactctatgggtgttcttccaaatcgcaaatatgcagtagtgtcaaagaacggaatttcaagctcaaatgaaaacgtcctagtttttccttcaatagaaaatgctttgaaagagctatcaaaagttacagatcatgtatatgtctctggcgggggtcaaatctataatagccttattgaaaaagcagatataattcatttgtctactgttcacgttgaagtcgaaggtgatatcaaattccctataatgcctgagaatttcaatttggtttttgaacagttttttatgtctaatataaattatacataccagatttggaaaaaaggctaa

SEQ ID NO: 6025 - DNA, 789 bp, Escherichia coli
atgggtgaatttttccctgcacaagttttcaagcagctgtcccacgctcgcgcggtgatcgagcgccatctggctgcgacactggacacaatccacctgttcggatctgcgatcgatggagggctgaagccggacagcgacatagacttgctcgtgaccgtcagcgccgcacctaacgattcgctccggcaggcgctaatgctcgatttgctgaaagtctcatcaccgccaggcgatggcggaacatggcgaccgctggagctaactgttgtcgctcgaagcgaagtagtgccttggcgctatccggcgcggcgtgagcttcagttcggtgagtggctccgccacgacatcctttccggaacgttcgagcctgccgttctggatcacgatcttgcgattttgctgaccaaggcgaggcaacacagccttgcgcttctaggcccatccgcagccacgtttttcgagccggtgccgaaggagcatttctccaaggcgcttttcgacactattgcccagtggaatgcagagtcggattggaagggtgacgagcggaacgtcgttcttgctcttgctcgcatttggtacagcgcttcaactggtctcattgctcctaaggacgttgctgccgcatgggtatcggagcgtttgcctgccgagcatcggcccctcatctgcaaggcacgcgcggcgtacctgggtagcgaggacgacgacctagcaatgcgcgtcgaagagacggccgcgttcgttcgatatgccaaagcaacgattgagagaatcttgcgttga

SEQ ID NO: 6026 - DNA, 348 bp, Escherichia coli
atgaaaggctggctttttcttgttatcgcaatagttggcgaagtaatcgcaacatccgcattaaaatctagcgagggctttactaagcttgccccttccgccgttgtcataatcggttatggcatcgcattttattttctttctctggttctgaaatccatccctgtcggtgttgcttatgcagtctggtcgggactcggcgtcgtcataattacagccattgcctggttgcttcatgggcaaaagcttgatgcgtggggctttgtaggtatggggctcataattgctgcctttttgctcgcccgatccccatcgtggaagtcgctgcggaggccgacgccatggtga

SEQ ID NO: 6027 - DNA, 840 bp, Escherichia coli
atggtgacggtgttcggcattctgaatctcaccgaggactccttcttcgatgagagccggcggctagaccccgccggcgctgtcaccgcggcgatcgaaatgctgcgagtcggatcagacgtcgtggatgtcggaccggccgccagccatccggacgcgaggcctgtatcgccggccgatgagatcagacgtattgcgccgctcttagacgccctgtccgatcagatgcaccgtgtttcaatcgacagcttccaaccggaaacccagcgctatgcgctcaagcgcggcgtgggctacctgaacgatatccaaggatttcctgaccctgcgctctatcccgatattgctgaggcggactgcaggctggtggttatgcactcagcgcagcgggatggcatcgccacccgcaccggtcaccttcgacccgaagacgcgctcgacgagattgtgcggttcttcgaggcgcgggtttccgccttgcgacggagcggggtcgctgccgaccggctcatcctcgatccggggatgggatttttcttgagccccgcaccggaaacatcgctgcacgtgctgtcgaaccttcaaaagctgaagtcggcgttggggcttccgctattggtctcggtgtcgcggaaatccttcttgggcgccaccgttggccttcctgtaaaggatctgggtccagcgagccttgcggcggaacttcacgcgatcggcaatggcgctgactacgtccgcacccacgcgcctggagatctgcgaagcgcaatcaccttctcggaaaccctcgcgaaatttcgcagtcgcgacgccagagaccgagggttagatcatgcctag

SEQ ID NO: 6028 - DNA, 204 bp, Escherichia coli
atggacagcgaggagcctccgaacgttcgggtcgcctgctcgggtgatatcgacgaggttgtgcggctgatgcacgacgctgcggcgtggatgtccgccaagggaacgcccgcctgggacgtcgcgcggatcgaccggacattcgcggagaccttcgtcctgagatccgagctcctagggatcgcctcagaaaacggaaaataa

SEQ ID NO: 6029 - DNA, 1206 bp, Escherichia coli
atgacgaataaccctaccgatgacagcagaccatggtcggtctttcttatttttctgcggcttggattgacatcttttggcggccccattgcgcacttgggctacttccgcgccgaatttgtcacacggcggcgctggctctccgaacggagctatgctgacttggtcgcgctttgtcagttcttgccagggcctgcaagcagccaggtcggcatagcggtaggactgtctcgggctggatacagcggggcgctggctgcttgggctggcttcacgctgccgtctgccatagccttgatcctttttgcgctcggcatctccagctatggcgattacgtctcgcagggcgcgttgcatggcttaaaagtggtggctgtggccgtggtcgctcaagcagtatggggcatggcgcgtaacctatgcacggatgggctgcgagtcaccatcatggcaattgctacctgcgtcgttttacttgtgccgtccgcgtggggacaggttggcgtgattgctatcgcaggcatcgcaggccggttattgttcaagccagcgaaagttgttgagcatgaccccctacctatcacggtcagtcaccgggccggcgtgctttggctctcgctgttctttgtcttgctgattggcctgccggtgttggccgaactgatgccaagtcaaaccatggcaatggtggattccttctatcgtgtcggatcactggtgttcggcggtggtcacgttgtgctgccattactgcaagccgaagtggtgccctccggctgggtcaacaatgaatcctttctcgcggggtacggggcagctcaagcggtgcccggccctttgttcacgttcgccgcgtttcttggtgcctcgatgaacaccgccccgtcgggctggatcggcggcattgtgtgtctgctggctatcttcgcgccctcgttcttgctggtcgtcggatcaatgccattttgggagcgtttgcgccgcaatacaggcatccaagctgcgctggccgggatcaatgccgctgtagtcggcttgctgctggccgcgctgtatcagcctgtatggactagcgccatctttcagccgcaagacttcggcttggcattagttgcccttgtcgcacttatgttctggaagctcccgccgtggctggttgtcctcggtagcggtgcagctgggtggctgttgagcgtcgctctgtga

SEQ ID NO: 6030 - DNA, 306 bp, Escherichia coli
atgactgacaaagacctctacggcggtttgatccgcctgcacatccttcaccatgcagccgaggaacctgtctttgggctggggatcatcgaagagctacgccgacacggctacgagatgagcgctggcaccgtgtacccgatgctgcacggcctggaaaaaaaaggctatctgacctcacgccacgaacgcaccgggcgacgtgaacggcgtgtttatgacatcactgaacaaggcagaactgcacttgctgatgcgaaaacaaaggtcaaggagctgttcggagagttggtagaaggtggttga

SEQ ID NO: 6031 - DNA, 765 bp, Escherichia coli
atgacggatttcaagtggcgccatttccagggtgatgtgatcctgtgggcggtgcgctggtattgtcgctatccgatcagctatcgcgaccttgaggaaatgctggcggaacgcggcatttcggtcgaccatacgacgatctatcgctgggtccagtgctacgccccggagatggagaagcggctgcgctggttctggcggcgtggctttgatccgagctggcgcctggatgaaacctacgtcaaggtgcggggcaagtggacctacctgtaccgggcagtcgacaagcggggcgacacgatcgatttctacctgtcgccgacccgcagcgccaaggcagcgaagcggttcctgggcaaggccctgcgaggcctgaagcactgggaaaagcctgccacgctcaataccgacaaagcgccgagctatggtgcagcgatcaccgaattgaagcgcgaaggaaagctggaccgggagacggcccaccggcaggtgaagtatctcaataacgtgatcgaggccgatcacggaaagctcaagatactgatcaagccggtgcgcggtttcaaatcgatccccacggcctatgccacgatcaagggattcgaagtcatgcgagccctgcgcaaaggacaggctcgcccctggtgcctgcagcccggcatcaggggcgaggtgcgccttgtggagagagcttttggcattgggccctcggcgctgacggaggccatgggcatgctcaaccaccatttcgcagcagccgcctga

SEQ ID NO: 6032 - DNA, 585 bp, Escherichia coli
atgccccgccccaagctcaagtccgatgacgaggtactcgaggccgccaccgtagtgctgaagcgttgcggtcccatagagttcacgctcagcggagtagcaaaggaggtggggctctcccgcgcagcgttaatccagcgcttcaccaaccgcgatacgctgctggtgaggatgatggagcgcggcgtcgagcaggtgcggcattacctgaatgcgataccgataggcgcagggccgcaagggctctgggaatttttgcaggtgctcgttcggagcatgaacactcgcaacgacttctcggtgaactatctcatctcctggtacgagctccaggtgccggagctacgcacgcttgcgatccagcggaaccgcgcggtggtggaggggatccgcaagcgactgcccccaggtgctcctgcggcagctgagttgctcctgcactcggtcatcgctggcgcgacgatgcagtgggccgtcgatccggatggtgagctagctgatcatgtgctggctcagatcgctgccatcctgtgtttaatgtttcccgaacacgacgatttccaactcctccaggcacatgcgtaa

SEQ ID NO: 6033 - DNA, 1239 bp, Escherichia coli
atgagcgaacgtcgatatagcccgctcgcgacgctgttcgcggcgacctttctcttccggatcggcaacgcggtggcggccctcgcgcttccatggttcgtcctgtctcatacaaagagcgcggcctgggcgggcgccacggccgctagcagcgtcatcgcgaccatcatcggcgcgtgggttggtggtggcctcgtcgatcggttcgggcgcgcgcccgtcgcattgatctcgggtgtggtgggcggcgtggccatggcgagcatcccactgctcgatgccgttggcgccctctcgaacactgggctgatcgcttgcgtggtgctcggtgccgcgttcgacgcacccggtatggccgcgcaggacagtgagctgcccaaactcggccacgtcgccgggctctccgttgagcgcgtctcgtcactgaaagcggtgatcgggaacgtcgcgattctaggtggcccggcccttgggggggccgcaatcggcctgcttggcgctgcgccaacgctcgggctgacggcgttctgctccgtccttgcaggtctgctcggcgcgtgggtgcttcccgcgcgtgccgctcggacgatgaccacgacggcgactctctccatgcgcgccggcgtcgcttttctctggagcgaacccctgctgcgccctctctttggtatagtgatgatcttcgtgggcatcgttggcgccaacggcagcgtcatcatgcctgcgctgtttgtagatgcaggacgccaagtagcagagctcgggctgttctcctcaatgatgggggctggtggtctccttggcattgccattcatgcgtcggtcggcgcccggatatcagcgcagaactggctggcggtggcattttgtggctctgcggtgggctcgcttctgctttcacagttgccaggcgtgccggtgctgatgttgttgggcgcgctcgtgggactgctgaccggctcagtctctcccattctcaacgctgccatctacaaccgcacgccgccagaacttctcggccgggtactcggcacggtctcggcggtgatgctgtcagcctcgcccatggttatgcttgcggccggcgcgtttgtcgaccttgctggtccgctccctggcctcgttgtatcggccgtgtttgcggggctcgtggctctactctcgctccgtcttcaatttgctacaatggcggcggcagccacagcctccgccccaacccatacagaaggtgaacactga

SEQ ID NO: 6034 - DNA, 906 bp, Escherichia coli
atgaccgtagtcacgaccgccgatacctcccaactgtacgcacttgcagcccgacatgggctcaagctccatggcccgctgactgtcaatgagcttgggctcgactataggatcgtgatcgccaccgtcgacgatggacgtcggtgggtgctgcgcatcccgcgccgagccgaggtaagcgcgaaggtcgaaccagaggcgcgggtgctggcaatgctcaagaatcgcctgccgttcgcggtgccggactggcgcgtggccaacgccgagctcgttgcctatcccatgctcgaagactcgactgcgatggtcatccagcctggttcgtccacgcccgactgggtcgtgccgcaggactcggaggtcttcgcggagagcttcgcgaccgcgctcgccgccctgcatgccgtccccatttccgccgccgtggatgcggggatgctcatccgtacaccgacgcaggcccgtcagaaggtggccgacgacgttgaccgcgtccgacgcgagttcgtggtgaacgacaagcgcctccaccggtggcagcgctggctcgacgacgattcgtcgtggccagatttctccgtggtggtgcatggcgatctctacgtgggccatgtgctcatcgacaacacggagcgcgtcagcgggatgatcgactggagcgaggcccgcgttgatgaccctgccatcgacatggccgcgcaccttatggtctttggtgaagaggggctcgcgaagctcctcctcacgtatgaagcggccggtggccgggtgtggccgcggctcgcccaccacatcgcggagcgccttgcgttcggggcggtcacctacgcactcttcgccctcgactcgggtaacgaagagtacctcgctgcggcgaaggcgcagctcgccgcagcggaatga

SEQ ID NO: 6035 - DNA, 681 bp, Escherichia coli
atggcaacgacgaacgcattcagtctggcgtcaccgccactggcacgcatctgccttcacggggatttacaacgatttggccgccgcctcagcctgtatgtgaacacggcagcggaagccattcgcgccctgtcgatgcagatgccgggctttcgccgtcagatgaacgaaggctggtaccagatacgtattgccggttatgacacggcaccggaggcggtgtacgcccgtcttcacgaacagctgggtgagggaacggtcatccacattgtgccgcgactggccggggccggaaagggtggactgcagattgtgctgggggcggcagccatcgtgggctctttcttcactgccggggcatcaatggcgttatggggttcagccctggcagccggtggtttttctgccaccacgatgctgttttcacttggagccagcatgattctgggcggtgtggcccagatgctggccccgaaggcaaaaacaccggattaccgcgcaacggataacggcagacagaacacgtacttttcctcactggataacatgattgcccaggggaacccgatgccggtgccttacggggaaatgctggttggctcccgccgtatatcccaggacatcagcacccgtgatgaaggcgggggcggaaaggtcgtggttatcgggcggcaggggtaa

SEQ ID NO: 6036 - DNA, 3693 bp, Escherichia coli
atgggaaaaggtggcggtaaggcacacacgcctcgtgaggcgaaggataatctcaaatccacgcagatgatgagcgtgattgatgcgattggtgagggaccgatagaaggtccggtgaagggactgcagagtatcctggtgaacaaaaccccgctgacggacacggacggtaatcccgtgatacacggtgtgacggcggtctggcgcgccggggagcaggagcagacaccaccggaaggctttgagtcctccggtgctgaaaccggactgggcgtggaagtgacgaaggcaaaaccggtgacgcgcaccattacgtccgcgaacattgaccgcctgcgggttaccttcggggtgcagtcactggtgcagaccacgtcaaagggcgaccgtaatccttcctctgtccggattctgattcagttacagcgtaatggccgctgggtgacggaaaaggatgtcaccattaacggcaagaccacctcgcagttcctggcctcggtgattctggataatctgcctccccggccctttaacatccggatggtcagggagacggcggacagcaccacggaccagctgcagaataagacgctgtggtcgtcatacaccgaaatcatcgatgtgaaacagtgctacccgaacacggccattgtggggctgcaggtggatgcggagcagttcggcggccagcagatgacggtgaactaccatatccgcggtcgcatcatccaggtgccgtcaaactatgacccggaaaaacgcacgtacagtggtatctgggacggcagtctgaaaccggcatacagcaacaacccggcctggtgcctgtgggacatgctgactcacccgcgctacggcatgggaaaacgtctgggggcggcggatgtggacaagtgggcgctgtatgccatcgggcagtactgcgaccagacggtcccggatggtttcggggggaccgagccgcggatgacctttaatgcgtacctggcacaacagcgtaaggcgtgggacgttctcagtgatttctgctctgcgatgcgctgtatgccggtatggaacggtcagacgctgacgttcgttcaggaccgcccgtcggatgtggtgtggccgtacaccaacagcgatgtggtggtggatgataacggcgtgggtttccgctacagcttcagtgccctgaaggaccggcacacggcagtggaggtgaattacaccgacccgcagaacggctggcagacctccacggaactggtggaagacccggaagccatactgcgctacggacgcaacctgctgaagatggacgcgttcggctgtaccagccgcggtcaggcccaccgtgccgggctgtgggtgataaagaccgaactgctggaaacgcagacggtggatttcacgctcgggtcacaggggctgcgtcacacacccggtgacatcattgaaatctgtgataacgactatgccgggaccatgaccggcggacgtgtcctgtccatcgatgccgccagccgtaccctgacgctggaccgggaggtgacactgccggagaccggcacggccactgttaatctgattaacggcagcggtaagccggcgagcgtggccatcaccgcacaccccgcgcctgaccggatacaggtcagtaccctgcctgatggtgtggagacatacggggtgtggggactctccctgccgtcactgcgccgtcgcctgttccgctgtgtctccgtccgggaaaacacggacggcacctttgccatcacggcggtgcagcacgtaccggaaaaagaagccatcgtggataacggtgcccgctttgagccgcagtcaggttccctgaacagcgtcatcccaccggcagtgcagcacctgacggtggaggtgagcgcagctgacggacagtatctggcgcaggcgaaatgggacacgccgcgggtggtgaagggcgtgcgcttcagtctgcgcctgaccagtggtaagggaacggatgccagactggtgaccaccgccatcaccgcagacacggagcaccgtttcagcggcctgccactgggggaatacaccctgacggtgcgggccattaacagctacggccagcagggcgaacctgcgaccaccaccttccggattaacgcgcctgcaaaacccgccaccattgagctgacgccggggtattttcagataacggcggtcccgcgtcttgcggtgtatgacccgacggtacagtttgaattctggttctcagaaaaacgcatcacgaacacggcacaggtggaaaaatctgcccgttatctggggaccggcagtcagtggactgtccaggggagccggattaagccggggacggatttctggttttacgtgcgaagcgtcaacctggtgggaaaatctgcttttgtggaagccagcgggcagcccagcaatgatggtgaagggtatctggaaattttccgggggctgatagatgagacgcttctgggccaggcactgaaagagcgcattgatgcttcagcgctgcgtacggaggtcacgcaactggaagaagacatccgtcagcggatggacacggatatcgcagaagtgacccggaaaatcggggaggcggaaaacagcctcacgcagctggttgcgaaaaagaatgaggaccagacactggccatcgcgcaggtgagccagaaagtggaccgggtgagcagtgaaatctcacagactgtcagccaggggcagtcagaaaatgcccgacagatagcacaggtccgccagtacgtggataaaaaagggagtgaaattacctcgaccacggataaaaaactgggtgaccaggccgtgaccatacagcaaatccagcgggttcagtcagacacgcgcaatgagctgaatgccatgtatatgctgaaggtgcagaaaacaaaaaacggtattccctatgtggccgggattggtgcggggattgaggatgttgatggtcagacgctgagcagtattctgctgcaggcggaccgtatcgcgatgattaccccggagaatggcaacaccacgccgctgtttgtggcgcaggggaatcagctgttcatgaacgacgtgttcctgaagcgactgtttgcggtgagcatcacgtcatccggcaatcctcctacgttttccctgacgccggatggcaggctgacagcccgcaatgcggatatcagtggagccatcacggcgaataccggcacgctcaataatgtcaccattaacgagaactgtgtcatcagagggaaactgtctgcaaaccagattgaaggcgatctcgttaaaacagtgggtaaggctttcccccgtgactcccgtgcaccggagaggtggccatcagggaccattaccgtcagggtttatgacgatcagccgtttgaccggcaaattgttattccggcggtggcattcagcggtgccagacatgagcgggagaataacgatatttattcgtcatgccgcctgatagtacggaaaaacggtgctgaaatttataaccgtaccgcgctggataatacgctggtttacagtggtgttattgatatgcctgctggtcgcggccacatgacgctggagttttctgtatcagcatggtgggtaaatggctggtatcccacagcaagtatcagcgatttgctggttgttgtgatgaagaaagccactgcaggcatcacgattagctga

SEQ ID NO: 6037 - DNA, 600 bp, Escherichia coli
atgcgtaaagtttgtgcagccattttgtccgcagccatctgtctgtccgtatccggtgcgcctgcatgggcgtctgaacatcagtccacactgagcgcggggtatcttcatgcccgtacgaacgctcccggcagcgataatctgaacgggattaacgtgaaataccgttatgagtttacggacgcgctggggctgattacgtccttcagttatgccaatgctgaggatgagcaaaaaacgcactacagcgatacccgctggcatgaagattccgtgcgtaaccgctggttcagcgtgatggcggggccgtctgtacgcgtgaatgaatggttcagcgcgtatgcgatggtgggtgtggcttacagccgtgtgtcgactttctccggggattatctccgcgtaactgacaacaaggggaaaacgcacgatgtgctgaccggaagtgatgacggtcgccacagcaacacgtctctggcgtggggggctggcgtgcagtttaacccgaccgaatccgtaaccattgaccttgcttatgaaggttccggtagtggcgactggcgaacggatgcatttattgttggtatcggataccgtttctga

SEQ ID NO: 6038 - DNA, 3027 bp, Escherichia coli
atgacagtaaaaatttctggcgtgcttaaagatggcacaggaaaaccagtacagaactgcaccattgtgctgaaggccagacgaaccagcagcacggtggtggtgaacacggtggcctctgaaaatccggatgaagccggacgttacagcatggatgttgagcatggccagtacagcgtcaccctgctggttgaaggttttccgccttcacatgccgggaccattaccgtctatgaaggttccagaccaggtacgctgaatgattttctcggtgccatgacggaggatgatgtccgaccggaggcactgcgccgctttgagcagatggtggaagaggtgtcacgtaacgcctccgcggttgcacagaatacggcagccgcgaaaaaatcagccagcgatgccagtgcatcagccagcgaggcggcaactcatgcaaccgatgctgcagcctcagcacgtgccgccagcacgtcagccggacaggccgcgtcgtcggctcagtcagcgtcttccagcgcaggaacggcatcgacaaaggcccgtgaagcagcaaaaagtgctgctgctgcagagtcatcaaaaagcgcggcagctaccagcgccagtgccgcgaaaacgtcagaaacgaatgccgcagcatcacaaaaatcggcagccacttctgcatccacagcgaccacgaaggcgtcagaagctgccacctcggcacggggtgcggcggcctcaaaagaggcagcgaaatcttcagaaacgaatgcatcatcaagtgccagtagtgcagcttcctcggcaacggcggcaggaaattccgcgaaggcggcaaaaacgtccgagacgaacgctaagtcttctgaaacagcagcgggacagagcgcctcagctgcggcaggttcaaaaacagcggctgcattatctgccagtgccgcgtcaacaagtgccgggcaggcctcagccagtgccaccgccgccggaaaatcggcagaaagcgccgcatcatccgcttcaacagccacaacgaaggctggcaaagccactgagcaagccactgcagcagcgaggtctgcttctgcagcaaaaacctctgaaacaaatgcaaagacttcagcagacaatgctgcttcctctaaggcggcagccgcatcgtcagccagttcagcggcgtcatcggcatcatctgcgtctgcttcaaaagatgaggcgaccagacaagcgtcagcagcgaaaggtagtgccacgacagcaacaacgaaagcatcagaggcggcaggcagtgcgacggcggcatctcagagcaaagttgctgctgaatccgcggcaacgcgtgccgaaacagcggcaaaacgggcagaggatattgcatccgccgtggggcttgaggatgcgagcacgacgaaaaaggggatagtacagctcagcagtgcaacaaacagcaccagtgaaaagctggcggcaacgccaaaggcagttaaaactgttaaagatagttcagttcaaaaaactggcgacacaatgggagggcagttaaaaatcagcacgataaatgctcttcgaatattcaaccaagcctttggccttatttttaggcgttccgaagattatcttcatcttattccgactaatgaaggggagggggaaaatggagacatcggttcattaagaccattctctataaacttaagatcagggttggtgtccatcggtaatggactaaaagttggtggtagtgttactggtaatttgaccggaaacgcagatactgcgaccaagatcaagacagcacgtaagattgggggcgtggcatttgatggatcggcagatatcaacttgcctggagtcaacgctaccggtaatcaaaacactacaggtaatgctgcgaccgccacgaaacttcaggcagccagaacgattaacggtgtgtcatttgatggtagtgcaaatatcacattgaccccttcaaatattggggcattggcattaactggagggactctttcaggtggtttaactgctgctggtgaggttatttcaaggtcagcaaatggtctgcgtattgcctatggcaactatggattctttatccgaaatgatggatcaaacacatattttatgttgacagattcgggtaacagtcttggtacgcacaatagcttaaggccgtttataattagtaaccatactggcaatgttacaattgcaactaaattaaacgcgagtggtggtatcactggatctttatcgggtaatgcaagcacagcaaccaaattgcaaactgcaaggacaattaacggcgtaaaatttgacggctcggcaaatattgaagcgtttccgccaggtgttccgctgccgtggccatcagatacaccacctgcaggttatgcaatcatgcaggggcagacgtttgataaggcagcatatccgaaactggctattgcctatccttcaggtgttattccagatatgcgcggctggacaatcaagggcaaacccgccagtggccgggccgtattgtctcaggaacgggacggcataaaatcgcacacccacagcgccagcgcatccagtacggatttggggacgaaaaccacatcgtcgtttgattacggcactaaatccacgaataacatcgggtcgcatacgcacagtctgagtggctctacggggtctgccggtgctcatactcatggtaatggtattcgttggccgggaggcggcggttctgcgttagcattttatgatggcggtgggttcacttatgtcaaggattcacagtatcaagtaagcccggagacttcttccagtagatcgtattatcaacgtattcagacacagtcagcaggtgctcatacccactcgctgtctggtactgcagcaaatgctggtgcacatgcacatactgtcggtattggtgctcatacgcactccgttgcgattggttcacatggacacaccatcaccgttaacgctgctggtaacgcggaaaacaccgtcaaaaacatcgcatttaactatattgtgaggcttgcataa

SEQ ID NO: 6039 - DNA, 585 bp, Escherichia coli
atggcattcagaatgagtgaacaaccacggaccataaaaatttataatctgttgtccggaactaatgaatttattggtgaaggtgatgcatatattccgcctcatacaggtctgccagcaaacagtaccgatattgcaccgccagatattccggctggcttcgtggctgttttcaacagtgatgaatcatcgtggcatctcgttgaagatcatcggggtaaaacggtttatgacgtggcttccggcgacgcgttatttatttctgaactcggtccgttaccggaaaatgttacctggttatcgccggaaggggagtttcagaagtggaacggcacagcctgggtgaaggatacggaagcagaaaaactgttccggatccgggaggcggaagaaacaaaaaacaacctgatgcaggtagccagtgagcatattgcgccgcttcaggatgctgcagatctggaaattgcaacggaggaagaaacctcattgctggaagcctggaagaagtatcgggtgttgctgaaccgtgttgatacatcaactgcacctgatattgagtggcctacgaaccctgtcagggagtaa

SEQ ID NO: 6040 - DNA, 207 bp, Escherichia coli
atgaacggcaaatctaggttagcctcttacggaccgaaaggtcaaggagaagcaggctatgaagcagcaaaaggcgatgttaatcgccctgatcgtcatctgtttaaccgtcatagtgacggcactggtaacgaggaaagacctctgcgaggtacgaatccgaaccggccagacggaggtcgctgtcttcacagcttacgaacctga

SEQ ID NO: 6041 - DNA, 180 bp, Escherichia coli
atgaaaaacgcattgcagtttttgtttgttgcgttctggttgttcgcatcatgtatgcccatcatcttcacagcaaggtatatggaaaaagttgatgttttgatattaatgtttggacatataaatgccctttttttaggggtgttcatggcggtcatgtgcattgaatactggcggtaa

SEQ ID NO: 6042 - DNA, 315 bp, Escherichia coli
atgagcgagattaattatcaggaagggcatgaaacggcagggcaggcaaaaccagttgcatggcgatatcgctacgtgaaaaaaggcgttacggactttcaggagaatctgtgggttggtgactggaaatatgtaccgacaaaagaggattgcaacgacaggccgaactatgaaattcaggccttattcgctgccccgccagttccggtgacatcagaagaactggttaaagctgtgcacttttatgaacaactaaaacgcgaaaatccaccagcatccggaaacctgattacagattcccagataaggcaatga

SEQ ID NO: 6043 - DNA, 177 bp, Escherichia coli
atggctgattttggttcaactaaatacaacgtcagttttgaagcatggcatgaactgttaatggactatgcagagttacgtggtggcagtgctgctgatgctgaagcatggcgtgatgattatgaagcaggaaaaactccggtcgaagcatattgtgatgagtggggcgatgaatga

SEQ ID NO: 6044 - DNA, 183 bp, Escherichia coli
atgcgaaagtttaaaataattattgaaacgggaatagccggtggagatttcgaggatgaattcgaagtggatgatgatgcgacgcctgatgaaatacatgacgaagcaaaagatattttctttaactactgcaattactcatatcacgaaataaaagacgaagaggaagagcaaaatggctga

SEQ ID NO: 6045 - DNA, 357 bp, Escherichia coli
atggaaataaaaccagaggatgagttaagcaatatcgttttatttccggtaaaagaggatgaccctcgtaatcaggttaattttctttatgagccatcggaaagaccatattgtcatcacgcctctgtccgggttgacgaaaaagagcgtcaggtccgctgtaaaatctgcggtgcagttgtggaaccatttgactggatgctctctgtggcgaaaagagaaaccagactggcagatgatgtaaggctcttgcgtcaggaggagcgggaaaggcgaaaaaatatagaaaagctaattcagattgagcgtaacgcgaaagcgcggatacgcagggcgacaaaatccagaactgaataa

SEQ ID NO: 6046 - DNA, 624 bp, Escherichia coli
atgagcgagattaactatcaggtactgcgtgaaaaggcagagaaagcaactaaaggaagctacatcgtagggcatacatctgttaaccaacacggcaatttaacaggagtttttgtttgtcaaaaatggaaaggagaacccggtggcgtgattgcggaacgtcatgttaactgcctgattgaaacagatgctcaggcttatgcaaacgctgagttcatagcagaggctaacccggctaccgtgctggcactgctggatgaacaggaaagaaaccagcaatacatcaaacgccgcgaccaggagaacgaggatattgcgcttacggttgggaagctgctcgttgagcttgaagcagcaaaatcaaaactcaacgagcagcgcgagtattacgagggagttatctctgatgggtgcaagcgtattgctgaactggaagcgcgggaagttcaattaccgactcgctacgaccttcgatatggacacccgataaatgcagatgagcgacatgtcatgatacctaaagaaaatggcagttggctttacctgattgacctggaacacgcattacgcgtcgctggcattcgcatcaaaggagaggagcatggaaataaaaccagaggatga

SEQ ID NO: 6047 - DNA, 297 bp, Escherichia coli
gtgaggatttatatcgccggtccgatgacgggatatgaaaatttcaaccgcgaggcgtttcacagggcggaagatgcgctgaaacgggaagggcataccgttttaaacccggcagtacttccggacgggctgactcaaccacactacatggatatttgcatggcaatgctccgttgcgtggatgcggtttacatgctgaaaggctggcagcagtcggcaggtgcaagggctgagctggcactggcggagaaactgggccatgcggtgatttttcaggaggtgggcagtgaatattga

SEQ ID NO: 6048 - DNA, 318 bp, Escherichia coli
gtgagtggctggaagaagtggcgctgggctgaaatcctgatactccggcagtgtgcgggaacgatgagagtcgaaagcatcggttatctgattggtcgtagtgagtcagccgtcaggacgaaagcgcgggaactgggtatcagcatgattttacggggtgattttcacccgtcggcaaaatattcacagcgtgatattgagctggcgcggcaactgcatcagcgtggcgtaccccgacgggaaattgccgaaaagtttgggatgaagttgggcgcagtgaataactacgtttatttcgacaggagggttcaggagtga

SEQ ID NO: 6049 - DNA, 717 bp, Escherichia coli
atggaaaccgtatctgacgcactgaaagcactgaaaagagcctcttcacaggtagtggcggcccgccttggaatcagccgtgaagatgcggtcaacgaactgtggaaactgaagcgccgcggtgaagcggataacaagggttcgatgtggtggctgattcaggctggtgaaagtgaaccggtgtcaccggtaccgaaagtgacagcgcaaatgctgactgaggcgattgaacaacatggcccacaaacggcggatgagctggcactgatgttcgggattacctcgcgccgggcgaattcatcgctggccatggcaatcagcaaagggcgtctgattcgcgtgaatcagggcggtaaatttcgttactgcataccgggcgctgatttaccggcagagccggaagctgcatccgtagcggaaaccgatggtaaagcctttcctcagccagcaggtgttgcgttaccagtacaggaaatgatggcacaggaagaaatgaaaacagaaatcgtggaagacattgtgaggttacagccatcgatcaccgaaatgaaagcagatgacctgattctaccatcgctgcatgtggctaaccgcgagctgcgccgggcgaaaagtgatgtccagaagtgggagcgagtctgtgctgcgctgcgggaactgaacaaacacagggatattctccgggatattaccgccaccagagagcagcagcggtga

SEQ ID NO: 6050 - DNA, 747 bp, Escherichia coli
atgaaaaacattgcggcagttggggttcttgaacgtattcgcagacttgcaccacaggggtcggttccaccgtaccggacggtggaggagtggcgggaatggcaacttgctgaaggacgaaaacgcagcgaggagattaaccgccagaatcgccagttgcgggtggaaaaaatcctgaatcgttcgggcatccagcctctgcacagcaaatgctcgtttgcaaattatcaggtgcagaacgacgggcaaaaatacgcgctgagccaggccaaatccatagctgacgaactgatgaccgggtgcacgaattttgtgttcagcggtaaaaccggcaccaggaaaaatcaccttgcagcggcgatgggcaaccggctgatggtgaaggggcgcagcgtgattatcgtcaccgtgtctgacgtcatgagcgtgttgcatgacagctacgacaacggcaaatccggggaaaaatttttacaggagctttgcggggttgatttgctggtcctggatgaaataggcgttcagcgggagacgaaaaacgagcaggtggtattgcaccagataattgatcgccggacagcatcactgtgcagtgtcgggatgttaacaaacctgaatcatgccgcaatgagtacgcttcttggtgagaggattatggaccgcatgaccatgaacggtggtcgatgggtgacgtttaactgggatagctggcgtccaaatgtcagcaatatgagggttgtgaagtaa

SEQ ID NO: 6051 - DNA, 888 bp, Escherichia coli
atggcccgtcttgcagactacagcaatgacgagggcgtgtcatggcctgccattgaaactatccggcgtcagatcggtgcaagaagtgaatccacagtgaaatcggctattgcagaactggcgaaagagggctggctgacgaaggaagagcgtaaggtcggtgggcgtaatgtaagcaatatctatcggcttaatgtggaaaaactcgaagcagctgcggcggcggcgcgtgagtcatataaaccgaaaagaaaaattagcccggcaaaaaatgacccgttaacagttgacccgtcaaatattgacccctcaacggttgacccgtcaaattttgatggatcaactgttgataaaaaactgccgattaggggggcgatgattgaccccgatccgtcagtattaaaacctgatccgtcagataaaagatcttcttgtccggacgcttcgcaaccggacccgcagacggctgaacaggattttttaacccgacaccctgacgcggttgtgttcagtgcgaaaaaacgccagtggggaagtcaggaagatttggtgtgcgcacagtggatctggggacgaatcgtgagtctttacgagcaggcggccagcgatgatggcgagatcactagaccgaaagaacccaactggacagcatgggccaatgacgttcgcacaatgcggatgctggatggcagaactcacagacaaatttgtgaaatgtttgggcgtctccagcgggattcgttctgggtaaaaaacatcatgagtccggcaaaactccgggaaaaatgggatgaactggttatccgcctggggcgttcgcctgcgcagcgttgcgtgaatcacatttctgaaccggacactgaaataccgccgggattcagggggtga

SEQ ID NO: 6052 - DNA, 426 bp, Escherichia coli
atgaaaatcaagcatgaacacatccgcatggcgatgaatgtctgggcgcatccggacggcgaaaaagtaccggctgcgaaaattaccaaagcgtatttcgagctgggaatgacgttcccggaactgtatgacgacagccatccggaagccctggcccgtaatacccagaaaattttccgttggctggataaagacacccctgatgctgttgaaaaaatgcaggctctgttaccggcgatcgaaaaggcgatgccgcctttgctggtggcccgtatgcgcagccacagttctgaatattaccgtgagatcgtcgaacggagggatcggctggtgaaggatgtcgatgattttgttgcgtcagcggttgttttgtatgaccagatgaatcgcggcggcccggcagggaatgctgtggtgatgcactaa

SEQ ID NO: 6053 - DNA, 216 bp, Escherichia coli
atgttcaaagatgatgttctgcgctatttcaaaaaaaagcgactagtagctgaggctcttggaatttcacatgtggctgttgtgcggtggaaagcagttattcccaaacttcgcgcaatggaactggatgaaattactaacagtgaattgaaatacaacccagaactttacaagaagcaggatagcacctcgaacgaaggaaagaatgattcatga

SEQ ID NO: 6054 - DNA, 717 bp, Escherichia coli
atgtcaaccatagcaacatcacttggtagtaacattggttacatgaaaaacactatcagcgaacgtattcggaatcgtcgaaaagacgttggattaacccaacagcaggttgcgaaagcaatcggcatatctcgtgtatccgtaacaaaatgggaaaatggctcttcaaaacctgacggtgagaatttgtatctactgtcaaaattgctttccaaatctcctgaatggattctttatggaaaggactgtcacgataaaaccgatgatctgcgtctgaatcagtacccttacattagtgacaacatcgcccggttgcccgttttaacgtgggaacaggctggttattgggatatgagttgtccagtaaccaagattcctggtattaataactgggttgatgtcatgacaaaaaccgctgaaaactcttttttattgcatgttgagggagatgcgatgacaaactctaacggcctcccaaccatccccgacggatctaccgtgctgatcacaccatgctcaagtaacattagagaactggtgggaaaaataatcttaatccaattggaaggaacgccaaacgtaacactaaaaaaagttgcgattgacggaccaaacatctatttgttgtcactgaatccgctttacaaacccatcgaactgaatggtggttacaccattaaaggtaaagtttcacaaatacatcaatacttagactga

SEQ ID NO: 6055 - DNA, 237 bp, Escherichia coli
atgacggcagggttcaactttaataactatgcagcaggtttttgttccgctaccccggcgttaaggggaaatgaggtcagcatggatactatcgatcttggcaacagcgaatctctggtatgtggcgtgttccccaaccaggacggtacgttcaccgcgatgacgtataccaaaagcaaaacgtttaaaaccgaaaatggtgcccgtcgctggctggaaagaaactcaggtgagtga

SEQ ID NO: 6056 - DNA, 129 bp, Escherichia coli
atggatttcaacacaatcatggaaaaggcttacgaagaatacttcgaaggccttgccgaaggcgaagaagccctcagcttcagtgagtttaaacaggcgctttccagttcggcaaaatctaacggctga

SEQ ID NO: 6057 - DNA, 303 bp, Escherichia coli
atgaaaaaaagaaatttcagcgcagagtttaaacgcgaatccgctcaactggtcgttgaccagaattacaccgtggcagatgcagccagcgctatggatgtcggcctttccacaatgacgcgatgggtgaaacaattacgtgatgagcggcagggaaaaacaccaaaagcctcccctattaccccggaacaaattgaaatccgtgagctcaggaaaaagctacaacgtattgaaatggaaaatgaaatattaaaaaaggctaccgcgctcttgatgtcagactccctgaacagttctcgataa

SEQ ID NO: 6058 - DNA, 267 bp, Escherichia coli
atggaactggccagacatctagaatttactgtcagcaccggcgttaaagtttacttctgcgatcctcagagtccttggcagcggggaacaaatgagaacacaaatgggctaattcggcagtactttcctaaaaagacatgtcttgcccaatatactcaacatgaactagatctggttgctgctcagctaaacaacagaccgagaaagacactgaagttcaaaacaccgaaagagataattgaaaggggtgttgcattgacagattga

SEQ ID NO: 6059 - DNA, 819 bp, Escherichia coli
atgtgtcaggtatttggtgtatccaggagcggttattacaactgggtacagcatgaaccctcagacagaaaacaaagtgatgagcggctaaaactggagattaaggtggcacatatccgcactcgcgaaacatatggaacccggcggctccagacggagctggcagagaatggcatcatcgttggtcgtgaccgactggcacgtcttcgtaaggagctaaggctacgctgtaagcagaaacgcaagttcagagcgactacgaactcgaaccacaatctgccagttgcgccaaatctgctgaaccagacgttcgctcctacagcaccaaatcaggtctgggtggcggacctgacgtatgttgccacacaggagggatggttgtacctcgctggcatcaaagatgtttatacgtgcgaaattgtcggctacgccatgggagagcgcatgacaaaagagctgacaggtaaagccctgtttatggcgctcaggagccagcgcccacctgccgggctaatccaccactctgatcgaggttcacagtactgcgcatacgattaccgggtcatacaggagcagtttggtctgaaaacatcaatgtcgcgtaaaggtaactgttacgacaacgctccgatggaaagcttctggggaacgctgaaaaatgagagcctgagccactatcgttttaataaccgggatgaagccatctcagtaatacgggaatacattgagattttctacaatcgtcagcgtcgtcactctcgtctggggaatatctccccggcagccttcagggaaaaatatcatcagatggctgcttaa

SEQ ID NO: 6060 - DNA, 456 bp, Escherichia coli
atggtagtgtccgctattgccagtacacctcaaactgagttctcatggttccgatacggacagtataacgaaacgggtatttacatctcgatcgagaagaccattatcattacaatcaccgtttctggtgggtgctttaaaaaagaatacagcattgtctcccacatgctggtcactgacaccataacagaggccaccctgtacgaaaacgggctgtatacgcgccacatcagactcagtcgcccagtatctgacagcaaataccccttgccacccggatctcagctcattaaaaatatgaccttacgactgcgcctgcaggatcagcaggaagaaacatccgtgacattatttcagggaaaaatgagtaccgacggaaataactattccatcatcaaaggtaaagtaagctcagtacttctgttattaaaaatgctgcagattaatcatgcctga

SEQ ID NO: 6061 - DNA, 462 bp, Escherichia coli
atgtttactgaagaagaaaaaatccgcgccattgagctttatttcaaatatggtaagaagctggctcccgtcgtacgcgaactgggctacccttcgaaaagaaatctgcggcgttggatccgctcatgggaagcaggtggtggcgcaaaagaatccattcgtcataagcaccgttactccgatgagcaaaaacaggttgccgttgaacattatcttaaccacggctgctgcctggcgtttaccagcagagccctgggttatccctgcactgatgtactcgctcgctgggttaatgaactttatcccgacagacgacgtatatttaccagtaaggccaacccggttgcgccctttgaaccagaagtcaaacgtcaggctgtcatggcactctgtacacgacaagtatcagccagtgagatcgccaggcgtattggtgtcagtcgtgcggtattgtataaatag

SEQ ID NO: 6062 - DNA, 204 bp, Escherichia coli
atgaagactatacgaggcgttggactaattaccctgatgtgtggtgtcagtacattaattccccagtatctggtggctgttaatcttggcgcggaactcccggctttcgcgggtagtcttgtcagtctgatagtaatagtctttatggcgaaaaaccgtaaagaaaaaaccgcccctgaattggggatgcggacgatttcctag

SEQ ID NO: 6063 - DNA, 216 bp, Escherichia coli
atgtggctactgattttctggctttcatctccctttaatgtctcttccggtgatgcccggcagcccacactggcggtgcacagccaggcatttcataccgaacgggcctgtcgcgatgcattgcacgccattaaaaaggagaatgttggcgaattttctctgcggggcgtttgtgtttctgacggaaatacgaaggaggaagctgagagctcatga

SEQ ID NO: 6064 - DNA, 369 bp, Escherichia coli
atgaaagataacagcacaaccgccaccccagaagcctggaaaatgcgttttctggccaacgggacatccggcacatggttttacactgacgacattacagtcactgacgcgtggcttcgcgcgcacccggatgatgtggaggttatccctctctgccggataccaccccgtcagcattcccatgaacaacatattgaagaactccgtgcagccctggcccggatgctgcatatgcatcatatgatgctggaaaccacgcattacagggaaaacatcaccgatgcccgttgtatccgtgaaatgcatgaagctccattacaggcgctcaatattctggccagatacccgcataaaaaggacgaggtgtga

SEQ ID NO: 6065 - DNA, 243 bp, Escherichia coli
atgaaggatgaaatacacagtaccagcatcaacccggatgttgttgagcagtttctggcccttatgaacacacattgtaaatcctcagaagaggcgctcgccatgctgagtacgctttgttacaacctgatggtgacatgcggtatccattccatggacagccagatgctcaatgggcatgggatatccatgcaacttcaggggattgatattgccgaaaggccaggtaagaatattcactaa

SEQ ID NO: 6066 - DNA, 537 bp, Escherichia coli
gtgagtaaccaatggcgaccagatatttgccctataaccggacgtgcatttttcatgtggattgagcatccgacattgggaaatgtgccgacgtatggtggcccattagatagctacaccatcccaacaaaggacagcgacggtgagttttcatgtgagcgttacgatcatgatttcggtggctgggtagaaagcgaatgtcttgggttatatctgattgatgataaagaacaatgcagagtctacgaactcgaggagcgcgttaaagagctggaagcgcgggaaataaaaccggccaagggcgaagttcttgtcgttgtatctggttttactggttgcggaaaaagcgccattgccggggaaatagaaatcgcgatgaaggctattggtgtaccggttcagtggactaatggcgatgcagaaaagcgcatgacaggagctgactggctgacagcaattgagatgtacaaaccaactgtgcgcattgtggaagttaatgtgccacgcgtcgctggcattcgcatcaaaggagagtga

SEQ ID NO: 6067 - DNA, 300 bp, Escherichia coli
gtgagggtgaggatttatatcgctggtccgatgaccgggtataaaaatttcaaccgtgaggcgttccacgatgcggaagaggaactgaaacgggaagggcatacagtcttaaacccggcagtacttccggacgggctgacacagccacactacatggatatttgcatggcaatgattcgttgtgttgatgcgatttacatgctgaaaggctggcagcggtcagcaggcgctaaggcagaactggcgctggcggagaagctggggcatgcagttatttttcaggaggcaaacagtgagtaa

SEQ ID NO: 6068 - DNA, 423 bp, Escherichia coli
gtggcaaaagtttttacacaagaagagcgggaaaaaattaaagggcaggttcttgaactcgtacgccagagtggacgcgagacgttacgacaactggaagctaaaactggggcaacaagatatctgatgagcgttctggccagagagctggttgccagtggcgatgtatacaactctggttacgggttattcccgtctgaacaggcgcgtaaggattggcaaaatacccgtaaaaagctctcaagggcaaagctgaagaaaccatctgcggttgatccggaccttatctggtcattaccagacggagaaatacgccgctacgacaggcgtcagaacataatctgtcgcgagtgccggaagagcgaagctatgcagcgtgtgctggcgttctatcagggtaattttcaggaggtgatggcgtga

SEQ ID NO: 6069 - DNA, 1071 bp, Escherichia coli
atggctaacgcctggctcagattatggcatgacatgccaaatgaccctaagtggcgaacaattgccagggtgtcagggcagccaattgcaacagtgatggcagtgtatatccacctcctggtgagcgcgtcacgaaatgtcacgcgaggtcacattgatgtcacgacagaagatttggcaagtgcgctcgacgtgacagaagaggtaattgattcaattttgcagacgatgcaggggcgggtacttgatggtgatttaatcactggatgggaaaaacgccaggtgcttaaagaggacaacggcaatatttcgcaaaccgcaaaatctcctgcagagcgcaagagggcgcagcgagagagggaaagaaagcgggaacaaaatggcgattgtcacggcgcgtcacgaaatgtcacgcacatgtcacgacgagtcacgacagataaagatacagataaagatacagatcaagaagatcaaaacactatggtccatggcgtaaaaaacgccacgaaccaggcaggggatgttcagaccgtcaatcctggtcagccagcaggcacgacaccggaagccgattcagcgtatgcgctgaaagccgattcgggcgctgtgcagcaggtgatgaccgcaaggccggagcaatcacaccaactgcagcagcctgaagccgattccgccattcagcgggaagccgatcgggtagtcccggaaagcaccgggcagtctgtgggacgagtggattatccggatgtgttcgaacaggtctggcgggagtacccgttgcgtgccggagcaaacccgaagaaatccgctttcagtgcctggaaggccagattacgcgagggggtgccaccagaggccatgctggatggcgtgaggcgttacgcaagatacttggcggctaccgggaaaacgggaacggaatttgttcagcgagcgacgacgttttttggaccggaccggaattttgagaacccctggttgctcccggtaagcagcacgaacaaccagcgttgtgtgaatcatatttctgaaccggataacgaaattccgccgggcttcagggggtaa

SEQ ID NO: 6070 - DNA, 228 bp, Escherichia coli
atgcgagttgatgaacttgttcagttttttggctctgttcagagggtcgctgatttttatgggataacccgcgaagctatttacatgtggcgtaagcgccccggtgaaatagttccgaaagggagagctgcggaagctgctgcatactccaagggaaaattatctttgaacccagagctttacaaaaagaaggataccacccgggacaaaaggaagagtgattcatga

SEQ ID NO: 6071 - DNA, 645 bp, Escherichia coli
atggaaagccttggcatcaggcttaagaaactcagaaaagataagggactcacccaagtagaactgggtaagctttcaggcgtgactggggttactatagggtactgggagaaagatctaaacgaacccggcagcaaagctctaagtaagttagcccaggcattaggaactactgagtcctatctcctgtatggagtatcgtctcctgaactatcttttgtgcagagcaatccaggcaccaagatcccctacttttcgtggggtgacgcgatttctttcctaatcttagaaggagagaaaacaatgggaaatgtcgataggatcaccacattctttgatgtagtggaaggtgattttgccgtttcaatgcctgatgacactatgcataacccctcagggtcaccaagtatcccggttggtgccactgtgatcctaagaccaggagagagttataaaaatggcagtatcgtcgctgtaatagttccagatccacttacaaatgaaccgtctatgactataaaaaaattagttattgatggaaaacttgtgtatttaagccctctcaatccgcgctatcaatcatccttgcttacgccagagtgtaaaattgttgccgtagcaaaaggtgtgcagttcaacctataa

SEQ ID NO: 6072 - DNA, 237 bp, Escherichia coli
atgacggcagggttcaactttaataactatgcagcaggtttttgttccgctaccccggcgttaaggggaaatgaggtcaacatggatactatcgatcttggcaacaacgaatctctggtgtacggcgtgtttcccaaccaggacggcacattcaccgcgatgacgtataccaaaagcaaaacgtttaaaaccgaaaatggtgcccgtcgctggctggaaagaaactcaggtgagtga

SEQ ID NO: 6073 - DNA, 129 bp, Escherichia coli
atggatttcgacacaatcatgaaaaaggcttacgaagaatacttcgaaggccttaccgaaggcgaagaagctctcagcttcagtgagtttaaacaggcgctttccagctcggcaaaatctaacggctga

SEQ ID NO: 6074 - DNA, 219 bp, Escherichia coli
atgcagaaacgagaacccgtcatcatcgcgccagactataccgatgatgaactttatgagtggatgcgccagaaaattaatgcagcgcaggatctgaaatgggccaatgaagccagggctaagcaggctgaaaatctgtccgctctggagcaggatatcaccaggctggaaaaagcagcggcattaagcattgccagaatgattacataccagcgttaa

SEQ ID NO: 6075 - DNA, 192 bp, Escherichia coli
atgaatccagtatttgcacttattctgacggtttttcttgtttccggagagccagttgatattgcagtcagtgttcacagaacaatgcaggaatgtatggcagcagcaaccgaacagaaaattccaggcaactgttatccggtcgataaagttattcaccaggataataacgaaatcccggcaggtctttaa

SEQ ID NO: 6076 - DNA, 312 bp, Escherichia coli
atgcttaacccacccaatggcgtgcaacttaagctccggatacatggcgttaacttctggcattttcatcaacgcttcaacgatatgtccgtcgaatgttgccatgtcttcctgcaacaattcctgtgcgctaataaccatatcaacggtgatgttttcacatgtgtcgaacttaaccatgacagcgttctgtacttcaggggccagcttgtcaaaagtgacgttcatcggatcggattcagtctcaaccgggacaaaagaagcagactcctcatcccagcggttttcctgcatatattcagcatcccatga

SEQ ID NO: 6077 - DNA, 279 bp, Escherichia coli
atgctgctggtcaaccgggatacctggtgtcgtgccggcgattaccgcgctccgggatcactggccgggatgattaaacaggcgtggtgcagtgccctgggagtggatatcggagatcataccacgctggcgcattttccggtcaggccagcggtgtggctggaacgcgatgatgacaccggctttcagcaggtgctggagcgtgctgactatctggcgaaggagagtaccaaagcttacggcaccggtgagcgcaactttggctgcagtcgtggctga

SEQ ID NO: 6078 - DNA, 384 bp, Escherichia coli
atgtacgcaaaatcttttctcgcacttgatggcaacggacgtctgaccggtgcccgtaccgcacagactgctccttatgcccactacacctgccacctttgcggcagtgcactcagataccacccgcaatacgacaccgaacggccctggtttgaacacactgacgacgggctgacggagcacgcgcagcaatgtccttatgtcaggccggaacgcagagaaatacggttgattaaacgtctgcagcaattcgtcccggataccttacccgtggtgcgtaaagccagctggcactgcagacaatgtcaccacgattattatggggagcggtactgcacacactgccagaccgggcgcttcagtgaggagggggtagcagaatga

SEQ ID NO: 6079 - DNA, 411 bp, Escherichia coli
atgaacggtataaaaacggggctggggatcacgccgggtgagcacattatcagtgccgactctgcgctcagcagaaatatccggcattgtttctgcctttcctgtcatggccggttgattctgcagacagatgctcagggggcatggtttgagcacgatttacatgccctgagcgagcaacagaaggcggactgtgtggtgctgaatccggaaaagtcccacccttacattgaggatatggcgatgtttttatcaccattaccggtcgtgctggagtggcattgtgtgatgtgtgagcagttttttcatgggaagaagttctgtgaggcctgtggtacggggatttattgcagagcaacatgtacgaagtatgtttacagataccagccagatttgctgctggactcctga

SEQ ID NO: 6080 - DNA, 234 bp, Escherichia coli
atgttgaccacaataagccacgacagcgtattgctgcgtgccgacgatcccctgatcgacatgaactacatcaccagcttcaccggtatgactgacaaatggttttacaagttaatcagtgaaggctatttccctaaacccatcaaactggggcgcagcagccgctggtacaaaagtgaggtggagcagtggatgcagcaacgaatcgaggaatcccggggggcagcagcatga

SEQ ID NO: 6081 - DNA, 522 bp, Escherichia coli
gtgcagataaccgaagccttacttgcagagccgggagatatccggcgttttattcagcaggcggtggaccactggccgcgtctgctggcatttcacttcacgctccattcggcagaagggaatattgatgaggggcagattcatgcattctgtacttccttttatgaacgtattactgagcgtaatcacacggccagtccatcctcaccggtggtgttacgctggttgcgggaagattcagaaaaagaaacgatgcgatgtttgctgttattcagtcagggactcatttgccattcgcgggccagtgtcacagttgatgaagaatgttcgcaagtggtggatttactgcaacagacctggggggagataagtgcaggcggacaatgccgggtggaaaggtgttatcaggttgcccgggatgatacatccggccagtacgttgcgttaaaaacagctgcgttatcttttgatattaccggtgatatccacaacagtcagggggggaccggtgacgataactga

SEQ ID NO: 6082 - DNA, 2850 bp, Escherichia coli
atgaaaatctgtctctaccataccctgaacccggaagcgatcccgggctataaaaaatttgcacaggccattaaggctgataacttcgttcaggctgatgttcgtaaaattgacactaatctttaccgcgcacggctcagtatccgggaccggttactgttttcactgtatcgctatcagggggaaacagtctgccttgtactggaatatattcgcaatcatgcctatcacacttcacgttttcttcgcaaaaacgtggtcattgatgaggaccgcttacaacaacaacctgtgccggatcctgttgatagtgcgcctgaacagctgacctacatcaatccgtctcacgggcgttttcaccgtctggataaaatgttgtcctttgatgatgatcagcaggcactgtacgaacatccgctgccgctggtgattatcggctctgcggggagtggcaagacagcgctggtactggaaaaaatgaagcaggctgctggtgatatactgtacctcagcctgtcctcatttctggtggaaaaagcgcgaacactttataacgcgtcgggtgaagggagcgaggtgcagaatattgactttctgtcgctgacggagtttctggaaaccctgcgcattccggaaggccgggaagtgaccttccgtgcgttcagcgactggctgccccgtaacaggaccacggctgcactgggatctgcccataccctgtatgaagagttccggggtgtgattggtgcggctgcgtccggcaacggaccgctgtccagggaggcttatctgtcgctgggggcacggcagtcgctctacagtatggatgaccgtcagacagtttataccctgtttgaacgttatacggcatggctgaaacagtcgcgtcagtatgacagtaatctgctcagccatcagtacctgccgcaggcagagccccgttacgatgccattttcgtcgatgaagttcaggatatgacgcctgttcagctgcagctggtactgaaaacgttacgtcatcccggtcagtttttactctgcggtgatgccagtcagattgtacaccccagctttttctcatggagttcgctcaaaagtctctttttccggcaacaccaggggaacgaggctgccattaatattctgcaggcgaactaccgtaacgggcaccatatcaccgcactggctaaccgtctgctgaggctcagacaggcccggttcagtgccattgatcgggaaagtcaccatttcgtcagaagctgtggtcagacggaaggcgttgtccggttactggaagacagggaagagacaaaacaggaactgaatggcaaaacatcacgttcgaatcgggtggcggttattgtgatgcatccggaacagaaagcacaggcacggtgctggttcagtacaccgctggtgttttcagttcaggaagtgaagggactggaatacgaaacggtgatcctccacaacatggtcagcggcgcccggcaggcgtttgatgatatctgtgagggcatttctccggcagaccttgaggttgaggcccgttattcccgtccgcgggacaggcaggatcgttcagcggaaatctataagttttttatcaacgcgctctatgttgcgctcacccgtgccacacacaacgtgtatctggttgaacagcaactgacgcacccgttatgggagctgcttgcgctcacgcatcaggaagagcaactggagctgaaggaagagatttccagccgtgatgaatggcagaaaaccgcacatctgcttgagaaacaggggaagcaggagcaggcggacagcatccgcagccggatcctgcagacgtctgaggtgccatggcaggtcatcaccgcagaggacgcccggcagtggaaagaacagatcctcgcaggcacggcaggtaaagccacacagttgcaggcgctggagtacagtctgatttattcccttttcccgctgtataatgcgctgtaccgggaagattttaagcccgcagggcagcccagggcgaagagtctgcagttgctggagcagaagtatttccggacataccaggtgaataatccggttgcgctgttgcgggatattgagcgttatggtgttgatcaccgctcgccgtttaatcttactccgctgatgtcagcagcccgggcaggtaatatcgccctggttcagcaactgcttgatcgtggtgcagatccctcgctgacgggtaatgacgggctggcggcttatcatcatgtactgtcagcggcggtcagtacgccccgttatgcgcaacagaaaagcgcgcagttgtataccctgctgaaaccagaaagtctctcactgcaggtggacggacgactcatcaaactggacaaccggcagatgtccatgttcctggtgctcctgatgcaggcgctgttccacacgcatctgggaggtgctctggttttttcagaagccttcagtgcggcacgactggcagagtgtgtggcccatcttccggaggcgctgctgccgggacgtcgcaaacgaaggagttatatcagcagccagctttctcagcatgaagttaacagcaaacacccgtatggcaaaaagctctttctgaggctgaaccacggacagtatattcttaacccgggacttaaaatcaggcagggggaaaggtggtgtgcggtttatgcgttgcagtcaccggaagatctgggtcatgatttgcagacttatctgcaggatatgtctccggaattagtgaaaatcctgggagggaaaaaggatgtttataaatacagtgaagaggctgtcggatactgggcggagatgatccgtcgtgccgctcagaaagcgtga

SEQ ID NO: 6083 - DNA, 870 bp, Escherichia coli
atggcgtcgccggaggtggcaagggattttgtctcgctgcatcttccggaggaataccgtcagttgtgtgatttatcgacgctgcggctggagccctgcacgtttgtggacctggagctgaagcagtatgcatgtgatgcactgttcagtatgaagactgtcagtggtgaggatggctatgtttactgcctcgtggagcaccagagtacggaaaacgcgtatatggcgttcagaatgctcaggtattcggtggctgcgatgcagcgacactttgaggcgcataaggtacttccgctggtgataccggtgctgttctaccacggtgagcgcagtccgtatccgtacagcatgaactggctggatggcttttctgacccggatattgcggctaaaatctacaccagagcgttccatctggtggatgtgacggtgatggatgacgatgaaattatgcatcaccgccgtctgggggccctgacgctgctgatgaagcacagccgcagccgtgaccttatgttacagatggacaggctggttcagctgatacaggactccctgaatgaagaactggcacaggtactgtttcactatctgctgaatggcagtgaacatgtgacggtgacgtttttgcagacgctggcgcagcgtctgccccagcacgaggacaacattatgacactggctgaacgcattgagcagaaaggtattgccaagggcattgagcgaggactggcacagggcattaagcagggtaagctggaagggaagctggaaactgcctgcaatatgctgaatgccggaatggaccgtcagacggtgctgcagatgaccgggctttcaaatgaccagctgaatatgctgaaacactga

SEQ ID NO: 6084 - DNA, 492 bp, Escherichia coli
gtgacggatctggtgcccggccagtccggtggaggtaaaggtaaggggcgcttgccggaaccggtcgagcgcgtcatccacgagctactgcaaaagcggttcctgaccaagcagaagcgcagcctagcggcctttcaccgcgaagtcactcaggtgtgcaaggctcaaaaactgcgagtgccggcgcgcaataccgtggccttacggatcgctagccttgacccgcgcaaggtcatccgccggcgggaaggccaggatgccgctcgtgacctacaaggtgtgggcggcgagcctcctgccgtgaccgcgccgctggagcaggtgcagatagaccatacggtcatcgacctgatcgtggtcgatgaccgcgaccggcaacctattggccgcccgtacctgaccctcgccatcgacgtgttcacccgctgcgtgctcggcatggtcgtcacgctggaagcgccgtctgccccgatttattgttcacagcgatag

SEQ ID NO: 6085 - DNA, 699 bp, Escherichia coli
atgcgcatcttcatcctcggcgcacttaatatttcgctattctggagcttgttgtttatttcggtctaccgcctgccgggcggggtcgcggcgacggtaggcgctgtgcagccgctgatggtcgtgttcatctctgccgctctgctaggtagcccgatacgattgatggcggtcctgggggctatttgcggaactgcgggcgtggcgctgttggtgttgacaccaaacgcagcgctagatcctgtcggcgtcgcagcgggcctggcgggggcggtttccatggcgttcggaaccgtgctgacccgcaagtggcaacctcccgtgcctctgctcacctttaccgcctggcaactggcggccggaggacttctgctcgttccagtagctttagtgtttgatccgccaatcccgatgcctacaggaaccaatgttctcggcctggcgtggctcggcctgatcggagcgggtttaacctacttcctttggttccgggggatctcgcgactcgaacctacagttgtttccttactgggctttctcagcccggggaccgccgtgttgctaggatggttgttcttggatcagacgctgagtgcgcttcaaatcatcggcgtcctgctcgtgatcgggagtatctggctgggccaacgttccaaccgcactcctagggcgcgtatagcttgccggaagtcgccttga

SEQ ID NO: 6086 - DNA, 1200 bp, Escherichia coli
gtgaaacccaacagacccctgatcgtaattctgagcactgtcgcgctcgacgctgtcggcatcggcctgattatgccggtgctgccgggcctcctgcgcgatctggttcactcgaacgacgtcaccgcccactatggcattctgctggcgctgtatgcgttgatgcaatttgcctgcgcacctgtgctgggcgcgctgtcggatcgtttcgggcggcggccggtcttgctcgtctcgctggccggcgctgctgtcgactacgccatcatggcgacggcgcctttcctttgggttctctatatcgggcggatcgtggccggcatcaccggggcgactggggcggtagccggcgcttatattgccgatatcactgatggcgatgagcgcgcgcggcacttcggcttcatgagcgcctgtttcgggttcgggatggtcgcgggacctgtgctcggtgggctgatgggcggtttctccccccacgctccgttcttcgccgcggcagccttgaacggcctcaatttcctgacgggctgtttccttttgccggagtcgcacaaaggcgaacgccggccgttacgccgggaggctctcaacccgctcgcttcgttccggtgggcccggggcatgaccgtcgtcgccgccctgatggcggtcttcttcatcatgcaacttgtcggacaggtgccggccgcgctttgggtcattttcggcgaggatcgctttcactgggacgcgaccacgatcggcatttcgcttgccgcatttggcattctgcattcactcgcccaggcaatgatcaccggccctgtagccgcccggctcggcgaaaggcgggcactcatgctcggaatgattgccgacggcacaggctacatcctgcttgccttcgcgacacggggatggatggcgttcccgatcatggtcctgcttgcttcgggtggcatcggaatgccggcgctgcaagcaatgttgtccaggcaggtggatgaggaacgtcaggggcagctgcaaggctcactggcggcgctcaccagcctgacctcgatcgtcggacccctcctcttcacggcgatctatgcggcttctataacaacgtggaacgggtgggcatggattgcaggcgctgccctctacttgctctgcctgccggcgctgcgtcgcgggctttggagcggcgcagggcaacgagccgatcgctga

SEQ ID NO: 6087 - DNA, 654 bp, Escherichia coli
atgtttatcagtgataaagtgtcaagcatgacaaagttgcagccgaatacagtgatccgtgccgccctggacctgttgaacgaggtcggcgtagacggtctgacgacacgcaaactggcggaacggttgggggttcagcagccggcgctttactggcacttcaggaacaagcgggcgctgctcgacgcactggccgaagccatgctggcggagaatcatacgcattcggtgccgagagccgacgacgactggcgctcatttctgatcgggaatgcccgcagcttcaggcaggcgctgctcgcctaccgcgatggcgcgcgcatccatgccggcacgcgaccgggcgcaccgcagatggaaacggccgacgcgcagcttcgcttcctctgcgaggcgggtttttcggccggggacgccgtcaatgcgctgatgacaatcagctacttcactgttggggccgtgcttgaggagcaggccggcggcaccgttgaacaggctccgctctcgccgctgttgcgggccgcgatagacgccttcgacgaagccggtccggacgcagcgttcgagcagggactcgcggtgattgtcgatggattggcgaaaaggaggctcgttgtcaggaacgttgaaggaccgagaaagggtgacgattga

SEQ ID NO: 6088 - DNA, 837 bp, Escherichia coli
atgttcatgccgcctgtttttcctgctcattggcacgtttcgcaacctgttctcattgcggacaccttttccagcctcgtttggaaagtttcattgccagacgggactcctgcaatcgtcaagggattgaaacctataaaagacattgctgatgaactgcgcggggccgactatctggtatggcgcaatgggaggggagcagtccggttgctcggtcgtgagaacaatctgatgttgctcgaatatgccggggagcgaatgctctctcacatcgttgccgagcacggcgactaccaggcgaccgaaattgcagcggaactaatggcgaagctgtatgccgcatctgaggaacccctgccttctgcccttctcccgatccgggatcgctttgcagctttgtttcagcgggcgcgcgatgatcaaaacgcaggttgtcaaactgactacgtccacgcggcgattatagccgatcaaatgatgagcaatgcctcggaactgcgtgggctacatggcgatctgcatcatgaaaacatcatgttctccagtcgcggctggctggtgatagatcccgtcggtctggtcggtgaagtgggctttggcgccgccaatatgttctacgatccggctgacagagacgacctttgtctcgatcctagacgcattgcacagatggcggacgcattctctcgtgcgctggacgtcgatccgcgtcgcctgctcgaccaggcgtacgcttatgggtgcctttccgcagcttggaacgcggatggagaagaggagcaacgcgatctagctatcgcggccgcgatcaagcaggtgcgacagacgtcatactag

SEQ ID NO: 6089 - DNA, 804 bp, Escherichia coli
ttgaatcgaactaatattttttttggtgaatcgcattctgactggttgcctgtcagaggcggagaatctggtgattttgtttttcgacgtggtgacgggcatgccttcgcgaaaatcgcacctgcttcccgccgcggtgagctcgctggagagcgtgaccgcctcatttggctcaaaggtcgaggtgtggcttgccccgaggtcatcaactggcaggaggaacaggagggtgcatgcttggtgataacggcaattccgggagtaccggcggctgatctgtctggagcggatttgctcaaagcgtggccgtcaatggggcagcaacttggcgctgttcacagcctatcggttgatcaatgtccgtttgagcgcaggctgtcgcgaatgttcggacgcgccgttgatgtggtgtcccgcaatgccgtcaatcccgacttcttaccggacgaggacaagagtacgccgcagctcgatcttttggctcgtgtcgaacgagagctaccggtgcggctcgaccaagagcgcaccgatatggttgtttgccatggtgatccctgcatgccgaacttcatggtggaccctaaaactcttcaatgcacgggtctgatcgaccttgggcggctcggaacagcagatcgctatgccgatttggcactcatgattgctaacgccgaagagaactgggcagcgccagatgaagcagagcgcgccttcgctgtcctattcaatgtattggggatcgaagcccccgaccgcgaacgccttgccttctatctgcgattggaccctctgacttggggttga

SEQ ID NO: 6090 - DNA, 816 bp, Escherichia coli
atgaataaatcgctcatcattttcggcatcgtcaacataacctcggacagtttctccgatggaggccggtatctggcgccagacgcagccattgcgcaggcgcgtaagctgatggccgagggggcagatgtgatcgacctcggtccggcatccagcaatcccgacgccgcgcctgtttcgtccgacacagaaatcgcgcgtatcgcgccggtgctggacgcgctcaaggcagatggcattcccgtctcgctcgacagttatcaacccgcgacgcaagcctatgccttgtcgcgtggtgtggcctatctcaatgatattcgcggttttccagacgctgcgttctatccgcaattggcgaaatcatctgccaaactcgtcgttatgcattcggtgcaagacgggcaggcagatcggcgcgaggcacccgctggcgacatcatggatcacattgcggcgttctttgacgcgcgcatcgcggcgctgacgggtgccggtatcaaacgcaaccgccttgtccttgatcccggcatggggttttttctgggggctgctcccgaaacctcgctctcggtgctggcgcggttcgatgaattgcggctgcgcttcgatttgccggtgcttctgtctgtttcgcgcaaatcctttctgcgcgcgctcacaggccgtggtccgggggatgtcggggccgcgacactcgctgcagagcttgccgccgccgcaggtggagctgacttcatccgcacacacgagccgcgccccttgcgcgacgggctggcggtattggcggcgctgaaagaaaccgcaagaattcgttaa

SEQ ID NO: 6091 - DNA, 873 bp, Escherichia coli
atggttaaggttgtggaagatgaaagaagcagaatacgatatcttgaaaggcgcttaaatgaaaatgggttttatttaccatcaagcctggccgataaagattatttctcgtatcagaaacggattttaaacactcttatttcacagggtgctgacacactgaaaataaataattttctggctgaaacagaccagcgttacttcgattccttaccatctgaggatgatcttaactggtatcgtaatgatgcccgcgccagtttatggttgacttgtgaattatatgaaatgattaagataaacggttatgaaaatacccttacctgtttatctccggagtcactgccttctcaccacagcgtgagggtggatgccatacgcaggtgtattgacaactggcctttcattttatacacaccatcaaattacctgaaccagaaaagtattgaatggaccacactactcgaaaaagatgatattttcagagaggttaaggccagaaattttgatatctgctcatggctcaaaaaatatattcaggaaaagacgaacatttccctgaactatgtctgtggagaatcatctgaagagattatggcctggtgttatgccagttacttcacatggaaaaaaaacaaccagaattcaccagactcagtagaactgtttacccggaagtttaaaagcgcctgggctacccaaaaaaacagaataaaaaatagggttgataaaaagctgcgccccctgaacgtaaatatttcacaggaggcatatgacaaactgagaaaattatccataaacgagggtatctcaaatgaccgggttattgaaagtgctctggacatgatttaccgtagcaaaattaaaaaataa

SEQ ID NO: 6092 - DNA, 213 bp, Escherichia coli
atgccccggaaagaagccaggctgttcttccggttgctgaagcggcaatatgaaaaagcgagaatcgttctgacgtcaaataaaggattcgccaactggggggaaatgctcggcgataatgtactggcaacagtgatccctgagcatctgctgcatcactcaaccacgctgaatattaaggggggaaagctaccacctgaaggaaaaacgtaa

SEQ ID NO: 6093 - DNA, 603 bp, Escherichia coli
atgaaacaacagtatcagacccgctacgaatggctccacgaaagctaccagaaatggctgaccggcttcacccggcacgccgtatcctggggcgtgtgtcatccgaatatctactacttccataatctgacgcccggttgggtgtcattcaatggtgaaaaaccggagattgccatcgtcccccagagcctgcaccggctgatttatggccctgacaaacgggccacgccgcccctggatgatgatctgatagtgaatttatgcaccagtgaacatctgctggttcatcatccgatgctggaaggcattctgctgtctgaatgtgaacgtctgaaacaccattctctggcaaataaactgatcagtctcttccgtcagtttggtggcacggagttacgccttaaactggtctggctttgctggcttgatttaatgaccggaaacagccttgaagactggacagagaacctgaaacggaaatcagaaaaagagctggaggaatggatcatcgaccgtcagaagcagagcgcagcactgacggatctgatggatcagtacgtgctcctggcataccgcacaacggttgacgataaccgtaactga

SEQ ID NO: 6094 - DNA, 207 bp, Escherichia coli
atgaccaccccagtttcgctgatggatgaccagatggtcgatatggcgtttatcactcagctgaccggcctgaccgataagtggttttacaagctcatcaaggatggggcctttccggctcccatcaaactcggccgcagctcccgctggctgaaaagtgaagtggaagcctggctacaggcgcgtattgcacagtcccgtccgtaa

SEQ ID NO: 6095 - DNA, 213 bp, Escherichia coli
atggaagttaaaaccaaagaggactggctgtatcagttccgtcgttgttcatcccgggagacactggaaaaagtgatttcccacacgcgttataaacttacccctgcggagctggaaaccttcaactctgcggtcgatcaccgactggcagaactgacaatgaacaagctttacgatcgtgttcccgcttcagtctggaaatatgtcatctga

SEQ ID NO: 6096 - DNA, 213 bp, Escherichia coli
atgcttagacaacatcaggatagcctcttaccgcgctttgcgcaaggagaagaaggccatgaaactaccacgcagctctcttgtctggtgtgtgttgatcgtgtgtctcacactgttgatattcacttatctgacacgaaaatcgctgtgcgagattcgttacagagacggatacagggaggtggcggctttcatggcttacgaatccggtaa

SEQ ID NO: 6097 - DNA, 327 bp, Escherichia coli
atgactaaaaatacacgtttttcccccgaagtccgtcaacgggcagttcgtatggttctggaaagtcaggacgaatatgactcacaatgggcggcaatttgttccatagctccaaagattggctgtacgccagagactctgcgtgtctgggttcgccagcatgagcgggataccgggggcggtgatggtgggctcaccaccgctgaacgtcagcgtctgaaagagctggaacgtgaaaatcgtgaactgcgccgcagtaacgatatccttcgccaggcttccgcttattttgcgaaggcggagttcgaccgcctctggaaaaaataa

SEQ ID NO: 6098 - DNA, 747 bp, Escherichia coli
gtggatgaggtcgcctttaaaaaaggacatcgttatataacggtgatctccgatcgcgatggtcgtgcgctggccttaacggacgatcgtggcacagagagcctcgccggctatcttcgcacgcttactgacgggcagttgctggctatcaaaacgctctcaatggacatgaatgcaggctatataagagcagcgcgtatccacttaccctgtgcggttgagaaaatcgccttcgaccgcttccatgtagcaaagcaacttggcgaagtggttgataaaacccgtcagaatgaacatccgcacctccctgttgaaagttggcgtcaggcaaaggggacccgcttcctgtggcagtacagcgataaatggatgaccaaatccaggcaggaaaagctgatatggctgcgtgcacagatgaagctgacaagccagtgctgggcgctgaaagagctggcaaaggatatctggaacaggccatggagtgaggaaagacgtaatgactgggagagatggctggctctggcggccaacagtgacgttcctatgatgaaaaacgccgcgaaaacgataggaaaaaggctttacgggatcctgaatgccatgcgacaccgtgtctcaaacggaaacgcggaggcgcttaacagtaagatcaggctactgaggataaaagccaggggataccgaaatcgggagcgctttaagctgggcgtgatgttccactacgggaaactgaatatggcgttctga

SEQ ID NO: 6099 - DNA, 261 bp, Escherichia coli
atgaattatgttatctgcactaccattgtcgcccttggtctcattctgacaggctacgcaactgctgcagatgaaattaatcgtcaggacgttgttggtttgatgccgtcagactatatttctgttggtaatctatatacaccagaagaggtggcaactgcgcttaaagacaaagcggagcaggcaggaggttctcatttccgaatcacttcattgggaggaaaaaataaacttgatggaactgccattatctatcgctaa

SEQ ID NO: 6100 - DNA, 561 bp, Escherichia coli
gtgtctacttatgagaatatacttcgcataacggatactctgatccagcaacgcggatttttggggttcagttacgcagatctggaaaaagaaattggtatcagaaaagccagtattcatcaccatttcccgaggaaaactgatcttggtatagcctactgccaatacaaaacagaagtatttgatagacttaatataactctccataatgtttcttcaggtgtacaacgtctcaggacatatcttgatgcatttgctggttgtgctgaaagaggggaaatgtgcggtatttatgccatgctatccgacagccatcagttttctcctgaattacaggaggctgtaagtcaactggcacatcaggagatacagatgattaaagatattatcacctccgggcagaatagtggagagttcaaaacagttcttcttccggatgagctcgccgttatagtctgttctacactaaagggggcactgatgttaaatcgacttccaccacatgatatctattcaggaaccgttaacgctttaattaaaatgcttgatacccgtacttaa

SEQ ID NO: 6101 - DNA, 1029 bp, Escherichia coli
atgggattgtttacgacccgccagttactcggttataccgaacaaaaagttaaatttcgtgcgctgtttctggaactgtttttccgccgtacggtgaatttccataccgaagaggtgatgctggacaaaattaccggaaaaacgccggtggcggcctatgtctccccggttgttgaaggaaaagtgctgcgtcatcgtggtggtgaaacccgcgtgttgcgtccgggctacgtcaagccgaaacacgaatttaattaccagcaggcggttgagcgccttcctggtgaagatccatctcaactgaatgatccggcttaccgccgtctgcgtatcattaccgataacctcaaacaggaagagcacgcgattgtccaggtggaagaaatgcaggcggtaaatgctgtgttgtatggcaaatacaccatggaaggagaccagttcgagaaaattgaggtcgattttggcaggtcgacgaagaataacatcactcagggtagtggtaaggagtggtcaaaacaggatcgtgacacgttcgatcctacacatgatattgacctctactgcgaccaggccagcggtcttgtgaatattgccattatggacggtaccgtctggcgtcttctgaatggttttaagctgttccgcgaaaaactggatacccgtcgcggttcaaattctcaactcgaaacggcagtgaaagatctgggcgcagtggtgtccttcaaggggtattacggcgatctggccattgtggtggcgaaaatgtcttatatagcagaagacggtatcgaaaaacgttatcttccagatggcatgctggttctggggaatactgctgcagatgggatccgttgttacggtgccattcaggatgctcaggcgttgtccgaaggtgtggtggcctcttcccgttatccgaaacactggctgacggtaggggatcccgcccgtgaatttaccatgacgcagtccgcgccgctgatggtgttgccggacccggatgagtttgtggtggtacaggtgaaataa

SEQ ID NO: 6102 - DNA, 1053 bp, Escherichia coli
atggggaacccttttctgcgggccggtgtggaggtcgatcgatatggccgtgccgtcgcgtaccatatctgtgaggatgattttccgttctctggtagtggacgatgggaacggatcccgcgtgaacttcccaccgggcgtccggccatgttgcatattttcgagccggtggaggacgggcagacccgtggggctaatcagttttacagcgtcatggaacggctgaagatgctcgattccctgcaggcaacacagcttcagtcggccatagtgaaggcgatgtatgcagcgacgattgaaagtgaacttgataccgaaaaggcctttgaatatatcgccggcgcgccacaggagcagaaggataatccgcttattaatattctggataagttctccacctggtatgacacgaataacgtgacactgggcggtgtcaaaattccgcaccttttccctggtgatgatctgaaactacagactgcgcaggattcagacaatggattttctgcgcttgaacaggcgctgctgcggtatatcgccgccggtcttggcgtttcctacgaacagttgtcccgtgattactcgaaggtcagttattcaagtgcccgcgcctccgccaatgagtcgtggcgctattttatggggcggcgaaaatttattgcggcccggctggccacgcagatgttttcctgctggctggaagaggcacttcttcgggggattattcgtccgccacgggcacgttttgatttttatcaggcgcgatcagcctggtcacgggcagagtggattggtgccggaagaatggccattgacgggctcaaggaagtccaggaatcagtgatgcgcattgaggccggactgagcacgtatgagaaagagctggcgctgatgggcgaggattatcaggacattttccgccagcaggtcagggaatctgctgagcggcaaaaagccggactctcacgtccggtgtggatagcgcaggcgtatcagcagcagatagcggagagtcgtaggccggaagaggagacaacaccacgtgagacgtaa

SEQ ID NO: 6103 - DNA, 636 bp, Escherichia coli
atggccgacattatcagcgaactgaacagcctgagcgataaaatccagaaactgtctgacgatgcggccacggcgaacgccgatccggcggatatggccgcgcaggtggcgctgataaccagccggataaatgacctgaccgcctcggtgattttgatgcacgcgccgaaaggtgtggcggtcgccagcggcgagcacctgcaactggccgcagtgaaaaacctccagataaatgcgggaaacaacgccgatatcggcgtggtgaagaatatgtttatcggcgtagggcgggcgctgagcgtgtttgtgcgcaaggcgggtatcaaactgattgccaataaaggcgcagtatcggtacaggcgcagcacgatctgatggagttactggcgaagaagtcgatagagatcgtcagtactgaggacgagatcaggatttcagcgaagaaaaaaataacgattaatggtggtggaagttatatccggattgagggtagcggcattgagccgggaacgccgggggattataacgtcaaagcggtgcattacgggcgtatgggaaaagcacatgagcctgttgagttacaaatgttggcagagaaagtagatgagccacccgtaaaatttttcttttcttaa

SEQ ID NO: 6104 - DNA, 2364 bp, Escherichia coli
atgattattagcccgccatttatacgagcgaaaaataacaatgaaaacgatgctcattggattgaaaggatgatgccagttgaacctgaccgtgactatcccatcaactatgggggatcatggcatggaggcatccacgttagacatacaaacagtgacaggcaaccagaatatgtccgtgccattgctgatggtgtcgtggtatctattcgcaatccctctgaccaggcggcatgtagtcttccgccgctcaattataatggaagcacagacgatgggtatgttctgcttcgtcatgaaactgaaataggcactggtgaggacggcaatattgtttattactctctttacatgcacctggaaaagattgaagagggtatcagtgaaggaaataaagtctaccggaaatcgtcactgggaatgccggggcatgtcgacggggatcgcggcctgcacttccaaattttctgcgatgatgacaatctgagaaaaataaccgggcgcactacacctgagatggatgtgagccgtcatgggcgtaccgacgtggtttacggggatatctatttttacctgccgcccggtacccgcttttacaggagtgcgccggaaaacaacgcagtagataacacaggtgaagtttttcagagcacggaaccgttggttgtcaccatgtgttttgatactggccattgtatcatgactacccgcagagcaaatccggtgataccaagccgttatgacattgtgggagaagtgttgacggatgctgacggcactgattatgaatacaacttgtacagtgctgcactgagactttatccgcaaagtccaagcgcagggtttgagttactgcgctttggtcgggttatcaataccgagcatgaaacactgatacccgcgaatgcgccactgtggcgaaccgtgagctatcccggtgggcaaggagtgataaatctggcggcagatgttgtgacaaaatttagcgacggtgattttccgcactggagtggctggcgactggtagatgacgacgctgacagcaacagtcagtgcaattcagtaatattacgtggtggtggttttacggattttcgtcagatgatttgccacttcccactggagtggtgtaatacgggaatagaagcgcgttacggctggttgaaagaaggggtaatacaggaacgtcaggaaaatgaggctaacagcgatttatcattaggtacggattactacaggccaaataatgtcgaatataatacgactggagatagccatggagaatctcctcagtcagctatatcagaaatgccagatttgtcttatgaacagtcaaatgcttatgaaaatgccgtcagagttttattactgggagaagaagactggcagacgttggtgaagcatattaaggcactgtgttttgataccagtagtattgctgaaggacgggtttggcattttaatccgggtgagtttattaagcattttaggaagtgtgggtgggttgacaaagcaatattgaagcgaatttttgcctctggtactaatgaccgtgatagagcggttattgaacaaaaagttgatatatatggtacggctataaatattgttatgaataaatatataatgaattctcctctgagacgtgctcactttctggggcaaggggcagtggaatcttcccgtttaagaagtatgcaggaaaaaagccagtatcaaactgttgatgaaaatggtcggccagtcggcggaggtattgttccggactcattacgtgatgagaattcggacttgggtcattggtatggtgcaattgagactgaggtcgatggatacttctctggtgttaaatataattctggtggaggacgaattgcaggctcatatgactggatactaggaaactgcgacactgaggatgcccagaagtttcgtgggcgaggttttaagcagttaactggtcgatcaaattatgccgaatattgggtctatcgtgcctggatagatacgaatagttttaccgctaagtggtgggaagaccctctgtggcgcttacatgatcgtcgtcgtttaactcgcataccggctaatatcgaagagcctcacagggttaccagaagcgaatataactgtatcgatactggtggattctttattgttaagaccgttgatcgtcggggtactcggtcaagtattaccagagcgatggatcaagacagtgaagttattcatttgaacaataccacgatagatacaacggatgaacaaacaataagaagtgtgtcccgtgcaattaatggtggtgaaaatggtttgccagacaggataaccttcacacgcgcagctaagaaggttttaatatga

SEQ ID NO: 6105 - DNA, 858 bp, Escherichia coli
atgaaaaagagtttctttttatttttatatttcatatccctgagtgcatatcctggagatgaaaatgcatacatatatggtaacgatggaacaattgaaggaattaaatacaattatctcgataatgtaataaagttcaatattggtgatatgtcttttgatgttttcagcaaagataattttttcttaaagaaatgtcttctggataactacagtgacagtatagatacaggcatttcatttttaacaacagatcatgaagcaattgtttttcagtcatcgggtcggtttgttttaacaaaagatgtaatcgatatatgtaattcttctgaagaaaagcatgcggaagtttatccacctgtcaatattgggatgattgctgacatgaacttcaggaaaaatgttgctcttatatatcacccaatgggtaatatttcaggaaaaatggtatatcaggctgagttgtcaaagtttgttaaaaaaaattatagatcaagcagcttcttaacggaggttgatcctgaaaaaatacagtacctgataacgggtaggtttttttacaatggtagttacagagatttagaaaaaaaaagttattcaggcccatttgatctcgtctcaggcgttatctctcctgatgcaaaatatgtagatcctttcggtctggggtgtgatattgataaggtcaatcatagtataccacacgtgtatgaaatatccacagcacaacgagttgcatttaaaagcgatccagcgttatctgcgataataaataaagaacaaatagataaaaagtgtcggcagttattaaaagcatctgcatctttgaaagatttaggtggatatttaagtcagtag

SEQ ID NO: 6106 - DNA, 684 bp, Escherichia coli
atggccgacattatcagcgaactgaacagcctgagcgataaaatccagaaactgtctgacgatgcggccacggcgaacgccgatccggcggatatggccgcgcagatagcattgataaccagccggataaatgacctgaccgcctcggtgattttgatgcacgcaccgaaaggcgtggcggtcgccagcggcgagcacctgcaactggccgcggtgaaaaacctccagataaatgcgggaaacaacgccgatatcggcgtagtgaagaatatgtttatcggcgtgggacgggcgctgagcgtgtttgtacgcaaggcgggtatcaggctgattgccaataaaggcgcagtatcggtacaggcgcagcacgatctgatggagttactggcgaaaaaatcgatagagatcgtcagtaccgaagatgagattaaaatcaccgcgaagaaaaaaataacgattaatggtggtgggagttatatccggatagagggtagcggcattgagccgggaacgccgggggattataacgtcaaagcggtacattacgggcgtcagcctaaagcctcggagaaggttcctatgccagaatttcccatcctttcagccgtggactcatccgatttttgtcttgaatgcctgctgaatgccatcaaaaacgatgacgctgttgttgaaggagtgtaa

SEQ ID NO: 6107 - DNA, 822 bp, Escherichia coli
atgtcttcagaacaacaactggcagaccactggcttaagcgaaacgaaacgttaaacgcctttattttatttgaaggtggagcgctctctcaggaaatgcttcagatcatgatggagcattataaataccgacgaatttccctgtatcaactgcccgatcttaaaaaggtagcagcttacggtccctggttggttcgtattgaaagtgaaaaggatctggcgatggtgcttgtcgggaaactacctgtcgcaggcattactttctccgaattgcagctggagccactggcgtctcggcttgctgtgggatgtatggcaaaaacgccggatggtcgtgaagttctgctgaggtactacacgccccgagtgctgaaacaactggctgcccggcctgatatggactggcatccggtaatgttttctcagatagaatcatggtggatgctggaagatacgcggtggcaaaggctgaacatgccgcttactgtggcaaataacagcgatgagacagtggaaatcataacgcttgatgaaccgctctggcagaaaatagcggatcggggagatgtatctgcgcttttaagagagtggcgcaccatgaaaacgagtgagcacttcccgccctgtattcagcgaaatatggtggagaaggccttgaataaggctcaggtggtcggattgacaaagccactggatcagaaaatttatgcgttgagctatctgaatggaaagaaagcgtatcttgagtcagccgaatttcaggtcatgctggaaaaggtgaaacgaaatgaaatatcgctgtctgaccttggtcgccagtga

SEQ ID NO: 6108 - DNA, 528 bp, Escherichia coli
atggggctatttacccgactggaaaaatttgaccaaaagcttacgcgtggttatgcccgctgggggcgttgggtgtggcggatgctaatagcgatccccgtggcttattttttactgtgtgtaggaatatcaatctggggagctccaactggaggagtcatattggtgatccatagtgaactggataggccaatattaggattcagcgtgaacggcatggctggggcaaatgcgtttgcacatggtggaggttcaacgacttgctgcggtgacatcagagggaaagaagctgaggtcgtctggacattgagtacgactcgcgctcagtataatacgggactgcgtgaagaagttcgacgtatcactctgcctttgcctgaaaggaaacatgggcaggattttttgcatgtacatttcttgcctggtgataaggtttttttgggttggagtgaaggagctggttcgccctatgagaaacgaaaagaaccttcttatccgagtcgaaaaaatcaggaggcgcagccgtga

SEQ ID NO: 6109 - DNA, 1869 bp, Escherichia coli
gtgataagtgaatcagtgatttccgcagctgtacgagcacaacagtcagaagatggtaaagtgggaaattgtggccggatctggcatgtcgctttcttttttgatggagtgggacgaaatatcgaccgggatgcgacagactgccgtttgagtaatattgcccgcctgttccgggcatatcctgatgaacaaaaaaatacaggtgatacttgttataataaattttatttctccggaatgggcactgcctaccatgacgattctgtcgacaatattcacgctcttatggatattggtttagataactttctggaggatatgaaaagtctgccagaggatactatatcggatgcaggggagtctgttattaaaggagaaaagaaatggacggatgtgcttggtaatctccttgaggatctcaataatccggtagagtgggttaaagggattggcaagatggcggctaagtcggtaggcaaagcaggaattgagtccacaccttggttgcgtgatagcgaagccatgagcgcctattttatgacgggagaacccgtacgccttgaagctgcaaagcgattgtttaagaagttttatacggaaaatatgaagggagatgttcccatcaaaaaaatttctgtttcattatacggttttgaccttggagctacactggcacgtaaatttttggataattttcttaaggaagtttgcctgaaaaataaagaaaaaaaacaccaatataaaaacgcgttggtagatattgcttttattggtctttttgactgttctcggcattcaccgactagtagtaataatgggttggactatttttttatgtggttgggtttaccagggaaaatgattggttcagtattaggtgaaaaagctattgatcaggactcaccactgccggacgtagtaaataacgcacttcaccttgtagcagctcatgaacggcgtccatggcgtggtctgtatctgttggggaaaaaaacggatacagcgaataaaaaatacagggaagaactgcttcccggttgtagtgaagatattggtggtggcttgaaaccggatgaacagaaacccagtgcagaactgtgcagggttgcactatacaatatgtatcatgcagcatgtcaagctggtgtgccatttcctgattttgacactttggatcaatatgatacgaaagttgccagctattttattatgaatgatgctgttcagggaggatctgtaaattactgggttagtcgttatcaaagagaggaagtgaaggataaagtatttagtgaggcaatgcaggagaagtatctagataactattttctctggttgggtgagcaatattatatgtatcagtatgaacgggaacgtctggataaggagttgacatcggctcatcgtgggaaaataagtgactatgggccacttgcaggtacgggaattaatccaaatactaacgctgatgatataaaatcgcagatttcagaacttgactcactatggggatggttgaatgatgtaaaaagtgtagctattggattacgaaatgactttatagtcaacccgaggaaaaatgatagccgaataaaacttaaacctcaggtttataatgctgctgtcaatcgggctgtgaaattccttgagttttctcgcgcagtttataatgataaaaatctgccatcatcatcatctttgacggcaaatacactatattccttttttgtgcatgatatacaaaaggttgatcacacaccttctatatctgaagatttcttcttacgtcgctcatctgaaattccagatgcggatgaacctccaggaaataaagatgatggaaagaaacatactcgcagggatgattag

SEQ ID NO: 6110 - DNA, 432 bp, Escherichia coli
gtggtgaaagaaacggtccccatgccagcgagcggagactatcaggatctccccttgtggaggggacttacgatcgcggcggtcagggagattcgaaggaattactcgcaggacatcatcatcccaatgacgctcgtgcacccggactatctgactgagatactcgacggggtaaggcggatcgacgatcagctgctgcacatctttctgacgctcaacgaggacctattgcgtcaccggatcgcgaaccagaccatgcatcctgacccgaatcgaaatgcggagattcgagagtggcgattagcgaatgtcgcccgatgcttggccgcaagggaacggcttccatgcacaacccgtgttctcgatagtggtgcacacaccagcgatgaactcgcagcgatggtgctcgacggaatcgatgggcgcacctga

SEQ ID NO: 6111 - DNA, 228 bp, Escherichia coli
atggtcaacagctacagcctgtctgacgattccggcgtcatggctgcggcggctatcacgcattttttgttcggtcaggcggtgttttcgtacctcaatggttggagcgtgttgatcggacctggtacaggtttggacagcacgggctgcaaatacgcaagggatttaatgggcctggtggcgttcacggcttttatcgtgacgtttctgttcaggggctactcataa

SEQ ID NO: 6112 - DNA, 1137 bp, Escherichia coli
gtgtctcaactctcccagcttcgaagccccgccgccgtgcaggctgccatcgatgagttcgtgcaactgggccgcacgaaattcctggcgcgccacggctacggcaagtcccgcgacttcctggtacgtgatccgaagaccggcaccgattgcgattccaaggccatcgccggtgtggccttcggcaagcaatttcccgagcagggcccgctcactgctgacagcttctccggtggcgaggcgaccgtcgttccggcgctgacgcggctcgggtttcgcatcattcgcatcggcgaagactggtccgaagaagaggtcctggccacggtcgaagactatttcgacatgctgcgtgccgaggcggctggggagccgtacaacaagtccgagcacaaccaggcactgcgccaactgctgaacggtcgcagcaagtcttcagtcgagctcaagcaccagaacattagcgccgtactcgatgccctgggcctgccctatatcaacggctacaagccacgcggcaacagccaactgctgctgcgtaaatccgtacacgcctacgttctggaacatcagcagacggtcggcgctcttgtcgatgccctggaggaggtaaaacttccgggtgacaaaacctaccgagcggctttggtagaaccacccgcccgtgaagtgcttgtgcgtaccccggcatctctacggcaacgcctaccgcgaaagttcgattatgccgctcgcgatgaagccaaccgcaagctgggccgggcaggggagcagtgggtgattggctacgaacagcaacgcctgaccgagctcggccacccagagctttttcagcggctggattgggtgtccgacacccagggagacggtgcggggttcgacatcctgtcgttcgaagaggacgcccatgagcgcttcatcgaggtgaaaaccaccaatggcggggtaggctcgtctttcttggtcagccacaacgaactcgaattctccaaggaggcgggcgatcaattccatctgtatcgcgtgttccagtttcgggacggtccgcgcctgttcacgctacccggcgacctcagccaacatgtgcatctcaagccgacggactaccgggcgagtttccggagtttggtggggtaa

SEQ ID NO: 6113 - DNA, 1047 bp, Escherichia coli
ttgtgcgaagaggtgcacctgaacctggcctatcgctggttctgccggttgggtctggaagacgaagtccccaatcactcgaccttctcgaagaatcgccatgggcgttttcgtgacagcgatctattccgctggttattcaatgaggtgctgcggcgctgcatggcagccggcctagtcaagggtgaaggtttcgccgtcgacgccagcatcattaaggcggatgccagccggcaacgtggggtggcgggagatgaggtcgattggaacgatccaaagctcagcagccgcgcagtgcgcgagtacctcgaagcccttgatgaagaggcgctggctgaggctcttcccaagaaaatttcgctcactgatcctcagtcccgttggacagcagcgccaggtggcccggccttttttgcctactccacgaattacctgatcgacactgagcacggtgtgatcatggacgtggaagctaccccggcgcaccgtaccgccgaagtcgattcgactaggacgatggtcgagcgtgtcgaggcgcagttcgatctcacaccggaacgccttatcggcgataccgcttatggcaccgccccgatgctggcctggatggtcgaagaaaaggacatcgaaccgcatgtgccggtgtgggacaagaccgagcgcaaggacgacagcctctccagtaacgactttcactggagtcaggacgccaatgaatatcgctgcccagccggcaaaccgctacgcagtgaatggcgcgccttcacccagcaaaggtcgcgggtaactaaggccaaaaccgtcatttaccgctccagccaaaccgactgcgccacctgcccgttgaaagcgaaatgctgccccaacacgccgaatcggaagatcgtccgcagcatccatgaggctgcccgcgacgtggctcgacgcatcgccaagacaccggagtacctcgtctctcgctgcgaacgaaagaaggtggagatgcttttcgcccacctcaaacggatcatgaaactcgaccgtttacgacggcactgttgcaaatag

SEQ ID NO: 6114 - DNA, 603 bp, Escherichia coli
atgaaacaacagtatcagacccgttacgagctgctccatgaaaactaccagaaatggctgaccggcttcacccggcacgccgtatcatggggcgtgtgtcatccgaatatctactatttccataatctgacgcccgggtgggtgtcattcaatggcgaaaaaccggagattgccatcgttccccagagtctgcaccggctgatttatggtccggacaaacggagctccccgtccctggatgatgatctggtggtgaatttatgcaccagcgaacacctgctggttcatcatccgatgctggaagggatcctgctgtctgaatgtgagcgcctgaagcaacattctctggcaaacaaactgatcagcctcttccgtcagtttggcggcacggagttacgtctcaaactggtctggctctgctggcttgacttaatgaccggaaacagccttgacgactggacgaaaaacctgaaacacaaatcagaaaaagatctggagcaatggatcattgcacgtcagggtcagagtgaaccactgacaaatctgatggatcagtacgtgcttatggcataccgtacatcggttgatgccgctcacagttga

SEQ ID NO: 6115 - DNA, 207 bp, Escherichia coli; identical to SEQ ID NO: 5080

SEQ ID NO: 6116 - DNA, 249 bp, Escherichia coli
atgaatatcatgttattgttaatgccagcgaatgtggcgttgaagatccgttgcgccggtccgggtcccggtcatgatgaccgggaccacagagaggcgatggttctgtcagaaggtcacattcagtgtggcctgaccgttatacccttcagcgctgctgccgctgacgctgtgggcataaccggcctgaacgcccagggtgatattttcccggacacgggcttccagtccggcctgcaggtccagtga

SEQ ID NO: 6117 - DNA, 456 bp, Escherichia coli
atgattcacctgttcaaaacctgcatgattaccgccttcattctggggttaacgtggtctgccccactccgggcacaggatcaacgttacatcagtatacgcaatacagatacgatatggctcccgggaaatatttgtgcttaccagttccggctggataatggcggaaacgatgaaggatttggccccctcaccatcactctgcaactcaaagacaaatatggtcagacgctggtgaccagaaaaatggaaacggacgcttttggtgacagtaatgccacgcgaaccacagacgcatttctggaaacggagtgcgtggaaaatgtcgccacaaccgaaatcattaaagcaactgaagaaagtaacggccatcgtgtcagtctgccgttatcggttttcaatccccaggactaccatccactgctgattaccgtttccggaaaaaatgttaactga

SEQ ID NO: 6118 - DNA, 573 bp, Escherichia coli; identical to SEQ ID NO: 5923

SEQ ID NO: 6119 - DNA, 600 bp, Escherichia coli
atgtcgccggaggactggctgcaggcagaaatgcagggtgagatagtcgcgctggtccacagccaccccggtggtctgccctggctgagtgaggccgaccggcggctgcaggtgcagagtgatttgccgtggtggctggtctgccgggggacgattcataagttccgctgtgtgccgcatctcaccgggcggcgctttgagcacggggtgacggactgttacacgctgttccgggatgcttatcatctggcggggattgagatgccggattttacgcgggaggatgactggtggcgtcacggtcagaatctctatcttgacaatatggaggcgactggtttttaccgtgtcgcactgacagaggcgcagccgggcgatgtgctgctgtgctgctttggttcatcggtgccgaatcatgccgctatttactgtggtgatggcgagctgctgcaccatattcctgaacaactgagcaaacgagagaggtataccgacaaatggcagcgacgcacacactccctctggcgtcaccgggcatggcacgcatctgcctttacggggatttacaacgatttggccgccgcatcgaccttcgtgtga

SEQ ID NO: 6120 - DNA, 699 bp, Escherichia coli
atgcaggatatccgacaggaaacactgaatgaatgcacccgtgcggagcagtcggccagcgtggtgctctgggaaatcgatctgacagaggtcggtggcgagcgttattttttctgtaatgagcagaacgaaaaaggtgagccggtcacctggcaggggcgacagtatcaggcgtatcccattcaggggagcggttttgaactgaatggcaaaggcaccagtacgcgccccacgctgacggtttctaacctgtacggtatggtcaccgggatggtggaagatctgcagagtctggtcggcggaacggtggtcaggcgtaaggtttacgcccgttttctggatgcggtgaatttcgtcaacggaaacagcgatgccgatccggagcaggaggtgatcagccgctggcgcattgagcagtgcagcgaactgagcgcggtgagtgcctcttttgtactgtccacgccgacggaaacggacggcgctgtttttccgggacgtatcatgctggccaacacctgcacctggacctatcgcggcgatgagtgcggttatcacggtccggcggtcgcggatgaatatgaccagccaacgtccgatatcacgaaggataaatgcagcaaatgcctgagtggctgtaagtttcgcaataacgtcggcaactttggcggcttcctttccattaacaaactttcgcagtaa

SEQ ID NO: 6121 - DNA, 330 bp, Escherichia coli
atgaaaaccttccgctggaaagtgaaacccgggatggatgtgacatcggctccttccgtcagggaggtgcgctttggtgatggctattcccagcgtgcgcctgccgggctgaatgccgacctgaaaacgtacagcgtgacgctttctgttccccgttgggaggccacggcgctggagtcgtttctggctgagcacgggggctggaaggcctttctgtggacgccgccttatggttacaggcagataaaggtgacctgcgcaaaatggtcgtcgcaggtcagtatgttgcgtgttgagttcagcgcagagtttaaacaggtggtgaactga

SEQ ID NO: 6122 - DNA, 1188 bp, Escherichia coli
gtgaaggtgtctgcgggcgatcgtcaggaagacagtgctcatgctgcccttctgacgcttcaggcagaactccggacgctggagaagcatgccggagcgaatgagaaaatcagccagcagcgccgggatttgtggaaagcggaaaatcagttcgcagtactggaggaggcagcacaacgtcgccagctgtctgcacaggagaaatccctgctggcgcataaagatgagacgctggagtacaaacgccagctggctgcacttggcgacaaggttacgtatcaggagcacctgaacgcgctggcgcagcaggcggataaattcgcacagcagcaacgggcaaaacgggccgccattgatgcgaaaagccgggggctgactgaccggcaggcagcgcgggaagccacggaacagcgcctgaaggaacagtatggcgataatccgctggcgctgaataacgtcatgtcagagcagaaaaagacctgggtggctgaagaccagcttcgcgggagctggatggcaggcctgaagtccggctggagtgagtgggaagagagcgccacggacagtatgtcgcaggtaaaaagtgcagccacgcagacctttgatggtattgcacagaatatggcggcgatgctgaccggtagtgagcagaactggcgcagcttcacccgttccgtgctgtccatgatgacagaaattctgcttaagcaggcaatggtggggattgtcgggagtatcggcagcgccattggcggggctgttggtggcggcgcatccgcgtcaggcggtacagccattcaggccgctgcggcgaaattccattttgcaactggaggatttacgggaaccggcggcaaatatgagccagcggggattgttcaccgtggtgaatttgtcttcacgaaggaggcaaccagccggattggcgtggggaatctctaccggctgatgcgcggctatgccaccggcggttatgtcggtacaccgggcagcatggcagacagccggtcgcaggcgtccgggacgtttgagcagaataaccatgtggtgattaacaacaacggcacgaacgggcagattgggccacaggcgctgaaggctgtgtatgacatggcccgcaagggtgcccgtgatgaaattcaggcacagatgcgtgatggtggcttgttatccggaggtggacgatga

SEQ ID NO: 6123 - DNA, 678 bp, Escherichia coli
atggcgctacagcaggaatggaacggcaggcatcagcgcggtatgaagtcccggctgaagcaggctcgtctgccgcgggtcaaaacgctggagcagttcgactttaccttccagccaggcatcgatcgtaaggtcgtccgggaactggcaggtctggcgttcgtggagcgcagcgaatacgtgatcctgctgggaccttcgggtgtaggaaaaacgcatctggccatagctcctggcgtgaaagcggtggatgcgggacatcgggtactgtttatgccactggacagactgatcgcgacacagatgaaagcgaaacaggaaaaccggctggagcgtcagctacaacaactgagttatgcccgggtgttgatcctggatgaaataggctatctgccgatgaacagagaagccagcctgttcttccggctactgaaccgtcgatatgaaaaagcgagcattatactgacgtcaaacaaagggttcgcagactggggagaaatgttcggagatcatgtgctggcaacagcgatcctggagcggctgctacatcactcaaccacgctgaatatcaaaggagagagttaccggttaaaagagaaacgtaaagcaggagtgctgaccaaaaacacaacgccaatcagtgatgatgaaatggtggaaagcggacagcatcagtaa

SEQ ID NO: 6124 - DNA, 1020 bp, Escherichia coli
atgaataacgaacagatgcttatcaaatgcaaagatccccgtaaatgtcggttttatgccgaatatctgaatcacaaataccccaatgaattccctcagtttgcgcctgacaacccacaaaactgtatcagaaatgttaattcgtttttaaaagaaaagtattataaagcttcaaacaattcttttggtgtttttggttcgactgcagaagaagctctcagcaaagaaattaatgaacttgaaattattgcagggcaggcaatactgcctgaagagagttttctctggttgaaaactgacgaacttgcgactttctttacctggactactatttatctgtcgaaggaagaccatacaaaattcccgaaaataaaccataattcatcaggaataaaaaacggaattgaagtcaggaaaatacgaacagttaccgatgaaacgttaaatacttacaaaaaaagtaaccttccggataatccatcatcccataacgaacgaataaaagtaatcatttcatattttgactcctgccattctttaattaataaaaatgcaaaaagcatatacctcgaggaactcagacaggcgtggcttaaaaagaaaagcgcttgtcaaaagtttaagtggctccttcctgacgatgatgaaatgtgtcagtggttctggacaagactgaaacaaaaacaggatgaaaaacatccagtacataacccagtgacccggtggttcataccatcttcaacgaaagaatattatcttgcctctcttgtcgcctttgctttatggaaagaagcgcctgataccattgaactgttcagaacacgaataaatcatgcctggcatcagaaaaaacaaaaggacaaatatcggagtgatggtaaaaaggccattaatatacatataagaagcaatgtgaaagaaatgcttgatgagctcagaactgtttacggtctgagaacaggagagttttttgaaatgctgattacagagaaatatcttgaacacaagcgaaggaagtaa

SEQ ID NO: 6125 - DNA, 312 bp, Escherichia coli
gtggacagtacgattgttgaagtgatgggcatcagtgcgcagttcacctccggtgcacagcgtggcggcgaggttcatggcgtttttgacgatccggagtcgctgggttttgccagtagtgggatccgtattgaaggaagtaacccgtcattatttgtgcttacggatacggtttgtgctgtacggcgtggtgacacgctgaccattaacggcgagatgttctgggtggaccgtgtttctccggatgacggagggagttgttatctctggctcaaccgggggcaaccacctgccgccagccgtcgtcgctga

SEQ ID NO: 6126 - DNA, 579 bp, Escherichia coli
atggccatacagggtcttgagcaggccgttgaaaacctcagccgtatcagcaaaacggcggtgcccggtgcctccgcaatggccattaaccgcgttgcttcatccgcgatatcgcagtctgcgtcacaggttgcccgtgagacaaaggtacgccggaaactggtaaaggaaagggccaggctgaaaagggccacggtcaaaaatccgcaggccagaatcaaggttaaccggggggatttgcccgtaatcaggctgggtaacgcgcgggttgtcctgtcccgacgcaggcgtcgtaaaaaggggcagcgttcatccctgaaaggtggcgacagcgtgcttgtggtgggaaaccgtcgtattcccggcgcgtttattcagcaactgaaaaatggccggtggcatgtcatgcagcgtgtggccgggaaaaaacgttaccccattgatgtggtgaaaatcccgatggcagtgccgctgaccacggcgtttaaacagaatattgagcggatacggcgtgaacgtcttccgaaagagctgggctatgcgctgcagcatcaactgaggatggtaataaagcgatga

SEQ ID NO: 6127 - DNA, 312 bp, Escherichia coli
gtggacagtacgattgttgaagtgatggggatccgtgcgcagttcacctccggagcacaacgtggcggcgaagttcagggggtttttgacgatccggagtcgctgggttttgccggtggcggggtccgtattgaaggaagcagcccgtcattatttgtgcggacggatacggtgcgtgccgtgcggcgtggtgacacgctgaccattaacggcgagatgttctgggtggatcgtgtttctccggatgacgggggaagctgttatctctggctcaaccgtgggcaaccacccgctgttaaccggcgacgataa

SEQ ID NO: 6128 - DNA, 534 bp, Escherichia coli
atggcgataaaagggcttgatcaggcgattgataatctgagccgggttcgtaaaaacgccattccggcggcttcagcaatgacgattaaccgcgtggccacaacggcgattaatcagtcttcatcacaggttgcccgggagacaaaggtacgccggaaactggttaaggaacggtccagactgaaacgggcgacggtcagaaatccgaacgcaaaaattatcgttaaccgcggtgatcttccagtgattaagctggggatcaggatgctgggccgtcgtccgaacagcatacttaaagccggtcagcatcggtatcagcgggcattcattcagcgattaaaaaacggtcgctggcatgtcatgcagcgtgtggccgggaaaaaccgttaccctattgatgtggtgaaaatcccgatggcggccccactgaaacaggcgtttgatgagaatgttgaccgtatccggcgtgaacgcctgcccggagaactggcatccgcgctgaaacaacaactgaggattgcgataaaacgatga

SEQ ID NO: 6129 - DNA, 396 bp, Escherichia coli
atgaaacacactgatatccgtgctgcagtgctggatgcactcgagcagcatgaacacggggcgacgctgtttgatggtcgccccgttgtttttgacgaagaggattttcctgcgatcgcggtttatctgacggatgcagagtataccggtgaagagctggatgcagatacctggcgggccacactgcatattgaggtgtttttaccggcacaggtaccggattcagagcttgatcagtggatggaaagccggatttatccggcgatgactgcgatcccggcactggctggactgattaccacgatggttacgcagggctatgagtatcgtcgtgatgacgatatggcgttatggagctctgcggatctgacttattccattacatacgagatgtga

SEQ ID NO: 6130 - DNA, 2091 bp, Escherichia coli
atgcgaataaccactctggcttccgtagtcattccctgtctcggattttcagccagcagcatagctgctgcagaggatgtgatgattgtctctgcatccggctatgagaaaaagctgactaacgcagccgccagtgtttctgtgattagccaggaggaattgcagtccagccagtaccacgatctggcggaggctctgagatcagtagagggtgtggatgttgaaagtggtacgggtaaaaccggtgggctggaaatcagcatccgaggaatgccagccagttacacgctgatactgattgatggtgttcgtcagggcggaagcagtgacgtgactcccaacggtttttctgccatgaataccgggttcatgccccctctggccgccattgagcgtattgaggttatcagggggccgatgtccacactgtatggctctgatgcgatgggcggtgtggtgaatatcattaccagaaagaatgcagacaaatggctctcttccgtcaatgcagggctgaatctgcaggaaagcaacaaatggggtaacagcagccagtttaatttctggagcagtggtccccttgtggatgattctgtcagcctgcaggtacgcggtagcacacaacagcgtcagggctcatcggtcacatcactgagcgatacagcagccacgcgtattccttatcccacggagtcacagaattataatcttggtgcacgtcttgactggaaggcgtcggcgcaggatgtgctctggtttgatatggataccacccggcagcgttatgataaccgggatgggcaactggggagtctgacggggggatatgaccggaccctgcgctatgagcgaaacaaaatttcagctggctatgatcatactttcaccttcggaacatggaaatcgtatctgaactggaacgagacagaaaataaaggtcgtgagctcgtacgcagtgtactgaagcgcgacaaatgggggcttgccggtcagccgcgggagcttaaggaatcgaaccttatcctgaattcattactgcttacccctctgggagaatctcatctggttacggtggggggcgagtttcagagctcgtccatgaaagacggagttgtccttgccagcacaggtgaaactttccggcagaaaagctggtcggtatttgctgaggatgagtggcatctcacggatgcacttgcgctgactgtgggcagccgctatgaacatcatgagcaattcgggggacacttcagtccgcgtgcatatctggtctgggatgtggcagatgcctggacgctgaaaggcggtgtgaccacgggatataaggcacccagaatggggcagctacataaagggattagtggtgtatccgggcagggaaaaacaaatctacttggtaaccccgacctgaagccggaagagagcgtcagttatgaggctggggtgtattacgataaccccgccggtctgaatgccaatgtcacaggttttatgactgacttctccaacaagattgtctcttattccataaatgataacaccaatagctatgtaaacagcggaaaggcccggttgcatggtgtggaatttgccggcacattgccgctgtggtcagaggatgtcacgctgtcactgaattacacctggacccgaagtgaacaacgtgatggtgataacaaaggtgcgccgctgagttatacccctgaacacatggtgaatgcgaaactgaactggcagatcaccgaagaggtggcatcatggctgggtgcccgttatcgcgggaaaacaccacgtttcacccagaattattcgtcactgagcgctgtacagaagaaagtgtatgatgagaaaggagaatacctgaaagcctggacggtggtggatgcaggtctgtcgtggaagatgacggatgccctgacgctgaatgctgcggtgaataacctgctcaacaaggattacagtgacgtgagcctgtacagtgccggtaagagtacgctgtatgccggtgattacttccagacgggatcatcaacaacaggatatgtgatacctgagcgaaattactggatgtcgctgaactatcagttctga

SEQ ID NO: 6131 - DNA, 492 bp, Escherichia coli
atgatgttcaactgtatccgctgccattgtttcagccgttgcctgttcatctgccattgcgccagatggttgcgggttatcttcatcatttttttcttcttctgttttgcactcagcagccagtccgccgttaatttcttccaggatatctttttccggtgtatgccgggcagccatgagcgtttcagctgtgggattctcgtgatcagtttctgtcaggttggcattgatatacccctgaaggcgccccgggtagtgataaaactcagggtgggcgcttcggataagtgcaaaaatagctgcgcgggaatagtccaggataccaggggttgcgcgaagtgctgcggaccattccctgaacggactttcttttttcaggacgatttcttttgcgcgacgataaacgctgcccggaatttcataaatattaaaatccatcggaagtgtggctgctgcaatctccacatccagcgcatcgaaggtgtgtactaa

SEQ ID NO: 6132 - DNA, 189 bp, Escherichia coli
atgacttcagcatttgcactgatgatgacggtttttcttataacgggtgaatcacagaatgtgattaccggaatttatgccagtaaagaatcctgcctccaggcaagagacgagcaaaaaatttctggtgaatgcctcccggtaaaaaaagtatcgctgtacctgaataacgaaacaccggctggataa

SEQ ID NO: 6133 - DNA, 189 bp, Escherichia coli
atggaaacgttattaccaaacgttaatacgtctgaaggttgttttgatattggtgttctgctcagtaaccgggagtttactgaagatgccattaatatgaggaaatatgagccttatctgctcaatgataattccatactttcccgaattgctcttcttgaacttggtattttcggagagcgtcaatga

SEQ ID NO: 6134 - DNA, 375 bp, Escherichia coli
atggaatttaaagatttaccaatgccattccaggaaatggcagcgaatgtggttcgctctcaactggcgactcttgacctgagtaccgtagaaaaagaaaccatcgacaatatatccggtaacgtacgccgagcctttatcgggctgtacgaagagaagcagctctctgataaccaggatttacatgaaaaatactttctggaattaatggacatcattaataaaggatttggcttgttaatgaaaaagaaagggattcgaatagctcccctcgaaaatcattttacagcaagcagtattaattcctgtgatttaaagcatcacacatccgatgggaaagttgaatcaaacaacaaaatatcaattaatcattaa

SEQ ID NO: 6135 - DNA, 1491 bp, Escherichia coli
atgccatactttcagtatcctgatgagtttcccctgagctcgctgcctccactcattcgtgatgccgttattgaagctcagcaaatcacgcaggctcccctggggcttgtggcagcatctgccctgggcgctgtttcacttgtctgccagaatctgattgatgtctgcagactgaatacactgcgggggccggtttctcttttcttactgacgcttgctgagtccggagaacgaaaaaccgcagtggacaaattattaatggagcccctgtaccagcaggagatgctgttatattccagacacaaaaatgaactgacgacatggaaaaataaggaagagcttttaaaggcgcagaaaaaagcattgttgtcaaaactgaataaagaactccgcaaaggcgcggatgagtcagaaacgctcagacaactggaagcgcttcagaaaaacagaggggaaaaacctgtaagatataaattcatttttaatgatgccacgacagcagcaattaaagatcagctttgtggtcagtggcgttcagtgggtatcatgtctgatgaagccggtataatatttgatgggtataccctgtctgagctgccttttattaacaaaatgtgggatggctccgtattgtcggtggacagaaagaatgaacccgaacagatgattgaaaatgccagaatgacattatccctcatggtacaacccggtctttttgaccgatatatggagcgaaaaggttctgttgccagggacagtggttttcttgcccgttgtctaatcagtaaacctgccaccacgcaggggaaacgctttattaacggagctgtgaccccgggaggatcattaacggcatttcatgaacgattaatggaactggccagaggcagtattgaaaaatccagtaaggatgaacgttattgtctgcatttttctcctgaagcgcaaaaaatatttattgatcactataatgttctggagcaggatttgtctccttccggacccttaagccagtttcgggggcatgtttcaaaaaaaacagaaaacattgcgagaattgctgcgttattgcagtatttcagtcagggtgaagggaaaatctctgccgatatcatgacgtctgctgtcgtaataagttcgtggtacacagatgaatataaaaaattatttgcgttacctgatgaatctgaactgcagctgcaggacgcccgggagctgctcgactggctcattgaggagtgccgcggagaatgcccgccccgtgtcaggaaaaattatattctccagtgtggcccgggccggttccggaacaggaaaaagctgaacgtcctgctgaacattcttgcatctcaactcaggctctctgtcgtgcaggaaggaaaaaccacctatgtcctgctttccgaaataaacaatatcacgctgcctgaactgaatgcgtgctacagccagaaactgataagatggcatgagcaatcctttggcttataa

SEQ ID NO: 6136 - DNA, 270 bp, Escherichia coli
gtgaagctggcttttagtggtccaagggtttctggtcataatgaggagttagataccagcggggggacaggtactgcgattgtagttcaggctgcaggtaaaaacgtttctttcgatggcacagaaggtgatgctaataccctgaaagatggtgataatgtgctgcattatactgcgattgttaagaagtcgtcagccaataatgcccaagtcactgagggtgctttttctgcagtcgcaaccggtgatgctgtcaacttactgatttag

SEQ ID NO: 6137 - DNA, 222 bp, Escherichia coli
atgaagaatgaaatactggaatttctgaacaggcataatggagggaaaaccgcagaaattgcggaggcgctggcggtaacggattatcaggcacgctattacctgttattactggaaaaagaaggtgtggttcagcgctctccattaaggcgaggcatggcaacatactggcttctgaaaggagagaagcaggcggggcagaactgttcttccacaacttaa

SEQ ID NO: 6138 - DNA, 360 bp, Escherichia coli
gtggcgttcatcattgatgtgtttgccggatacatcgtggggtggtgggtctcatcgtctatggaaacgacattcgtgctggatgcgctggagcaggcgttgtgggcccgccgtccgtccggcaccatccatcacagcgataaaggctctcagtatgtgtcactggcctatatggagcgattaaaagaagcaaaactgctggcatcaacagggagtacaggcgactcgtatgacaacgcgatggcggagagcatcaatggtctttacaaagcggaggtaatacaccgtaagagctggaaaaaccgtgcagaagtggaactggccacactcacgtgggtggactggtataacaatcgatga

SEQ ID NO: 6139 - DNA, 699 bp, Escherichia coli
atgcaggatattcgcgaagaaagtctgaacgagtcggttaagtcagagcagtcaccgcgggtggtactctgggaaatcgacctgacggtacagggtggtgagcggtattttttctgtaatgagctgaatgaaaaaggggagccggtcacctggcaggggcgtaagtatgaggcatacccgattgacggcagcggctttgagatgaacggccggggcagcagtgccagaccgtcgctgacggtgtccaatctgttcggtctggtcaccgggatggcggaagacctgcagagtctggtgggggccacggtggtccgccgccgggtgtatgcccgttttctggatgcggtgaatttcgttgcgggcaatccggaggcggacccggagcaggagctgagtgaccgctgggtggtggagcagatgtcgcagctgacagccatgacggcctcgtttgtgctggctacaccgaccgagacggacggggcgctgtttcccggtcgcatcatgctggcgaacacctgtatgtgggattaccggggagatgaatgcgggtataacggtcctgcggtggcggatgagttcgacaaccccaccacggatatccgtaaggacagatgcagcaagtgcatgcgcgggtgtgaactgcgcaggaatgtcggcaattttggcggtttcctttccattaataaactttcgcagtaa

SEQ ID NO: 6140 - DNA, 330 bp, Escherichia coli
atgaaaacctttcgctggaaagtgaagccggatatggaggtgaactcgcagccatcggtgcgtgaagtgcgttttggtgacgggtactcacagcgtatggcggcagggctgaatgctgacctgaaaacatacagggtgacgctttccgtgacccgggaggaggcccggcatctggaagcgttcctggcagagcacggtggctggaaggcatttttgtggaagccaccctatgcataccggcagataaaggtgacctgtgccgggtggtctgcacgggtcgggatgttgcgcgttgagttcagcgcggagtttaagcaggtggtgaactga

SEQ ID NO: 6141 - DNA, 1188 bp, Escherichia coli
gtgaaggtgtctgcgggcgatcgtcaggaagacagtgctcatgctgccctgctgacgcttcaggcagaactccggacgctggagaagcatgccggagcaaatgagaaaatcagccagcagcgccgggatttgtggaaggcggagagtcagttcgcggtactggaggaggcggcgcaacgtcgccagctgtctgcacaggagaaatccctgctggcgcataaagatgagacgctggagtacaaacgccagctggctgcacttggcgacaaggttacgtatcaggagcgcctgaacgcgctggcgcagcaggcggataaattcgcacagcagcaacgggcaaaacgggccgccattgatgcgaaaagccgggggctgactgaccggcaggcagaacgggaagccacggaacagcgcctgaaggaacagtatggcgataatccgctggcgctgaataacgtcatgtcagagcagaaaaagacctgggcggctgaagacctgcttcgcgggaactggatggcaggcctcaggtccggctggagtgagtgggaagagagtgccacggacagtatgtcgcaggtaaaaagtgctgccacgcagacctttgatggtattgcacagaatatggcggcgatgctgaccggcagtgagcagaactggcgcagcttcacccgctccgtgctgtccatgatgacagaaattctgcttaagcaggcaatggtggggattgtcgggagtatcggcagcgctattggcggggctgttggtggcggcgcatccgcgtcaggcggtacagccattcaggcagctgcggcgaaattccattttgcgaccggaggatttacgggaaccggcggcaaatatgagccagcggggattgtccaccgcggggagtttgtcttcacgaaggaggcaaccagccggattggtgtcgggaacctgtaccgcctgatgcggggctatgcggaaggtggttatgtcggcggtgccggaagtccggcgcagatgcggcgggcggaaggcattaattttaatcagaacaatcacgtggtgattcagaacgacggccccaacgggcgggcagggccgcagctgatgaaagcggtgtatgagatggcccgcaagggggcacaggatgaactccggctgcagttgcgtgatggcggtatgttatcagggagcggtggatga

SEQ ID NO: 6142 - DNA, 1542 bp, Escherichia coli
atgccaacagttccaatttctatgagaaaacttaaagaaattcttaggcttaaatacggtgttggactcagccatcgacaaattggtcgtagtcttgcaatctccccttccgttgtatccagatatgctaatcgggcggctcaacttggcataaagcagtggcccttacctacaggatgggatgatacaaaactaaaacatgcgttccttcagacccaggttaagatgaagaagcactctctgcctgactgggctacagtacaccgggaactgcgtaataaatgcgtgacgctgcagctactctgggaagaatactgtgagcgtaatccaggcggtttttacagctataaccattactgccggatgtaccgtgaatggctcaaaaccacttcaccatcaatgcgtcaggtacataaagctggcgaaaaacttttcgttgattactgtggacctaccgttggcgttaccgaccctgagaccggagaaataagaactgctcaggtcatcgtagctgttctcggggcatcaagttacacatgggcagaggccacctggtctcagcagcttgaagactgggtgatgagtcatgttcgctgcttccagtggttgggtggcgttcctgaacttgttgttccggacaatctgaaaagcgccacatccagggcatgtaagtatgatcctgacgttaaccctacctaccagcagatgcttgagcattataatgtcgcagttttgcctgcgcggccacgtaaaccgaaagataaagccaaagctgaagttggcgttcaggttgttgaacgctggatcatggcccgaatcaggcatgagatcttctacagccttgcatcgcttaatcagcgcattcgggagttgctggaaagactgaataacaaaataatgcagaagttgggttattcacgtgcagaactcttcatccagcttgataaacccgcactgaagcctcttcctgaagccagttacagttacaccctggtgaagaaagtcagagttcatgccgattaccacgtggaaatcgacaaacattactactcggttccatgttcgctgttaggccagcaactggaagcatggatctccggagaactggtaagactcttcaatcaggggcaggaggttgctgtgcacccgcgcaagcgtacttatggctacagtacccgcaacgagcacatgcctgaagctcatcgacagcatgccacctggacgccagagcgtcttctggaatgggcggggcacataggcagtgaaactcatagttatgtgcttcatatactgaactctcgtccacatccggaacaaagctatcgcttctgccttggactcctgaaccttcataaaaaatacagtaaagccagacttaatgcagcatgtgcaagagctctgaaaacaaaggtatggcgtctgtcaggtattaaatcgatcctggaaaaaggtctggataaacaacctgttcaggatccaaaaccagatctgttatccacgatggaacacgaaaacgtacgcggcagtgagtattaccactga

SEQ ID NO: 6143 - DNA, 747 bp, Escherichia coli
atgaatcatctttacgaacaactgaccgcacttaaactcaccggcttccgtgatgcgcttaaaaagcaacttgctcaaccgggcacataccaggagctgggcttcgaagaacgcctgtcattactgacagcagaagaactaacctgccgtgaaaacaggaaggcagagcgtctgatcaaacatgcacggttcagacttaatgctgagttatcaaagctggattatcgtaacaatagagggctggacagggccctcatccgttcactcagtcagggaaactggttaaccctgaaacaaaatattttactgaccggggccaccggcagcggtaaaacgttcctggcatgtgcacttggtcataatgcctgccgacagggatacaaggtctactattatcgccttaaagcgctgatggaacagtgctatcaggggcatgctgatggaagatacagcaaacttttgaccaggctgaataatagcgatctgctgcttctggatgactgggggctggaacctctctcatcagaacagcgtagcgacctgctggaaatagtggatctgatgtaccaacgaggctcaatcatcgtagtgagccagttgccggtggaaaactggtacaaaatgatcggagactccacacatgcggatgccatcctagatcgactggttcatggcagtatcaagatcgaacttaaaggagaatcaatgcggaaaatacaatctccgttgaccgaaggagatcagtga

SEQ ID NO: 6144 - DNA, 447 bp, Escherichia coli
atgggaaaactgtctgccaaccagattgaaggtgatattgtcaaaacggtgggaaaagcctttccgagaaatggcagttatgccagcggtacaataacggtcactgtgtacgatgaccaggcttttgaccgtcagatagtaatcccacccgttctgtttcgcggtggtaagcatgaaaacttcaacagcaacaaccaacagtcatactggtattcaacctgtaagctgcaggtactgaagaacggacaggaaatctttcagcaacccgcgacggatgtcagcagggtattttcatcagtcattgatatgcctgccggacacggccatgtcaccctgactttcaatgtttcttcatatggtgctaataactggacgccaacgaccagtatcagcgaccttcttgttgttgtgatgaagaaatctacagccggtatcagtatcagttga

SEQ ID NO: 6145 - DNA, 1929 bp, Escherichia coli
atggcagtacagatttcaggcgtgctgaaagacggtgcaggaaaaccgatacagaactgcaccattcagctcaaagcaaaacgtaacagcaccacggttgtggtgaacacggtggcctcagaaaatccggatgaagccggacgttacagcatggatgtcgagtatggccagtacagcgttatcctgctggttgaaggttttccgccttcacatgccgggaccatcaccgtgtatgaggattctaagccggggacgctgaatgattttctgggggccatgacggaagaggatgtcatgccggaggcattgcgtcgttttgaggtaatggtggaggatgtggcacgcaacgctgaagccgcctctcagagcgcagcggcagcaaagaaatcagaaacagcagcggcatcgtccaggaacgcggcgaaaacatcagagacgaatgcaggtaacagcgcgaaagcggcagcttcttcaaaaacagccgcacaaaacgcagcaacagcggcagaacgttcagagacaaatgcccgtgcgtcagaagaagcctccgcagacagtgaagaggcttcccgccgtaatgcagagtcagccgctgaaaatgccggagtcgccaccacaaaagcgcgggaggctgcagcagacgcaacaaaggccgggcagaaaaaggatgaggctctgtcggcagcgacacgagctgaaaaggcggcagaccgcgcagaagccgcagcggaagtgactgcagagccctatgcgaatatagtgccgccgctgcctgatgtgtggataccgtttaacgattcactggatatgattgcgggtttttctccgggctataaaaaaatagctattggtgacgatgtggttcaggtcgccagtgataaacaggttaatttcagtcgcgcatcaacggcaacatatatcaacaaatctggcgaactgaaaacggcggaaattaatgagccgcgatttgagtgtgatggcctgcttattgagggacaaagaacgaactacatgctcaattcggaaagtccagccagctgggggaagtcatcaaacatggatgtgcccgaaactgggacggatagttttggttttacttatggaaagtttgtctgcaacgattctctggttgggcaaacttcggctattaatatggcatcaattgctgcaacaaagtcagttgatgtctcaggcgataacaagtacgtgacaacctcatgccgttttaaaacagaacgacaggtaaggttacgtatacggtttgataagtatgatggtagtgcaacaacttttcttggcgatgcgtacattgatacgcaaacgcttgaaattaatatgacaggtggtgctgccggcagaattacggcacgagtcaggaaggataagaccacgggctggatttttgcagaggcaacgattcaggcaattgatggtgagttaaaaataggctctcagatacagtattctcctgagcagggtggggcaacagtatctggtgactatatttatcttgccaccccacaagtagagaatgggccgtgtgtatcatcatttattatttcaggaggcagcgcaacgacaagagccagtgatttggttagtatccccaccagaaataatctttataagttaccatttacttttttacttgagattcataaaaactgggatattgcaccaaacgccgcaccccgcgtgtgggatatagcagccaataccgggcaatcagcaattgcagcaatcaacagaggtagtggtaagttatatatgagtctgtcaaacccttcaggctcgtatgttaatagcgcagcgacagatgtatttgcagagaaaaccacatttggatgtattgcaaaagctgatggtcactttcatgtggtgacaaatggtaaagcggttaatgaagtttattgtgaatataatgggtaa

SEQ ID NO: 6146 - DNA, 678 bp, Escherichia coli
gtgtccggtcagcacatccaggcgtccgccattttccagtacgacattatcagctttaccctccacaaccgagaatgctccaaggcggtttatgccggtaacggttgcagccgtactggtaaccagtgcgccgccctgcttcagggtgacattcgtggctgtaccaccggcgtccacctgcagtctgcccttctgattaacggtggtattcccggccacacccccgtttttgacaatctgccagccgtcactgttcacaacagtgtcagacgctgtaccgccgttgtgcacatactggtatcccccattcagcgtggtatccagtgcgtgaccatgtacagtctggtcgccgccggcataaaccacagtggtatttgtcgttccttcagttctcacaatctggcgaccgtttttattgatggttgtgcgtacggcatccccgcgaacaaactgcccggtatcaccgttttctgcatccggtcccccttccgccccggtattaacaacggtatccgttgccactgtaccgggcttgacgacctgccagcccttatcattaatgacggttcctgtggctatcgccccctcatgcatccactgttcgccaccattcagcgtggtgttcactgcccgtccctgaaggctctgtccgcctccggcactgataaccgtgtctga

SEQ ID NO: 6147 - DNA, 273 bp, Escherichia coli
atgaatctgtcctgcatggctgaggtcatccaccaccgactgaaccgtggcgttatcggggatattccaggtggcaccggatgtcagggtgacattcgtggggtcaatggcaccgttcagcactgtgctgccggtcagcttcagggccgtgccgcgctgagcgatgacatccgtggtgacggtactgttgttcagcgtcagcgtgccttcattcaggttgacggctttctgggtgagtgtggtgttgctgacagtgagtgtgccacttcctga

SEQ ID NO: 6148 - DNA, 489 bp, Escherichia coli
atgaaactggccctgacgctggaagctgacagcgttaacgtacaggcactgaacatggggcgaattgtcgttgacgtcgatggtgttgagcttgccgaactgattaacgtggtctgcgataatggctactcccttcgtgttgttgatgaatctgaccggacctcaacagacagcatacccccctctgctgccctgagcggtatacgctgtagtaccgcgcatatcacggaaacagacaacgcctggctgtactcgctgtcgcatcagacgaatgacaccggcgaatcagaatggattcattttacaggtagcggatatctgttacgtaccgatgcgtggtcatacccggttctgcggcttaaacgcctggggctgtcaaaaacgttccgccgtctggttgtcacacttacccgacgttatggcgtcagtctcattcatctggatgccagcgctgaatgcctgccggatttacccactttcgactggtaa

SEQ ID NO: 6149 - DNA, 378 bp, Escherichia coli
atgaaaacattacccgacacacacgtacgggcggcatcgcgctgcccgtctcccgtcaccatctggcagacactgctcacccgactgctggaccagcactatggcctcacgctgaatgacacaccgttcgctgatgaacgtgtgattgagcagcatattgaggcagggatttcactgtgtgacgcggtgaactttctcgttgaaaaatacgcgctggtacgtaccgaccagccgggattcagcgcaggagccccgtcgcagttaatcaacagcattgatattctccgggctcgcagggcgatcggcctgatgacccggaacaattacagaatggtaaataacattacccagggcaagcatccggaggcaaaacgatga

SEQ ID NO: 6150 - DNA, 381 bp, Escherichia coli
gtgtcagacacactctccgggacaatgcttcccgacgacaatcacgaccgcccctggtgggggctgccctgcaccgtgacgccctgtttcggcgcccgtctggtgcaggagggtaaccggttgcattaccttgcagaccgcgccggtatcaggggccggttcaacaatgcggatgcataccatctggaccaggcttttccactgctgatgaaacaactggaactcatgctcaccagcggtgaactgaatccccgccatcagcataccgtcacgctgtatgcgaaagggctgacctgcgatgccgacaccctcgggtcctgtggttacgtttatctggctgtttatcctgcgaccgaaacggaaagtaaccctccggaatag

SEQ ID NO: 6151 - DNA, 645 bp, Escherichia coli
atgagcagaattatcaccaccaccgtgtatacactgaatgagctatccgccaccgcacaggaaaaagccctcgactggtaccgtcagcatcatgctgacagcaactggtatgaaaacgtgtatgaagacttcagggaggtctgtggcattttcggaattgacctccgccagcgcgttttccggctcagcaacggcaggtttatggaagagccgtgcatctggttcagcggattctgcggccagggggacggagcctgttttgaaggacgctggcactggcagccagcggcaccccggaaaatcagggaatatgccccgcagaaccgtgagcttcatcgtatcgcggatgccctgcaggcggtacagaagcgtaacttctggcagttacaggctgaaatcagtcaccggggacgttactgccatccgtacagtatggatatcacggttacccggaacagtccggctggtcaggcaatgacagccgatgcggaagccgctgtcagcgaagccctgcgcgaccaggccttctggttgtaccgtcagctggaaaacgagtacgactggctgagctcagatgccgctgtggatgaggccctgctcatcaacgaatacacctttaccgaaggcggtctgcgcgccggctga

SEQ ID NO: 6152 - DNA, 1023 bp, Escherichia coli
atggtcacttttgagacagttatggaaattaaaatcctgcacaagcagggaatgagtagccgggcgattgccagagaactggggatctcccgcaataccgttaaacgttatttgcaggcaaaatctgagccgccaaaatatacgccgcgacctgctgttgcttcactcctggatgaataccgggattatattcgtcaacgcatcgccgatgctcatccttacaaaatcccggcaacggtaatcgctcgcgagatcagagaccagggatatcgtggcggaatgaccattctcaggggattcattcgttctctctcggttcctcaggagcaggagcctgccgttcggttcgaaactgaacccggacgacagatgcaggttgactggggcactatgcgtaatggccgctcaccgcttcacgtgttcgttgctgttctcggatacagccgaatgttgtacatcgaattcactgacaatatgcgttatgacacgctggaaacctgccatcgtaatgcgttccgcttctttggtggtgtgccgcgcgaagtgttgtatgacaatatgaaaactgtggttctgcaacgtgacgcatatcagaccggtcagcaccggttccatccttcgctgtggcagttcggcaaggagatgggcttctctccccgactgtgtcgccccttcagggcacagactaaaggtaaggtggaacggatggtgcagtacacccgtaacagtttttacatcccactaatgactcgcctgcgcccgatggggatcactgtcgatgttgaaacagccaaccgccacggtctgcgctggctgcacgatgtcgctaaccaacgaaagcatgaaacaatccaggcacgtccctgcgatcgctggctcgaagagcagcagtccatgctggcactgcctccggagaaaaaagagtatgacgtgcatcttgatgaaaatctggtgaacttcgacaaacaccccctgcatcatccactctccatctacgactcattctgcagaggagtggcgtga

SEQ ID NO: 6153 - DNA, 780 bp, Escherichia coli
atgatggaactgcaacatcaacgactgatggtgctcgccgggcagttgcaactggaaagccttataagcgcagcgcctgcgctgtcacaacaggcagtagaccaggaatggagttatatggacttcctggagcatctgcttcatgaagaaaaactggcacgtcatcaacgtaaacaggcgatgtatacccgaatggcagccttcccggcggtgaaaacgttcgaagagtatgacttcacattcgccaccggagcaccgcagaagcaactccagtcgttacgctcactcagcttcatagaacgtaatgaaaatatcgtattactggggccatcaggtgtggggaaaacccatctggcaatagcgatgggctatgaagcagtccgtgcaggtatcaaagttcgcttcacaacagcagcagatctgttacttcagttatctacggcacaacgtcagggccgttataaaacgacgcttcagcgtggagtaatggccccccgcctgctcatcattgatgaaataggctatctgccgttcagtcaggaagaagcaaagctgttcttccaggtcatcgctaaacgttacgaaaagagcgcaatgatcctgacatccaatctgccgttcgggcagtgggatcaaacgttcgccggtgatgcagcactgacctcagcgatgctggaccgtatcttacaccactcacatgtcgttcaaatcaaaggagaaagctatcgactcagacagaaacgaaaggccggggttatagcagaagctaatcctgagtaa

SEQ ID NO: 6154 - DNA, 201 bp, Escherichia coli; identical to SEQ ID NO: 5078

SEQ ID NO: 6155 - DNA, 459 bp, Escherichia coli
atgacctacaaatacaaccccttctggcagcaacgtattcgtgagacagtgcggcacgcactgaatgttcatccccgcctgacggcattgcgggttgacctgcgtttcccggatgtaccggcagcaacggacgcagctgtgatatcccgcttcatcaatgccctgaaagcccgaatcgacgcttaccagaaacgtaagcatcgggaaggtaaacgcgtgcatcccaccactctgcattacgtctgggcccgggagtttggggagtgcaaaggtaaaaaacactatcatctgatgctgctggtcaaccgggatacctggtgtcgtgccggtgattaccgcgctccgggatcactggccggaatgattgaacaggcctggtgcagtgccctgggggtggatgccgggccatgccacgctggtgcattttccggcctggccggcggtgtggctggcgcgtaa

SEQ ID NO: 6156 - DNA, 381 bp, Escherichia coli
atgcagaaaaatgtgactcccggcaggcgaaaaggctgccctaattatcctcccgaatttaaacagctgctcgttgctgcctcctgtgaacccgggatatccatctcaaaacttgctcttgaaaatggcattaacgccaatctgttgttcaaatggcgacaacaatggcgcgagggaaagctgctattaccttcttcagagagcccccagctacttcctgtgactctcgatgcagctgccgaacagccagaatcgctcgcagaggacccggaaaccctcagtatcagctgtgaggtaacgttccggcacgggacgctccgcttcaatggcaatgtcagcgaaaagctcctgactctgctgatacaggaactgaagcgatga

SEQ ID NO: 6157 - DNA, 348 bp, Escherichia coli
atgatcccgttaccttccgggaccaaaatttggctggttgccggtatcaccgatatgagaaatagcttcaacggcctggctgcgaaagtacaaacggcgctgaaagacgatcccatgtccggccatattttcattttccggggccgcagcggcagtcaggttaaactgctgtggtccaccggtgacggactgtgcctcctgaccaaacggctggagcgtgggcgctttgcctggccgtcagcccgtgatggcaaagtgttccttacgcaggcgcagctggcgatgctgctggaaggtatcgactggcgacagcccaagcggctgctgacctccctgaccatgctgtaa

SEQ ID NO: 6158 - DNA, 420 bp, Escherichia coli
atgctctttgccgcgctcgtcatcgaggcggattttgttgttcgccggggtgcgcagtacgttacgcttatagttctgaatggtcacatggtcggtgtgtgccgagtcgtgttttaccccggcgatataaggtcggtccgggttgccttcctcaaacgcgatgctgacttccgttcccgccagcagcggcagatgcaggccgtaggtgtctcccgcatacgggcgcgactggcgtacccacaggctttcataacccggtttccacgtatcgcggtcaaagtcgaggttgacccggtagcgcccgtccttgtcgatatgggcgtagatgtcgttcttcaccgtgctggtgacccgtgccgggagcgtgccggccatcacggggcaggggataagcgccgggcggtagccatagcgttctga

SEQ ID NO: 6159 - DNA, 405 bp, Escherichia coli
atgaaatcattaaccgcagtgcgtaaaaaaagccctaattatcccgttgagttcaaaatcaaaatggttgaactctcgcatcgaccagagatctccgtagcgcaactcgctcgtgagcatgggatcaacgataatttgctgttcaagtggcgccagtactggcgcgaaggaaaactacgtcctccttcaacaacagaaaacaacgtgcctgagctgctcccgataactcttgatgccgaagatgttgtccctacaacctccccccggtcacaacctgtagctgctgcgacacctgaatcactcaatatcagctgtgaagtgacgttccggcacggatcactccgtctgaatggtgccatcagcgaaaatatcctgaacctgctgatacgggagctcaaacgttga

SEQ ID NO: 6160 - DNA, 357 bp, Escherichia coli
gtggcgttcatcattgatgtgtttgccggatacatcgtggggtggcgggtctcatcgtctatggaaacgacattcgtgctggatgctctggagcaggcgttatgggcccgtcgaccgtccggcacagtccatcacagtgataaaggttctcagtatgtatcgctggcctacacacagcggcttaaggaagccggattactggcatcaacaggaagtactggtgactcgtatgacaacgcgatggcggagagcatcaatggcctttacaaagcggaggtaatacaccgtaagagctggaaaaaccgtaagcgtcgtctcagcaccgtctggcagatcctgaaattcctgagagaatag

SEQ ID NO: 6161 - DNA, 123 bp, Escherichia coli
atgataatctggatcaacggacctttcggcgccggaaagacgacgctcgctaagcggctgcgcgatcggcgttccaaatcgctgatctttgaccccgaggaaatggcactgttgcaaagttag

SEQ ID NO: 6162 - DNA, 861 bp, Escherichia coli
atgcatacgcggaaggcaataacggaggcgcttcaaaaactcggagtccaaaccggtgacctcttgatggtgcatgcctcacttaaagcgattggtccggtcgaaggaggagcggagacggtcgttgccgcgttacgctccgcggttgggccgactggcactgtgatgggatacgcgtcgtgggaccgatcaccctacgaggagactctgaatggcgctcggctggatgacgaagcccgccgtacctggctgccgttcgatcccgcaacagccgggacttaccgtgggttcggcctgctgaatcaatttctggttcaagcccccggcgcgcggcgcagcgcgcaccccgatgcatcgatggtcgcggttggtccgctggctgaaacgctgacggagcctcacgaactcggtcacgccttgggggaaggatcgcccgtcgagcggttcgttcgccttggcgggaaggccctgctgttgggtgcgccgctaaactccgttaccgcattgcactacgccgaggcggttgccgatatccccaacaaacggtgggtgacgtatgagatgccgatgcttggaagagacggtgaagtcgcctggaaaacggcatcggattacgattcaaacggcattctcgattgctttgctatcgaaggaaagccggatgcggttgaaactatagcaaatgcttacgtgaagctcggtcgccatcgagaaggtgtcgtgggctttgctcagtgctacctgttcgacgcgcaggacatcgtgacgttcggcgtcacctatcttgagaagcatttcggaaccactccgatcgtgcctccgcacgaggccgtcgagcgctcttgcgagccttcaggttag

SEQ ID NO: 6163 - DNA, 279 bp, Escherichia coli
atgctgctggtcaaccgggatacctggtgtcgtgccggcgattaccgcgctccgggatcactggccgggatgattaaacaggcgtggtgcagtgccctgggagtggatgccggacgttatgacacgctggcacattttccggtcaggccggcggtgtggctggaacgcgatgatgacaccggctttcagcaggtgctggagcgtgctgactatctggcgaaggagagtaccaaagtttacggcaccggtgagcgcaactttggctgcagtcgtggctga

SEQ ID NO: 6164 - DNA, 384 bp, Escherichia coli
atgtacgcaaaatcttttctcgcacttgatggcaacggacgtctgaccggtgcccgtaccgcacagaccgcaccttatgcttactacacctgccacctttgcggcagtgcactcagataccacccgcagcacgacacggaacgtccctggtttgaacacactgacgacgggctgacggaacacggtcatgagtgcccttatgtacaaccggaacacagggaagtacagctgattaaacgtctgcagcaattcgtaccggatgccttacccgtggtgcgtaaagcctgctggtactgcagacaatgtcgccacgcttattatggggagcagtactgcacacactgccagaccgggcgtttcagtgaggagggggtagcagaatga

SEQ ID NO: 6165 - DNA, 189 bp, Escherichia coli
atgaaatcattaaccacggaaacagcgctggatattctgattgcgtggctgcaggacaatattgactgcgaatcagggattatcttcgacaacgatgaggataaaacggattcagcagcactgctgccctgcattgaacaggcccggcaggatgtccgtaccctgcgtcatctgcaccagaaccggtga

SEQ ID NO: 6166 - DNA, 588 bp, Escherichia coli
atgacggtccttcagggcgctgaagctgtagcggaacggcgcgccatcttccggcatcaccacattactgcggttataggtccacaccttatccgatggccggtcctgcacgaacgtcagcgtctgcccgttccataccggcatacagcgcatcgccgagcagaaatcactgagaacatcccacgccttacgctgtgtggtcagccaggcattacaggtgatgcgcggctccgtgccaccaaagccatccggcaccgactggtcgcaattctggccgatgacatacagcgcccatttgtccacatccgccgcaccgagacgcttccccatgccgtagcgcggatgggtcagcatatcccacagacaccaggccatgttgttgctgtatgccggtttaaacgtcccgtcccagataccgatgtattgccgcgtctgcgggttatagttcgacggcacctgcagaatgcgcccgcgaagatgataattacggctcacctgctgactgccgaactgttccgagtccacctgcacgccgaccagtgccgtgttcgggtagcactgtttcacatcgatgatttcggtgtatga

SEQ ID NO: 6167 - DNA, 456 bp, Escherichia coli
atggaacgttaccggggcgttgccttttgcaacagcacggctcagtacggcatccggtgttgtctgattgtcaaagtaaatctcccctgcgttaacaatatcgccggtactgaccacatcaccattcagtaccatgctggcgcctttactgagctgtgttctgccactcagacttcccccggcagccagcatcagtgttccacgatgtccgacagtggtgttgctggcctgtcccccggcattaaccgtaaagctgccgccattttccagcagcaggccgctggcctgaccggatatgccatcaatactgaacttaccgctggcattggtcccctcaacagtggcaccactgtctgcaatcagggcaccaccggatgtcatggtgacacctgttgccttaccaccggcagacactgccagggttccgccgtcatccacccgtgttttctgcgctga

SEQ ID NO: 6168 - DNA, 918 bp, Escherichia coli
gtggtggcttccgaactggcgcgctcacggggaaaacgcaccggtgtggcagttgctctgtctcttgctgctgtcacgtcactcccggcactggctgctgacacggttgtccaggcgggagaaaccgtgaacggtggaacactggaaaatcatgacaaccagattgtcttcggtacggccaacggaatgaccatcagtaccggtctggagtatgggccggataacgaggccaataccggcggacaatggatacaaaatggcggtatcgccaacaacactactgtcaccggtggtggtcttcagagagtgaatgccggaggaagcgtttcagacacggttatcagtgccggaggcggacagagccttcaggggcaggcagtgaataccactctgaacggcggtgagcagtgggtacatgaaggcgggattgcaacgggtaccgtcattaatgagaagggctggcaggccgtcaaatccggcgcagtggcaaccgacacggttgtgaataccggcgcggaaggggggccggatgcagaaaatggtgataccgggcagtttgttcgcggaaatgccgcacgtaccaccatcaataaaaatggtcgtcagattgtggctgttgaaggaacagcaaataccactgtggtttatgccggcggcgaccagacggtacacgggcatgcgctggataccacactgaatggcggttaccagtatgtgcacaacggaggcacagcctctgacacggttgtaaacagtgacggctggcagattgtcaaggaaggtggtctggcggatttcaccaccgttaaccagaaaggcaaactgcaggtgaacgccggtggtacagccacgaatgtcaccctgaaacagggtggagcactggtcaccagtgcgtattaccgtgaaggagatcggtga

SEQ ID NO: 6169 - DNA, 468 bp, Escherichia coli
ttgttctataagttgctcagcaagctcattttcgctgttcttcatcgtgccgaaggctgcagccgtcagcagatggctggtcagttccatctggcagaccattttgacctgcaggtagagcgccgggttcccggcatgtgtctggcgggggaaggctgcatcgttctctggtgtatccggtgtgcgccagaacacaccatcgatggccagcagggtcaggccgcaccagtgcggatgcggcgtggtgttatgccagagctgcgctgttttcgtgaacacgcggcggacagcctcacttcccaggcgctggcgggtctgaataacggcactgggggcaacgaaggggcgattgcccggcagcatgatatccaggcgattcacaatctggtgaagaggttctttacgctcaagcgccatgccaacaatacaccagaccatcatttcgaggggaagacggcgcttgcgtag

SEQ ID NO: 6170 - DNA, 648 bp, Escherichia coli
atggcagcgacgcacacactccctctggcgtcaccgggcatggtacgcatctgcctttacggggatttacaacgatttggccgccgcatcgaccttcgtgtgaaaacgggggccgaagccatccgggcgctggccatgcagatcccggcgtttcgtcagaaactgagtgacggctggtatcaggtacggattgccgggcgtgatgcaggtgaaaccgaattatctgcccgtcttaatgagccgctggcaaatggtgccgtgatccacatcgttccgcgtctggagggggccaaaagtggcggtgtgtttcaggcggtgctgggtgcggcgctgattgcggtggcatggtggaaccctgtgggctggctgggggccgcggctgtatcgggtatgtatgcagcaggggccagtatgatcctgggtggtgtggcgcagatgctggcaccgaaagcccggacgcccacggcagccagtacagataacggcaaacagaacacgtatttctcgtcactggataacatggttgcccagggcaatgttctgcccgttctgtacggtgaaatgcgtgtggggtcgcgagtggtatctcaggagatcagcacggcagatgaaggtgatggtggtcaggttgtggtgattggtcgctga

SEQ ID NO: 6171 - DNA, 573 bp, Escherichia coli
atgcaaaaacttgaaaaccggtgtgagctgctgctcatccagcatcagaaatggatgacaaacgtgacgaggcttatcgtcgctcatggaatgggggctccgcatcttcatggttatcaccgcctgaccctggcccacttttttctgccagaaaaaggcaccatcatctcagtggcaccacagggactctatcaggtcgtcaacccgggaacaccaccgttcattcctgccattcaggaagggttaatgaccagcattcagacccatgaaatcatgctgcttacacattttaatctgggcggcgttttactcagtgagctacatcgtctgggtgaaaaccggctggcaaacaggctgaacagcctgctccggcgtttcgacgatcgtgatctctaccacacgctgatatggctgtgctggtatgatctgatgtgtgcccactccatgcagccctggactgaagagttaaagcataaatcacatgcagagcttgaaagctgggctgtggcgcgcaaacgggaaaagcgcgagctggaactgatgattgacgagtacctgttatacgcctgttga

SEQ ID NO: 6172 - DNA, 207 bp, Escherichia coli
atgaataccccagtttcactgatggatgaccagatggtcgacatgtcgtttatcactcagctgaccggcctgaccgataaatggttttacaagctcatcaaggatggtgcctttcctgcccccatcaaactgggccgtagctcccgatggctgaaaagtgaagtggaagcctggttgcaggcacgtattacacagtcccgtccgtaa

SEQ ID NO: 6173 - DNA, 366 bp, Escherichia coli
atgattgatgtcttagggccggagaaacgcagacggcgtactacacaggaaaagatcgctatcgttcagcagagctttgaaccgggaatgacggtctcccttgttgcccggcaacatggtgtggcagccagccagctatttctctggcgtaagcaataccaggagggaagtcttactgctgtggctgccggagaacaggtcgttcctgcctctgaacttgctgccgccatgaagcagattaaagaactccagcgtctgctcggcaaaaaaacgatggaaaatgaactccttaaagaagccgttgaatatgggcgagcaaaaaagtggatagcgcacgcgcccttattgcccggggatggggagtaa

SEQ ID NO: 6174 - DNA, 195 bp, Escherichia coli; identical to SEQ ID NO: 5143

SEQ ID NO: 6175 - DNA, 510 bp, Escherichia coli
atggtcgggaagtgctgtcatgagcgcactgaccagcgtatccagttcccagccggtgcgggccgatacggccacaaccggatgtacgggccggaacagacggaataccgcctccgttttttcgcgaatattctgtgcctgtgcaggagaaggctgaataccggccatatcccattcatggcagggctccgttttgtcggcctgtgtcaccacaaacagcacctgctgatgtccgcactgcaggatgtgtcgccagaaatactcatccacagacagggcacggtcatcggctttaatcagccacagtaccaggtccagttctggcagaatgtcacggtacagggcttcatactctgcatccctgtcccggctctcgcccaccccgggcaggtcagtgataaccatgctgtgaccgtggccactcagacggaagcgccgcacttcccgggtgccagcgtgaacatcactgaccggggtgacctccccctgaaacagtgcattacagagtga

SEQ ID NO: 6176 - DNA, 759 bp, Escherichia coli
gtgtatgacccggcagtacagcgtccgttgcgtcagacccgcacccgtaagccgttccctgaatcactaccccgtgacgaaaagcggctgttgcctgcggcgccgtgctgcccgaactgcggcggttcactgagctatctgggcgaggataccgccgaacagctggagttgatgcgtagcgccttccgggttatccggacggtacgggaaaaacatgcctgtactcagtgcgatgccatcgtgcaggcacctgcaccttcgcggcccatcgagcggggtatcgccggaccggggctgctggcccgcgtgctgacctcgaagtatgcagagcacaccccgctgtatcgccagtcagaaatatacggccggcaaggtgtggagctgagccgttcactgctgtcgggctgggtggatgcatgctgccggctgctgtctccgctggaagaggcgcttcatggctatgtgctgactgacggtaagctccatgctgatgacacgcctgtcccggtgctgttgccaggcaataagaaaacgaagaccgggcggttatggacctacgttcgtgacgaccgtaacgccgggtcaacgctggcgccggcggtgtggttcgcttacagcccggacagaaaaggcatccatccgcagacccatcttgcggggttcagtggtgtactgcaggcggatgctgtcacgaacggtgcaatagtgctccacacccaacgcctgaaatcagatccagggggtaatctgctctcctga

SEQ ID NO: 6177 - DNA, 312 bp, Escherichia coli
atgagagttgagcagaataatttcagggacatgttctccgtttatctctccggcccgccgcagacgcagcatgtgttttgtgtatccccggcggcccgggtcgcgcacacgggtctggcaggcgaagaatggctgaaagccttcccgctgcaggctttccagtacggtgatggtggggatgtacgtatagttctggcttcgggacgtgtgtttatcttccccgaaaatccccggcacatagtgcatcagttcttcgtgtgtcagcggacggtcacggcgtatctggttcgcataaccaaaacgactggctag

SEQ ID NO: 6178 - DNA, 540 bp, Escherichia coli
atgcatccgcctgcaggataccccggaagggacgaaggtgttgtaccggatgttttccctgcctgtctggtgagtaggcgaaccagaccgccggtggctctgatgagcccgcattccggtcatcccggacatacgtccagatgcgtcctgtttttgccttttttctgcccggtgtcagcacttttaccggtgtgtcgtcagtgtgaaccttgcgggtgttcatcacgtaacggtacagggcatcattcagcggagtcattaactggcagcacgcgtcaacccagttggagattaatgcacggctcagttcggcaccctgtcgggcaaagatttcactctgacgatacagtggcaggtgttcgcagtattttcccgttaacacgcgggcaagtaatccggagcccgcgatgccgcgcgctatcgggcgggacggcgctggcgcttcaactatacagtcacattttgtacaggctttttttacccgaacagtgcggatcactttcagggcgctactcaccagttccagctgctcagcactga

SEQ ID NO: 6179 - DNA, 222 bp, Escherichia coli
atgagaatcatcacccgtggtgaagccatgcgtattcaccaacagcatcctgcatcccgtctttttccgttctgtaccggtaagtatcgctggcacggcagtgctgaagcgtatactggtcgtgaagtgcaggatattcccggcgttcttgccgtgtttgcagaacgccgtaaggacagttttggcccgtatgtccggctgatgagtgtcaccctgaactga

SEQ ID NO: 6180 - DNA, 276 bp, Escherichia coli
gtggcttctgtttctatcagctgtccctcctgttcagctactgacggggtggtgcgtaacggcaaaagcaccgccggacatcagcgctatctctgctctcactgccgtaaaacatggcaactgcagttcacttacaccgcttctcaacccggtacgcaccagaaaatcattgatatggccatgaatggcgttggatgccgggcaacagcccgcattatgggcgttggcctcaacacgattttacgtcacttaaaaaactcaggccgcagtcggtaa

SEQ ID NO: 6181 - DNA, 378 bp, Escherichia coli
atgggcgaacagtggggctatgtcggggctaaatcgcgccagcgctggctgttttacgcgtatgacaggctccggaagacggttgttgcgcacgtattcggtgaacgcacgatggcgacgctggggcgtcttatgagcctgctgtcaccctttgacgtggtgatatggatgacggatggctggccgctgtatgaatcccgcctgaagggaaagctgcacgtaatcagcaagcgatatacgcagcgaattgagcggcataacctgaatctgaggcagcacctggcacggctgggacggaagtcgctgtcgttctcaaaatcggtggagctgcatgacaaagtcatcgggcattatctgaacataaaacactatcaataa

SEQ ID NO: 6182 - DNA, 600 bp, Escherichia coli
atggtattgcgagcttcagtcgcactacacggtcgttctgttactctttatgagaaagcgttcccgctttcagagcaatgttcaaagaaagctcatgaccaatttctagccgaccttgcgagcattctaccgagtaacaccacaccgctcattgtcagtgatgctggctttaaagtgccatggtataaatccgttgagaagctgggttggtactggttaagtcgagtaagaggaaaagtacaatatgcagacctaggagcggaaaactggaaacctatcagcaacttacatgatatgtcatctagtcactcaaagactttaggctataagaggctgactaaaagcaatccaatctcatgccaaattctattgtataaatctcgctctaaaggccgaaaaaatcagcgctcgacacggactcattgtcaccacccgtcacctaaaatctactcagcgtcggcaaaggagccatgggttctagcaactaacttacctgttgaaattcgaacacccaaacaacttgttaatatctattcgaagcgaatgcagattgaagaaaccttccgagacttgaaaagtccggcactgttgcaaagttag

SEQ ID NO: 6183 - DNA, 507 bp, Escherichia coli
gtggagttattagataccgatggcatctattatcagttcagaactctggcgagtactaatgccagtccaggaagtgttggacaatggagcgagaaagtatcagggatgtcgtcagtttttaataaagccaaaaacccaccaatgtctatccatttttgctgggattcagtgattgataaaaaagtgtatgaaacctggataacactggcgggagacgtctggaaattgatgctcacaccttattcaccaccaggcggtggcagtgaaaagtattatctgcggtatctgttaatcgggctggctccggaagggaaaataggagtgtggctggagaaacctgacaagcccaatattcgcctgacggataagcagattctgatagaaacggtttcaggtgaaaaaatggaaatgtgtaacggccgaagtgcctataaacatgggtattcttatccggaaagtacaaaaaactttatcaaagataaaaaatatccctatggtaactggtaa

SEQ ID NO: 6184 - DNA, 426 bp, Escherichia coli
atggaattacaggactggcgaaaagaacctcgtaaaaactattcgaatgaattcaaacttcgtatggtggaactggcatcacaacctggagcttgtgttgcacagattgcacgtgaaaatggcgtcaatgataatgttattttcaaatggctcaggctctggcagaacgaagggcgtgtttcgcggcgtcttccggtaacgacctcttctgacactggcgttgaattattacctgtagaaataacgccggatgagcagaaagaacctgtggcggccattgcgccgtctttatccacttccactcagaccagagtcagtgccagttcctgcaaggtggaattccgtcacggtaacatgacgctggaaaatccatcgccagagctgctcacagtgttgatccgtgaactgaccgggaggggaagatga

SEQ ID NO: 6185 - DNA, 198 bp, Escherichia coli
atggtgatacgcaaaacggtgtgcagggattgtagtaacgcaattactcataatacggaatgctgcccgagctgcgcgtcaacagcttcctcaggctattaccgaaataccgatcgtctgctctttctactgacgttactgcctgtgctgattctggctgtcgtttcaggcgtcagtgtatttgtactgttgcagtag

SEQ ID NO: 6186 - DNA, 288 bp, Escherichia coli
gtggtgcagaaacgtaacttctggcaactgcagactgaaatccaccaccggggacgcgactgccatccgtacagcatggatatcacggttacccggaacagtccgactggtcaggcaatgacaaccgatgcggaagccgcagtcagcgaagccctgcgcgacctggccttctggctgtaccgtcaactggaaaacgagtacgactggctgacctcagatgccgctgtggatgaggcccttctcatcaacgaatataccttcaccgaagccggtctgcgcgccggctga

SEQ ID NO: 6187 - DNA, 381 bp, Escherichia coli
atgctgggagcagtggaacgccgctttggcagcgagcttccggcgtctccagtggagtggctgacggataatggttcatgctaccgggcgaatgaaacacgtcagttcgccaggatgttgggacttgaaccgaagaacacggcagtgcggagtccggagagtaacggaatagcagagagcttcgtgaaaacgataaagcgtgactacataagtatcatgcccaaaccagacgggttaacggcagcaaagaaccttgcagaggcgttcgagcattataacgaatggcatccgcatagtgcgctgggttatcgctcgccacgggaatatctgcggcagtgggccagtgatgggttaagtgataacaggtgtctggaaatatag

SEQ ID NO: 6188 - DNA, 159 bp, Escherichia coli
atgccgggttgtacatcacgtttattgcccgaaggccctttctcacgcgaacaggctgttgccgtcaaaacagcttaccgcaatgtgtttactgaagatgaccagggaacatattcccggctggttatccgtaatgctgaaggtcagttgcgctggtga

SEQ ID NO: 6189 - DNA, 276 bp, Escherichia coli; identical to SEQ ID NO: 6180

SEQ ID NO: 6190 - DNA, 477 bp, Escherichia coli
atgcaacagctttcctttctgcccggagagatgacgcccggcgagcgcagcctcattcagcgggccctgaaaactctggaccgccatcttcatgaacccggcgtggccttcacctccacccgtgcggcacgggaatggctgcttctgaacatggcgggactggagcgtgaagagttccgggtgctgtatctgaacaaccagaatcaactgattgccggtgaaaccctcttcaccggcaccatcaaccgcacggaagtccatccccgggaagtgattaaacgcgccctgcaccacaatgccgctgccgtggtgctggcacacaatcacccgtccggtgaagtcacccccggtaaggcagaccgccttatcacggaacgtctggtacaggcactgggcctggtggatatccgggtgccggaccatctgatagtcggtggcagccaggttttctcctttgccgaacatggtctgctttaa

SEQ ID NO: 6191 - DNA, 141 bp, Escherichia coli
atgctgaaaggcggaatttccggccgcagtgcaaaaggaaaacgtatccacacccgtgccattcacaacatcgacaccgatattaagctcaaccgcgcattgtgggtaatggcagaaacgctgctggagagcctgcgctga

SEQ ID NO: 6192 - DNA, 222 bp, Escherichia coli
atgaaaatcatcacccgtggcgaagccatgcgtattcaccgtcagcatccggcatcccgtctttttccgttctgtaccggcaaataccgctggcacggcagcactgaagcgtataccggtcgtgaggtgcaggatattcccggtgtgctggccgtgtttgctgaacgccgtaaggacagttttggtccgtatgtccggctgatgagcgtcaccctgaactga

SEQ ID NO: 6193 - DNA, 243 bp, Escherichia coli
atggtgaattaccgtcttatatcactggcgctaacattggatgcagcaatctctacatccaatgtgaataaccatgaattgcacagaaataatatacctgcgatcctctccggaaattccggtatcactgactacgtaccgttttcagcagaacgaaatgcggcgatggtcatttggcggacagccatagatagccgtccggctgtgtgtaacgatgaggaaggaaccccgggaacgttatga

SEQ ID NO: 6194 - DNA, 129 bp, Escherichia coli
atgcccccttcaaccacggatgtgctgaatatggcggcagcacaaccgctggtatttgatgcagaactggacaccgtgcgtgagcgtcttggtagcgtaaagggcggcgatgtggagttcggcaattaa

SEQ ID NO: 6195 - DNA, 432 bp, Escherichia coli; identical to SEQ ID NO: 4516

SEQ ID NO: 6196 - DNA, 396 bp, Escherichia coli
atgccatttgctcgttatttctgcattttcataaacgttggtttgggagaaacggcaaagaggaatgtggggacaggagaaaatcaggtaccggatatgaacagctttggtaactcattgaccgccaatggataccagaaattacctggggggatgattattcaatgggggagtttttctgtctcaccaaccggaggaagtgttggaacagttgatataacattacctgtagctttccctgctgcttgtcgttcggtaaacgctcttatttcaactaatgatccttctgcccgttctgtgggctttgatattggaagtaccaacagaactaaaatcagatttacttacacttctgctacaacaaattcaatttactggatggctgtggggtattaa

SEQ ID NO: 6197 - DNA, 348 bp, Escherichia coli; identical to SEQ ID NO: 1629

SEQ ID NO: 6198 - DNA, 441 bp, Escherichia coli; identical to SEQ ID NO: 1630

SEQ ID NO: 6199 - DNA, 603 bp, Escherichia coli; identical to SEQ ID NO: 1631

SEQ ID NO: 6200 - DNA, 1827 bp, Escherichia coli
gtggtggtgaacacgctggcctcagaaaatccggatgaagccgggcgttacagcatggacgttgagtacggtcagtacagcgttattctgttggtggagggattcccgccatcacatgccgggatcatcaccgtgtatgaagattcccgacccggcacgctgaatgattttctcggtgccatgacggaggatgatgcccgtccggaggctctgcgccgttttgaactgatggtggaagaggtggcgcgtaacgcgtccgcggtggcacagaacacggcagccgtgaagaagtcagccagcgatgccagcacatcagcccgtgaggcggcaacccatgcgactgatgctgcaggctcagcacgcgcagccagcacgtcagccggacaggccgcttcgtcggctcagtccgcgtcttccagcgcaggaacggcatctacaaaggccactgacgcggaaaaaagtgctgccgctgcagagtcctcaaaaagcgcggcggccaccagtgccagtgccgcgtcaacaagtgccgggcaggcctcagccagtgccactgccgccggaaaatcggcagaaagcgctgcatcgtccgcttcaacagccacaatgaaggctggcgaagccactgagcaggccactgcagcagcgaggtctgcttccgctgcgaagacatccgaaacgaacgcgaaagcctcggaaaccagcgcagaatcctcaaaaacggctgctgcatcgtccgccagttcggcggcgtcatcggcatcatcggcgtctgcttcaaaagatgaggcggctaaacaggcgtcagcagcgaagggcagtgccacgacggcatccaggaaggcgacagaagcagttggcagtgcgacggcggcagcacagagcaagagttcggcagaatccgcagcaacgcgcgccgagacagcagcaaaacgggcagaggatattgcatccgctgtagcgcttgaggatgcgagcacgacaaaaaaggggattgttcagctcagtagctccactaatagcacgtctgaaactcttgcggcaacaccgaaagcggttaaggcggtaatggatgaaacgaacaagaaagcgcccctgaacagtccggcgttgaccggaacaccaacaacgccaactgcgccaaaaggtactgacaatactcagatcgcaagcacggcctatgttatggctgcgatttccgcccttgtgaactcgtcgcctgcctcgctggacacactgaataaacttgctgcggcactggggaataaccctcattttgccacgacgatgctcagtgcgctggcaggcaaacaacctctggacgatacgcttactcgtctgagtggaaaagatgctgcaggcctgctcgcatacctcggtctggggaatggtgctgtactgccggttggtgttcccgttccctggccgtcagcgacgccacctgcagggtggatcaaatgtaatggtgctgtgttcgacgcctcccggtacccagggctggcacaagcctatccggcgcacagattgcctgatttacgcggggagtttatccgtggatgggatgacgggcgtggcgtggacaccggaagggggatactgagctctcaggctgatgatattaagaagcctgaacttaagtatcttgcgcctgaccgtactcaatacggaaatacgacaacatttgtgtttcagggaggggtgaatggtgtttattcatcggtgattaaacagtcaggaagttcacctaccgttgatgcctttcaggtttccgggggaactgaaaccagaccgcgtaatattgcatataactacattgtgaggggagcctga

SEQ ID NO: 6201 - DNA, 2511 bp, Escherichia coli
atgaacgtacagttcttcgaccacgcacaccacaagctcaaaattcgcggcctgcaaagtccggtggacgtgctgacttttacaggccgcgaacagctcagcgccccgttccgctacgacattgagtttaccagtaccgataaagccatcgcgccggagtcggtgctgatgcaggacggcgcattcagcctgagcgccccgcccgtacagggaatgccggtgatgacgcccctgcgcaccctgtacggcgtcattaccggctttaagcatctctcctcgtcacaggacgaagcccgctatgaagtgcgtcttgaaccccgtatggcgctgctggcccgcagtcgccagaacgccatttaccagaaccagacggtgccgcaaatcgtcgaaaaaatcctgcgcgagcggcaccagatgcgcggtcaggacttcgtgtttaacctcaaaagcgaatacccggcccgcgaacaggtgatgcagtacggtgaggacgacctgacgtttgtttcacgcctgctgtcagaggtgggtatctggttccgctttgccaccgacgcccggttgaaaatcgaagttatcgaattttacgacgaccagagcggctacgagcgcgggctgacgctgccgcttcgccatccttctgggctgtttgatggtgaaacggaagccgtatgggggctgaacaccgcgtacagcgtggtggaaaaaagtgtctccacgcgggactacaactaccgtgaagccacggcggaaatgaccacaggccagcatgacgccaccgggggcgataacaccacttacggcgaagcctatcactacgccgacaacttcctgcaaaaaggcgataaagaggcagcggaaagcggcgcgttttacgcccgtatccgccacgaacgctacctgaatgaacaggccattctcaaaggccagagcaccagttcactgctgatgccggggctggagataaaagttcagggcgacgacgcgccagcggtgttccgcaagggcgtactgattaccggcgtgacggccagcgcggcgcgtgaccgcagctatgaactgacgtttaccgctatcccgtactcagaacgctacggctaccgtccggcgctaatcccccgcccggtcatggccggaacgctcccggcgcgggtcaccagcacggtgaagaacgatatctatgcccatatcgacaaggacgggcgctaccgggtcaaccttgactttgaccgcgatacgtggaaaccgggttatgaaagccagtgggtgcgccagtcgcgcccgtatgcgggagacacctacggcctgcacttgccgctgctggcgggaacggaagtgagtatcgcctttgaggaaggcaacccggacaggccgtatatcgccggggtaaagcacgactcggcgcacaccgaccatgtgaccatccagaacgacaagcgcaacgtgctgcgcacccctgccaacaacaaaatccggctggatgatgagcgcggcaaagagcatatcaaggtcagtaccgagtacggcggcaagagccagctaaacctcggtcatctggtggacgccgggaaacagcagcgcggggaaggctttgaactgcgtaccgatctgtggggcgcggtgcgggcaaagaaaggcatctttatcagcgccgacgcgcaggacaaggcgcagggtcaggtgcgcgaaatggctccggcgatggcaatactggatggcgcacagtcacagatgaagtcgctgtccactgatgcgcagacggcgaatgccgatccggcagatctgtcatcacagatagcgctgttgcagcaaagtgtaaaagatctgactcaggctgcgatcctgctaagcgcacccaaaggcgtggcgatcgccagcggagagcacctgcaactggcggcatcgaaaaacctgatcgcgaacgcaggaaatcacgctgacatcggtgttgtgaagaatatgtttatcggtgtgggtcaggcgctgagcgtgtttgtacgcaaagcgggtatcaaactgtttgccaataaaggggcgatctcggtacaggcacagaacgatctgatggaactgttggcacagaaatcgatagagatcaccagtacggaagatgagatcaagatcaccgcgaagaagaaaatcaccctaaacggcggtggcagctacatccggctggatgcctgcgggatagaagctggaacgccgggagaatataacgttaaggccggatattacgggcgtaaaccaaaggcgaagctgacgccggagttgatggcgtttccagtgattgagagcggggaatttaatgctaagttcctttttactgatgatgatggtctaccttatgccaacacaaaatatattgcatgtttttctgatggcactcaaaaagaaggtattactgatgagaatgggtatacagaaaattttaatactgattccaaacaaacaattgatgtcagattattgaatcaaaatatagacatgatattgggaggcgtgcatgagtaa

SEQ ID NO: 6202 - DNA, 933 bp, Escherichia coli; identical to SEQ ID NO: 2227

SEQ ID NO: 6203 - DNA, 3423 bp, Escherichia coli
gtgaacaaaatttattcgtttaagtgttgtcctgtcaccgtaggtcttattgctgtctccgaacttgccagtagtgtaacgaaaaacgcaggccgaaaattaaaaaaaatatcgctgatggttttatctgtgagctgtctctcttatcctatgatatccttggcgggcattgtccgttccgatatagcctatcagatttatcgtgatttcgctgaaaacaaagggctttttgtacctggtgccacagatattccggtatatgataaggacggaaatttagttaaggttgccggcggatatgcttttaaaacaggaggaaccacaggagttcctctgatatctgatgcaacaatagtctctaatcccgggcaaacctatgatcctgtaaacggacctttacctgactatggtgcccctggggacagtggttctcctttgtttgcttatgatgaacaacaaaaaaaatgggttattgttgctgtattaagagcatatgcaggtattaatggtgctacgaactggtggaatgtcatatcaacagattatctgaaccaggttatgcaggacgatttcgatgcccccgtggactttgtttccgggctgggccccctgaactggacatacgacaaaacatcaggcacaggtaccctgagtcagggcagtaaaaactggaccatgcacggacagaaagacaatgacctcaatgccggtaaaaatctggtattcagcgggcagaacggtgcaattgtcctgaaagacagtgtgactcagggggccggttatctcgaatttaaagacagttacaccgtatctgctgaatccggaaaaacatggacgggggccggcattattactgacaaggggacgaatgtgaccaggaaggtcaacggtgttgccggtgacaacctgcataaactgggggaaggaaccctgaccataaacggaacaggtgtaaaccagggaggactgaaaacgggagacggtaccgttgtacttaaccagcaggcagacactgcaggtaatgttcaggccttcagttctgtgagcctcgccagcggatgtccgaccgtggtgctcggggatgcccgtcaggtcaatccggataacatttcatgggggtaccggggaggtaagcttgaccttaatggtaatgccgttaccttcacccggctgcaggctgctgattacggggcggtgattacaaatcatgcacagcaaaaattccgacttttactggatcttaaggctcaggatacaaatgtcagtgaaccgacgattggaaatatacccccctttggtggtaccggcactctaggaaacctgtacagcatgatactcaacggccaggcccgcttctatattctgaaatctgccagcaatggtaacaccctgtgggggaacagcctgaatgatccggttcagtgggaatttgttggtacggacaaaaacaaagctgttcagacagtaaaagactggatcctggccgggcgggcaaaacaacccgttatctttcatggtcagctgtccgggaatatggatgtcgccattccacagctgccggggggaagaaaggtcatctttgatggtagcgtgaacctgccagaaggtaccctgagtcaggacagtggcaccctgacattccagggtcatccggttatccatgcctccgtccgtggcagtgcgtcggtcagcctgaaccagaaagactgggaaaaccgccagttcacaatgaaaacactgtcgctgaaagatgctgacttccatctttcacgtaatgccacgcttaacagtgacatccagtcggataacagccatatcacactgggaagtgacagggtatttgtggataaaaatgacgggacgggaaattatgtcagtcctgaggaaggtacctctgtcccggacaccgtgaatgacaggagccagtatgaagggaatattacgctgaaccataactcaaccctggatatcggcagcctgttcaccggggggattgacgcttatgacagtgccgtcagcatcacctctccggacgtcctgcttacagccccgggggcttttgtcggcagttcgctgacagtacatgatggaggtcaccttacagcactggacggtattttcagcgacgggcatattcaggtcggtaagaacggtaaaatcaccctgagcggtacaccggttaaagatacggctaatcagtatgcccctgctgtatatctgacggatggatatgagctgaccggcgataacgcagcactggaaattacccgtggagcacatgtttccggtgatattcatgcctctgcggcatcaacagttaccatcgggtctgacaggtcggcagaactggcttctgcggaaacgcctgcatcggcgtttgccggtagtcttcttgggggctataacgcagcattcaatggtgctataaccggcggcagggctgatgtcagtatgcataatgcactgtggactctgggagtggactcctctatccatagtcttactgtcagaaacaaccgtatccgctctggaggagaccgggcattccgtaccctgaaggtgaataaactggatgcaacaggcaatgattttatcctgcgtacggacctgaaaaatgccgataaaatacaggtgactgaaaaagccactggttcagataacagcctgaatgcctgctttatgaagaatccgtctcagggacaggccctgaatattcccttggtcacggtaccggcgggaacttctgcagaggtgtttaaggccggcacccgggggacaggtttcagtcgggtgacaccacccctgcatgttgacaccagtggtggcaatacgaagtggatactggacggttttaaagcggaagctgataaagccgctgccgcgaaggctgacagtttcatgattgccgggtataaaaacttcatgacggaagtcaatgatctgaacaaacgtatgggtgacctgcgtgacacaaacggtgatgccggagcctgggcgcgcatcatgagtggtgccggttctgcagacggtggttacagtgataattacacccatgttcaggtcggctttgacaaaaaacatgaactggacggtgtggacctgtttaccggtgtcacgatgacctataccgacagcagtgcagacagccatgcattcagcggcaagacgaaatcggttgggggcggtctgtatggttcagcattgtttgagtccggtgcctatatcgatttgattggtaaatatattcaccatgacaatgattacacaggtaactttgctagcctgggaacaaaacactacaacacccattcctggtatgccggtgctgaaacgggttaccgctatcacttgacagaggacactttcattgaaccgcaggctgaactggtttacggcgcagtatccgggaaaacattccgctga

SEQ ID NO: 6204 - DNA, 1485 bp, Escherichia coli; identical to SEQ ID NO: 4016

SEQ ID NO: 6205 - DNA, 873 bp, Escherichia coli
atgaatccgtctgatgccattgaggcaattgaaaaaccgctctcctccctgccttactcgctttcccgtcacatcctggaacatctgcgcaaactcacccgtcacgaacccgtgattggcattatgggtaaaagcggggccggtaaatcctcactctgtaatgcactgtttcagggggaggtcaccccggtcagtgatgttcacgccggcacccgggaagtacggcgcttccgtctgagtggccacggtcacagcatggttatcactgacctgcccggggtgggcgagagccgggacagggatgcagagtatgaggccctgtaccgtgacattctgcctgaactggacctggtactgtggctgattaaagccgatgaccgtgccctgtctgtggatgagtatttctggcgacacatcctgcaccggggacatcagcgggtactgtttgtggtgacgcaggccgacaaaacggagccctgccatgaatgggatatggccggtattcagccttctcctgcacaggcacagaatattcgcgaaaaaacggaggcggtattccgtctgttccggcccgtacatccggttgtggccgtatcggcccgcaccggctgggaactggatacgctggtcagtgcgctcatgacagcgcttcccgaccatgccgccagtcccctgatgacccgactgcaggacgagctgcgcacggaatctgtccggtctcaggcccgtgaacagtttaccggtgcggtggaccggatatttgacacggcggagagcgtctgtattgcctctgttgcacgcacggttctgcgtgccgtccgtgactcggtggtctctgttgcccgcgctgtatggaactggattttcttctga

SEQ ID NO: 6206 - DNA, 2241 bp, Escherichia coli
atgttaacacataaagttaacactcgttttttgcgtaatgagaaaaatagttttttatatttaaaatacataattaaaaatattgaaaataatgagtatattaagtatcttcctcaattaggaactgttcgtggatataaagcaagactttcacaacaacttcttttacaaaatagtatatacgtaaattatgaacaaactaactttgagaaaatacttgggtacttgattaatgacaatatcaaaaatatcggcttcgatatttttgatacattattatgtcgtcctttagtcaacccagcagatttgttccatctaatagaagaagatgtacacaaaataacgaaattgagaagctttaatttcgcaaaaacaagaatatatgctgaaaatctagcccgccacggcaaagttgaagtgtcattagatgatatatatactaaattacaagaaagtactggtttttcagatgaagtaataggtaagataaaaaaactagaatgtgaaatggaacgccagttactctcaccaagagagtcaatgttagaatatttttcattagccaaaatacatcataaaagattgtttatcgcctctgatatgtacttatcagagacctttttaagagatgtgttaacaataaatggatataaaactgaaaaaataccagtttatatttcatgcgagtataataaagtaaaacataatggttcattatttaagtttattttatggaaagaagggttagaaccatctaaaactctttttattggtgataatttcaagtctgatgttcagcgagcgatcgataatggctttttagcagtgcattatcctaaagcaatagaaaaattaaaaaacacaaatttatttaaaccggacgtattaggttttgtctataaagaaaatttttcattctatcttggaatgattgctaataagatttttgataacccatttattcaatttgatcaaaaatcatctatcaacaactcaagtgcacttcttggttattatatttttggtccattagttttaagtttaacccattggttaatacaaaatttaaataatgagaattacaacaaaatactcttttcttcaagagattcaagagttatttttgatgtatacaatgagataaataaaaatctatatgattataaattacctaagagtgagtatttttatatatctcgaacagctacattgcctgcatatactaataaagccttaaggggaacgcttctttctctatataattcaaagctagatgtcaaaaagtttttagattatgtttttggcatagatgtttcaaacaatgaaatagctaaaaaaatagctcgtgatttaaaactcaatttaacatcagatagtagtaagcacaaaaaagaaattgctcagtttatacataaatattatgactctacagagtatagtaatacccttgaacaaaaaaatgaacatcttattgagtatgttactaatattatagggaatgatagttttgctgtttttgacttaggaacaagaggaacaagtcgagatattctatctgacattctgggtattaatatacctttatatatgtttagagaaacgaaacataaatgtacaaatgatataactagctatatagtagatacgtttaatccttttagaaaaggtgtccgagttattcttcctgcattttatgagttattactttctgatgctataacctctacctgctatggttatgagaaatcagcaacatctgttaagccaatcgtgaatccagcagaactcacagctacttctctattaactctcaaatcgcaagtatatatgaaagagttttgtaaggattatatttcgctgtttaaagataaatgggagtatatcaactctcaaacacgggatgcatttgtatatcctttgtcttatctatgtagtaatactacagatactttactattaagtcagtttgtcggtgatgatcccttatttaatgataagcatttctctataattcatcctccactgaacaaaaaaaacaccactactaaaaaggtaagcgaaattactaaaaataaaacacagagcaaggtacagccaagttctatatcgaatgtgaccaaaacaaatagtgatataaggaggaatgcgtttatttatttcaaacggaaattctataaaaatgaaatcacaaaaaaaatttgggataaggggcgtgagttatatataaaacatctaaactaa

SEQ ID NO: 6207 - DNA, 294 bp, Escherichia coli; identical to SEQ ID NO: 2050

SEQ ID NO: 6208 - DNA, 705 bp, Escherichia coli; identical to SEQ ID NO: 2863

SEQ ID NO: 6209 - DNA, 2253 bp, Escherichia coli
gtgaacacggtggcctctgaaaatccggatgaagccgggcgttacagcatggatgttgagtatggtcagtacagcgtcaccctgctggttgaaggttttccgccttcacatgccgggaccattaccgtctatgaaggctccagaccaggtacgctgaatgattttctcggtgccatgacggaagatgatgtcatgccggaggcattgcgtcgttttgaggcaatggtggaagaagcggcacgcaacgccgaagccgcctctcagagcgcagcggcggcaaagaaatccgaaactgcagcggcatcatcgaagaacgcggcgaaaacctcagaaacgaatgcagctaatagtgcacaggcggcagcgacctcacagactgcatcagcaaactccgcgacagcagccaaaaaatcagaaaccaacgcgaaaaatagcgagacagccgcaaagacgagcgaaaccaacgcaaagtccagccagacggcagcgaaaaccagcgaaacgaatgccaaagccagtgaaactgcggcgaaaaatagccagaatgcagcagccgaaagcgagagcgcggcagccggttctgcgactgcagcagctggatcagcaactgctgcggctaacagccagaaagcagcgaagacgagcgaaactaacgcaaagtccagccagacggcagcgaagaccagcgaaacaaatgccaaagccagcgaaactgcggcgaaaaacagccaggatgcagcagccgaaagcgaaagtgccgcagccggttctgcaagtgcggcagctaatagccaaaaagctgcaaaaaccagtgaaactaacgcaaaggcgagcgaaacaaaagcagcaattagcgagacagaagcaacgtcagccgcaacgagagcagagaatgcagcccggattgcagaagatgccgctgatcctgcttctgtccctccgcttcctgatatctggctacccttgaatgattctctggaagcgataacagggtatgcgccggggtataaaacaataaccatcggcagtgatgaaatcactgtgccagttaatggaatatgtcagtttagccgggcttcatcagcaacgtatattgataagtccgggcatattaccgtagcaggtaataacgttcctcgttttgaaaaatatggtttgctgatagagaatcagcgaacaaacatgttcgtaaatagttttaatcctgatgcctggaataaaagcggtggtatatctgtaacatcatcaacagatgaatttgagtttaaatatggacgtttcacagtaggaagcgacatagcaggaacgacaacagggagaaatatatgcacagttgctggtaataaaggcatagatgtgactggcgatgatcagtacagtaaaggtccgtatgttaccgcgtcgttcagggtaagaagtgatctcaatgttcgcgcacgtatccgttttgaacggtataactcggaaggatacacttttctttgtgacgcctatttgtcattacagacccgtgaactacaaattactggtggcaatgcccagctattaacagcaaactttgaaatcgaccctggaagtggatggatatattttcaggcaacactgaaatgtctgccagaatggggaatggttggtacgcagctgcaaattgcagccgacagagctgtggggtcttttgcaacaggtgactggatagaagtaaccaccccgcaattcgagtatggtgcctgtgcaacttccttcatcataactacaacagagccagcgactcgtgcatcagatttatgtaaatttccgctgatgaaaaatatgtataccatgccttttacgttcatggtggaagtccataaaaactggtttatttctcataatgctgcaccgcgcgtaattgatacagaaaaccatcagtcaggtgctccatttatcatgggatttggctcttctggaactatcagtcaggacggttatccctattgtgatataggcggggctaaccggcgtgtatatgagtcatgcggagtaagagatctcgttatgggattcagggttaaggctgacggcatgacatgctcatttgcaaataagcatataagcacagaaacaaaaacagtatggaaatatattcgtgaagctgccgtgattcgtattggggggcaaacgacgacaggattgcgacaccttaatggtcatataaaaaatctccgtttctggaacagagcattgtcagatacgcagcttaaggaatacgtataa

SEQ ID NO: 6210 - DNA, 756 bp, Escherichia coli
gtgaccgccaccgctcacatccagctcgccgtcctggttcaccaccgcgttattacccgcgatttcagttccggtcgaaccctgaccgtctacggtggtattgccgctgttgttggccgtcgcatcatcacccgtaatgcgggttccggtgccgccatcaaggatcgtgctgtcgccgtcgttgttgacgatagctttgtcaccgtttatctcggtgcccgtggaatccttgccgtcaacggtggtgttgccgttattgttcacggtggcttcgtcgccattaacctgcgtgccggtgccgccgttgctgatggcattgtcaccgtcgttgttcacgaccgccttgtcgccgtctatctgaataccgatggagtcaggatcggtgacagtcatgccgcctttgttgtccaccgttgcgctgtcgccggtgatatcaataccgtgaccgccgccgctcacatccagctcgccgtcctgattcaccaccgcgttgttacccgcgatttcagttccggtggtgcctttgccgtcgacgatggtttttccagtgttgtttactgtggtattgtcgcccgtaataacgagctcaccgttgtgattatattgccacttcgttgcaccatctgcgctcatcccttcaagggcaaccgtgttattcgtttcatcaatctgccaaagattaatagtcgccttacgcccattgctatcttgcagagaaatagtcccgtcagcattctcggtataagtaaaaactga

SEQ ID NO: 6211 - DNA, 564 bp, Escherichia coli; identical to SEQ ID NO: 3917

SEQ ID NO: 6212 - DNA, 231 bp, Escherichia coli; identical to SEQ ID NO: 3919

SEQ ID NO: 6213 - DNA, 192 bp, Escherichia coli; identical to SEQ ID NO: 4489

SEQ ID NO: 6214 - DNA, 408 bp, Escherichia coli
atggctgtctgcactgctgtcggtataggtcatcgtgacaccggtaaacaggtccactccgtccagttcatgttttttgtcaaagccgacctgaacatgggtgtaattatcactgtaaccaccgtctgcagaaccggcaccactcatgatgcgcgcccaggctccggcatcaccgtttgtgtcacgcaggtcacccatacgtttgttcagattgttgacttccgtcatgaagtttttatacccggcattcatgaaactgtcagccttcgcggcagcggctttatcagcctccgctttaaaaccgtccagtatccacttcgtattgccaccactggtgtcaacatgcagggttggagtcacccgactgaaacctgtcacccgggtgccggccttaaagatatcccctga

SEQ ID NO: 6215 - DNA, 216 bp, Escherichia coli; identical to SEQ ID NO: 4011

SEQ ID NO: 6216 - DNA, 675 bp, Escherichia coli; identical to SEQ ID NO: 4012

SEQ ID NO: 6217 - DNA, 435 bp, Escherichia coli
atgaaaactgaactgaccctgaatgtcctgcagaccatgaacgcacaggaatacgaagatatccgggctgccggaagtgatgaacgccgtgagctgacacacgccgtgatgcgggagctggatgcgccggataactggacgatgaacggcgagtacggcagcgagtttggcggctttttccccgtccaggtccgtttcacgcctgcccacgaacgttttcacctggcgttatgttcaccgggcgatgtctctcaggtctgggtgctggttctggtgaatgccggtggtgagccgtttgcggtggttcaggtacagcggcggtttgcaccggaagccgtcagccattcactggcactggcggcgtcactggatacgcaggggtacagcgttaacgacatcatccatatcctgatggcggaagggggtcaggcatga

SEQ ID NO: 6218 - DNA, 1959 bp, Escherichia coli; identical to SEQ ID NO: 4013

SEQ ID NO: 6219 - DNA, 2517 bp, Escherichia coli
atgttacagatagtcggcgcgctgatcctgctgatcgcaggatttgccattcttcgccttttgttcagagcattaatcagcacggcttctgcgctggcagggctcatattgctgtgtctgttcggcccagccttactggctggctatatcaccgaacgcataacccggttgttccatattcgctggctggcaggcgtatttctgacgattgccggaatgatcatcagcttcatgtggggacttgatggtaaacatatcgcgctggaggctcacgcctttgactctgtgaaatttattctgaccaccgctctcgccggtggtctgctggctgttcccctgcagatcaaaaacattcagcagtacgggatcacaccagaagatatcagcaaggaaattaacgggtattactgctgtttttatactgcctttttccttatggcgtgttctgcatgcgcaccattgatcgcgttacagtacgatatttcaccgtcactgatgtggtggggcgggttgttgtactggctggctgcattagtgacgctgctatgggcggccagccagatccaggcgctgaaaaaactgacctgtgccatcagccagacactggaagaacaaccggtgctcaacagcaaatcgtggctgaccagtttgcaaaacgattacagccttcctgactcactgacggagcgcatctggctgacgctcatttcacaacggatttcccggggagagctgagggaatttgaactggcagacggaaactggttactgaacaatgcctggtatgaaagaaacatggcagggtttaacgaacagttgaaagagaacctgtcattcacacctgatgaactgaaaacgctcttccggaaccgcctgaatttatcaccggaagcgaatgacgattttctcgatcgttgcctggacggcggtgactggtatcccttttcagaaggtcgccgttttgtatcattccatcacgtggatgagcttcgtatctgtgcctcctgcgggctgacagaagtacatcatgccccggaaaatcataagccggatccggaatggtactgctcctctctttgtcgcgaaacagaaacactgtgtcaggaaatttatgaacgcccttacaacagctttatttccgatgcaacggcgaatggtctgattctcatgaaactgccggaaacctggagtacaaatgagaaaatgtttgcttccggagggcagggacatgggtttgccgctgaacggggaaaccatattgtcgacagagtccgtctgaaaaacgcacggatcctcggtgataataatgccagaaatggagcagacagactggtcagcggaacagaaatccagacgaaatattgttcaactgcagcccgtagcgtcggtgcggcattcgacggacaaaacggacagtatcgttacatgggaaataatggccccatgcaactggaagtcccccgtgatcagtatgccggcgctgttgaaaccatgaggaataagatccgcgaaggtaaagtacccggtgtaaccgatcccgcagaagcgtcccggctgattcgtcggggacatctgacttatactcaggcccgtaatatcacccggttcgggaccatcgaatcggtcacttatgatattgccgagggttcggttgtcagtctggcggccggagggatcagttttgccctgacggcatcggtcttctggctcagcaccggcgatcgcgatgctgccctgcagacagctgctgtccaggcaggaaaaaccttcacccgcacactggctgtctacgtcacaacccagcaactccaccggctcagtgttgttcagggtatgctgaagcacattgatttttcgactgccagcccgactgtccgactggctcttcagaaggggaccggtgcaggaaatatcagtgccctgaacaaagtaatgaagggtacgctggtgacatctctggcactggtagctgtcacaaccggccctgacatgatcaaaatgttgcggggacggatctccggtgcgcagttcatcaggaatcttgccgtggcatcttccggtgtggcaggtggagctgtcgggtcagtggcgggcgggatactgttcagtccactgggaccatttggtgcactgacagggcgtgtggttggcggtgttctggggggaatgattgcctccgctgtatcaggaaaaattgccggagcgctggttgaagaagatcgcgtcaaaattctggcaatgattcaggagcaggtgacatggcttgccggcagtttcctgctgaccggacatgagattgaaaatctgaacgagaatctggcccgtgttatcgatcagaatgctctggagatcattttcgccgccggtatacaacaacgggccgcgaccaatatgttaatcaaaccactggtggtcagtatcatcaggcaacgccccgtcatggaatatgatgcatcccatctcggcaatatggttaaccgactggaagaagcattacccccggagttaccggcataa

SEQ ID NO: 6220 - DNA, 456 bp, Escherichia coli; identical to SEQ ID NO: 4494

SEQ ID NO: 6221 - DNA, 774 bp, Escherichia coli
atgaccgccctgaatgctgagacggacgctgttgttttcaccatttacaccggtctgatggctgcgggagcctgccacaatccggtcatagtccattgcctgtgtcagcatggaggcatacagggggacttctgcacgataagcattttcactgcgcagataccagctctcatcactgtcccggttgagggagtagttaaaggcaccggcctgcagcctgttcccctggacaaaggccccttcctccgtggtggcaccgttaatggcttcaaccacctgaatacccttaccgctggtcgccagccccgacgcactgttgccggcgttcaccaggttcaggatggtttttccggttgccctgccgccgtcaatgaccagtctgtcagcattgttctgtgccatatccgggcgtacacgcaggctgatggtgccattctgtccgttcaggtttttcactttcagggttgccggtacgaacttccctgtgcgggtggaggtgaaatgaatctgtccggcatggctgaggtcatccaccaccgactgcaccgtggcgttatcggggatattccaggtggcaccggaggcgagagtgacattcgtggggtcaatggcaccgttcagcacagtgctgccggtcagcttcagggctgtaccgcgctgagcaatgacatccgtggtgacggtactgtcgttcagcgtcagcgtgccttcattcaggttgacggctttctgggtgagtgtggtgttgctgacagtgagtgtgccacttcctga

SEQ ID NO: 6222 - DNA, 918 bp, Escherichia coli
atgaccgccctgaatgctgagacggacgctgttattttcaccgcttacaccgctctgatggctgcgggagcctgccagaatccggtcatagtccattgcctgtgtcagcatggaggcatacagggggacttcagcacgataagcattttcactgcgcaggtaccagtcttcatcgctgtcacggttcagggtgtagttaaaggcgccggcctgaagcgggcgactcagggcaaacgcaccttcttctgtggtggcaccattctgtgcatccacaacccggataccctgtccggaggttgccaccccgaggttactgtttccgacatttgtaaacgcaagccaggttttgccggttgcctgaccaccattaatcaccagctggtcagaggcattgctgccatcaaggcgaacacgcatattgatggtgccaccctgaccggtgaggttactggtggtcagtttatggaacgttaccggggagtcgccttttgcaacagcacggctcagtgcggcatccggtgtcgtctgattatcaaagcgaatctctccggcgttaacaatatcgccggtactgaccacatcaccattcagtaccatactggcgcctttactgagctgtgttctgccactcagacttcccccggcggccagcgtcagtgttccacgatgtccgacagtggtgttgctggccagtcctccggcattaaccgtaaagctgccgccattttccagcagcaggccgctggcctgaccggatatgccatcaatactgaacttaccgctggcattggtcccctcaacagtggcaccactgtctgcaatcagggcaccaccggatgtcatggtgacatctgttgccttaccaccggcagacactgccagggtaccgccgtcatccaccagtgttttccaggctga

SEQ ID NO: 6223 - DNA, 678 bp, Escherichia coli
atggccctccagtacatccaggcgaccaccggactccagaacaacaccgtcagcattaccgttttccacagtgaaattgcccagacggttgctgccggtgacggttgccgccgtactggtgaccagtgcgccgccctgcgtcagggtgacattcgtggctgtaccaccggcgttcacctgcagtttacctttctggttaacggtggtgaaatccgccagaccaccttccttgataatctgccagccgtcactgttaacaacagtgtcagatgctgtacctccgttgtgcacatactggtaccccccattcagcgtggtatccagtgcgtgaccatgtacagtctggtcgccgccggcataaaccacagtggtatttgccgttccttcagcagccacaatctgacgaccatttttattgatggtggtgcgtacggcatctccgtagacggtctgcccggtatcaccattttccgcatccggtcctccttccgcgccggtattcacaaccgtgtcggttgccattgcaccggatttgacggcctgccagcccttctcattaatgacggtacccgttgcaatcccgccttcatgtacccactgctcaccgccgttcagagtggtgttcactgcctgcccctgaaggctctgtccgcctccggcactgataaccgtgtctga

SEQ ID NO: 6224 - DNA, 573 bp, Escherichia coli
atgctgcgcctgcgccgtaacggagagataaacggagaacatgtccctgaaattattctgctcaactctcatgacggtacctccagctaccagatgctgccgggttacttcaggttcgtctgccagaacggatgcgtctgtggtcagtctctgggggaagtgcgtgttccgcaccggggaaatgtggtggacagagtcattgaaggggcttacgaggtggtgggcgtgtttgaccggatagaggagaagcgtgatgccatgcagtcgctgattctgccgccaccggcacgccaggcgctggcacaggcggcactgacttaccgttatggtgacgaacatcggcccgtcaccaccgccgacattctgacgccacgacgccgggaggattacggtaaggacctgtggagtacttatcagaccatccaggagaatatgctgaaaggcgggatttccggtcgcagtgcaaaaggaaaacgtatccacacccgtgccattcacagcatcgacaccgatattaagctcaaccgcgcattgtgggtaatggcagaaacgctgctggagagcctgcgctga

SEQ ID NO: 6225 - DNA, 246 bp, Escherichia coli; identical to SEQ ID NO: 4533

SEQ ID NO: 6226 - DNA, 474 bp, Escherichia coli
atgaaaacattgtctcagaacaccacctcttcggcctgtgcaccggagactggcctgcaacaactggttgccaccatagtccctgatgaacagcgcatcagcttctggccgcagcattttggcctcattccacagtgggtgaccctggagccccgtgtcttcggctggatggaccgtctgtgcgaaaactactgcggtggtatctggaatctgtacaccctgaacaacggcggggcatttatggcccctgaaccggatgactatgatgacgaaacatgggtactgttcaatgccatgaacggtaaccgcgctgaaatgagcccggaagccgccggcattgccgcctgtctgatgacgtacagtcatcacgcctgccgtacggagtgttatgccatgacggttcattattaccgtctgcgggattacgccctgcagcatccggaatgcagcgccattatgcgcattattgactga

SEQ ID NO: 6227 - DNA, 1293 bp, Escherichia coli
atgcgcgatgatgttgcatttcagattatcaatgatgaattatatcttgatggcaacgctcgtcagaacctggccactttctgccagacctgggacgacgataatgtccataagttgatggatttatccattaacaaaaactggatcgacaaagaagaatatccgcaatctgcagcaatcgatctgcgttgcgtaaacatggttgccgatctgtggcatgcgcctgcaccgaaaaatggtcaggccgttggcaccaacaccattggttcttccgaggcctgtatgctcggcgggatggcgatgaaatggcgttggcgcaagcgtatggaagccgcaggcaaaccaacggataaaccaaacctggtgtgcggtccggtacaaatctgctggcataaattcgcccgctactgggatgtggagttgcgtgagatccctatgcgccccggtcagttgtttatggacccgaaacgcatgattgaagcctgcgacgaaaacaccatcggcgtggtgccgactttcggcgtgacctacaccggtaactatgagttcccgcagccgctgcacgatgcgctggataaattccaggccgacaccggtatcgacatcgacatgcacatcgacgccgccagcggtggcttcctggcaccgttcgtcgccccggatatcgtctgggacttccgcctgccgcgtgtgaaatcgatcagtgcttcaggccataaattcggtctggctccgctgggctgcggctgggttatctggcgtgatgaagaagcgctgccgcaggaactggtgttcaacgttgactacctcggcggtcagattggtactttcgccatcaacttctcccgcccggcgggtcaggtgattgcacagtattatgaattcctgcgcctcggtcgtgaaggctataccaaagtacagaacgcttcctaccaggttgccgcttatctggcggatgaaatcgccaaactggggccgtatgagttcatctgtaccggtcgcccggacgaaggcatcccggcggtttgcttcaaactgaaagatggtgaagatccaggatacaccctgtacgacctctctgaacgtctgcgtctgcgcggctggcaggttccggccttcactctcggcggtgaagccaccgacatcgtggtgatgcgcattatgtgtcgtcgcggcttcgaaatggactttgctgaactgttgctggaagactacaaagcctccctgaaatatctcagcgaccacccgaaactgcagggtattgcccagcagaacagctttaaacacacctga

SEQ ID NO: 6228 - DNA, 573 bp, Escherichia coli
atgctgcgcctgcgccgtaacggagagataaacggagaacatgtccctgaaattattctgctcaactctcatgacggtacctccagctaccagatgctgccgggttacttcaggttcgtctgccagaacggatgcgtctgtggtcagtctctgggggaagtgcgtgttccgcaccggggaaatgtggtggacagagtcattgaaggggcttacgaggtggtgggcgtgtttgaccggatagaggagaagcgtgatgccatgcagtcgctgattctgccgccaccggcacgccaggcgctggcacaggcggcactgacttaccgttatagtgacgaacatcagcccgtcaccaccgccgacattctgacgccacgacgccgggaggattacggtaaggacctgtggagtacttatcagaccatccaggagaatatgctgaaaggcgggatttccggtcgcagtgcaaaaggaaaacgtatccacacccgtgccattcacagcatcgacaccgatattaagctcaaccgcgcattgtgggtgatggcggaaaccctgctggagagcctgcgctga

SEQ ID NO: 6229 - DNA, 486 bp, Escherichia coli
atgaaaaccatttcacataattccaccacatcttctgtttccgtaaccgctgcatcagggaatgaccagcctcagttggttgccaccatagtccctgatgaacagcgcatcagcttctggccgcagcattttggcctcattccacagtgggtgaccctggagccccgtgttttcggctggatggaccgtctgtgcgaagactactgcggtggtatctggaatctgtacactctgaacaacggcggggcatttatggcccccgaaccggatgacgatgatgacgaaacatgggtactgttcaatgccatgaacggcaaccgcgctgaaatgagcccggaagccgctggcattgctgcctgtctgatgacgtacagtcatcacgcctgtcgtacggagtgttatgccatgacggtccattattaccggctgcgggattacgccctgcagcatccggaatgcagcgccattatgcgcattattgactga

SEQ ID NO: 6230 - DNA, 573 bp, Escherichia coli
atgctgcgcctgcgccgtaacggagagataaacggagaacatgtccctgaaattattctgctcaactctcatgacggtacctccagctaccagatgctgccgggttacttcaggttcgtctgccagaacggatgcgtctgtggtcagtctctgggggaagtgcgtgttccgcaccggggaaatgtggtggacagagtcattgaaggggcttacgaggtggtgggcgtgtttgaccggatagaggagaagcgtgatgccatgcagtcgctgattctgccgccaccggcacgccaggcgctggcacaggcggcactgacttaccgttatagtgacgaacatcagcccgtcaccaccgccgacattctgacgccacgacgccgggaggattacggtaaggacctgaggagtacttatcagaccatccaggagaatatgctgaaaggcgggatttccggtcgcagtgcaaaaggaaaacgtatccacacccgtgccattcacagcatcgacaccgatattaagctcaaccgcgcattgtgggtgatggcggaaaccctgctggagagcctgcgctga

SEQ ID NO: 6231 - DNA, 624 bp, Escherichia coli
atgaacgaagtgttcctgaagtatctgacggctcccaccattaccagcggcggtaatcctccggcattttccctgacaccggacgggcggctgacggcgagaaatgccgatatcagcggtaacgtgaatgcgaactccgggacgctcaacaacgtcacgattaacgagaactgtcgggttctgggaaaactgtccgcgaaccagattgaaggcgatctcgttaaaacagtgggcaaagctttcccccgtgactcccgtgcaccggagcggtggccatcagggaccattaccgtcagggtttatgacgatcagccgtttgaccggcagattgttattccggcggtggcattcagtggcgctaaacatgagagagagcatactgatatttactcctcatgccgtctgatagtgcggaaaaacggtgctgagatttataaccgaacggctctggataatacgctgatatatacgggtgttattgatatgcctgcaggcagtggtgtaatgacactggaattttctgtatcggcatggctggtaaatggctggtatcccacagcaagtatcagcgatttgctggttgtggtgatgaagaaagccaccgcaggcatcagtatcagctga

SEQ ID NO: 6232 - DNA, 645 bp, Escherichia coli; identical to SEQ ID NO: 4520

SEQ ID NO: 6233 - DNA, 315 bp, Escherichia coli
atgagagttgagcagaataatttcagggacatgttctccgtttatctctccgttacggcgcaggcgcagcatgtgttttgtgtatccccggcggcccgggtcgcgcacacaggtctggcaggcgaagaatggctgaaagccttcccgctgcagactttccagcacggtgatggtgggaatgtacgcataccgtttactgcgggaagtatgccggtctttaccgaaaatactgggaacatagtgcatcagttcttcgtgtgtcagcggacggtcacggcgtatctggtttgcagcataaccaaaacgactggctag

SEQ ID NO: 6234 - DNA, 312 bp, Escherichia coli; identical to SEQ ID NO: 6177

SEQ ID NO: 6235 - DNA, 501 bp, Escherichia coli
gtgaatgcgaactccgggacgctcaacaacgtcacgattaacgagagctgccgggttctgggaaaactgtccgcgaaccagattgaaggcgatctcgttaaaacagtgggcaaagctttcccccgggactcccgtgcaccggagcggtggccatcagggaccattaccgtcagggtttatgacgatcagccgtttgaccggcaaattgttattccggcggtggcattcagtggcgctaaacatgagcaagatcatactgatatctactcctcatgccgtctgatagtacgaaaaaacggtgctgaaatttataaccgaacggctctggataatacgctgatatatacgggtgttattgatatgcctgcaggcagtggtgtaatgacactggaattttctgtatcggcatggctggtaaatggctggtatcccacagcaagtatcagcgatttgctggttgtggtgatgaagaaagccaccgcaggcatcagtatcagctga

SEQ ID NO: 6236 - DNA, 375 bp, Escherichia coli
gtggccttcacctccacccgtgcggcacgggaatggctgattctgaacatggcgggactggagcgtgaagagttccgggtgctgtatctgaataaccagaatcagctgattgccggtgaaaccctcttcaccggcaccatcaaccgcacggaagtccatccccgggaagtgattaaacgcgccctgtaccacaatgccgctgccgtggtgctggcgcacaatcacccgtccggtgaagtcacacccagtaaggcagaccggcttatcaccgaacgtctggtacaggcactgggcctggtggatatccgggtgccggaccatctgatagtcggtggcagccaggttttctcctttgccgaacatggtctgctttaa

SEQ ID NO: 6237 - DNA, 303 bp, Escherichia coli
atggcggggccgtctgtgcgcgtgaatgaatggttcagcgcgtatgcgatggctggcgtggcttacagccgtgtgtcgactttctccggggattatctccgcgtaactgacaacaaggggaaaacgcacgacgtgctgaccggaagtgatgacggtcgccacagcaacacgtctctggcgtggggagctggcgtgcagtttaacccgaccgaatccgtggccattgatattgcttatgaaggctccggcagtggtgactggcgcactgacggtttcatcgtgggtgtcggttataaattctga

SEQ ID NO: 6238 - DNA, 264 bp, Escherichia coli
gtgagcgcctcttttgtactgtccacgccgacggaaacggatggcgctgtttttccggggcgcatcatgctggccaacacctgtacctggacctatcgcggtgatgagtgcggttatagcggtccggctgtcgcggatgaatatgaccagccgacgtccgatatcacgaaagataaatgcagtaaatgcctgagtggctgtaagtttcgcaataatgtcggcaactttggcggcttcctttccattaacaaactttcgcagtaa

SEQ ID NO: 6239 - DNA, 843 bp, Escherichia coli
atgaaaatactacgctcgttagtttgtatatttttattggggggggggtcgggggcacaggcggccacaaaaatcgccaccctgataaccccattagcctattccggctatctcacacaaatacactactatcttgagatactgactcctgacggtgttgagtttggtgtttataaacaacacagtataatgcttcaaaccgagaatttagatttggtgtcctggacagggagttctactgctccgacgctgaaaatggagtcgttcaatacgacttcaaaatctacgtgtgttggtcttgaagcgtatgatgcgcagtcgaacaaatctaattgggattgttataatgcccctctcggtgtgtactatgacggtccggtgcacggttgcccgtggctgatttcgacgtatactgacagcaatgtctcttcgatagatggtattggtccctataccggccccaaagttcacaactcatcatgccctgtccccgtcgccacttatgatatttcgtggagtgaagattatgttgcccattctaaagtgctgtcattgtcatcgacgggcggaacgattgagaaaacgctgcccacctttttgatggaaagcggcaagctctgtgacggcagcgtgatggacgatcgaggcgcatactgccgctttgtggcgcagatgatcaccttctccacctccggctgtgacagttcgcaagtgacggtcacacccaacccgtatcccattactgacaagcgactgcatgacatggtggtgcgtgtcgataccagcagccgccagcccattgattccacctgccgcttccagtacacgctcaacgaactgtag

SEQ ID NO: 6240 - DNA, 660 bp, Escherichia coli
atgcgcgaaataactaaagggcaaccgccggccagtttgcaacagtgggtgagagcaaaaccacgggataaaaatgccaatcagtggtttcaggaactttatgcgcaaaaaaaatgggatatcgttggcgatctcagccagcagtgcgctcaggaacaattttatctctgtgcttattgctgcgatcgcgtgacaggtacaaaccgcgataccgttaatgaacatgtcgaagccagggatttagctcctgctcgcagtctggaattcacgaatatcgttgcaagctgcaaaacaaaaggccagtgtgacgactcgcataagaaccagccattgctgttaacgccgcttatgccggaatgtgaaaccgagtttatcttcaagatcagtggtcgaattgaagggacgacgccgagagctatcgatgcgattaaggtactcaaccttggcgatagtgaacgtaataatcgggcattaattgaaaaacgtaagcagctttccgacagccttctgtgggctaatggcattgacccttcagaggggcttgaggatgacgatctgctgcaagtggttatcgacgaattactcacccccgtcgacggttatctggcacctttcgctcccgtggtggcgaatattctaaaaaactggatgaccgcatga

SEQ ID NO: 6241 - DNA, 1359 bp, Escherichia coli
atgatgaatatccgcacgcttaagctcactaatctggggcggtttgaagaacttgacgttcatctggctccagtggaggagttcaagagcaatgtgaccgtttttattggtaataatggtgcaggtaaaacatcaatattaaaatcgttggcaaccagcctgagttggttcgttgcccgagttcgtactgaaaagggtaacggtagccctattcctgaagacgctattctgaacggtaggagttcggcgacaattgaacttcaggtactgaatacgcatccagcgacggaggccgctacgccctaccgttggttgcttgccagaacggccagtgggaaaaaatcgaccaccgcctccagcctgcaagaggccagccaattggctgcgttttatcgagatcaatacacccagaatagcggggcatccttcccgcttatcgccttctatcccgtagaacgtgtcgtgctggacgtgccgttgaaaataaaagaacgtcataattttttgcaactggatggctacgataacgccctgaatcagggtattgatttccgccgtttctttgaatggtttcgcaatcgcgaagatgcagaaaatgaatcaggcttaccgcaagacgttctggataagctcagtaccaggatagatctcgataacaccgtcttaaatgcattaacggcaatcatggcctcgtcccgggatcgccagttgaccgccgtcagaacggccattagtcgctttatgccagggttcagcaacttacgcgtcaggcgtaaacctcgcctgcatatgtcgattgataaaaatggccagacactgaatgtgctgcaattatcgcagggtgaaaaatcactgatggcgttagtcggcgatattgctcgccgcctggcaatgatgaacccgatgttagaaaacccgctaaacggcgagggaattgtattaattgatgaagtggacatgcacctgcatccaacatggcagcgtacaatcatccagcgtctgacgacaacattcccacattgccagtttgtcttaacaacccactctcctttagtgatcagtgattgcaaagatgtgctggtttattctctggatgatggcgaattaacgcagctcccgtctctgtatgggcaagatgcgaatactgtgcttttgaatgtgatggatacggatattcgcaatgcgacagtggcagaaaaacttaacgatcttttggatctgattcagaaaaacgactttatcaacgctaacgctcttctgaatacgctaagcctggaacttcctgaaaaccatcttgaactggtgaaagccagaatgcttctgcgcaaacaggaaattaaacatgcgcgaaataactaa

SEQ ID NO: 6242 - DNA, 552 bp, Escherichia coli
atgaaaaagaaaacaacacttagcgaggaggaccaggcgctgtttcgccagttgatggcggggactcgcaagattaagcaggacacgattgtccaccgaccgcagcgtaaaaaaatcagcgaagtgccggtcaagcggttgattcaggagcaggccgatgccagccattatttctccgatgagtttcagccattattaaataccgaaggtccggggaaatatgttcgcccggatgtcagccattttgaagcgaagaaactgcggcgcggtgattattccccggagttgtttcttgatttgcacggtctgacgcagctacaagccaaacaggaactgggggcgttgattgccgcctgccgccgtgaacatgtgttttgcgcctgtgtgatgcatggtcatggtaagcatattttgaagcagcaaacgccactgtggctggcgcaacatccccatgtaatggcatttcatcaggcaccaaaagagtatggtggcgatgcggcattgttggtgctgattgaagtggaagagtggttgccgccggaattaccctga

SEQ ID NO: 6243 - DNA, 390 bp, Escherichia coli
atgaacagttatcagaacatgttactcaatgatggaaatattgccgaatccgattaccttgcctgttccggtataaatgaaaatcatgatgagtatttcggtgccgttgcgccgccgattattcaaaccagtctttttgtgcagaagaattaccagcagtattgtgatgatatgcgtcacgaagcccagcgttacatatacagtcgcggcttaaatccaaccgtaagtatggttgaaaccaaacttgctttgctggaggggggggaagaggcgcggtgctttgcatcaggcatgggggcaatcagcgcagtgatggtcggtttgttaaacagcggtgaccatattttattagttaatcaaatcgtaagcgtcaacggagcaccgtattga

SEQ ID NO: 6244 - DNA, 1614 bp, Escherichia coli
atgagtcagaaatacctcattcgcatcgcagagctggaaaggttgctctctgagcaggctgaagccctccgtcagaaagaccagcaactgagtctggttgaagagacggaagccttcctgcgctctgcactgacacgtgccgaagaaaagatcgaagaagatgaacgggaaatagaacatctgcgggctcagatagaaaaactgcgccggatgctgttcggtacccgttctgaaaaactgcgtcgtgaagttgaactggctgaggctctgctgaaacaacgtgaacaggacagcgatcgttacagtgggcgggaagacgatcctcaggttccccgccagttgcgacagtcgcgccatcgtcgtccgttaccggcacaccttccccgtgaaatacaccgcctggagccagaagaaagctgttgcccggagtgtggcggtgagctggattatctgggggaagtcagcgctgaacagctggaactggtgagcagtgccctgaaagtgatccgcacagaacgggtaaaaaaagcctgtacaaaatgtgactgtattgttgaagcaccggcgccgtcccgcccgatagagcgtggtatcgcgggccccggattacttgcccgcgtgttaacgggaaaatactgcgaacatctgccactgtatcgtcagagtgaaatctttgcccgccagggtgtcgaactgagccgggccttactctccaactgggttgacgcgtgctgccagttaatgacaccggtgaatgatgccctgtaccgttatgtaatgaacacccgcaaggttcacactgatgacacaccggtaaaggtactggcaccgggtcagaaaaaggcgaaaacagggcgtatctggacgtatgtccgggatgatcgcaatgtgggttcgtcatctcctccagcggtctggttcgcgtactcgccgaaccggcaggggaaacacccggagcaacacctccgccccttccggggtatcctgcaggcggatgcgttcacaggttacgacaggttgttcagtgcagaacgtgaaggtggtgcactgacagaagttgcgtgctgggcccatgcccggcgaaaaatccacgatgtatacatcagcagcaaaagtgcgacggcagaagaagccctgaagcgaatcagtgaactgtacgccatcgaggatgaaatacggggattaccggagtcagagcgtcttgccgtcaggcagcagcgaagcaaagtgttactgacgtcgctgcatgaatggatggtggagaagaatggtacgctgtcgaaaaaatccagactgggcgaagcgttcagctatgtactgaatcagtgggatgccctctgttattacagtgatgacggtctggcggaggcggataataatgctgcggaaagagcgcttcgtgcagtctgtctcggaaagaaaaactttatgttctttggcagcgatcacggcggcgagcgtggagcactgttgtacgggctgatcggcacctgccgtctgaacggtatcgatccggaagcgtatctgcgccatatcctgagcgtactgccggaatggccttccaaccgagttgatgaactcctgccatggaacgtagtactcaccaataaataa

SEQ ID NO: 6245 - DNA, 351 bp, Escherichia coli
atgatctcactcccatcaggtacccgtatctggctcgttgccggcgttaccgatatgcgtaaatccttcaacggactgggagaacaggtacaacatgtgctgaatgataatcccttctccggtcacctgtttatcttccgtggccgacggggtgacaccgtcaaaattctttgggctgatgctgatggtctgtgcctgttcaccaaacgcctggaggaaggccagtttatctggcctgcggtacgtgacggcaaggtatccattacccgctcgcaactggcaatgctcctcgataagctggactggcgtcagccaaaaacatccagccgtaactcactgacaatgttgtaa

SEQ ID NO: 6246 - DNA, 165 bp, Escherichia coli
atggaattacaggactggcgaaaagaacctcgtaaaaactattcgaatgaattcaaacttcgtatggtggaactggcatcacaacctggagcttgtgttgcacagattgcacgtgaaaatggcgtcaatgataatgttattttcaaatggctcaggctctggtag

SEQ ID NO: 6247 - DNA, 711 bp, Escherichia coli
atgacaatgcagattgttgatttacaggcgatagctcaactggcgacccgttatgggattatcaccgcaattgataacacctggccgacaccgctatttcaaaaaccgttaagtctgggatttgatattgtcattcattcctgcacaaaatatctcgccgggcacagtgatgtgttagctggtgtggtaatcacccgccgtgaattgatgagcatcattcgtgatttctcgcatcagctattaggtgccgtgctttcgccgtttagcgcctggttactgttacgtggtatacgaacactcccgatcagaatggcaacgcatcagcataacgcgattaacgttattgaatggttagctactcgtgatgaggtggaaaatatacgtcatcctctctgcgctacagataaggaaaaagagataattcgtcgccagatgtgtggcttttcaggactgtttagtttcgaattaaaaggagccggctttgaggaagtgaaatgctttatcgatgcctgccgtattttcaaaccgggctgtagctggggcggctatgaaagcctgattatctcacctaaccgtggttataatcagtctgcactggttgatgcggagatcccgcgcggattaattcgtctctcgcttgggcaggaaaatgccgctcttttaattgccgatctggagcgtgcttttgactcgctaaggacgaaaccatga

SEQ ID NO: 6248 - DNA, 1440 bp, Escherichia coli
atgacaataaatcagccatcctttagctcggcgatgatcattctggctattatttttatattgttcctggctggcgtcgggatacttaatgcccccgtggagtttgtgttgattgtagtgacgttggttactgctttttatgccaggtattatggtgcgcgctggagagatattgttaatatatttatgagtaaaattaaagaagcagttccggcaatgcttattttactctctatcgggatgttgattggctgctggatagtttccggaacaattcctttaatggttttatatggtctggaaatggtaagccctcattatctctatttgacagccttcctggtgacagtttgtatctctctttttaccggaacatcatggggtacggcgggtactatcggcgtagcattgatggccgtggctgcggcgatggacgtttcattaccgattaccgccggggcggtgatttcgggttcctattttggtgataaattatcgcctctttccgataccaccaatatggcagcgatggctgcgggcgtcgagttatggcaaagtattcgcaatatgatgtatacctctattcctgcttttttcgtctcatgttttggcttctggtgggccggaagcggcctgaatgaaatgaatcagcaaattgagaatattgccattatgagagatgtattacagcgacttttttggttaaatccgctgtgtttgcttcccgcactactggtgttcttcggtgcgctaaaaaaatgggatactacagtagtattaattgcctcttcgttcctcgctttatttattggtgcaatatttcagccgattgcatggatggatatggttcaatccgctgtaaatggttttaaagataccatgttactacaatttgatggtattgccagcgatccgctggtggctaaaaatcttatggtgcttctcaatcgcggcggaatctattctatggtcagtccgattgtggtgatgctttgtgcatttttatttgcatcagcacttgaggcatctggcggattaaatattgtcctgcaacgtctggttaagaaattacgctctgtaaccagcgtcgttctggctacgatgttttccagtacattattagtggcctgtactggaaatgccgtcattagcttttttctggtcaaaagcatgtatgatccgtgctatgacgaacatcaattgcataaagtgaatatgtcgcgggccatggagtctggagccactttgctggaaggactttttccctggactatttccgggatgtttatggcgaaaacgcttggtgttgcaacacttgattacctgccgtggacgttttttaatttgagttgctttgcgatcgctcttttatttgcttttctggcaaaatggagccgttttggcactcgctatgccgcgcccgaagtagctcgtagataa

SEQ ID NO: 6249 - DNA, 645 bp, Escherichia coli
atgagtaaacccgctatcacgctttggtcagatgcccattttttctccccttatgtgttatccgcctgggtggcgttgcaggagaaaggcctgtcgtttcatatcaagaccatcgacctcgacagcggtgaacatttgcaaccgacgtggcaaggttacggtcagacacgccgtgtgccgttattacaaatcgatgattttgagttgagtgaatcttctgccattgcggagtatctggaagatcgatttgcgccaccgacctgggaacgtatttatccgcttgatttagaaaatcgtgcgcgtgcacgacagattcaggcctggttgcgcagcgatctgatgcccatccgcgaagagcgtccgacggatgttgtctttgcgggggcgaaaaaagcgccactaacggccgagggaaaagccagtgcagagaaactgttcgcgatggcagaacatttgttagtactgggtcagccgaatttatttggtgaatggtgcattgctgatactgatctggcgctaatgattaaccgcctggtactacatggcgatgaggtgccggaacgcctggtggattatgcgacattccagtggcagcgagcgtctgtccagcgttttattgctctttcggcgaagcaatctggctga

SEQ ID NO: 6250 - DNA, 1842 bp, Escherichia coli
atgaacatgcttgccttaaccattattttgccattgattggcttcgtcctgctggcgttctcccgtgggcgctggtctgaaaacgtctcggcgatcgtgggcgttggctctgtaggcctggcggcgctggtaactgcctttattggcgtcgacttcttcgctaacggcgagcaggcatacagccagccgctgtggacgtggatgtcggtaggcgactttaacatcggttttaacctggtgctggacggcctgtcgctgactatgctctcggtggtcacaggtgtgggtttcctgatccacatgtacgcctcctggtacatgcgcggtgaagagggctactctcgcttcttcgcctacactaacctgttcatcgccagcatggtggttctggtgcttgccgacaacctgctgctgatgtacctcggctgggaaggcgtgggcctgtgctcctatctgctgatcggtttctattacaccgatccgaagaatggcgcagcggcaatgaaagcgttcgtcgtgacccgtgtgggtgacgtgttcctcgctttcgcgctgttcattctctacaacgaactgggcaccctgaacttccgcgaaatggtggaactggcaccagcgcactttgctgatggcaataacatgctgatgtgggcgacgctgatgctgctgggcggtgcggtcggtaaatctgcgcagttgccgttgcagacatggcttgccgacgcgatggcgggcccgacgcctgtctccgcgctgatccacgccgcaacgatggtaaccgcgggtgtctacctgatcgcccgtacccacggcctgttcctgatgacgccggaagttctgcatctggtgggcattgttggggcggttacgctgctgctggccggttttgccgcgctggtacagaccgatatcaaacgtgttctcgcttactctaccatgagccagattggctacatgttcctcgcgcttggcgtgcaggcatgggatgcggcgattttccacttgatgactcacgcgttctttaaagcgctgctgttcctggcatccggttccgtcattctggcctgccatcacgaacagaacatcttcaagatgggcggtctgcgtaaatctattccgctggtttatctctgcttcctggtgggcggcgcagcactgtcggcactgccgctggtcactgcgggcttcttcagtaaggacgagatcctcgcgggtgcgatggcgaatggtcatatcaatctgatggtggctggtctggtcggtgcgtttatgacctcgctctacaccttccgtatgattttcatcgtcttccacggaaaagaacaaattcacgctcacgccgtgaaaggggtaactcacagcctgccgctgattgtgctgctgatcctttccaccttcgttggcgcactgattgtaccgccgctgcagggcgtgcttccgcaaacgacggagctggcgcacggcagcatgttgaccctggaaattacctctggcgtggtcgcggtggtcggcattctgctggctgcctggctgtggctgggtaaacgtactctggtgacctccatcgccaacagtgcgccgggccgtctgctgggcacctggtggtacaacgcctggggctttgactggctgtacgacaaagtgttcgtcaagccgttcctgggtattgcctggttgctgaaacgcgatccgctgaactcaatgatgaacatcccggctgtcctttcccgctttgcaggtaaaggtctgctgttaagcgagaacggttatctgcgctggtatgtggcatccatgagcatcggtgcggtcgtggtgctggcactgttgatggtactgcgttga

SEQ ID NO: 6251 - DNA, 1212 bp, Escherichia coli
atggttacagttgtcagcaattattgtcaattatctcaaacccaactcagtcagacatttgcagaaaaatttactgtgaccgatgaattactgcagtctttaaaaaaaacagcgttatccggagatgaagaaagtattgagttactgcataacattgcgttaggttatgatgaatttgggaaaaaagctgaagatattctttaccatattgttagaaacccaacaaatgagaccctatcgattatccgacttattaaaaatgcctgtttaaaattatataatttggcacataccgcaaccaaacaccccctcaaatcacatgattcagatgatctcctgttcaaaaaactattctccccttcgaaattaatgacaattatcggtgaggacattcctcttatatcagaaaaacagtcgctttcaaaggtacttttaaatgataagaataatgaactgagcgatgggacaaacttctgggataaaaatcgtcaattaaccacggatgaaatagattgctatcttcagaagatcgccgctaatgcaaaaaatactcaagtcaattatcctactgatttctacctccccgattccaacagcacttacctggaaatcgctctcaatgataatattaagagcgatccatcatggccgaaagaagtccagttattccccataaatactggcggacactggatattagtttcgctacaaaaaatagttaatgaaaaaaataacacacaacaaataaaatgcgtcatattcaactcattacgtgcactaggccatgaaaaagaaaattcacttaagcgcatcattaatagttttaattctgaactcatgggagaaatgccgaataatgataatataacagatcatttagctgaaccagaaataatatttttacataccgatcttcagcaatacttaagccaaagttgcggtgcatttgtgtgcatggcagccaaagaagtaattgaacaaagggaaagcaattctgacagcgctccctatacgttattaaaaaactatgctgacagatttaaaaaatattcagcagaagagcagtacgaaattgattttcaacatcgactgataaacagaaattgttatttagataaatatggcgatgcaaatatcaatgattattatagagacttagaaataaaacactcacaaccccaaaatagagcatcaggcaaaagagtaagttaa

SEQ ID NO: 6252 - DNA, 186 bp, Escherichia coli
atgactattgctgaacggctacggcaggaaggacatcaaattggctggcaggagggtaaattagaaggcatgcatgaacaagccattaaaattgccttgtgcatgctggaacagggcattgagcgtgaccaggtgctcgcggccactcagctaagcgaagccgatctggcagcgaataaccactaa

SEQ ID NO: 6253 - DNA, 900 bp, Escherichia coli
atgactcttacccaaataaattctttactcgccgtgctggattacggtggctttactgaagccagcaagcgattgttcatgacgcagtcggcggtaagtcaggcaattgctgccctcgaacaagaacttggcgtgaatatactgttacgcgatcgccgtaaagctatacaactgacctctgcaggtcaccgcattatgcatcatctgcgcgccattaatcgggaagtgaacgcagtaaaagagatagccgagcaggaaaagcagaaccctcaaagaacgctgagacttggttgtttccccagcgtctgcgcctgtatcttaccggctgtgattcgctactttgaaattcatcatccgaatataaaaattattccttttgaggaaaatagcacagcgattattgattcccttcagaatgaatccattgatgccggttttgttcattttccggtgagcggaatgtactccgtgcccatttatcaggataaattcaccgtagtgttaccgcccaaccatgctctggcaaaaaacagcactattacagtggaagagttaatgggtgaaccattaattattagtaaaggacgctatgaattaagcattatggcactatttaaagaaaagaatattaccccacagataaaatatgaatttaatcacccggatacagcgatcagttttattcgacagggattaggcatcgccttattaccagagttaacgctgaaaaccattgcagatgaattgtgttccgttcctctcgaaccaaccttctatcgacagatttcgttgttggctaaagaaaagccggtagaaggcagtccactgtttttactacaaatgtgcacagaacaattagtggagagtggaaaatttgatatgagacaggatggcgcatga

SEQ ID NO: 6254 - DNA, 1191 bp, Escherichia coli
atgaaagagaagttatggacgaaggatttttgggcaataaccatcatcagctttattattttcttcgtcttttatgttttactaacattgttgccaatttatatctcagaccgcttgcatgcctctcctgataaagcaggtttgttggtgactttatttttaattgccgccattgttattcgcccctttgccgggcaatgggtgggcaaatactcgaataaaactattctggggctctcttctctggccttcttggtggtcactgcgctgtatcctttttgccactcaattgaatcactgctttttattcgggtgcttcatggtattaccttcggggttatcactacggtaaaaggaacgatttccgcgcggctgatcccggcctcccgacgtggggagggcatcagttttttctctctggcaatggggctggcaatggtggtcgggccgtggattggcctgaatatggcgcgctgggaggcctttaatatggctttctggttatgcaccggcgtggcagcggtggggattattctgtcgctgattatgacagtgccgccggttatcagccatgctgatggttcaacgccgaaaatgggcttcgccgccatgttcgatcgcgcggcgttgccatttgcgatggtcaccttttttatgaccttttcgtatgccggggtttctgcttttctggcgctttatgcacgcgaacttaacctgatgtcggcagccagtaatttcctgctttgctacgctatcttcctgatgatctgccgtacctttaccggcaatgtctgcgacaaaaaaggaccgaaatatgtggtttacccttgccttgtgttctttacggtaggactggtggttctcggctacacccagggaagcataatgatggttgtttctggcgcattgattggtatcgggtatggttccgtgacgccagtttttcagacgcagattatcagttcagtggaaccgcataaaatcggtgtcgcaaactccctcttcttcaatgcgatggatgcaggcctggcgctgggagcctgtgtgatggggatgatggttgcacatactggctaccgaatgatttatctgctgggtgcactattagtggtagtggctggtggagtctatgcgctgcaaatgaagggcaaaagcggtgtcgcgctagtagtggcaaaagaaattcattaa

SEQ ID NO: 6255 - DNA, 1017 bp, Escherichia coli
atgattgcatctcttttctctgttaacagtgtcgcggaggttttggattcatgccagggatatgatatcaaagcgagttgtcaggccagcaggcaaagcctttcaggcattacgcaggactggagcatcgccgatgggcaatgggtgattttttcgggtatggccaataatgccagcggtggcgccgtatttttgcagcaaagtgctgaatttacgatatcaccacaaaatgaaacagggatgaccctgtttgctaataactcgattagtggcgaatataataatggcggagctatctttgctaaagaaaactcaacgataaatcttgcgaatgttattttcgacagtaacgttgcaggaggctatggcggagcaatctattctgcgggaacaaacgatgccggtgatatggatttaaatatcactaatgcaatatttgcgaataatatcgccaatgatggtaaaggtggcgctatttattctatcaataatgatatttatttaagtgatgtcatttttgataataatcaggcatatacatcaaccagctatagtgatggggacggcggtgccattgatgttacggataatagtacggataacacacatctttcaggaaaaacgataattaataatacctcctttaccaataactatgcagaaggttatggcggagcaatttataccagcagcaccacatccccgtatcttattgatatttctgttgatgataattatgaccaaaacaatggtgtgatgattgatgaaaataacagcgcctcgggatatgaccattcggcgacggcagcggcggggggctttatgtatatcggtcatagtgtggctgaatttaatattgccgccgataaaacgctggtaataggcaataccagcaacgatggcgcgattgattctcttgccggaacgggagtcatcgtgaaagagggagcgggagagttagtcctcaatgccgacaataatgcgtttaccggcgagatgagtatccagaatggctag

SEQ ID NO: 6256 - DNA, 2388 bp, Escherichia coli
atggcattaaccggcgatattgtggtggaagataacgccgtattgtcgctagcggggaatcaggccgatttacgggcaatgcagagcgatccgcaatcgatcgtgctaaatagcggagtattggatctctctgatttcaccacctgggatggcgatagctcatacaatgacggtctgcaaatcagcggcagcggggggacagtgattggtagtaatgatgtcgttgatatcagcagtggcgatgatttacatattggcggcagtgatgccagccagaatggcgtttatgtcgtcattaatgcgggggatcagcgcgtaacgctggcgaataacaacggttatctcggtaatacgcaaatcgcctccggtacgcttgaagtcagcgataattcgcaattgggggacacaagttacaaccgttcagtgatcttcacagatccccaacaacacagtgaaatggatgtgacgactgatgttgacactcgctcggctacaacaggtcagggcaggaatattgaaatgcgcgctgatggcgaaatacacgttgaggatggtgtagatacgcaatggggcgggttgatggcggatagtaccgggcaacaactggatagcgtaagcacgttgactaaaagtggcggcgggacgcttgagttgaccgccagcggcactgcgacgtctgcggtacgtgtggaggacggaacgctaaaaggtgaagcggagaatattattccttatgtttcttcactgtgggtgggggaagacggtgtttttgaaaccgggcaaaatcaggatattcgttcaatcgatgccacctctggcggcgatatcgacataaccgatggtactgtgttgcgattgacgcagcaggatacgaaccaggcgctggatgcctcgctgtttagcggcgacggtacgttggtgaatgccaccgatggtgtgacgctgacaggcgagcttaataccaaccttgaaactgacagcctgacttatctttcagacgtgacggtcaatggtgatctaactaatacttccggtgctgtcagtctgcaaaatggcgtcgctggcgacacgctcacggtaaacggtgattacaccggtggcggtacgttgtttctcgacagcgaattaaacggcgatgactcggcaagcgaccaactggtgttgaacggtaatactgctggcaacacgaccgtggtaattaatcccattacgggtattggtgagccgacatctacaggcattaaagtggttgatttcgcagccgatccaacgcaatttcaaaacaatgcgcagttcagtctggcgggcagcggctacgtcaatatgggggcgtatgactatacgctggtggaagataacaacgactggtatctgcgatcgcaagaagtcaatccgacgctgccgcccgatccggacccgactccagatcctgatcccacgccggatcccgacccaacccccgacccggaacctacgcctgcctaccagccggtgttgaatgccaaagttggtggatattttaataacctgcgggcggcaaatcaggcatttgtgatggagcgacgcgatcacgctggtggcgatggtcagacgctgaatttacgcgttatcggcgggcgttatcattacacggcggtagggcagttggctcagcatgaagacacttctacggtgcagcttagcggcaacctgtttagcgggcactggggtgatgatggcgagtggatgcttgggattgttggtggctacagcgataaccagggcgacagccgctcgaatatgaccggaactcgcgccgataaccagaaccacggttatgccgttgggctgacctcaagctggtatcagcacggtaatcagaagcagggggcctggttggatagctggctgcaatatgtgtggtttaacaatgatgtttccgaacaagacgatggcgtggatcattaccactcgtcggggattatcgcctcgctggaagccggttatcagtggttaccggggcatggtgtggtgattgaaccgcagacgcaggtgatttatcagggcgtgcagcaggatgattttaccgccgctaaccatgcgcgcgtgtcacaatcgcagggtgatgatattcaaacgcggctgggtttacacagcgaatggcgtactgctgttggtgtcacgccaacgttagatctgaattattatcacgatccccattcgacgggaattgaagaagatggcagcactatcagtgacgatgcggcgaagcaacggggtgaaataaaagtgggaataacgggcaatatcagtcagcgagtttcgctgcgtggtagcgtggcgtggcagaaagggagtgatgattttgcccagacggcagggtttttgtcgatgacagtgaaatggtaa

SEQ ID NO: 6257 - DNA, 699 bp, Escherichia coli
atgagagataaagcgaaacgtgacttaagtcacatatcaattgagataccaaaatccgtaacccaggtcatcaaagaaaaaatcagggatatgataattcatggcgatctcagtcttgggcaaccgataagtgaaaatgaactttcgaatattctggcggtaagtaaaacacctattcgtgaagcttttattttacttagtcacaatgaaaatctgatcaatatcattccacgcagcggaacattcgttttttccgtaacagataaagatattaatgacctcataaaaatgcgagtaattctggagcagggtgcaattagtgaaacaatggaaaagaatgcaaacaatgtcatcattgaactaaatagtatactatcaaaatcagcaaaaattaatgccgagcgcgatactcaggcttatcttaaactggatcatgattttcattatgtgtttgttaaatacgctgataataaatacatctctcaggcacaccaattgatatccgcacgtttacttgctatccgttatcgactggatttcactacggaatatatcaccaattcaaatcgtggccatgcgactattttagatatgctaaaaaataataacgttgaaggtgtttgtaattttattactcatcacgtaagtagtggatttaccgagcgcgcacgaaaaattctctcgttatctacacagtaa

SEQ ID NO: 6258 - DNA, 132 bp, Escherichia coli
atgagcagtcctcagaaagatttgtatgatgccatttctattgtgaaaaggaagattattccgttagcatttattctgtattttttaactatatggatcgtgttaatattgggtttgccgctttacgcatga

SEQ ID NO: 6259 - DNA, 1236 bp, Escherichia coli
atggatcgtgttaatattgggtttgccgctttacgcatgaatgaatcccttggtattactccagaggattttgctaatatatcttcaatattttttgtgtcctatttgatttttcaaattccgagcagtattggattgcaaaagttaggtgcaagaaaatggattagcgccattattgttggttggggaacagtaacaacgttaattttctttgccaaagacacccagcatatattgctcgctcgggtctttttgggaatatttgaagcggggtttttccctggcatggtttactacctggcatgttggttcccggcgcgcgaacgtggaaaagtgaatagcttttttatgttatcaatcgcagttgcatctgtgctggcggcaccaatgtctggttggattattgaacatatgaataccggtaactatgaaggatggcgctggctttttgctattgaaggcattcctacggtgttattgggggcgctgaccttttatttactgccagatcgtccggaaaaagcccgctggcttacaccatcgcaagtcaccgcattggtcgataaacttaattctgataacgaaaaagccgcagcattaaataaaaatacaaatgcatcttttctgtcaatcattaaaaatccagtattactacaactctcatttgcttatatgtttattcaggcagcggcgttggcggcaaattactggttaccggggttggttaaaggattttcatcggatttcacagataccgatgtcggtttgattatgagtattccgtttattttcgcgatgttcagtatgccattatggggatggcattccgataaaaagaatgaaaggaaatggcatgccgcactaccgatgttggttgcaggttgcggttttttaatgatcgcacttgtaccttcgatgacgctgcgcatgatgggattaacattatacggtgtaggcattctcagttattacggtccgtactgggctttaccctcagctttactttcaccatcaggcctggcaatcagtattgcgtttattaactcttgttcaagtttgggtggttttctgatcaataaatcacttggctatgtttctacacattatggagccacggggatatttattgttgaggcgattctttgctttatcgccgtagctattttgttatcaatgaaaattgataataaaaaagataacgcccagaaagacaatgttatttcacatgctaaataa

SEQ ID NO: 6260 - DNA, 1203 bp, Escherichia coli
atgaagattacatctgtagaaatttttgactgcgaactcaaaaaaagagatcaaactatggcctcttataatccagtacttattcgggttaataccgatgctggaataagtggtgttggcgaagtaggattagcctatggtgcaggtgcaaaatctggtgttggtattatcagagatttagcccctctcatcattggtgaagatccgttgaacattgagaagatttgggaattcctcttcaggaaaacattttggggaatgggcggtggtaatgttttttacgcaggtatgagcgctattgatattgccttatgggatattaaaggtaaatatttaaacgtgccggtttatcaactactggggggaaagactaacgataaattgagaacttacgccagtcagttacaatttggttggggcgaaaaaaggcaaatattagtaacgcctgaagagtatgcagaggcagcgcgtgccgctattgcagaaggttataatgcgataaaagttgatccgcttgaaatcgatctgcatggcggcgattgtgtctttcagaacaaaaatagaaattactctggcttattactggccgaacaattaaaaatgggcgaggcaagaattgccgctatgcgtgaagcaatgggcgacgatgctgatattattgtagagattcattctcttctaggaacaaattcagcgatccagtttgccaaagcaatagagaaatatcgtatttttctctatgaggagccaattcatccattaaattcggataatatgcagaaagttgcccgttcaacatcgattccgatagcaacaggtgagcgttcttatactcgctggggatatcgtgatttactggaaaaacaatcaattgcggtagctcaacctgatttgtgtctttgtggtggcattacagagggaaagaaaatttgtgattatgccaatatatatgacacaaccgttcaggtacatgtttgtggcgggcctgtttcaacagtagcggcgctgcatatggaaactgcaatacctaactttattattcatgaacatcataccaatgcgatgaaagcatgtattcgggaactttgtacttacgattatcaacccgagaatggctattatgtcgcgccagagttgcctgggcttggtcaggaattaaacgatgaaatcgtacaacaatatcttgcctatgtgatcaaataa

SEQ ID NO: 6261 - DNA, 132 bp, Escherichia coli
atgaggcacgggctgctggcgctgatttgctggctgtgttgtgttgttgcccatagcgaaatgttgaatgtcgaacaatccgggctgtttcgcgcctggtttgtacgcattgcacaagaacagctccgctag

SEQ ID NO: 6262 - DNA, 4395 bp, Escherichia coli
gtgcgactggaagcgccggggcgtgattatcgacgctatcagatggaagagtacggtggcgtggacgttcgcctgtatcgtattcctgacccgatggcatttttgcgccagcagaaaaacctgcatcgcattgtggtgcaaccgaaatatctgggcgacgggctaaacaatacgctgacctggctgtgggataactggtatggcaaatctcgccgtgtaatgcagcgtactttctcttctcagtcacggcagaatgtgactcaggcgttacccgaattacagctcggtaatgccattgttaaaccttcccgttatgtacagaacagccagttttcaccgctgaaaaaatatccactggtggaacaattccgttatccactatggcaggctaaaccggtcgagccgcagcaaggggtaaaactggaaggcgcatccaacaatttcatctcgccgcagccgggtaacatttatattcctctcggcaaacaagagccgggattgtacctcgtcgaggcgatgataggtgggtatcgggcgacgacggtggtatttgtctccgataccgtggcgcttagcaaagtgtcaggcaacgaacttctggtgtggaccgcgggcaaaaaacagggtgaagcgaagccaggctcagagatcctgtggactgacggtcttggcgtgatgacacgcggggtgaccgatgacagcggtaccttgcagttacaacatatatcgccggaacgctcatacattctgggtaaagatgcggaaggcggcgtttttgtctccgagaacttcttctacgaaagtgaaatctacaacacccgcttgtatatctttaccgatcgcccgctatatcgcgcaggcgatcgtgtcgatgttaaagtgatgggccgcgagttccacgatccgttgcattcatcccccatcgtcagcgccccggcgaagctttcggtgctggacgctaacggcagtctgttgcaaaccatcaatgtcacgctggatgcgcgcaatggcgggcaggggagtttccgcctgccagaaaatgccgttgccggaggttatgagttgcgtcttgcttaccgcaatcaggtctatagcagtagttttcgcgtggcaaactacatcaagccacatttcgagattggcttagctctcgacaaaaaagagttcaaaactggcgaagcggtcagcggcaaactgcaactgctctacccggatggtgagccggtaaaagatgcccgtgtgcagttaagtttgcgcgctcagcaattatcaatggtcggtaacgatttgcgttatgccggacgttttcccgtgtcgctggaaggcagtgaaacggtatccgacgatagcggtcatgtggcgttaaatctccccgccgctgataaaccaagccgctatttgttaaccgtctccgccagtgacggtgcggcgtatcgtgtcaccaccaccaaagagatcctcattgaacgtggactggcacattactcattaagtactgccgcacaatacagtaatagcggtgaatcggttgtgttccgttatgccgcgctggaatcttcaaaacaggttcctgttacgtatgaatggttgcgtctcgaagaccgcacgagccatagcggagagctaccgtcaggcggcaaatcctttaccgtcaatttcgctaaacctggcaactacaatctgacattacgcgataaagacggcttaattctcgctgggttaagtcatgccgtcagcggtaagggcagcacggcgcatactggtacggtagatatcgtggcggataaaacgctgtaccagccaggcgaaactgcgaagatgctgattacctttccggagccaattgatgaagcattattgacgctggaacgcgatcgcgtggaacagcagtcgctgctttcgcatccggcaaactggctgacgttacaacgtttaaacgatacccagtatgaagcccgggttccagtgagcaattcctttgcgcctaacatcactttttcggtgctgtatacccgtaacggtcagtacagttttcagaacgccgggatcaaagttgccgttcctcagctggatatccgggtcaaaacggacaaaacccattaccagcctggtgaactggtcaatgtcgaattaacctcgttgctgaaaggtaaacctgtttctgcgcagctaacggttggcgtggtcgatgaaatgatctacgcgctgcaaccggaaatcgcgccgaatatcggcaaatttttctatccgctggggcgtaataatgtgcgcaccagttccagcctgtcatttatcagctacgaccaggcgctctccagcgagccggttgcgcctggcgcaactaaccgcagcgagcggcgagtaaaaatgcttgaacgtccacggcgtgaagaggtggataccgcggcatggatgccgtcactcacaaccgataaacaaggcaaagcgtatttcacgttcctgatgcctgattcgttaacccgctggcgtatcaccgcgcgtgggatgaacggcgacgggctggtcgggcaggggcgtgcttatctgcgttcggaaaaaaatctctacatgaagtggagtatgccaacggtgtatcgcgtgggcgacaaaccggcggcaggactgtttatcttcagtcagcaggataacgaaccggtggcgctggtgactaaatttgcaggcgctgagatgcgccagacgctgacgctgcacaaaggggcgaattatatttcgctgacgcagaatattcagcaatctggcttgttaagtgcagaactgcaacaaaatgggcaagtgcaggacagcattagcacaaaactgtcttttgtggacaacagctggcccgttgaacagcagaaaaatgtcatgctcggcggtggcgagaacgcgctgatgttgcccgagcaggcgagcaatatccggcttcaaagtagtgaaacgccgcaggagattttccgcaacaatcttgatgcgttagtcgatgaaccgtggggtggggtgatcaacaccggtagccgtctgatcccgctcagtctcgcctggcgttcgcttgccgatcatcaaagtgccgccgctaacgacattcgtcagatgattcaggataaccgtctgcggctgatgcaactggcggggcccggagcgcgctttacttggtggggtgaagatggcaatggtgacgccttccttacggcatgggcatggtacgccgactggcaggccagccaggcgctcggcgtaacgcaacaaccggaatactggcagcatatgctcgacagttatgccgagcaggcagataacatgccgttattgcatcgggcgctggtgctggcgtgggcgcaggagatgaatctgccgtgcaaaacgttgttgaaagggttggatgaagctatcgcccggcgcggaactaaaactgaagatttctctgaggaagacacccgcgatatcaatgacagcctgatcctcgatacaccggaatctccactggcagatgcggtggcaaacgtcttaaccatgacgttgctgaaaaaagcgcagttgaagtccactgtgatgccacaggttcagcaatatgcgtgggataaagcggcaaacagcaatcagccgctggcgcacacggttgtgctgctcaatagcgggggcgacgctacccaggcggctgctattttaagtggtttgaccgatgagcaatctactattgagcgcgcgctggccatgaactggctggcgaaatatatggcgacaatgcctccagttgtgttgcctgcgcctgcgggcgcatgggccaaacataagttaactggagggggcgaatactggcgttgggttggtcagggcgtgccggacattctctcttttggtgacgaattatcgccgcaaaatgtgcaggtccgctggcgtgaaccggcaaaaacggctcaacaaagtaacattccggtgaccgttgaacgccagttgtatcggcttatccccggtgaagaagagatgagctttactctgcagccggtgaccagcaatgagattgacagcgatgcgctgtatctcgatgaaattacgcttaccagcgagcaggatgccgttctgcgctacggtcaggtggaagtaccgctcccgccaggggctgacgttgagaggactacgtggggcatttcggtcaataaaccgaacgctggaaaacagcaggggcagttgctggaaaaagcacgaaatgaaatgggcgaactggcctatatggtgccggtgaaagaactgacgggaacggccactttccgccatttgctgcgcttctcgcaaaaagggcaattcgttctgcctcctgctcgttatgtgcgttcctatgcacctgcacagcaaagtgttgcggcagggagcgaatggaccgggatgcaggtgaaataa

SEQ ID NO: 6263 - DNA, 1314 bp, Escherichia coli
gtgaactggcgcagaatcgtctggctattagcgttggttactctgccaacgcttgcggaggagacgccgttacaactggcgctgcggggcgcgcagcacgatcaactgtatcagctgtcgtcatcaggcgtgaccaaagtctcagcattacctgacacgctcaccacgccgttagggagtttatggaaactgtatgtttacgcctggctggaggatacccatcaaccggagcagccctaccagtgtcgcggaaactccccggaagaggtttattgttgtcaggcaggggagagcataacgcgcgataccgcgctggtacgttcctgtgggctctattttgcgccgcagcggttgcatattggcgcagatgtgtgggggcaatactggcaacagcgtcaggcacctgcgtggttagcgtctcttactacgctgaagccagaaacctcggtaacggttaaatcactgcttgattcattagcgacgttacccgcgcaaaacaaagctcaggaagtcttactggatgtggtgctggacgaggcgaaaatcggtgtcgcatctatgctcggtagtcgggtacgggtgaaaacctggagctggtttgccgatgataaacaggaaatccgtcagggtggttttgctggctggttaaccgatggtacaccgctgtgggtgactggcagtggcaccagcaaaacggtactgacccgttatgcgacggtgcttaatcgggttttgccagtgccgacgcaggttgccagtgggcaatgtgtagaggtggagctgtttgcccgctatccgctgaagaaaatcgcagcggaaaagagtacgacggcagtaaaacccggcgtacttaatgggcgctatcgtgtgacgttcgccaatggtaaccacattacgtttgtcagccacggtgagacgaccttactgagcgaaaagggcaaactgaaattgcagtcgcatctcgatcgtgaagagtatgttgccagagttctggatcgcgaggcgaaaagtacgccccctgaggcagcgaaagccatgaccgtggcgatacgcacttttttacagcaaaacgccaatcgggaaggcgattgcctgaccatccctgacagcagcgccacacagcgtgtttcggcttcgccagctaccacgggggcgcgaacgatgaccgcctggacgcaggatcttatctatgcgggcgatccggttcattatcacggcagtcgcgctaccgaagggacgctttcctggcggcaagccacggcccaggcgagacgggctacaacgaaccagacgtgtttgcggtctgtcgtttag

SEQ ID NO: 6264 - DNA, 183 bp, Escherichia coli
atgacagaagccgaaatactgggattaatccgccgtgatggtatccagcttaatggcgtggatatgcgcaacatacgaaccagagttcttgagttgctggcctaccgtcgccgcgttgagatgtatcgggagaaggagaaaataacgtaccactggaagaagccggagcggttgcggcggtaa

SEQ ID NO: 6265 - DNA, 543 bp, Escherichia coli
atgaaatcgcacctgatgaacaaaaaaaacatggcgaaaagctgccgtgtaagtgcgacagcgttcgacaagtggggagtgactcccgttgaacgtaaaggccgtgaggcgttttacgatgttgccagcgtgatagacaatagggttaacaatgcaattagccagcttacaaacgacaaaggcgatattgatgatgatgaactcttacgagtcaggatcagattactgacagcacaggcggaggcgcaggaacttaaaaacgagcgcgatcgcggtgacgtgattgatactgagttttgcctgtacgcgctttcaaagctggcgagtcagatttcatcaatcatggacagcctcccgcttactatgcaaaggagcttcccacagattacccccgccatgctggataggcttaaaagggaagtggttaaagcctgtaatgccagtgccagagttgccgacaacctcccacagatactggctgattacttgaaagaaacaaccggaaacgtaccggaaaagttgctacagaagaaaggcgagtaa

SEQ ID NO: 6266 - DNA, 414 bp, Escherichia coli
atggcaacgaatgaaagcatcatgacgctaccgctggcgagtaaatttaaagccgaagcgcgggcaatggctgacagaggtttatcaacctatgaggccgtatatcaactaaacaaactggaagagcaggacaagccgcgcgctgatgcgattatggcgcttgatgaatctggcgactatcagccgctgttacgtgcaatggcaaacgtgccttgtatcgatgttggtacggctaaaagcatccttagcatgaccatagagcaggaacgtccgaaggttgcgccggaacttactgcagcctttgaaaactttatggacatgcacagcccgcaagccgtatcagctggcatggcatacgatggcagaaaccagggtgatgacggcgacatcgatcgcatactgaaaaccatctga

SEQ ID NO: 6267 - DNA, 336 bp, Escherichia coli
atggacactccatacattgagttatttgcaggcagtcagcaggtcgccacgacgctggtacattttgccgctgatgctggcgttattcaggaatttaccccgctgatgctggcggacaatggcgagtttaagccgtgggatggtaaggaatctggcaaggctgtttatctgacctcgtcccctgtggacacgtcaaagcagaaatcagcacagtgttacaagacggggatattcaatattgccgccgttaactggcctgagagcgtcgacaccgatgcgaaaaaatgcgccgcctttgcgggttctggcgtatccgttcagccgctggcccgataa

SEQ ID NO: 6268 - DNA, 1056 bp, Escherichia coli
atgacaggcaaagcaacggcacttaacactaaccagcttttcatgtacctgaatcgcggggatattgcggattttaaattcaaccctctgtttactacgctgtttttcccgaacgtggcgacattcagcacgcaaaacatcatgctggataccctggacattgaagaagtcaccatgtcggcgttttgttcgcctatggttggcagccaggtacagcgcgataaagggtacgaaaccagcacaattaaacctggctacatgaagccaaagcacgaaatcgatccaacaaaaaccatcatgcgcatggctggagaagatccggcacagcttaacgaccctacctaccgccgtatgcgcctgattactggcaacatgcgccgccaggtaaacgccattaaagcgcgcgtggaatggctggcggtgaatgcgataacgaccggaaaaaacatcattgagggcgaaggcatagaacgctatgaaatcgactggaaaataccggaaaactgcatcatagagcaggccaagggtaaaaaatggtccgagcaggataaagacatgcacgacccaatctatgacatcgagctttatgctgatcaggctggttgccccgcaaacgtcatgattatgggcgctgaggtatggcgcacgttacgcagctttaaaaaattccgtgagctgtacgatctttcccgtggttcagagtccgccgccgaactggcctgtaaaaacctgggcgaagtggtgagctttaaaggctatctgggcgatattgcccttatcgtctattccggcaaatacactgacagcgacggcacagaaaaatatttccttgagcctgatttgctggttctgggcaacaccaacaataaagggctggtggcctatggtgcgattatggatcaggacgcagtaagaacgggcgcaacgcaaaacatgttttacccgaaaaactggattggggacggcgatccggcgattgagtacgtgcagacgcacagcgcaccgcagccggttccggcagatattcgtaaatttgttaccgtcaaaattggttaa

SEQ ID NO: 6269 - DNA, 207 bp, Escherichia coli
atggctgaagagaaaaaaggcggtgtttcggtgtacataagccccgacatcgtgaaggcgctcaaggaacgccaccagcagaacgtaaaagcaggcattgcggcaggacttgatccgctggcgatggttgagccgtcaacaggctggcaggtacgcgcctatttacgcgcggcgctgggtatgaatcaggttcacgggggtgaataa

SEQ ID NO: 6270 - DNA, 273 bp, Escherichia coli
atggtacatgaccgcatagcggaggaactcgaggcaaaaggcttttaccggagggcatcggcgcgatggggtgaagtcatgctgctggtggagacagacaaggaacggcatcaggttacgatgcgacggctggaatgttccaggaaggcacagaagccaccggagccgccggataacttcggagacctgagaaaggcagtagatcgcacttatgctgaaatgggtatagatggtgtaagcgatgaaatatggcgtaattacccagacagctaa

SEQ ID NO: 6271 - DNA, 411 bp, Escherichia coli
atgacagcacagatagcagcttacgggcggctggtggacgacccgcaggtaaaacagaccagcaagggcacaccaatgacgctggcacgtatggcggtatcgttgccatgtagtcaggcgcaggatgggcaggctacgttatggctatcggtcatcgcatttggtaagcaggccgacttcctggctaaacatcaaaaaggcgacgttgccagcgtatccggcacgatgcaggtcagccagtggaccggacagaacggggaaacgcggcagggttatcaggttattgcagacagcgtaatcagtgcccgtgcggcacgtcctggcgggaacagacgcaaaaccacaggcacacagggtaatcagccaccagcgggagacgatgacccctacggtgatgatattccgttctga

SEQ ID NO: 6272 - DNA, 252 bp, Escherichia coli
atgactcaaaaacacagagacagaacagagccaaaatataaagcgttagacatgacagagcacgccttaaaggtggcaatcagaacgatagaccgccacgcgggggaaggatacgcgaaagcacatcccgaactgataagcgcattcatgaccacgacggcggcaaattttgccacgctgacagagcgggagattgcggaagctgaacaggtgacaaccatcaacgttaaaaccggagaggtggaatcatga

SEQ ID NO: 6273 - DNA, 1410 bp, Escherichia coli
atgaaactggcaccgaacgtaaaacgattaccgaaagataaatacaccgatgcgattatttttgcgggtattgatgctcattcattcgcagagcattacatcattgcacaggcaaaaaaagcaggagatccagtccctcccgtttatctggggcgttatcagttaagcgaactggataacctccagattgttgatgatgggcgatacagggcgacggtgatacgcgccggaaatattgaagagccgcagctgttaaccatcgccacgaaactggcgatcgccggagtccaggaggcgcggctactttctgaaaatttcgaattgctggaggaatggagcgaccagcttccacggcttagggaggcatgggaacgcggggaaagcctggtcatgaaaaaaatcccccagcgaaaaaccacgctaccgatgagcgttggatctaccggatacgacacacagcttgattacgtggtaaaggggattattccggcatcgtcgctttgcagcatatacggggcgagcggttcctataaatcattccttgccggatcgtgggcgtgtcacgtttccacgggccgccagtggggaggccgcagggtggcgcatggcgctgttctctatgtggttggtgaaggcggtatcggcgttccgcgtcgtgtaaaagcctgggaggttgtgcacggtgagcaggtgaaaaatctgtatctggtaaaccgtcccatctttccggcggtcccgcttgatgttgatgaaatggttatcgctgcccgtcaggtggagagggaaacgggtaaacctgttcgcatgattattctggatacgctggcgcgttgctttggtggtaatgatgaaaatgattcccgtgatatgggggcgtttatccgtggttgtgacgaactgaaacgacgcacaggggccacggtgctggtggttcaccattccggcaaggatgagacgaaaggcgcgcgcggttccagtgcatttcgtgcttcgctggatgctgaataccggatacgcagggaggacgcaggaagcgaagcgctggttatctcatgcaccaaaatgaaggacgcggaggaactcaaagaagccgcatatgacttacgcgtggtggagctttttaccgacgctgacggggagttaatcacgtcgctggtggtggtggataagccgcgccctcccgttgaactggagcgcatcgaggaggcaggcaacaagacggaaaaccataccgcgctatggggatgcatacgttcacgcacacagcacggcgacaagtgcacgatcccgctgttacgtgacgatatgaaaaagctggagtatgacacaaaacaccttaaacgatggttagccaaactggaaaaagacgacgtgatctacattgacggtgatgatgtaggaccactgtaa

SEQ ID NO: 6274 - DNA, 300 bp, Escherichia coli
atgaaacttaaatattctggcttaactgccagtggcaacactcaccctaaatttacgcgcggtgatatttaccgcgaccagtacggcggcacggtaatgattaagggcgtggaagaacggcgcgtaacctaccgccgtgaaggttacgaatatgattgcgtgatgcctgtttatcagttccggcgtgatttttctctggtacagaccgcgccgcataacgtgcccaccagcaacgccagggcacgggcaaacatccagaagctgaaaaccatgattaacggattcaggagtaaaaaatga

SEQ ID NO: 6275 - DNA, 234 bp, Escherichia coli
atgcgtgatatttatcttgaaacaatagaccgcgcatttagtgcccttgcttacgctgaaggtatgtacgaaatattgcggatgtgccttgaatcctttggcgataatgaacgtaatgcaaaaaaaacgcggattattacatcattaataacgcttcttgagcctgtaataaatgagttgcaggaaatagagacattgcacgacagatataacgaacagcacaccggagaataa

SEQ ID NO: 6276 - DNA, 450 bp, Escherichia coli
atgcacaataaaaccacaccgaacgcagcagccgccgcactcactacgctgatgcacgcgcttattgatattgaatgcacggcagagcttgcgcagggagaagaacagaaagaccggacacagttcgccctggaatgtatccgatacatcgcaacgcggtcgctgaatgacgctaaaaatattcttgttgctgattgtgaaaatggggggggggttatgcgtgatgatcgttttaattccctgaaacaagaattttccggcgttcctgatgatgcggctgatgcgctttcgtcaatgccagaacttattagagcggcttttttcttactttccacgaaagaatataaatcaacgggacttgatgtactgaatatcgccgccgattatgcggaatatgtggcagaggcgcgttacagaagaaaatttcctgaggatgtaagccatgcgtga

SEQ ID NO: 6277 - DNA, 201 bp, Escherichia coli
atggttgccgtaaatcatataccacaccttgtacacacacaaacggcctttgtgtggcgttttctggccctgagtgccggagaatctcaaatcatccacgtaaccgcctggacggaacgcgaagcgcgtagccgttgcccgtccggttgtgttgctgtattcgccgcccgtattcgtcagggggaaacctatgcacaataa

SEQ ID NO: 6278 - DNA, 666 bp, Escherichia coli
atgacaaacacgaaaaaagcggccccgatatggagccgcctttctgaacaattaacccgctgcgccttatgtgtatgtgatcccaaacataagcacggggatgatagccgctatcaggctggtgggcaatgcaatcagtctggttcagttcgttgccatacctgcaatgagcgcttttccctatactctttaaggaattgctcaagggcaaaagcacatggtgcgaatctttctgattcatgctctatctttctgcgccgtcttttccgtgccggtgataatgttttggtcaattctttatcggtcattgtgttgtcctgcatagcaatgcgccgtaatacctcacaccacggcgctgatagtttttatcctttgggttctatgccgcgccgctttagttcagtgcgccccaactctttaagccagttggctaggcttatgccgtcgctctgtgcttctttgtcgaattgctcttttagctctggagaaattcgcattctgaattgtggggattgcccgtcccctttagggcttttatcgcgtttgattgttgacaagtggtcacctattgaattagcctttccattgttaggtggtcaccttaacacaagagcacttaaaaaagcaaagccccgcaagtgtcattaccactcgcagggcttctaa

SEQ ID NO: 6279 - DNA, 207 bp, Escherichia coli
atggaagcaatcagaaaaattatctttcgccaggaagtaaaaaaaattatccacatcaaggcagacagcacgctgcaaagcatgatcaacgccggagaatttccgcagggttttcgcgttggtttacgccgtcgcggatggtatgaggatgatgtgttggcctggcagaaagaacgcgaacaggaagcacgcggaacggctgcttaa

SEQ ID NO: 6280 - DNA, 1242 bp, Escherichia coli
atggcgagaaaaacacacccattaaccacagtgcagatcaaagcagccagaccagcgcaaaaggagtacaccctgcaggacggcggagggctttttctcctggtcaaaccgtctggatcaaaactctggagattttcctactaccgaccatcggacaaaaaaagaatattgctgagttttggatcgcttgaagatgtttccctggctgatgccagaaaacgccgtagcgagtacaggacgttaatcagtgccggaactgacccgcaggaccacgagaggcaaaaaagagagacagaggcccgaagacaagggaacacgttcgaaaatgtggcggcggcatggtaccaggtgaaaatcagccagaatctggcccccaacacgattaaagacatctggcgttcgctggataaatatgtattcccgttcatcggcaacacgccaatagataccctcaccgcccgaaggttcgttgaagtgcttacccccatcaaggagcgcggcaacctggaaacactcaagcgggttttacagcgcgttaatgaggtaatggattacgccgccaacagtgggctgattgatgccaatccggctatgaatgtgcgtaaggcgtttccctcacctgtaaaaaaacatatgccaacaatccgccccgaacagctgccggagcttatgcaggctttatcagtatcggcaacagaacggcagaccagattactgattgaatggcagttactgaccgtaacccgtcccgccgaagcgtcatcaacgcggtgggatgaaatcaacctggacgcgaagcaatggacgatacctgccggacgcatgaagatgcgcagggatcacgttatcccgctttccggtcaggctatggcggtgctggaggccatgaaaccaatcagccaccaccgcaattacgttttcccaagtctgaaagacccacagcagccgatgaacagccagacagctaacgcagcattgcggcgtatgggattcgctggcgtgctgctgtctcatggattacgcgccatattcagcacagcagcgaacgaggaaggattcgagccggacgtaatagaggcggcacttgcccacgtcgacaccaacgaagttagacgggcatacaaccggagcaactacatagaaaaacgcatcgtgctgatgcgctggtggggcgaatttgtcgaggctgcggcgacgggcgtaaccctcgccagtggtaaaaggggtatccgagccgtgtag

SEQ ID NO: 6281 - DNA, 1089 bp, Escherichia coli
atgaataaccgggagaaggagatccttgcaatattaaggcgtaacccgctgattcagcagaacgaaattgcggatatgctgcaaatcagccgttcgcgtgttgcagcgcatattatggatttaatgcgcaaaggacggattaaaggcaaaggttacattctcaccgagcaggaatactgcgtagtggtggggacaatcaatatggatattcgcgggatggcggatatccgttacccgcaagcggcttctcatcccggtaccattcattgctcggcaggcggcgttggacgcaatatcgcccacaatctggcgctgttaggccgcgacgttcatttgctttcagtgattggcgatgacttttatggcgaaatgcccctggaagaaacgcgccgcgccggcgtgaatgtctccggctgcgttcgtttacatggtcaaagcacatcgacgtatctggcaattgccaatcgagacgatcaaaccgtgctggcgattaacgatacccatctgctggatcagttgacaccgcaactactgaacgggtcgcgcgatttacttcgtcatgcgggcgtggtactggctgattacaacctgacagccgaggcgctggagtgggtctttaccctcgctgatgaaatcccggtgtttgtcgataccgtttcagaattcaaagcgggcaaaatcaaacactggctggcgcatattcacaccctgaaacccactttaccggagctggaaattttatggggacaggcgatcaccagcgatgctgaccgtaatgccgcagtgaatgcattacatcagcaaggtgttcagcaactgtttgtttatttgcccgatgagtcagtttattgcagcgaaaaggatggagcacaatttttgctgaccgcaccagcgcatacgacagtagacagttttggtgctgacgatggttttatggcgggtctggtatatagctttctggagggaaacaatttccgtgacagcgcccgttttgcgatggcctgcgcggcaatttcacgcgccagcggcagcttaaacaaccctaccctgtctgccgataacgcgctttcattagtgccaatggtgtaa

SEQ ID NO: 6282 - DNA, 720 bp, Escherichia coli
atgttaaagcgcgtgttcctcagcctgttagtcctgatcggcttgctgctgttgactgtgctcggcctcgatcgctggatgagctggaaaaccgcgccttatatctacgacgaattgcaggatctcccctaccgccaggtcggcgtggtgctcggcacagcaaaatattatcgtactggcgtaattaatcagtattatcgctaccgcattcaaggagcgattaatgcctataacagcggtaaggtaaattatctattactgagcggcgataacgcattgcaaagttataatgagccgatgaccatgcgcaaagatttaatcgcagctggtgtcgacccatcagatattgttctcgattacgcaggctttcgtacgctggattccatcgtgcgtacacgcaaagttttcgatactaatgatttcattattatcacccaacgtttccactgtgagcgggcattatttattgcgctgcatatggggattcaggctcagtgttatgccgtaccgtcaccgaaagatatgctgtcagtacgtattcgcgaatttgccgcccgtttcggtgcgctggctgacctttatatttttaaacgtgaaccgcgttttttagggccgctggtccctattccggctatgcaccaggtgccggaagatgcgcaggggtatcccgccgtcacacccgaacagttacttgaattacaaaagaaacaaggaaagtag

SEQ ID NO: 6283 - DNA, 885 bp, Escherichia coli
atgcatccacgttttcaaaccgcttttgcccaacttgcggataacttgcaatctgcactggaacctattctggcagacaagtacttccccgctttgttgaccggggagcaagtctcatcgctgaagagcgcaacgggcctggacgaagacgcgctggcattcgcactacttccgctggcggcggcctgtgcgcgtacgccattgtcgaattttaatgttggcgcaattgcgcgcggtgtgagcggaacctggtatttcggtgccaatatggaatttattggtgcgacaatgcagcaaaccgttcatgccgaacaaagcgcgatcagccacgcctggctgagtggtgaaaaagcgcttgcagccatcaccgttaactacacgccttgtggtcactgccgtcagtttatgaatgaactgaacagcggtctggatctgcgtattcatcttccgggacgcgaggcacacgcgctgcgtgactatctaccggatgcctttgggccgaaagatctggagattaaaacgctgctgatggacgagcaggatcacggctatgcgctgacgggtgatgcgctttctcaggcggcgattgcggcggcaaaccgttcgcacatgccttacagtaagtcgccaagcggtgtcgcgctggaatgtaaagacggtcgtattttcagcggcagctacgctgaaaacgccgcattcaacccgactctgccgccgttgcagggggcgttaattctgttgaatctcaagggttatgattacccggatatccagcgcgcggttctggcagaaaaagccgatgcgccgttgattcagtgggatgccacctccgcaacgctgaaagctctcggctgtcacaatatcgaccgcgtgcttctcgcttaa

SEQ ID NO: 6284 - DNA, 696 bp, Escherichia coli
atgatggcgaatatctggtggtcattaccgctgacattgattgtcttttttgccgcccgcaaactggcggcacggtataagtttcccctgcttaacccgttgctggtagcaatggtggtgatcattccttttttaatgctgaccggcatctcttacgacagctactttaaaggtagcgaagtgctaaacgatctgctgcaaccggcggtcgttgcgctggcctatcctttatatgagcagctacaccagatccgcgcgcgctggaaatcgatcatcaccatctgttttatcggcagcgtggttgcgatggtgacggggacttccgtggcattgttgatgggcgcttcaccggaaatcgccgcgtcaatcctgccgaaatcagtcaccacgcctattgcaatggcggttggcggcagtattggcggtattccggcaatcagcgcagtttgcgtgattttcgtcggtattctgggcgcagtgtttggtcatacgttacttaatgcgatgcgtattcgcaccaaagcagcgcgcggtctggcgatggggacagcctcgcacgccctcggtacggcgcgctgtgctgagctggattatcaggaaggtgcatttagttcgctggcgctggtgttatgcgggattattacttcgctgatcgcaccgttccttttcccgattattctggcagtaatgggctaa

SEQ ID NO: 6285 - DNA, 399 bp, Escherichia coli
atgagtaagacactgaacattatctggcaatatttacgtgcttttgtcctgatttatgcctgcctgtatgcaggcattttcattgcttccctgctaccggtaaccattccgggcagcatcatcgggatgctgatcctgtttgtcctgctggccttgcaaattcttccggcgaaatgggtcaatccggggtgctacgtactgattcgctatatggcgctattgtttgtgccgattggcgtaggcgtcatgcaatattttgatttgctccgcgcacagtttggcccggtagtggtttcctgtgcagtcagtacgctggtggtttttctggtggtgagctggagttcgcaactggtgcatggtgaacgtaaagtcgtaggtcagaaaggatcagaagaatga

SEQ ID NO: 6286 - DNA, 909 bp, Escherichia coli
atggcaaactgggcgcagaaactaaagcttcatcacctgcaaatgctggtggcgctgggtgaacagggcaatctgacccatgtggcgcggatgatgaatatcacccagcctgcgctgtcgaaatggttgtcacaactcgaagatgagatcggcctcacactctttgagcggcacagcaaagggttacgccctaccgaaggcggtagattgttattgcaacatgcccagcggttaatcaatgacatggagcgctcgcaacatgaactggcccgttttaaacaaggtgggctggtcggcagtctgaaaattggctgttctcccgtcgccactgactgcgtatcacaggcgattttgcatttgctcaaggagatgccaactctacacctgaatattgaagagaaggttatgaccccattgctgcaagatctgttggcaggttctgtcgacgtggtcgttgggcgaattggcggtcgcgccttgcagctgccactgaattataaggtgctctacaccgagccggtgtgttttgtcgcccgtgctgagcatccactggcgaaatacgccaccctcagctggaatgatcttgctaactggcggtggatagtctggccgacaggtacccccattcgcatcagtattgataatgcgctggtagaccacggcgtgatgctgccagaaaacacgattgagtcggcgtcgatgaacgtcagtaccaacctgttacaaagcagcgatatgatctctattttgtcattacgcctggcgcaacgttatgccagccagggacaactggtgatcctcaacctgccaaagatagaacagaaaggcagcgtcggtgtgttctggcgcaataacgaaacgccttcttatgctttaagtcagtttctgcactttttacagcagaattag

SEQ ID NO: 6287 - DNA, 1359 bp, Escherichia coli
atgactcaacgacgtgatttacaagcactgatcgatgctgctccggtcggcaagatgcagtggcgcgttatcatctgctgttttctggtggtaatgctcgatggttttgacaccgcggctatcggctttatcgcccctgatattcgcactcactggcaactcaccgcaggcgatctcgccccgctttttggcgcgggtctgctggggttaaccgcaggcgcactgctttgtggtccgttgtccgatcgctttggccgcaaacgggtgattgagctgtgcgtctttttgtttggcgcgttaagcctcgcctcggctttctcaccggatctgcaaacgctagtattcctccgtttcctcaccggccttgggctgggtggcgcgatgccaaacacaattaccatgacctcggaatatctgcctgcccgccgccgcggcgcgctggtgacgctgatgttttgcggctttaccctgggttcggcgtttggtgggattgtcagcgcgcagctggtgccggtgattggctggcacgggatcctggtgttgggtggcgtattaccgctgatgctgtttgttgcactgctggtggttctgccggaatcgccacgctggcaggtgcgccgccagctaccccaggcggtgattgcgaaaaccgtcagcgccatcacccgcgagcgttatgtcgatacccacttttatctcattgaatcagcctccgttacaaaaggcagcattcgtcaactgtttatggggcgtcagttacccatcacgttgatgctgtgggtggtgttctttatgagcttgctgattatttacctgctctcaagctggatgccaacgctgctcaaccatcgcggcatcgacctgcaacatgcctcctgggttaccgccgcgttccagattggcggtacgttgggcgcgctggcgctgggcgtgctgatggataagttcaatcctttccgcgtactggcgctgagctatgccataggcgctgtatgcatcgtgatgattggcttaagccaggacggattatggctaatggcgctggcgattttcggcaccggcattggcatcagcggatcgcaggtggggctgaatgcgctgaccgcaacactttatccaacacaaagtcgcgccacgggcgtgagctggtcaaacgccgtgggccgctgcggcgcgattgttggctcgctgtctggcggcgtgatgatggcgatgaatttctctttcgacactctgtttttcattatcgctgtgcccgcggcgatcagtgcggtgatgttaaccctgctgatcaccgtggttcgccagtcgacctctgtccctgactcactgcctcacgcaggtgttgtgaacgaataa

SEQ ID NO: 6288 - DNA, 1029 bp, Escherichia coli
atgactgataacaatcaaaatagccgcgagcaattttatcagtatatttccgggcaaaacctgacccctctgtgggagtcactgcaccatctggtgccaaaaacgcccaacgctaactgtgcgccagcgtactggaattatcaggagatccgcccgctgctgctggagagcggcagcctgattggcgcgaaagaagccgtgcgccgcgtgctggtgctggaaaacccggcgctgcgcgggcagtcttccatcaccgcgactttatatgccggtttgcaactgatcatgccgggcgaagtggcaccgagtcatcgccataaccagtcggcgctgcgttttattgttgaaggtaaaggggcattcaccgccgttgatggcgaacgcacgccaatgaatgagggcgattttatcctgaccccgcagtggcgctggcacgatcacggtaaccctggcgacgaaccggttatctggctcgatgggctggatctgccattagtgaacactctgggctgcggttttgccgaagattacccggaggagcaacaaccagtaacgcgtaaagagggcgattatctgccgcgttacgctgccaatatgttgccgctgcgccatcagaccgggaactcctcgcccatctttaactaccgttatgagcgtagccgcgaagtgctacacgatttaacccgcctgggcgatgccgatgagtgggatggctacaaaatgcgctacgtcaacccggtcaccggtggctatccgatgccgtcgatgggcgctttcctgcaactgctgccgaaagggtttgcctcacgcgtggcgcgtaccactgacagcaccatctaccatgtggtggaaggtagcgggcaggtcactatcggcaatgaaaccttcagctttagtgcaaaagatatcttcgtggtgccgacctggcacggcgtgtcgttccagaccacgcaagataccgttttatttagtttttcggacagaccggtacaagaagccctggggctgttccgcgaagcgcgttattaa

SEQ ID NO: 6289 - DNA, 702 bp, Escherichia coli
atgactcaatacgtattcgaaccacaagcgcccgttaccgtaccggttgttggcagtgatgaacaattccccgtacgccgcgtttactgcgtcggacgtaactatgccgcccacgcccgtgaaatgggctttgatccggatcgtgaaccgccattcttcttctgcaaaccggcggatgccgttgttccggttgccgctggcgaaacgctggcgctgccgtatccggcgcagaccgataactaccattatgaaattgaactggtggtggcgattggtaaaaaaggcagtgatatcccgctggaaaacgcccatgaatatgtctggggttatgccacgggtcttgatatgactcgccgtgaccgtcaaatggaaatgcgccagatgggccgcccgtgggaaatcggcaaagcgttcgatctctcggcccccatcgcgccgctgcacaaagccagcgaaactggcggtattgataacgcacctatctggttacaggttaacggcgaagatcatcagcgcagcgatattcgtcatctcatctggtcagtgaatgaaaccatcagctacctgtcaggcttctttgaactgcaaccgggcgatctaatctttacaggtacgccggaaggggttggcccagtagtcaaaggtgatgtgatcacgggcaacgtcgagggcttaacgcctatcgcggtgaagattgtctga

SEQ ID NO: 6290 - DNA, 645 bp, Escherichia coli
atgaagctgtacagtttttttaatagttcagcgtcttaccgggtgcgcattgcgctggcgctgaagggtatcgattaccagaccgaaggggtgaatatccgcattggtcagcaaaacgaactggcctaccggcggatgaatccggtcgggctggtgccgacgctgctgaccgacgagggcgaatcactcggacaatcgctggcgattattgactggctggagagtcactacccgcaagttccgctgatgccgcaggaagaaccggcccgcaacaaggtgctggaaattgtctatgccatcgcctgcgatattcatccattgaataacctacgcgtgctgcgctacctgaccgaagagctgaacgtcagtgaagaagataaaaaacgctggtatgcgcactggatccagcaagggttaagcgcggtggaacagctactgcgccagagccagtcggggcaattttgtgtgggcgagacgccgacgctggcagattgctgccttgttccacagtgggcgaacgcgctacgtatgaactgcgatctgagcgggtatccgcgctgcaaagcggtgtacgacgcctgcacgcagctgccagcgttcattgccgcagcgccagaaaatcaacaagataaaatttcagcctga

SEQ ID NO: 6291 - DNA, 1194 bp, Escherichia coli
atgactaaagtgacacgcgcagtaattgtgggaggcgggatcggcggtgcggcaactgcgttgtcactggcccgccaggggatcaaagtggtgctgctggaaaaggcgcatgagatcggtgagattggcgcaggtatccagttggggccaaatgcgttttcggcgttggatagcctcggcgtcggcgaaatcgcccgccagcgcgcggtattcaccgatcacatcaccatgatggatgcggtaaacgccgaagaagtggtgcgcattgaaaccggtcaggcctttcgcgatcatttcggcggcccttacgcggtgatccaccgggttgatattcatgcctcggtgtgggaagcggtactgacgcatccggacgtggaatatcacacctccaccaacgtcgtggatattcgcgagacagaagacgatgtcaccgttttcgacgatcgcggcaatagttggatcggcgatattctgattggctgtgacggcgtgaagtcagtggtgcgccagagcttattgggcgatgcgccgcgtgtcaccgggcatgtggtctaccgtgcggttatcgattgtgccgatatgccggaagatttgcgcattaacgcaccagtactgtgggcggggccgtgctgtcacttggtgcattaccctttacgcggcggcaagcagtataacctggtggtgacattccacagccgccagcaggaagagtggggcgtgaaagatggcagtaaagaggaagtgctctcttactttgaagggattcacccccgtccgcgccagatgctggataaaccgacctcctggcgacgctggtcaaccgccgaccgtgaaccggtagcgaagtggggaacgaagcgcattacgctggtgggcgatgcggcccatccggtggcgcagtatatggcgcagggtgcctgtatggcgctggaagacgcggtaacactgggtaaggcgctggcgcagtgtgagggtgatgcggcacaagcctttgcgctgtatgagtcggtacgtataccgcgcaccgcgcgcatcatctggtcgacccgtgaaatggggcgggtttatcatgccgcaggagtagagcgccaggtacgtaacctgctgtggaaagggaaatcgcaggcagagttttaccgcggcatggagtggctgtacggctggaaagaagataactgtttgcaaccacgctga

SEQ ID NO: 6292 - DNA, 948 bp, Escherichia coli
atgcgtgtgttactggcaccgatggagggtgtactcgactctctggtgcgtgaattgctgaccgaagttaacgactacgatctgtgcatcaccgagtttgtccgcgtggtggatcaactgctgccggtaaaagtctttcatcgcatttgccctgagctacaaaacgccagccggacaccatccggtacgctggtgcgcgtgcagttgttaggtcagttcccacaatggctggcagagaatgccgcccgtgcggtcgagttaggttcctggggcgtggatctcaattgcggctgcccgtcgaaaacggttaacggtagcggcggtggggcgacgttactcaaagatcctgaactcatctatcagggtgcaaaagcgatgcgcgaagctgtaccggcgcatttgcccgtcagcgtaaaagtgcgtctgggctgggacagcggtgagaagaaatttgaaatcgccgatgcggtgcaacaggctggcgctacggagctggtagtacatgggcggacaaaagagcagggttaccgcgcggagcatattgactggcaggcgattggcgagattcgccagcggttgaatattccggtgattgccaacggtgaaatctgggactggcagagcgcgcaacaatgcatggcgatcagcggctgtgacgcagtgatgattggtcgcggggcgctcaatattcccaacctgagccgggtggtaaaatataacgaaccgcgaatgccgtggccggaggtagttgctttgctgcaaaaatatacccgtctggaaaagcagggcgataccgggttatatcacgtagcgcggattaaacagtggttgagttatttgcgtaaagaatacgatgaagcaacagaattatttcagcatgttcgggtgttgaataattcccctgatattgcaagggctattcaggcaattgatatcgagaaactctaa

SEQ ID NO: 6293 - DNA, 975 bp, Escherichia coli
atggcggaatactatcgccaacgtgccagtgccggtttgattattagcgaagccacgcaaatttctgcccaggcaaaagggtatgctggtgcacctggcatccatagtccggaacaaattgccgcatggaaaaaaattaccgctggcgttcatgctgaaaatggtcatatggccgtacagctgtggcacaccggacgcatttctcacgccagcctgcaacctggcggtcaggcaccggtagcgccttccgcacttagcgcgggaacacgtacttctctgcgcgatgaaaatggtcaggcgatccgtgttgaaacatccatgccgcgtgcgcttgaactggaagagattccgggtatcgtcaatgatttccgtcaggccatttctaacgcgcgtgaagccggttttgatctggtagagctccactctgctcatggttatttgctgcatcagttcctttctccttcttcaaaccatcgtaccgatcagtacggcggcagcgtggaaaatcgcgcacgtctggtgctggaagtggtcgatgcagggattgaagaatggggtgccgatcgcattggcattcgcgtttcgccaatcggtactttccagaacacagataacggcccgaatgaagaagccgatgcactgtatctgattgaacaactgggtaaacgcggcattgcttatctgcatatgtcagaaccagattgggcggggggtgagccgtatactgatgcgttccgcgaaaaagtacgcgcccgtttccacggtccgattatcggcgcaggtgcatacacggtagaaaaagccgaaacgctgatcggcaaagggttaattgatgcggtggcatttggtcgtgactggattgcgaacccggatctggtcgcccgcttgcaacgcaaagctgagcttaacccacagcgtgccgaaagtttttacggtggcggcgcggaaggctacactgattacccgacgctgtaa

SEQ ID NO: 6294 - DNA, 4617 bp, Escherichia coli
atggcagataatctaaacccttcctcgcccctgccggacgtgttttcaccggcgacccgcgactggtttcttcgcgcctttaaacagccgaccgctgtccagtcgcaaacctggcatgtggcggcgcgaggcgaacatgcgctggtgattgcaccgactggctccgggaaaacgctggcagcatttctctacgccctcgatcagctcttccgcgaaggcggcgaagatacccgcgaggcgcataagcgtaaaacctcacgcattctctatatttcaccgatcaaagctctgggcaccgacgttcagcgcaacttgcagatcccgttacagggtattgccgatgaacggcggcggcgcggcgaaacggaagtcaatcttcgcgtggggatccgtactggcgatacgcctgcacaggaacgcagcaaactcacccgtaatccgccggatattctgatcaccacacccgaatcactctatctgatgctgacctcccgcgcgcgcgaaacgctacgcggcgtcgaaacggtaattattgatgaagtccacgcggtagcaggcagtaaacgtggtgcgcatctggcgttaagtctggagcggctcgatgcgctgctccacacctcagcacagcgaattggcctttctgccactgtgcgctcagcgagcgatgtggcagcatttcttggtggcgatcgcccggttacggtagtcaacccgcccgcaatgcgccatccgcagatacggattgtcgtaccggtcgccaatatggatgatgtctcatcagtcgccagcggcaccggcgaagacagccatgccggccgggaaggctccatctggccatatattgaaacgggtatccttgatgaagtgttgcgccatcgctcgaccattatctttactaattcgcgcgggctggcggaaaaactgacggcacgattaaatgagctttacgccgctcgcttacagcgttccccgtctatcgccgttgatgcggcccatttcgagtcgacctccggcgcaacctctaaccgtgtacaaagtagcgacatttttattgcccgctcacaccacggctccgtctctaaagaacaacgagcaatcaccgaacaggcgctgaaatcgggtgaattacgctgcgtggtcgcaacctccagtctcgaactagggattgatatgggcgcggtggatctggtgattcaggtggcaacgccgctttctgttgccagtgggttacaacgcattggacgtgccggacatcaggttggcggtgtatctaaagggctttttttcccccgaacccggcgtgacttagtcgattccgcagtcattgtagagtgtatgttcgcaggcaggctggaaaacctgacaccaccgcataatccactcgacgtccttgcgcagcaaaccgttgccgccgcggcgatggatgcattacaggtagacgaatggtactcccgcgtacgccgtgccgcaccgtggaaagatctgccaggacgtgtttttgacgccacgctggatatgctttccgggcgctatccctctggcgatttttctgcttttcgccccaaactggtctggaacagggagaccgggatattgaccgcccgacctggcgctcaattgttggcggttaccagcggcggcaccattccggatcgtggcatgtatagcgtgttattacccgaaggtgaagaacaggccggttcgcggcgggtgggtgaactggatgaggagatggtatatgagtcacgggtgaacgatattatcactcttggcgcaacctcatggcggatccagcaaatcacccgcgatcaggtgattgtgactcctgctccaggtcgttctgcccgccttcccttctggcgtggtgaaggtaacggacgtccggcagaattaggcgagatgatcggcgattttctccatttactggcggatggcgcgttcttttccgggactattcccccgtggttggcagaagaaaatacgatcgccaatattcaggggttgattgacgagcagcgcaacgcgacgggtatcgttccaggtagtcgtcatcttgtcctcgaacggtgccgtgatgaaattggtgactggcgtattattttgcactctccctatggaagacgggtgcatgaaccctgggcgctggcgattgccgggcgaatacatgcactatggggcgctgacgcgtctgtggttgccagtgatgacggcattgttgcgcgcattcctgacaccgatggtaaattgcctgatgccgcgatttttttgtttgaaccagaaaagttgctgcaaattgtccgcgaggcggtaggcagctcggcacttttcgccgcccgttttcgcgaatgcgccgcgcgggcattattaatgccgggccgcacgccgggccatcgcaccccgctctggcaacaacgactgcgcgccagtcagttgctggaaatcgctcagggatatccggattttccggtcattctcgaaaccctacgcgaatgtctgcaagatgtttatgatcttcccgcgctggaacgtttgatgcgtcgcctgaacggtggcgaaattcaaatatccgatgtaacgaccactacgccctcgcctttcgccgccagtttattgttcggctatgtcgcggaatttatgtaccagagcgacgccccgctggcagagcgccgggcatccgtactgtcgctggacagcgagttactgcgcaatctactcggacaggtcgaaccgggggaattactcgacccgcaggtcattcgccaggtggaagaagagttgcaacgactggctcctggcagaagagcgaaaggtgaagaaggattgttcgacctgctgcgcgaactggggccaatgaccgttgaagacctggcgcaacggcatacaggcagcagtgaagagattgcgtcgtatctggaaaatcttcttgcagtaaaacgaatcttcccgacgatgattagcgggcaggagcgtcttgcctgtatggatgatgccgccaggctgcgcgatgccctcggcgtacgactaccagagtcactgccagagatttatttgcaccgagtcagttacccgcttcgcgacctctttctgcgctatctccgggctcatgctctggtcacggctgaacaactggctcatgagtttagtctcggtattgccattgtcgaagagcaacttcagcaactgcgcgaacagggtctggtgatgaatctgcaacaagacatctgggtgagcgatgaagtatttcgtcgtctgcgtttgcgctcgctgcaagccgccagagaagcgacacgtcccgttgcggccacgacctatgcgcgattgctgctggaacgtcagggcgtattacccgccaccgatggtagcccggcactctttgcctcaacatcgccaggcgtttatgagggcgtggatggcgtgatgcgggtgatcgaacagcttgcaggagtcggtttacccgcctcactctgggaaagccagatcctgcctgcccgcgtacgcgactattcgccagaaatgctcgatgaattactggcaaccggagcggttatctggtcgggacaaaaaaagctgggtgaagatgacggcctggtggcactgcatctacaggaatatgccgcagaatcgttcactcccgccgaagcggatcaggcgaatcgttcggcgctgcagcaagcgatagtcgctgttctggctgacggaggagcctggtttgcacaacaaatcagccaacggatacgcgataaaatcggcgaatcggttgatccctcggcactgcaagaggcgttatgggcgctggtctggcaaggcgtcatcaccagcgatatttgggcaccgttacgcgccctcacccgcagcagttccaacgcacgcacctcaactcgccgcagtcaccgggctcgtcgtgggcgtcctgtctatgcgcaacccgtctcgccgcgggtatcttacaacacaccaaagctggccggacgctggtcgttattgcaggtggagccactaaacgataccgaaaggatgctggcgctggcggaaaatatgctcgaccgctacggcatcatcagtcgtcaggcggtgatagccgaaaatatccctggcggttttccatcgatgcaaacgctttgtcgaagtatggaagactccgggcgaattatgcggggtcgttttgtagaaggtctgggtggcgcgcaattcgctgaacgtctgactattgaccgattgcgtgacctggcgacacaaaccgcgcaaacgcgccactatacaccagtggcgctctccgccaacgatccggctaatgtgtggggaagtcttctgccctggcctgcacatccggcaacgctggttccaacgcgtcgggcgggtgcgctggtggtcgtttctggcggcaaattgttactttatctggcgcaaggtggcaaaaaaatgctggtctggcaggaaaaagaggaattactcgccccagaggttttccatgcgctgactaccgcactgcgtcgcgaaccacggctgcgctttacgctgacagaagtgaatgatctaccagtccgacaaacgccgatgtttacgctgctgcgtgaggcgggattttcaagttcgccacaagggctggattgggaatag

SEQ ID NO: 6295 - DNA, 162 bp, Escherichia coli
gtgaaaagaaccacgtacctttttactgatgaaaaaagcgcccttgcctatctggaaaaacatactgcccgactgaaaaatctcggcgttgaggaagttgtcgccaaagttttcgatgtcaatgagccactgagtcaaatcaatcaggcaaaactcgcctga

SEQ ID NO: 6296 - DNA, 1611 bp, Escherichia coli
atgaaaaaaattgctattgtgggtgccgggcctacggggatctacaccttattctcgcttctacagcaacaaactccactttctatttctatcttcgagcaggctgatgaagccggtgtcgggatgccatacagtgatgaggaaaactcaaaactgatgctggcaaatattgccagtattgaaataccgccgatttattgtacgtatctcgaatggctacaaaagcaagaagccagccatctccaacgttatggcgttaaaaaagaaaccttgcacgatcgtcagtttttaccgcgaattctgctgggcgaatatttccgcgatcaatttttacgattagtagaccaggcacgacagcaaaaatttgcagtggctgtttatgaatcatgccaggttaccgatctgcaaattacaaatgctggcgtcatgctcgctacaaatcaggatttacccagcgagacgtttgatttagcggtgatcgccacgggtcacgtctggcctgatgaagaagaagcaaccagaacgtattttcccagcccgtggtcaggcctgatggaagcaaaggtcgatgcgtgtaacgtgggtattatgggaacatccttgagcggactggatgcggcaatggcagtggctattcagcatggttcgttcattgaagatgataaacaacacgtcgtttttcaccgcgataacgcaagtgaaaagctaaatattacgttaatgtcgcgcacaggtattttacccgaagccgatttctattgccctattccctacgagcccttacacatcgtcactgatcaggcattaaatgctgagattcaaaaaggcgaatatggccttttggatcgggtatttagattgatagtagaggaaatcaagtttgctgatccaggctggagccaacgcatagccttagaaagcctgaatgtcgattcctttgctcaagcctggtttgccgagcgcaaacaacgcgacccattcgactgggcagaaaaaaatctcctggaagtcgaacgcaataaacgagaaaaacatactgttccctggcgttatgtcattctgcgcctgcatgaagccgtacaggaaattgttcctcatctgaatgaacacgaccataaacggttcagtaaaggccttgcccgggttttcatcgataattatgcggcaatcccttcagagtctattcgtcgactactggccttacgtgaagcgggaatcattcatattctcgccctcggtgaagactacgaaatggaaattaatgagtcgcgcaccgtcctgaaaacggaagacaatagctactcgtttgacgtttttattgatgcccgcgggcagcgtccgcttaaagtgaaagatattcctttccctggactacgcgaacaattacagaaaacaggggatgaaatccctgatgttggcgaagattatacgctacagcaacccgaagaaattcgtgggcgcgtagcgttcggcgcgttgccctggttgatgcacgaccagccattcgtacagggacttacggcatgtgcagaaattggtgaggcgatggctcgggctgtcgtaaaacctgcctcccgtgcacgtaggcgtctttcgtttgatcaaatgtaa

SEQ ID NO: 6297 - DNA, 2103 bp, Escherichia coli
atggctaacggttggacaggtaatatattaagagtcaatctcacgacaggaaatattaccatcgaagattccagtaagtttaaaagttttgtcggtggcatgggcttcggctacaaaattatgtatgacgaagtaccgctaggcacgaaacctttcgatgaagcgaataaattagtttttgctaccggcccattaactggatctggtgccccctgtagttctcgtgtaaatatcacctcactttctacttttaccaaaggaaatttagtcgtcgatgcccatatgggtggcttttttgcagcgcaaatgaaattcgctggatacgacgtcattattatcgaagggaaagcgaaatcaccagtatggctgaatattaaagatgacaaagttagcctggaaaaagccgatttcttatggggaaaagggacgcgcgcaacgacggaagaaatttgtcgcttgaccagtccggaaacctgtgtggcggctattggtcaggctggggaaaaccttgttcctctctctggcatgttgaatagccgtaaccacagcggtggtgcgggaactggcgcaataatgggttcgaaaaaccttaaagcgattgcggttgaggggacgaaaggggtcaacattgccgatcgtcaggagatgaagcgtctcaacgattacatgatgactgaacttatcggtgcgaataacaaccatgtcgtgccaagtacgccgcaatcgtgggcagagtattcagatcccaagtcacgttggacagcacgtaaagggctgttttggggcgcggctgaaggtggtccgattgaaacgggtgagattccgccaggcaatcagaacacggtcggctttcgtacctataaatccgtttttgacttaggtccggcggcagagaaatacacagtaaaaatgagcggctgccactcttgcccgatccgttgtatgacccaaatgaatattcctcaggtgaaagagtttggcgtgcctggcaccggtggtaacacttgtgtagcaaactttgtccataccactatcttcccaaacgggccgaaagattttgaagataaagacgatggtcgtgtgattggtaacctggttggtctgaatctattcgatgactacggcctatggtgtaactatgggcagctgcatcgcgactttacttattgttacagcaaaggggtgttcaagcgtgttctaccagctgaagagtatgcggaaattcgctgggatcaactggaagcgggtgacgttaacttcattaaagatttttactaccgtctggcgcatcgtgtgggtgagctgagtcacctggctgatggttcatatgccatcgcagaacgctggaatttgggtgaagagtactggggctacgcgaaaaataaactctggtcgccgtttggctatccggttcaccatgccaatgaagcgtcagcgcaggtcggttccattgttaactgtatgttcaaccgtgactgcatgacgcatacccatatcaactttattggttccggcttgccattgaaactgcaacgtgaagtggcgaaagaactttttggttctgaagatgcttacgatgaaaccaaaaactacacgccaatcaatgacgcaaaaattaaatatgctaagtggtcgctgttgcgggtctgtttgcataacgccgtcaccctgtgcaactgggtctggccaatgaccgtttcgccgctgaaaagccgtaattatcggggcgatctggcgcttgaagccaaattcttcaaagcgatcactggcgaagatatgactcaggaaaaattagatttagctgcagagcgtatctttacgttgcatcgcgcctacacagtaaaactgatgcaaaccaaagatatgcgtaatgaacacgatcttatctgttcctgggtattcgacaaggatccgcagatcccggtctttactgaaggtactgacaaaatggatcgtgacgatatgcatgcttcgctcacgatgttctacaaagaaatgggctgggacccacagcttggttgtccgacccgcgaaacattgcagcgtctggggctggaagatattgccgccgatctggcagcacacaatctactgcctgcgtaa

SEQ ID NO: 6298 - DNA, 744 bp, Escherichia coli
atgacaaaaattgccctggtgacggggggaagtaaaggcatcggctacgcagcagcaaaggcactctatgacattggatatacagttattgttgccgcgcgtaacgaagaaaccttacagcaatgtgcacaaggattagccaaggaacgctttattcctctggttgccgatgtcacggatgagtccgctgtcgttgcgctatttgccgagattaaggctctttttggtcgactggatctcttgttcaataatgcgggcaataatagtccggcaaaaagtattgaagaggttgagtttactgagtggacgcgcgtgtttaacgccaatattcattcgacatttttgtgttcgaaagaggcgattaaaatcatgaaagcgcagcagccaatgggaggacgtattattaacaatgcgtcgatttctgcactgacgccgcgcctctatactgcgccatacacggcgtcgaaacatgctgttaccgggttgaccaaggccatttccctggattgtcgcaaatttaatatcgcttgcgggcaaattaatatcggcaatgcggaaacgacattatcgaatcggatgcgtaagggcgtttatcaggcagatggtgctattaaagcggaagatatgatgaatgttgctgatgttgcagcgaccattcagatgatggctcagttgccagtaaccacgaatgtgctggaaataacgattatggcaaataatatgccgtatgtcggacgtggttaa

SEQ ID NO: 6299 - DNA, 480 bp, Escherichia coli
atgatttatggtgatatcgcgtatcttagtgaacaacaaaagcggacatttcatcctgtcatcactcgtgtcattgagtatctttcacaacatgatctgaatagtcttcctgtgggagagaaggtttttattcaggatgactcaatattttataccgtggttgaaccgatgactaaaccactacatgaatgtcgaccggaagttcatcgtaaatatcttgatgtccattttttaattgccggagaagagcggatttgtgtggattttgatgatggggaaaactcggttgtagaaagccacctgggcgaccgtgatgttattttttatgctgatgaacgtattaatgatcgaatcatcacgctgacaccaggacagtttgtggtggtctttccggaagaagtgcatcgggcatgctataaaatcgataacgtggaaaaaatcaaaaaaacagtcgtgaaaatcgacatgagtttattatag

SEQ ID NO: 6300 - DNA, 960 bp, Escherichia coli
atgaacttaaaagatattcaagtggcgatcgtcggcaaactaagtgatcgcttaatggctaaagttgaatctaccttcaccgcatatcgcctgtgggaactggctgatgaaggcgctttttacacgcaaatcgcgccggatattcaggcgctggtgaccagtggtaatccggtaatgggggcttctcgggcgctaatagaaaaatttccgaatctgaagattattgccagcaacggtgtgggttatgaccctattgatatcgtggcagccagggagcatggcgttatcgtcaccaacacacctggcgtgcttaatgactgtgtcgcagacattggtatagcgttgttactcaatgttgcccgacgtattaacattgccgatcgttatgttcgtgacggccgttggccaaacgaggggcgtttcccgatggcgacgaaagtgagtggcaaacgttgcggaattgtcggtctggggaacattggtaacgcagtagcccgccgtgcagcagcatttgaaatggaaattcactatttcgacccaaaaccgcataacaaacctgattggacggcgcatgattcgttggtttctctggcgcaagcggtggacttcctcgttctgacgctgccaggcggcgcgagtacgcgcggcgttattgacaaaacggtgctgcaggctctggggaaaaccgggcatttgatcagtatttcccggggatcagtggtgaacgaaaccgatctgattgatgctctgcaaaataacattattgctggtgcggcactggacgtttatgccaacgaaccacatgtgccagaacaattaatgtcgctggataacgttgtccttacgccacatatcgccagtggtacgagcgaaacgtttaatgcgatggcggatttggtatttgataacttacaggctttctttagcggacggccagttattacccctgttactcaataa

SEQ ID NO: 6301 - DNA, 1401 bp, Escherichia coli
atgagttgctatttgaaagtcctgatttgtgcgattgtcgcactcgctatatggtttttccccgtccccgacggattaacacccttaacctggcacattctggccatatttatcaccactgtggtggcgtttattctgcaaccgttgccggtgggcgctatcgcgttaatagccatcagttttattatgctgaccggtatgatgaaaaccagcgaagccttaaaaggtttcagcagcacgacggtatggcttattgtcgccgcattcctgtacgcgaaaggattcatcaaaacggggttggggcggcgtatcgcctatttgctgattcgcggatttggcggcagctcgttgcgtctgggttatacattggcgctaagcgatatgattatcgcgcccgcaacgccatcaaacacagcgcgagcaggagggattttgttcccgattgttcgcagtgtctctaacagctttggatctgaaccggatcaagggccgcgtaaaataggcgcttatctgatgcagacggtgttccattccaactgcctctcatcctcgatgtttatgacggccagcgcgccaaatgcactcattgtatctctggcggccagcactttatttgtcgatatctcatgggggatgtggacgctaagcgcactggtgccgggcattatcgcttttatcactatgccgttggtcatttacaaactctacccgccagagatcaaaaagacgccagaagccaaagcgttggcacaggaagaacttatcaaaatggggccggtaacccgtgatgagcgcgtgacgattggcattttcctgctttcattattggcctggagtacatcgaaatggactggcctggatgcgacggctgtcgcgctttctggcgtctgtttaatgttgatgacccggattatcacctggcaggatgtgcagtcagagaagggggcctgggacattctggtctggctgggagtcatgatctgtatggcagataagctcaatcagcttggcctgttcaaatggtttgccgtcacaacctcggcgctgttcaccggcattccgtgggagataacgttgacggtgttgctgatagtttactgctattcccactatttctttgccggaagtacgccgcatgtagtggcgatgtatgccgcttttggcagcgtctcggttgctgctggcgcaccgccgatgatggcggctctgtcactggcgttcgtcactaacctgatgagcggcatttcgcattatggcaacggacccgcagtgatctattacggcgctggctatgtctcgcaacgagaatggtggcggctgggctttatcgtcatgttgttgaacattgtcatctggttcggactgggggcggtgtggtggaaaattcttggcctgtggtaa

SEQ ID NO: 6302 - DNA, 1392 bp, Escherichia coli
atgaactttccattaattgcgaacatcgtggtgttcgttgtactgctgtttgcgctggctcagacccgccataaacagtggagtctggcgaaaaaagtgctggtgggtctggtgatgggtgtggtttttggcctcgccctgcataccatttatggttctgacagccaggtacttaaagattctgtacagtggtttaacattgttggtaacggctatgttcaactgctgcaaatgatcgttatgccgttagtcttcgcctctattctgagcgcggttgcccgtctgcataacgcatctcagttaggcaaaattagttttctgaccatcggtacgcttttgtttaccacgctgattgcggcgctggtcggtgtgctggtcaccaacctgtttggtttgacggctgaaggtctggttcagggtggtgcagaaactgcacgtctgaacgccattgaaagtaactatgttggtaaagtctctgacctgagcgttccgcagctggtcttgtcctttatcccgaaaaacccgtttgccgatttgaccggagccaatccgacgtcaattatcagcgtggtaatttttgccgcattcctcggcgtagctgcgctcaagctgctgaaggatgatgcgccgaaaggtgaacgcgtcttaaccgctatcgataccctgcaaagctgggtgatgaaactggttcgcctggtcatgcagctgaccccttacggcgttctggcgctgatgaccaaagtggttgcaggttctaacctgcaagacatcatcaaactgggaagtttcgttgtcgcgtcctacctcggtctgctgattatgtttgcagtgcatggccttctgctgggcattaatggcgtgagcccgctgaaatacttccgtaaggtatggccagttctgacgtttgcttttaccagccgttccagtgctgcgtctatcccactgaatgtggaagcacaaacgcgtcgtctgggcgttcctgaatccatcgccagtttcgccgcctctttcggtgcaaccattggtcagaacggctgtgccggtttgtatccggcgatgctggcggtgatggttgcgcctacggttggcattaacccgatggacccgatgtggattgcgacgctggtcggtattgttaccgttagttccgcaggcgttgccggtgtcggtggtggtgcaactttcgccgcactgattgtgctgcctgcgatgggcctgcctgtaacgctggtggcattgttaatctccgttgaaccgcttatcgacatggggcgtacggcgctaaacgttagtggctcgatgaccgctggcacgctgaccagccagtggctgaagcaaaccgataaagccattctggatagcgaagacgacgccgaactggcacaccgttaa

SEQ ID NO: 6303 - DNA, 804 bp, Escherichia coli
atgctttctacaaacttaatacagagtaattatggtgatttaaatattaaaagcctggctttcgactcttttaaagaaaggctgcagtctactatgacagcactcactttctttatatcaacgggtcaatgtgactgcgatgaaatagcagaatcaaactttaattatatgattgcctatatgtctaacattaactatgatgcctcaaagccaggagcgccagcacttagttttgatacatatctgcaggacaatgttaaatatagagtaataattaataatctttatggtagtgaaattcggataaggggtataaataaggattttattggaatggatgtcacttctgtatttcgcccagaaaaaatgaccaatttgatcaatataaaaaacaggttggttattcactatttaaggactatatactatgaacaaaattatatacatcctgtcgggagcatttttgctgcgattcaaaaaaatgagagtctcctaaagtttccttcgataatatcaatgcttaatatcagtcttctttttaatccactaaatcttccgggaatgggaaatggtgtgcttgaagatattatgagtattccagatagttcacttagaaaacgtctcgggtatgaggttttaagcttctcgctacaggcacattcattgagccaggaatgtattgataagttggccatttttttcgctgacgatctgtttcaatatgagtcagtatgcatcgccgcgatggaacatttaaaaagtaaggcaacggctcctatacaaaacggaccgttgccagcataa

SEQ ID NO: 6304 - DNA, 2262 bp, Escherichia coli
atgtcgcaacataacgaaaagaacccacatcagcaccagtcaccactacacgattccagcgaagcgaaaccggggatggactcactggcacctgaagacggatctcatcgtccagcggctgaaccaacaccgccaggtgcacaacctaccgcccctgggagcctgaaagcccctgatacgcgtaacgaaaaacttaattctctggaagacgtacgcaaaggcagtgaaaattatgcgctgaccactaatcagggcgtgcgcatcgccgacgatcaaaactcactgcgtgccggtaaccgtggtccaacgctgctggaagattttattctgcgcgagaaaatcacccactttgaccatgagcgcatcccggaacgtattgttcatgcacgcggatcagccgctcacggttatttccagccatataaaagcttaagcgatattaccaaagcggatttcctctcagatccgaacaaaatcaccccagtatttgtacgtttctctaccgttcagggtggtgctggctctgccgataccgtgcgtgatatccgtggctttgccaccaagttctataccgaagagggtatttttgaccttgttggcaataacacgccaatcttctttatccaggatgcgcataaattccctgattttgtgcatgcggtaaaaccagaaccacactgggcaattccacaagggcaaagcgcccacgatactttctgggattatgtttctctgcaacctgaaactctgcacaacgtgatgtgggcgatgtcggatcgcggtatcccgcgcagttaccgcaccatggaaggcttcggtattcacaccttccgcctgattaatgccgaagggaaggcaacgttcgtacgtttccactggaaaccactggcaggtaaagcctcactcgtttgggatgaagcacaaaaactaaccggacgtgacccggacttccaccgccgcgagttgtgggaagcgattgaagccggcgattttccggaatacgaactgggcttccagttgattcctgaggaagatgaatttaagttcgacttcgaccttcttgatccaactaaacttatcccggaagaactggtgcccgttcagcgtgtcggcaaaatggtgctcaatcgcaatccggataacttctttgccgaaaacgaacaagcagcattccatccaggtcatattgttcctggtctggacttcaccaacgatccgctgttgcaggggcgtttgttctcttataccgatacacaaatcagtcgtcttggcggaccaaatttccatgagattccgattaaccgcccgacctgcccttaccataatttccagcgtgacggcatgcatcgtatggggatcgacactaacccggcgaattatgaaccgaactcgatcaacgataactggccgcgcgaaacaccgccggggccgaaacgcggcggttttgaatcataccaggagcgcgtggaaggcaataaagttcgcgagcgcagcccatcgtttggcgaatattattcccatccgcgtctgttctggctaagtcagacgccattcgagcagcgccatattgtcgatggtttcagttttgagttaagcaaagtagttcgtccgtatattcgtgagcgcgttgttgaccagctggcacatattgatctcactctggcccaggcggtggcgaaaaatctcggtatcgagctgacggacgaccagctgaatatcaccccgcctccggacgtcaacggtctgaaaaaggatccatccttaagtttgtacgccattcctgacggtgatgtgaaaggtcgcgtggtagcgattttacttaatgatgaagtgagatcggcagaccttctggccattctcaaggcgctgaaggccaaaggcgttcatgccaaactgctctactcccgaatgggtgaagtgactgcggatgacggtacggtgctgcctatagccgctacatttgccggagcgccttcgctgacggtcgatgcggttattgtcccttgcggcaatatcgcggatatcgctgacaacggcgatgccaactactacctgatggaagcctacaaacaccttaaaccgattgcgctggcaggagacgcgcgcaagtttaaagtaagaatcaaggtcgctgatcagggtgaagaagggattgtggaagctgacagcgccgatggtagttttatggatgaactgttaacgctgatggcagcacaccgcgtgtggtcacgcattcctaagattgacaaaattccggcgtaa

SEQ ID NO: 6305 - DNA, 1353 bp, Escherichia coli
atgagacagaaattaaaagtcgtcactattggtggcgggagcagctataccccggagttactggaaggatttattaagcgttatcacgaattgccggtcagcgaattatggctggtggatgtcgaagatggtaaagagaaactggatattatttttgatctctgccaacggatgattgataacgctggcgtcccgatgaagctttataaaacgctggatcgccgcgaagcattgaaagatgctgatttcgttactacccaactgcgcgtaggccaattaccggcgcgcgaactggatgaacgtattccattaagtcatggttatcttggtcaggaaactaacggcgcgggcggtctgtttaaaggtctgcgtaccattccggtgatttttgacatcgtaaaagatgtcgaagaactttgtccgaatgcatgggtgattaacttcactaacccggcgggaatggtcactgaagccgtttatcgtcataccggatttaaacgctttatcggcgtgtgtaatattccgatcggcatgaagatgtttattcgcgatgttctgatgctgaaagacagcgatgatttatctatcgatctgttcggcctcaaccatatggtgttcattaaagatgtgctggtaaatggcaaatcacgctttgccgaattgcttgatggtgtggcatccgggcagttaaaagcatctggcgttaaaaatattttcgatctgccatttagcgaaggcttaattcgttctctgaatctgttgccgtgttcttatttgctttattacttcaagcaaaaagagatgctggctattgaaatgggcgaatactacaaaggcggcgcacgagcgcaggtagtacagaaagtcgagaaacaactttttgagctgtataaaaacccggagttgaaagttaagccgaaagaactggaacagcgtggtggggcttattactctgatgctgcgtgcgaagtgatcaacgctatctacaacgacaagcaagctgaacattacgttaatatcccgcatcatgggcatattgataatattccggcagactgggcggtagaaatgacctgtacgctggggcgcgatggcgcgacgccacatccgcgcattacgcatttcgatgataaagtgatggggctgattcacaccattaaaggcttcgagattgctgccagcaacgccgcacttagcggagagtttaacgatgtgttactggccctaaaccttagtccgttggtgcattccgatcgcgatgctgagctgctggcacgcgagatgattctggcgcacgagaaatggttgccaaattttgccgactgcatcgcagagcttaaaaaagcacattaa

SEQ ID NO: 6306 - DNA, 840 bp, Escherichia coli
atgcagccagtgattaacgcgccggaaattgccactgcccgagaacagcagttgtttaatggcaaaaacttccatgtgtttatctacaacaaaactgagagtatcagcggactgcatcagcacgactattatgaatttactctggtattgaccgggcgttatttccaggagattaacggtaagcgcgtgttactggaacggggcgattttgtttttattccgttaggttcgcaccatcaaagtttttatgagtttggtgccacgcgcatattgaacgttgggatcagtaaacgcttttttgagcagcattacctgccgttgttgccttattgctttgtagcttcgcaggtataccggaccaataacgcttttctcacctatgtggaaacagtgatttcttcattgaatttccgcgaaacagggctggaagagtttgttgagatggttactttttatgtcattaaccgtttacgtcattaccgcgaagaacaggtgattgatgatgtaccgcagtggctgaaaagtacggtagaaaagatgcatgataaagagcagtttagtgaatcggcactggagaatatggtgacgttgtcagccaaatcacaggaatatttgacgcgagcgactcaacgatattatggcaaaacgccaatgcagattattaatgaaatccgtattaattttgccaaaaaacaactggaaatgaccaactattcagtgacggatattgcgtttgaggccggttatagtagcccgagtttgtttattaaaacgtttaagaaattaacgtcctttacgcctaagagctatcgtaagaaattgactgaatttaatcagtaa

SEQ ID NO: 6307 - DNA, 1026 bp, Escherichia coli
gtgtcagatcagattatcgcccgcgtctcgcaatcccttgccaaagaacagtcactggaaagcctggtccgacagcttctggagatgctggaaatggtcactgatatggaatcaacctacctaaccaaagtggatgtcgaagcgcgcctgcagcatataatgtttgcccgtaacagccagaaaatgcacatcccggagaattttaccgtctcgtgggattactcgttatgcaaacgcgccattgatgaaaactgctttttcagcgatgaagtccccgaccgttggggcgactgtattgcggcacgcaatcttggcatcaccacatttctgagcacgccaattcacttaccggatggatcattctatggcacgctttgcgccgccagcagtgagaagcgccagtggagtgaacgcgcggaacaggttttgcagttattcgccggactgattgcacaatatattcaaaaagaggcgctggtagaacagctgcgcgaagccaatgccgcactgatagcgcaatcgtataccgactcgttaaccgggctaccgaatcggcgggcgatttttgaaaatctgacgacgctgttttctctcgcccggcatcttaaccataagataatgatcgcgtttatcgatctggataacttcaaattaatcaatgatcgttttggtcataatagtggcgatctgtttctcattcaggttggcgagcgccttaatacgctccagcaaaatggcgaagttattggtcgtctcggcggtgatgagtttttggttgtttcactgaacaacgagaatgcggatatttcgtcgctgcgagaacgtattcaacaacaaatacgcggagaatatcacttagctgatgttgatttgtattatcctggtgccagtcttggcatagtagaagtcgatcctgaaacgaccgatgcagacagtgccctgcatgctgccgatatcgcgatgtatcaggagaaaaaacacaaacagaaaacaccttttgtcgcgcatccagcgctagattcctga

SEQ ID NO: 6308 - DNA, 639 bp, Escherichia coli
gtgttcgctgaatacggggttctgaattactggacctatctggttggggccatttttattgtgttggtgccagggccaaataccctgtttgtactcaaaaatagcgtcagtagcggtatgaaaggcggttatcttgcggcctgtggtgtatttattggcgatgcggtattgatgtttctggcatgggctggagtggcgacattaattaagaccaccccgatattattcaacattgtacgttatcttggtgcgttttatttgctctatctggggagtaaaattctctacgcgaccctgaagggtaaaaataacgaggccaaatccgatgagcctcaatacggtgccatttttaaacgcgcgttaattttgagcctgactaatccgaaagccattttgttctatgtgtcgtttttcgtacagtttatcgatgttaatgccccacatacgggaatttcattctttattctggcgacgacgctggaactggtgagtttctgctatttgagcttcctgattatttctggtgcttttgtcacacagtacatacgtaccaaaaagaaactggctaaagtgggcaactcactgattggtttgatgttcgtgggtttcgccgcccgactggcgacgctgcaatcctga

SEQ ID NO: 6309 - DNA, 924 bp, Escherichia coli
atgaacaatttaccgctgctgaacgatttgcgcgtctttatgctggtggctcgccgggctggttttgccgccgtggcagaagaattgggcgtttcaccggcgttcgtcagcaagcgcatcgccttgctggagcaaacgctaaacgtggtgttgttacaccgcaccacccgccgcgtcaccattaccgaagaaggagagcggatttatgaatgggcgcagcggattttgcaggatgtcggtcagatgatggacgaactttctgacgtgcgtcaggtgccacaggggatgctgcgtattatcagcagctttggttttggacgacaggtggtggctccggcgttatcagcgctggcgaaggcgtatccgcaactggaattacgttttgatgtggaagaccggttggtcgatttggtcaatgaaggtgtcgatctcgatattcgcattggcgatgatatcgcccctaatttaatcgcccgcaaactggcgaccaattatcgcattctctgcgcgtcaccggaatttattgcacaacatggcgcgccgaaacatttaaccgatctttctgcattgccgtgcctggtcattaaagagcgcgatcatccttttggtgtctggcaattacgcaataaagaaggccaccatgcgattaaagttaccggcccactgtcgtctaatcatggagaaattgtccatcagtggtgtctcgatgggcaggggattgctctgcgctcctggtgggatgttagcgaaaacattgccagtggtcatttagtgcaagtgctaccggaatattaccagccagcgaacgtctgggccgtttatgtttcaaggctggcgacgtcagcgaaagtgcggataacggtagaatttttacgccagtattttgccgagcactacccgaatttttcactggagcatgcctga

SEQ ID NO: 6310 - DNA, 1086 bp, Escherichia coli
atgatgaaaacgatgcgtattgctgcgatcccgggagacgggattggcaaagaagtccttcctgaagggattcgcgtgttacaggctgccgctgagcgctggggcttcgccttgagttttgagcaaatggagtgggcgagctgcgagtattacagccatcacggtaaaatgatgccggacgactggcatgagcaacttagccgtttcgacgccatctattttggtgccgtcggctggccggataccgttccggaccatatttcgttgtggggttcgctgctgaaatttcgtcgtgagttcgaccagtacgtcaacctgcgcccggttcgtctctttcctggcgttccctgcccgctggcgggaaaacagcctggcgacatcgatttttacgtggtcagggaaaacaccgaaggcgaatattcctcgctcggcggtagagtgaatgaaggtacagagcatgaagtcgtcattcaggaatcggtatttacgcgtcgtggtgtcgatcgcattttgcgttatgcctttgaacttgcacaaagccgcccacgtaagacgctaacttctgccactaaatcgaacggtttagccatcagcatgccgtactgggatgagcgagtggaagcaatggccgagaattacccggagatctgctgggacaagcagcatattgatattctctgcgcgcgttttgtgatgcagccggaacgcttcgatgtggtggtggcgtccaatttgtttggcgatatcctttccgatcttggcccggcctgcaccggtaccattggcattgccccatccgccaacctgaatccggaacgcactttcccgtcgctcttcgagcctgtccacggttccgcgccggatatctacgggaaaaatattgctaaccctatcgccacaatttgggccggtgcaatgatgctcgattttctcggcaatggcgatgagcgtttccaacaagcgcataacggtattctggccgcgattgaagaagtgattgctcacgggccgaaaacacctgatatgaaaggcaatgccaccacgccacaggttgccgacgcgatttgcaaaattattttgcgttaa

SEQ ID NO: 6311 - DNA, 1611 bp, Escherichia coli
atgatgagcaatgttaagaaaaaagatgtgccgctgataagcatcagtctggtggccattcttttcatcgcagctgcattaagccttttcccacaacaatcggccgacgcggccaacgctatatacacttttgttacgcgtacgttaggttccgccgtacaggtattggttttgctggcaatgggactggtgatttatttagccaccagtaaatacggcaatattcgtcttggcgaaggaaaaccggaatacagcacgctctcctggctgtttatgtttatttgtgccggtttaggttcttctacgctttattggggggttgctgaatgggcctattattatcaaacccctggattaaatatcgcaccgcgttcacaacaggcactcgaatttagcgtcccttactccttcttccactggggcatcagcgcctgggcaacttatacgctggcctcattaatcatggcttatcactttcatgtgcggaaaaataaggggctgagcctttccggcattattgctgctattaccggcgttcgcccgcaaggcccatggggaaaactggtcgatttgatgttcctgatcgccactgtcggcgcactgaccatttcccttgttgtcaccgcagcaacctttacccgtgggctttccgcgctgaccggtttacccgataatttcaccgtgcaggcatttgtgatcctgctttccggcggcattttttgcctaagctcgtggattggtatcaacaacggtttgcaacgtctgagcaaaatggttggctggggcgcgttcctgctgccattactggtgctcattgtcggcccaaccgaatttattaccaacagcatcatcaatgccatcggcctgaccacgcaaaacttcctgcaaatgagcttattcaccgatccgcttggcgatggttcatttacccgcaactggaccgttttctactggctgtggtggatctcatacacccctggcgtagcaatgtttgtcacccgcgtttcccgcggtcgtaagattaaagaagttatctggggactgatcctcggcagcaccgtcggttgctggttcttcttcggcgtaatggaaagctatgccattcaccagtttatcaatggcgtaatcaacgtcccacaggtgctggaaacactgggcggcgagacagctgtgcagcaagttctgatgtcgttgccagccggtaaattgttcctcgccgcatacctgggcgtgatgattattttccttgcctcgcatatggatgcagtggcctacaccatggcggcaaccagtacgcgtaatctccaggaaggtgacgatcctgaccgtgggctgcgtcttttctggtgcgtggtaattaccctgatcccgctttcaattcttttcactggcgcgtcgctggaaacgatgaaaaccaccgtcgtactcacagcccttccgttcctcgtcattttactggtgaaagtcggcggatttattcgctggctgaaacaggattacgccgacattccggctcatcaagttgaacattatctcccgcagacaccggttgaagccctggaaaaaacaccagtgctccctgcgggaaccgtattcaaaggcgacaactga

SEQ ID NO: 6312 - DNA, 1125 bp, Escherichia coli
atgagcaatctgagccctgactttgtactacccgaaaatttttgcgctaacccgcaagaggcgtggaccattcctgcccgtttttataccgatcagaacgcctttgaacacgaaaaagagaacgtcttcgccaaaagctggatttgcgtcgctcatagcagcgaactggcgaatgccaatgattatgtgacgcgtgagatcattggcgaaagcatcgtgctggtacgcggtcgtgataaggttttgcgcgcgttctataacgtgtgtccgcaccgtggtcatcagttgttgagcggtgaaggaaaagcaaaaaatgtgattacctgcccatatcacgcatgggcatttaaactcgatggcaatctggcccatgcacgtaactgcgaaaacgtcgccaatttcgatagcgacaaagcgcaactggttccggtgcgtctggaagaatatgccggattcgtcttcatcaacatggaccctaacgccaccagtgtagaagatcagttacccggtctgggcgcgaaagtgctggaagcctgcccggaagtccacgatctgaaactggcggcccgctttaccacccgcacgcctgccaactggaagaacattgtcgataactatctcgagtgctatcactgtggtccggcgcatccaggtttctccgactccgttcaggttgatcgttactggcacaccatgcacggtaactggacgctgcaatacggtttcgccaaaccgtcagaacagtctttcaaattcgaagagggcacggatgcggcattccatggtttctggctgtggccgtgcacgatgctgaacgtcacaccgatcaaagggatgatgacggtcatttatgaattcccggtggattctgaaactaccctgcaaaactacgatatttacttcaccaatgaagagttaaccgacgagcaaaaatcgctgattgagtggtatcgcgatgtgttccgtccggaagatttacgtctggttgaaagcgtacagaaagggctgaaatcgcgtggctatcgtggtcaggggcgcatcatggccgacagtagcggtagcggaatttccgaacatggtatcgcccatttccataatctgctggcgcaggtgtttaaggactaa

SEQ ID NO: 6313 - DNA, 966 bp, Escherichia coli
atgtcagactatcaaatgtttgaagtacaggtgagtcaggtggaaccgcttaccgaacaggtgaaacgcttcacgctggtggcaaccgatggcaaaccattacctgcgtttaccggaggaagtcacgtcattgtgcagatgagcgatggtgataacgagtacagcaatgcgtattcactactgagttcgccgcatgacacctcttgttatcagattgccgttcggctggaagaacactcgcgcggcggttcccgctttttgcatcagcaggtaaaagtgggcgatcggttaacgatttcaacgcctaataacctgtttgcgctaattccctcggccagaaagcatctgtttatcgcgggcggtattggtatcacccctttcctgtcgcacctggcagagttgcaatacagcgacgtcgactggcagttacattactgctcacgaaatccagaaagttgcgcatttcgtgatgagctagtccagcatccgcaggctgagaaagtccatttgcatcattcatcaaccggaacacgactggaattagcgcgattattggcggatatcgaacctggcacacatgtttatacctgtggccccgaggcgctaaatgaggaggtaagaagtgaagctgcgcgtctggacatcgccgccgatacgatgcactttgaacaatttgcgattgaagacaaaaccggcgatgcatttaccctggtgcttgcccgttccggaaaagagtttgtggtgccggaagagatgactattttgcaggttattgaaaataataaagcagcgaaagtggaatgtttatgtcgtgaaggggtatgcggaacctgcgagacggcaatactggaaggtgaagctgaccatcgggatcagtattttagcgatgaagagcgtgccagccagcaaagtatgttgatctgttgttcgcgcgcgaagggtaaatgcctggtgttggatttgtag

SEQ ID NO: 6314 - DNA, 1911 bp, Escherichia coli
gtgacggacgattttgcaccagacggtcagctggcgaaagcgataccaggctttaagccgcgagaaccacagcgacagatggcggtagccgtcacccaggcgatagaaaaaggccagccgctggtggtggaagcaggaaccggtacgggcaaaacctacgcttacctggctcctgcgctgcgggcgaaaaagaaagtcattatctcgaccggctcaaaagcgttgcaggatcagctctacagccgcgatttgccaatggtctcaaaggcattgaaatacacgggcaatgtggcgttgctgaaagggcgctcaaactacctctgcctcgaacgtctcgaacagcaggcgctggcggggggcgatctgccggtacaaatcttaagcgatgtgatcctgctgcgctcctggtctaatcaaacagtcgatggtgatatcagcacctgcgtcagcgtggcggaagattcacaggcgtggccgctggtcaccagcaccaacgataactgccttggcagcgactgcccgatgtataaagattgctttgtggtcaaagcacgcaaaaaagcgatggacgccgatgtggtggtggtgaatcatcatctgtttctggcggatatggtggtgaaagagagcggttttggcgaactgatcccggaagcggacgtcatgatcttcgacgaagcccaccagctgcccgacattgccagccagtattttggtcagtcactctccagtcgacaactgctcgacctggcaaaagacatcaccatcgcctaccgcaccgaattaaaagacacccagcagttacaaaagtgcgcggaccgtcttgcccagagcgcgcaggattttcgtctgcaactcggtgagcctggttatcgtggcaacctgcgcgaactgttagctaatccgcaaattcaacgggcgtttttactgctcgatgacaccctggaactttgttatgacgtggcgaaactgtcgctggggcgttccgccttgctggatgcagcatttgagcgcgccacgttgtatcgcacgcggctgaaacggctaaaagagatcaatcagccgggctacagctactggtacgaatgcacttcgcgccattttactctggcactcacgccgctcagcgtggcggataaattcaaagagttaatggcgcaaaaacccggtagctggatctttacctcagcaacgctgtcggtgaatgacgatctgcatcattttacctcgcggcttggcattgaacaggcagagtcgttgctgttacccagcccgtttgattacagccgccaggcgttactctgtgtgccgcgcaacctgccgcaaaccaatcaaccgggctccgcacggcaactggcggcaatgttgcgaccgatcatcgaagctaacaacggtcgttgttttatgctttgtacctcgcacgccatgatgcgcgatctggccgagcagttccgcgctaccatgacgcttcccgttttgttgcagggggaaaccagcaaagggcaactgttgcagcaatttgtcagcgccggtaacgcgcttcttgtggcaaccagcagtttctgggaaggggtggacgtgcgtggcgatacattgtcattggtgattatcgacaaattgccgtttacctcgccggatgatccactattaaaagcacgcatggaagattgccgtttgcgcggtggtgatccgttcgatgaagtacaactgccggatgcggtcattactctcaagcagggggtagggcgattgattcgcgacgccgacgatcgcggcgtgttagtgatttgcgacaatcggctggtgatgcgcccttacggcgcgacgtttctcgccagtctgccgccagcgccgcgcacccgtgacattgcccgtgcggttcgtttccttgcgataccatcctccaggtaa

SEQ ID NO: 6315 - DNA, 426 bp, Escherichia coli
atgaccatcattgccggccttcccgttgaatataacgatcgctttattcgtggaattgcggtgttcgcaccgtggcgtaaaacgcctgggatctaccatcagagtcatggtgcatgtctgggccgtcgttccagaaccatcacggtggtcgatgaacaaccggaaggtatggatatggacccgacctgttcactgtttacgacagggcaatgtctgggagaacccgacctgctggcgtcggcccgtcgcttacaatttttttcacatcagtactcgattgctgtgctgatggcaaatgcccgtggtaacagtgcactatgggatgaacatggtcgtctcatcgttcgcgccgatcgtggttcattattgttagtcggtcagcgttcatcacagggttggcaaggcgatatcattccattacgctag

SEQ ID NO: 6316 - DNA, 1266 bp, Escherichia coli
atgaagacattcttcagatactttctttttttagcactgtgctcttgttgttatacagcaagtgttggtgcagctaataacgtcagctatgttgttgggaataatgccggtgttggtccatcagaccaaaaatggaaagaaacaggtcccaatgcagatatcatcgtcaaattccggtatggctcaggcaccaataatttagttttttataaaccaacccaacttagcccaaccggggtgtcattaaaatgggcacagttagattccgcttcaggtggcggctttctttactgtaacagaagtggtaacgcaagcggcacgccaatgagtattgaaaataaaatggttgattccggtaaaagttatggtgggcataaactctttaagacatctgtcccaggcctgtattacacattagcaatatcaaacatttggtcaacatatacatccactgatatcaacccatcaggcatgtatattggcgattctacagaacaatattttaactggcgtggcgaaagcgagcaaacactatattggtcttgcaacaacgcgaatagcaccaaaaaatactgggccgttggtggcgttatgcaaacgctcacgattgaattttataccgataccaactttaacccgacaacgaaccaacaggtaacattatccagaacagataattatctctactcattcaaaggatatggtgttggcattggtatcaatgaacacagctattttcttaaaatcgactttgacctgacagatatcatattaacaaaccctacctgttttactgcggcgcttagtggtccaacggtaagtggttcaacggttaaaatgggtgattatagccctgcgcaaataaaaaatggcgcaacagcggttccttttgatatcacgctacagaactgtattcgtgttcgcaatatagaaacaaaacttatgtcaaacaaggtgggcagtgtaagcaaagaacttctggctaacacactcacaggaaataacgcagcaaaaggcgttggagtactgattgaaggtttaaaaaacactaaaagtgcacaaatggtactgaaaccaaatgattcaacgtctgtttataaagattacgaaacagaagatgacactaccggaggaatttacccggataaaggaaacggtatctcacaacctcttcatttccaggctacattaaaacaagacggtaatattgctatagaaccgggggattttaaagccaccagcacttttcaggttacctacccctga

SEQ ID NO: 6317 - DNA, 1401 bp, Escherichia coli
atggctaagacgttatacgaaaaattattcgacgctcacgtagtgtacgaagccgaaaacgaaaccccgctgttatatatcgaccgccacctggtgcatgaagtgacctcaccgcaggcgttcgatggtctgcgcgcccacggtcgcccggtacgtcagccggggaaaaccttcgccaccatggatcacaacgtctctactcagaccaaagacattaatgcctgcggtgaaatggcgcgcatccagatgcaggagctgatcaaaaactgcaaagaatttggcgtcgagctgtatgacctgaatcacccgtatcaggggatcgtccacgtaatggggccggaacagggcgtcacattgccggggatgaccattgtctgcggcgactcacataccgccacccacggcgcgtttggcgcactggcctttggtatcggcacttccgaagttgaacacgtactggcaacgcaaaccctgaaacagggtcgtgcgaagaccatgaaaattgaagtccagggcaaagccgcgccgggcattaccgcgaaagatatcgtgctggcgattatcggtaaaactggtagcgcaggcggcaccgggcatgtggtggagttttgcggcgaagcaatccgtgatttaagcatggaaggtcgtatgaccctgtgcaatatggcaatcgaaatgggcgcgaaagccggtctggttgcaccggacgaaactacctttaactatgtcaaaggccgtctgcatgcgccgaaaggcaaagatttcgacgacgccgtcgcctactggaaaaccctgcaaaccgacgaaggcgcaactttcgataccgttgtcactctgcaagcagaagagatttcgccgcaggtcacctggggcaccaatccaggccaggtgatttccgtgaacgacaatattcccgatccagcttcgtttgccgatccggttgaacgcgcgtcggcagaaaaagcgctggcctatatggggctgaaaccgggtattccgctgaccgaagtggctatcgataaagtgtttatcggttcctgtaccaactcgcgcattgaagatttacgcgcggcagcggaaatcgccaaagggcgaaaagtcgcgccaggcgtgcaggcactggtggttcccggctctggcccggtaaaagcccaggcggaagcggaaggtctggataaaatctttattgaagccggttttgaatggcgcttgcctggctgctcaatgtgtctggcgatgaataacgaccgtctgaatccgggcgaacgttgtgcctccaccagtaaccgtaactttgaaggccgccaggggcgcggcgggcgcacgcatctggtcagcccggctatggctgccgccgcggctgtgaccggacattttgccgacattcgcaacattaaataa

SEQ ID NO: 6318 - DNA, 570 bp, Escherichia coli
atgaaagtaagaaacccagaacagattagtatctctgctagtaataccactaaagatccaggccttactcattctcagattatgaggatgtttaacctggtcaaaaagaccgagaatatgaatctctttgaagcgctatgggagacgttacgcaatctcttccggtcagataaacattcccaggctgcggcaaggcaaattctgaaggatgcattttatttccataatagtgatgactactcaaaatactttaccggggctgtcgacggggatgcgcgtgataagtttacccactggctgataaattttaataaactcaaagaacatgcaatagatccggaaaatatggccgcgaaggcctcactctcgccaaaagatacgttaagagtcagtttttttattggcgatgaggcgatatttactctggagttgcagatgaaagagaacaccaggaccgggtgcattgatctgagtaatgcttactttaacggggttgtcatttgtggtattgaccgtctcgaggttgacctgagcaatgctgaaatgaacaatagcagatggtatgactga

SEQ ID NO: 6319 - DNA, 699 bp, Escherichia coli
atgttaaaactgactgatatcacctggctttaccaccatttgccgatgcgttttagcttaacggtggaacggggcgagcaggtggcgatcctcgggccaagcggcgcgggtaaaagtaccctgctgaatttgatcgccggttttctgacgccagccagcggttcgctgattatcgacggcgttgatcacaccactacgccgccgtcacgccgtccggtgtcgatgctgtttcaggagaacaacctgttcagtcacctgacggtcgcgcagaacatcgggctggggctaaatccggggttgaaactgaacgcggcacagcaggggaaaatgcacgcgattgcccgtcagatggggattgataatttaatggcgcggttaccgggcgagctttccggcggtcagcgacagcgcgtggcgttagcgcgttgtctggtacgcgaacagccgattttattgctcgatgaaccgttctctgcgctcgatccggcgctacgtcaggagatgctgacgctagtgagcacgagctgccaacagcaaaaaatgacgctattgatggtgtcgcacagtgtggaagatgtggcgcggatcgccacgcgctcggtggtggtcgccgacgggcgcatcgcctggcagggtaagactgatgagttgttgagcggtaaggcgagtgcttcggcactattggggattacgggttaa

SEQ ID NO: 6320 - DNA, 765 bp, Escherichia coli
atgcaagcattgctggaacactttattacccaatccaccgtgtattcattgatggcggtggtgttggtggcctttctggagtcgctggcgctggtcggtttgattttacccggtacggtgctaatggcggggctgggggcgctgattggcagtggcgagttaagtttctggcacgcctggctggcagggatcgtcggttgcctgctgggcgactggatctctttctggctgggctggcgttttaaaaagccattgcatcgctggtcatttctgaagaaaaacaaagcattactcgataaaactgaacatgcgttgcatcaacacagcatgttcaccattctggtcggtcgctttgttggcccgacgcgtccgctggtgccaatggtggcgggaatgctggatctcccggtggcaaaatttattacgccgaatattatcggctgcctgctgtggccaccgttttacttcctgccggggattctggcgggtgcggcgatcgatattcctgccgggatgcagagcggtgagtttaaatggttgctgctggcgacggcggtatttttgtgggttgggggctggctgtgctggcggttatggcgcagtggcaaagcaaccgatcgtttaagtcattatttgtcgcgcggtcgtttgttgtggctgacgccgttgatttctgccatcggcgtggtggcgctggtggtgttaattcgccacccgttgatgccggtgtatatcgatattttgcgtaaagtggttggggtttag

SEQ ID NO: 6321 - DNA, 1320 bp, Escherichia coli
atggatatctgctcccgaaacgagaaattagcgattagaagaccagcgatactggttgcactggcacttttactgtgtagttgtaaaagcacgcctccagagtccatggtgacaccaccagcgggttcaaagccaccagccacgacgcaacaatcgtcacaaccgatgcgtggcatctggctggccacggtgtctcgcctcgactggccaccggtttcctcggttaacattagtaaccccaccagccgggcacgtgtacaacaacaggcgatgatcgacaaactggatcatctgcaacgtctcggcataaacacggtcttttttcaggtcaagccggatggtaccgccctgtggccatcgaaaattttgccgtggtccgatcttatgaccggtaagattggtgaaaatccgggttacgatccgctgcaattcatgctcgacgaagcccacaagcgtgggatgaaagtacacgcatggtttaacccctatcgcgtatcggttaatacgaagtccggtactatcagggaactgaatagcaccctgtctcaacaaccggcgagcgtctatgtgcaacaccgcgactggatcagaacgtccggcgatcgctttgtcctcgacccgggcatacctgaggttcaggactggatcacatcaatagtcgcagaagtggtttcccgctatccggtagatggcgtgcagtttgacgactatttctatactgagtcaccagcttcacggctaaatgataacgaaacgtaccgcaaatacggcggcgcatttgcgtcaaaagcagactggcggcgcaacaatactcagcagttaattgcgaaggtatcgcacaccattaaaagcattaagccggaagtcgaatttggcgttagcccggcaggcgtgtggcgtaaccgatcacacgatccgctcggttccgatacccgaggcgcggcagcctatgacgaatcctacgctgatacccgtcgatgggtggaacaagggttgctggattacattgctccccaaatatactggccattctcacggagtgccgcgcgttatgacgtgttggcaaaatggtgggcggatgtcgttaaaccgaccaggacccgcctgtatatcggtatcgccttctataaagtaggagaaccttcaaagatagagccagactggatgattaacggcggcgtaccggaactgaaaaagcagctcgatcttaacgatgccgtgccagaaattagcggcacaatcttgttccgtgaggactatctgaataagccacagactcaacaagcggtcagctatctgcaaagtcgttggggcagttaa

SEQ ID NO: 6322 - DNA, 1383 bp, Escherichia coli
atggagatgtattttaaaagaatgaaagatgagtggaccgggcttgtcgaacaagcagatccgctcattcgtgctaaagccgcggaaattgccgttgcgcatgctcattatctgagtattgagttttatcgaattgtccgcatcgacccgcatgccgaagaattcttgagtaatgaacaagttgagcggcagttgaaaagtgcgatggaacgctggattattaacgtgctttctgcccaggttgacgatgtcgaaaggctaatacaaatccagcataccgtcgcggaagtgcatgcccgcataggaactccggtagaaattgtcgagatggggtttcgggtgctgaaaaaaatcctctatccggtaatcttctcttcggattattccgccgcagaaaaacttcaggtctaccatttctcgattaacagtattgatatcgctatggaagtgatgacccgcgcgtttacctttagtgacagtagtgcctcaaaggaagatgaaaactatcgtatcttctcgttactagaaaacgccgaagaagaaaaagaacggcaaatagcctcaatactttcatgggaaatagatattatctataaagtcctgctggattctgatttgggcagtagtttgcctttaagccaggctgattttggcctgtggtttaaccataaaggtcgacattattttagcggcattgccgaagtgggccatatctcccgtctgattcaggatttcgacggtattttcaatcaaaccatgcgtaacaccaggaatttgaataacagaagtctgcgggtgaaatttttattacagataagaaataccgtatcgcaaattattaccttgttgcgtgaattgtttgaagaagtatcgcgccacgaagtcggtatggatgtactgacgaaattacttaaccgccgtttcctgccgacgatcttcaaacgcgaaattgcccatgccaaccggaccggtacaccgctgtcagtgctgattattgacgttgataaattcaaagagattaacgatacgtggggccataacactggcgatgaaattctgcgtaaagtctctcaggccttttatgacaacgtccgcagtagtgattatgttttccgctacgggggcgatgaatttatcattgttttgactgaagcttcggaaaacgaaacgttacgtaccgcagaacgtattcgcagtcgggtggagaaaaccaaactgaaagccgcaaacggcgaagatattgccctctcactttccatcggtgccgccatgtttaatggtcatcctgactatgagcgcctcattcaaatagccgatgaagctctgtatatcgccaaaagacgaggtagaaaccgtgttgaactctggaaagccagtctttag

SEQ ID NO: 6323 - DNA, 2400 bp, Escherichia coli
atgaagctaaccgatgaggataatgccgccgatggcatttttttccccgcccttgagcaaaatatgatgggtgcggtgttaattaacgaaaatgatgaagtgatgtttttcaaccccgccgcagagaagctctgggggtacaaacgtgaagaagtcattggcaataacattgatatgctgattccgcgggatttgcgtcctgcgcatcctgaatacattcgtcataaccgtgaaggcggtaaagcgcgcgtcgaggggatgagtcgggagctgcagctggagaaaaaagacggcagtaaaatctggacccgttttgcgctatcgaaagtgagcgccgaggggaaagtttattacctggcgctggtacgggatgccagcgtagaaatggcgcaaaaagaacagacccgacaattgattattgccgttgaccatctcgaccgaccggtgattgtcctcgatccggaacgccatattgtgcagtgcaatcgcgcatttaccgaaatgtttggttactgcattagcgaagccagcggtatgcagcccgattcactccttaacattcctgaattccctgccgataaccgcattcgtttacaacagttgctttggaaaaccgcccgcgatcaggacgaatttctgctattgacgcgcaccggtgaaaaaatctggattaaagcctctatcagcccggtttatgacgtgctcgcgcatctgcagaacctggtaatgaccttctcggatatcaccgaagaacggcaaatccgccagcttgaaggcaatattctcgccgccatgtgcagcagcccgccatttcatgaaatgggggaaatcatttgtcgtaacatcgaatctgtactcaacgaatcgcatgtttcgctgttcgcgctgcgcaacgggatgccgatacactgggcgtcatcttcgcacggtacagaagttcaaaatgcgcaaagctggtcagcgaccattcgtcagcgtgatggcgcgccggcggggatcctgcaaattaaaacctcgtcaggagcagaaaccagcgcctttatcgaacgcgtggcagatatcagccagcatatggccgcgctggcgctggaacaggaaaaaagccgtcagcatattgaacaactcatccaatttgatccgatgaccggtctgccaaatcgcaataacctgcacaattacctcgatgacctggtcgacaaagccgtctctccggtggtgtatctcatcggtgttgaccatattcaggatgtgattgatagccttggctatgcgtgggccgatcaggcattgctggaagtggtcaatcgctttcgtgaaaaactcaaaccggatcaatatctctgtcgtatcgaaggtacgcagtttgtcctcgtgagcctcgaaaacgacgtcagtaacattacgcagatcgccgatgagctacggaatgtggtcagcaagccgataatgattgacgataaaccattcccgctcaccttgagcattggcatcagctacgacgtgggtaaaaaccgcgattacctgctctccactgctcacaatgcaatggattttattcgcaaaaatggcggtaacggctggcagttcttcagcccggcgatgaacgaaatggtaaaagagcgtttggttttaggcgcggcgctgaaagaagcaattagcaataaccaactgaaactggtttaccagccacaaatcttcgcagaaacgggtgaactgtacggcatcgaagcccttgctcgctggcacgatcccctgcatggtcatgtgcccccttcacggtttattcctctcgcagaagagatcggtgaaatagaaaatattggacgctgggtcatcgcggaagcttgtcgtcagttagcagaatggcgtagccagaatattcatatcccggcgttatccgttaacttgtcggcgttgcactttcgcagtaatcagctgcctaatcaggtgtctgatgcaatgcaagcctggggtattaacggccaccagctgacggtggaaatcacggaaagcatgatgatggaacacgataccgaaatctttaaacgcattcagatcctgcgcgatatgggcgtgggtttatcggtagatgattttggcacgggcttttccggattatcccgcttagtcagtcttccagtaacggaaatcaaaattgacaaaagttttgtcgatcgttgtctgaccgaaaaacgcatccttgccttacttgaagccattaccagcattgggcaaagccttaatttaaccgtcgtggcggaaggcgtcgaaaccaaagagcaatttgagatgctacgcaagatccactgtcgcgttattcagggatatttcttttcccgccccctacccgccgaagaaattccaggctggatgagcagtgtgttaccgctgaaaatctga

SEQ ID NO: 6324 - DNA, 582 bp, Escherichia coli
atgtcggataccaccgaactggttgatttagccgtgatcttccctgatctggagatcgaactgaaatacgcctgcgctgataacatcacaggtaaagctatttatcagcaagcgcgttgtctgttacacaaggatgcgattaccgcgctggcgaaaagtatcagtatcgcccagctgtcaggcttacaactggtgatttacgatgcgtatcgcccacaacaagcacaggcgatgttgtggcaagcctgcccagacccgcaatatgttgttgatgtggcggtcggttctaatcacagccgtggcacggcgatcgacctgacgcttcgtgatgagcacgggaacatactggatatgggtgcagagttcgatgaaatgcacgaacgttcccatgcttatcacccttccgtcccgccagccgctcagcgcaatcggctgttgctgaatgcgattatgactggcggtggctttgtcggtatcccgagcgaatggtggcacttcgaattaccccaggcagcgagttacccactactcgctgatcaattcacctgttttatatcccctggcacacagcacgccagttaa

SEQ ID NO: 6325 - DNA, 252 bp, Escherichia coli
atgaagagatcgattttgtttcgtcctacattgctcgcgatcgtccttgccacaacaatgccggttgcgcacgccgccgtaccgaaagatatgctggtgatcggtaaagctgccgacccacaaaccctcgacccagcggtgacaattgataataacgactggacggtgataaaggctcaaccgacgttgaaggcgatctggcaagtagctggaaagcgtctgacgatcaaaaagagtggacgttcaccctga

SEQ ID NO: 6326 - DNA, 1110 bp, Escherichia coli
gtgaggtttacccttagccagccattcgcaccgttcctctacacgctggcgaatgacggtgcatccattatcaatccggcggtcttaaaggagcatgcggcggatgatgcccgtggtttcctcgcgcaaaataccgctggctccggaccgtttatgctgaaaagctggcaaaaaggtcagcaattagttctggtgccaaatccgcattaccccggcaataaaccgaatttcaaacgggtatcggtaaaaattatcggtgaaagtgcttcccgtcgcctgcagctctcccgtggcgacattgacattgccgatgcgctgccggtggatcaactcaacgccctgaagcaggaaaacaaagtcaacgtggcagagtatccgtcactgcgcgtcacctatctgtatctgaataacagcaaagcgccacttaatcaggcggatctgcgtcgggccatttcctggtctaccgattatcagggtatggttaacggcattctgagtggtaacggaaaacaaatgcgcggcccgattccggaaggcatgtggggatacgatgcgacggcaatgcaatacaaccatgacgaaacgaaagccaaagccgaatgggataaagtgacgagcaaacccaccagcctgacgtttctctattctgataatgatccgaactgggagcctattgctctggcgacacaatccagtctcaacaagctgggcatcaatgtgaagctggaaaagctggcgaacgccaccatgcgcgacagagtgggtaaaggtgattacgacatcgcgattggcaactggagtccggattttgccgacccgtatatgtttatgaattactggtttgagtccgacaaaaaaggtctgccgggtaaccgctcgttctatgaaaacagtgaggtcgataagttactgcgcaatgcgctagcgaccaccgaccagacgcagcgtacccgggactaccagcaggcacagaaaatcgtcattgatgacgctgcttatgtgtacctgttccagaaaaactatcaactggcgatgaacaaagaggtgaaaggctttgtgttcaatcccatgctggaacaggtcttcaatatcaatactatgagtaaataa

SEQ ID NO: 6327 - DNA, 1023 bp, Escherichia coli
gtgaccttctggagtattttacgccaacgctgctgggggctggtgctcgtggtggcgggcgtctgcgtgattacgtttattatctcgcacctgatccccggcgatccggcgcggttactggcgggtgaccgcgccagcgatgctatcgtggaaaatattcgccagcaactggggctggaccagccactgtacgtacagttttaccgctacgtcagcgatctgtttcagggtgacctgggaacatccattcgtaccgggcgtccggtgctggaagagttgcgtatatttttcccggcgacgctggaactggcattttgcgcgctgctgctggcactcctgattggcatcccgttgggcatactctctgcagtctggcgaaatcgctggctggatcatctggtgcgaataatggccattaccggaatctccacacctgcgttctggcttgggctgggcgtcattgtgctgttttatggtcatctgcaaattcttcccggcggcggaaggcttgatgactggctggatccaccaacgcacgttaccggcttttatctgctcgatgcgctgcttgaaggcaacggtgaggtcttcttcaatgcgttgcaacatcttatcttaccggcattaacgctggcgttcgttcacctgggaattgtcgctcgccagatccgctcagcgatgctggaacaattgagtgaagattacattcgtaccgcccgggccagcggcttgcccggctggtatatcgttttatgttatgcgctacccaatgcgttgatcccctcgattaccgtattgggactggcactgggcgatttgttgtatggcgcagtgctcaccgaaaccgtttttgcctggcccggaatgggtgcatgggtagtaacatcaatacaggcgctcgacttcccggcagtgatgggctttgccgtcgtggtttcatttgcttatgtgctggtcaacctggtggtggatttgctctatttgtggattgatccgcgtatcggacgtggaggtgatgaatga

SEQ ID NO: 6328 - DNA, 897 bp, Escherichia coli
atgatgctaagcgaggaaacgtccgtcgtacgcccaccaaaacaaacgcgatttaacggtgcaaaactggtatggatgctgaaaggcagcccgctcaccgtgaccggcgcagtcatcattgtattaatgctattgatgatgattttttcaccgtggctggcgacgcatgatcccaacgccattgatttaaccgcccgccttttgccgccttctgcggcgcactggtttggcaccgatgaagtgggacgcgatctgtttagccgcgtactggtcggcagtcagcaatcaattctcgccggattagtggtggtcgccattgcaggtatgatggggtcgctactcgggtgtctatccggtgtgcttggcggacgcgcagacgcgatcatcatgcgcatcatggacattatgctgtcgattccttcgctggtgctgacaatggcactggcagccgctctcgggccgagtttgtttaacgccatgctggcgattgctatcgtgcgaatcccgttttatgtgcgcctggcgcgggggcaaacattagttgtccgccagtacactttcgttcaggcggcgaaaacctttggtgcgtcgcgttggcatctgatcaactggcatattttacgtaactccctgccgccgctgattgtgcaggcatcgctggatatcggtagcgcgattttaatggccgccacgttgggatttattggccttggtgctcaacaaccgagtgctgaatggggggcgatggtggcgaatggtcgcaactatgtgctcgatcaatggtggtattgcgcatttccgggggcagcgattttgcttaccgccgtcgggtttaatctctttggcgatggtattcgcgatctgcttgacccgaaagcaggaggaaagcagtcatga

SEQ ID NO: 6329 - DNA, 987 bp, Escherichia coli
atgacccaacccgttctggacattcaacaactgcatttgagtttccccggttttaacggcgacgttcacgcgctcaacaatgtgtcattgaaaatcaaccgcggtgaaattgtcggtctggtgggagaatccggctcgggtaaatcagtcactgcaatgttgattatgcgtctgctaccgacgggcagttattgcgtacatcggggacatatttcactgctgggagaagatgttcttaacgctcgggaaaagcagcttcgtcagtggcgcggcgcacgagtggcgatgatctttcaggaaccgatgaccgccctcaatccgacacgtcgaataggtcttcagatgatggacgtgatccgccatcatcaaccaataagtcgtcgggaagccagagctaaagcgattgccctgctggaagagatgcaaatcccggatgccgtggaagttatgtcgcgctatccgtttgagctttcaggtggtatgcgccagcgggtaatgattgcgctggcattctcctgcgagccgcaattgattattgccgacgaaccgactacggcgctggacgtcacggtacagttgcaggtactgcgtctgcttaaacataaagcccacgccagtggaactgcggtactgttcatcagccatgatatggccgtggtgtcgcaactgtgcgatagcgtttacgtaatgtatgccggaagcgtgattgaaagcggcatgacggcagacgttatccatcatccccggcatccgtataccattggtttgctgcaatgcgcaccggaacatggaataccgcgccagccattacccgccattccagggacggtaccaaacctcacccatttgcctgactgctgcgcttttcgcgatcgttgctatgcggcaggtgcgcagtgtgaaaacgtcccggcgctaacagcgtgtggtgacaacaaccaccgctgcgcctgttggtatcctcagcaggaggtcattagtgtctga

SEQ ID NO: 6330 - DNA, 927 bp, Escherichia coli
gtgtctgacacgttattaacgttacgcgacgtccatatcaatttcccggcccgaaaaaactggcttggtaaaactacggaacatgttcatgccatcaatggtattgatttacagatccgtcgtggtgaaaccttagggatcgtcggtgagtcaggttgcggcaaaagcaccctcgcacagcttttaatgggtatgctgcaaccgagccacgggcagtacatccgttcaggatcacaacgcattatgcagatggtgtttcaggacccgctctcttcgcttaatccgcgcttaccggtgtggcgcatcatcacggaaccgctctggattgctaagcgtagtagtgaacaacagcggcgagcgttggcagaggagctggctgtgcaggtgggtattcgtccggagtatctcgaccgcttgcctcatgcgttctcaggcgggcagcggcaacgtatcgccattgccagagcactctcttcgcagcctgacgtgattgtgcttgatgaaccaacctcggcgctggatatctccgtgcaggcgcagatcctcaatttactggtaacgctacaggaaaatcgcgggctgacttatgtgctgatttcacacaatgtctcggtgatacgtcatatgagcgatcgggtggcggtgatgtatctcggacagattgtggaattaggagacgcgcaacaggtgctgacagctccggcacatccatacacccgattattgctggattccctccccgccattgataaaccgctggaggaagaatgggcattacgtaaaacggatctaccaggaaaccgcacgttgccacaaggctgttttttccgcgaacgctgccctctggcaacccacggatgtgaagtccggcaatcattagcaataagggaggacggacgtgagatccggtgctggcgggcgctgtag

SEQ ID NO: 6331 - DNA, 1698 bp, Escherichia coli
atggaaccaaaaacaaaaaaacagcgttcgctttatatcccttacgctggccctgtattgctggaatttccgttgttgaataaaggcagcgccttcagcatggaagaacgccgtaacttcaacctgctggggttactgccggaagtggtcgaaaccatcgaagaacaagcggaacgagcatggatccagtatcagggattcaaaaccgaaatcgacaaacacatctacctgcgtaacatccaggacactaacgaaaccctcttctaccgtctggtaaacaatcatcttgatgagatgatgccagtcatttacaccccaaccgtcggcgcagcctgtgagcgtttttctgagatctaccgccgttcacgcggcgtgtttatctcttaccagaaccgccacaatatggacgatattctgcaaaacgtgccgaaccataatattaaagtgattgtggtgactgacggcgaacgtattctggggcttggtgaccagggcatcggcgggatgggcattccgatcggtaaactgtcactctataccgcctgtggcggcatcagcccggcgtatacccttccggtggtgctggatgtcgggacgaacaaccaacagctgcttaacgatccgctgtatatgggctggcgtaatccgcgtatcactgacgacgaatactatgaattcgttgatgaatttatccaggctgtgaaacaacgctggccggacgtactgttgcagtttgaagacttcgcacaaaaaaatgcgatgccgttacttaaccgctatcgcaatgaaatttgttcttttaacgatgacattcagggcaccgcggcggtaacggtcggcacactgatcgcagccagccgcgcggcgggtggtcaactgagcgagaaaaagattgtcttcctcggcgcaggctctgcggggtgcgggattgccgaaatgatcattgcccagactcagcgtgaaggattaagcgaggaaacggcgcggcagaaagtctttatggtcgatcgctttggcctgctgaccgacaagatgccgaacctgctgcctttccagaccaaactggtgcagaaacgcgaaaacctcagtgactgggataccgacagcgatgtgctgtcactgctggatgtggtgcgcaatgtaaaaccagatattctgattggcgtctcaggacagaccgggctgtttacggaagagatcatccgtgagatgcataaacactgtccgcgtccgatcgtgatgccgctgtctaacccgacttcacgcgtggaagcaacaccgcaggacattatcgcctggactgaaggtaacgcgctggtcgccactggcagtccgtttaatccagtggtatggaaagataaaatctaccctatcgcccagtgtaataacgcctttattttcccgggcatcgggctgggtgttattgcttccggcgcgtcacgtatcaccgatgagatgctgatgtcggcaagtgaaacgcttgctcagtattcgccgctggtcctgaacggcgaaggtctggtactaccggaactgaaagatatacagaaagtctcccgcgcaattgcgtttgcggttggcaaaatggcgcagcagcaaggcgtggcggtgaaaacctccgccgaagctctgcaacaggccattgatgataatttctggcacgccgaataccgcgactaccgccgtacctccatctaa

SEQ ID NO: 6332 - DNA, 1011 bp, Escherichia coli
atgaaggctgcagttgttacgaaggatcatcatgttgacgttacggataaaacactgcgctcactgaaacatggcgaagccctgctgaaaatggagtgttgtggtatatgtcataccgatcttcatgttaagaatggcgattttggtgacaaaaccggcgtgattctgggacacgaaggtattggtgtggtggcagaagttggcccaggtgtcacttcattaaaaccaggcgatcgtgccagcgtggcgtggttttacgaaggatgcggtcattgcgaatactgtaatagtggtaacgaaaccctctgccgttctgttaaaaacgccggatacagcgttgatggcgggatggctgaagaatgcatcgtggtcgccgattacgcggtaaaagtgccagatggcctggactcggcggcggccagcagcattacctgtgcgggggtcaccacctacaaagccgttaagctgtcaaaaattcgtccagggcagtggattgctatctacggtcttggcggtctgggtaacctcgccctgcaatacgcgaagaatgtctttaacgccaaagtgatcgccattgatgtcaatgatgagcagttaaaactggcaaccgaaatgggcgctgatttagcgattaactcacgcaccgaagacgccgccaaaattgtgcaggaaaaaaccggtggcgctcacgctgcggtggtgacagcggtagctaaagctgcgtttaactcggcagttgatgctgtccgtgcaggcgggcgtgttgtggcagtcggtctgccgccggagtctatgagcctggatatcccacgccttgtgctggatggtattgaagtggtcggttcgctggtcggcacgcgccaggatttaactgaagccttccagtttgccgccgaaggcaaagtggtgccgaaggtcgccctgcgtccgttagcggacatcaacacaatctttactgagatggaagaaggcaaaatccgtggccgtatggtgattgatttccgccgctaa

SEQ ID NO: 6333 - DNA, 1101 bp, Escherichia coli
atgaaattaaaaatagttgcggtggttgtaactggtttgttagctgcgaacgtagcacacgctgccgaagtctataacaaggatggtaataaactcgacctttatggcaaggttaccgctctacgttattttactgatgataagcgtgacgatggtgataaaacttatgcccgtctcggctttaaaggagaaacgcaaatcaatgatcaaatgattggttttggtcactgggaatatgattttaaaggctataacgatgaagccaacggctcgcgcggtaacaagacccgtctggcctatgcaggtttaaaaattagtgaatttggctctctggactatggtcgtaactacggtgtcggctatgacattggttcatggaccgatatgttgccagaatttggtggcgatacctggagtcagaaagatgtcttcatgacataccgtactaccggtgtggcaacctatcgcaactacgatttcttcggcttaattgaaggtctgaactttgccgcgcaatatcaaggcaaaaatgaacgcactgacaatggtcatctttatggtgctgactacacgcgtgccaatggtgacggtttcggtatctcctcaacttatgtttatgatggctttggtatcggtgcggtgtataccaaatccgatcggacaaatgcgcaggaaagagccgctgctaatcctctcaatgcctccggtaagaatgcagaactgtgggctacaggtataaaatatgatgccaacaacatctactttgcagctaattacgctgaaacattaaacatgaccacctatggcgatggttatatctctaacaaagcacaaagttttgaagtagtgacacaatatcaattcgacttcggcttgcgcccatcactcgcttacctgaaatcgaaaggcagagatctgggccgctacggcgaccaggacatgattgagtatatcgacgttggtgcgacgtatttcttcaacaaaaatatgtcgacctatgttgattataaaatcaacctgattgatgaaagcgactttacccgtgccgtagatattcgcaccgataacatcgtcgcaacgggaattacctatcagttctaa

SEQ ID NO: 6334 - DNA, 1260 bp, Escherichia coli
atgaccaatattaatacagcttgtgtaaaaaataatgccagttatcaattaaataacgcattacctaacaaagaaaccatctccagcaatttttgtgaacgactggcacaatggggtaataagtcgcttaataatggtgaagaaagagcaattgccgtggagcgaattaaagaagcttacaattcgaacatggcatctcttgatttgtcatatcttgatttgagtgagttaccccctatcccctcgacagttaacacgttaaatctggaaaacaattgtctcacttgtcttgactttactgacaatgccagcctcgtcaatatcaacctcagctttaataaaattaaaacgataacctttccaaatcaatcaaaactggaaaatatttatattgatcacaataatctggaaaatttggatttaaaaaatcagctttcattggttaacctggaagcgcaaaataacaacctgacaaaaattaatatttctgatagttataaactgaaatttcttaatcttgattataacaaactagcatcgctggatctctcccggcaagaatctctgattgagttaagtgcccatcacaacatgatcaatgaccttatattacacaatcaccccatagtggagaaaatcactttaaacgacaaccatattgcacatttaaacgcgaaaaccactacaaaactggaatatttaaacttaagcaataacaatttattgccaacagatgacattgatcaattaatatcatcaaaacatctttggcatgtattagttaacggcatcaacaatgatccacttgcccaaatgcagtactggactgcagtaagaaatataattgatgacactaatgaagtgaccattgatttatcttataacctggcaatcacaaatatcgataccagcgatgaacatcttgtagaagtaagcgagaattccgaaggaaatcatataaaagaaaatgactcaatgtctattcgttatagatcaaaatattattccagagagtacgccttaatagaagaagaaacaatattttctgacgcagaactaaaagctattctgcctatgcgtcgcatgtacggggttggtgactataagtcaaattcctcttctctaccctcacactcggggctaaaggacccaacgggcacacccgtctgttattatattcataatgaggataaaccttccttaggttttggtccaacatccaataattggttaagccaatcctttacaacagagttataa

SEQ ID NO: 6335 - DNA, 1257 bp, Escherichia coli
atgaaattcccttcaatatttaataaaataaatccacaatccatacagcaacatccagaaaaaaatgaacttaactggatgctcgaattaaatcaatggaaagcagaacgcatacttacaggtgaaatccatcgtccggaatgccgaaacgaagccgctaaaaggataaattgtgcttttttgtcgaaacagaatgatattgatttatcaggacttaatttaactacccaaccaccagggctgcaaaacttcacctctatcaatcttgataataaccaactcacacattttgatacaaccacctacgatagactcgtaaagcttagtctgaatagtaatgctcttgagtcaataaattttcctcaaggtagaaatgtaagcattacacatatatctatgaataataattctctcagaaatattgatatagatcggctttcatcaattacttattttagtgcggcacataatcaactagagtttgtgcaattagaatgttgcgaaaggctgcagtacctgaatctcagccacaatcaattaactgatattgtggcaggaaataaagatgaacttttactgctggatctatcccataataaactaacaagtttacataatgccttattccccaacttgaatacgttacttatcaacaacaacttgctttctgaaattaaaatattctttagcaacttctgcaatgttcagacattaaacgctgcgaacaatcagttggaaaaaataaaccttcatttcctgacttatctttcatctatcaaaagtttaaggctggacaataataaaataacccgcattgacactaagaatacatccgatattggaaatttattccccataataaaacagagcaaaaacttaaattttttaaatgtttctgggaagaacaattgccctactatgcagctcatgttatttaatttgttttccccagcacttaagcttaatactggcctggcaattctttcgcctggtgcatttgaagttcactctgacggaatagatgtggataacgaattgtttcactatactataaaaaaagcacataccccatataatttacacacttacaagacagaggaagttgtaaatcagatgaatataaaaattaaaaatatgacattagatgaaataaacaatacttactgtaataacgattattacaatgaggcgataagagaggaaccgatagactttctggacagatcgttttcctccagctcatggccttttcagtga

SEQ ID NO: 6336 - DNA, 3741 bp, Escherichia coli
atgagtaaacttttggatcgctttcgctacttcaaacaaaagggcgaaacctttgccgatggtcacggacaggtgatgcatagcaaccgcgactgggaggacagctatcgccagcgttggcagttcgacaaaatcgtgcgttccacccacggtgttaactgtacaggctcctgtagctggaaaatctacgttaaaaatggtctggtgaccagggaaatccaacagaccgactacccgcgcactcgccctgacctgcccaatcatgaacctcgcggctgcccgcgtggcgcaagttactcctggtatctctacagcgctaaccgtctgaaatacccgctcattcgtaaacgactgattgaactgtggcgcgaagccctcaagcaacacagcgatccggtactggcgtgggcatcgattatgaacgatccgcaaaagtgcctgagctacaaacaagtgcgtgggcgcggcgggtttatccgctccaactggcaggagctaaaccagctgattgccgctgctaacgtctggaccatcaaaacttacggcccggatcgcgttgccggtttctcgccgatcccggcgatgtcgatggtttcttacgccgccggaacacgttatctgtcgctgttaggtggcacctgtttaagcttctacgactggtattgcgacctgccgcccgcctcgccgatgacctggggcgagcaaaccgacgtaccggaatctgccgactggtataactccagttacatcatcgcctgggggtctaacgtaccgcagacacgtacgccggacgcccatttctttaccgaagtacgctacaaaggcactaaaaccatcgctattacccctgactactctgaagtggccaaattgtgcgaccagtggctggcaccgaaacaaggcactgatagtgccctggcaatggcaatgggccatgtcattttaaaagagtttcatctcgataatcccagcgattattttatcaactactgccgccgctacagcgacatgccgatgctggtaatgctggaacctcgcgacgacggcagctacgtacccgggcgcatgatccgcgcgtctgacctggtagatggactgggcgaaagcaacaatccgcagtggaaaaccgtggcggttaataccgcaggtgaactggtggtgccgaacggttcgattggttttcgctggggagaaaaaggcaaatggaatctggaatccattgccgccggtacggaaaccgaattgtcgttaactctgctcggtcaacatgatgccgttgcaggcgtggccttcccctactttggcggcattgaaaatccgcattttcgccgcgtaaaacacaatccggtcctggtgcgccaattgcccgttaaaaacctgacattagccgatggcaacacctgtccggtcgtcagcgtttatgatttggtactggcgaattatggcctcgatcgcgggctggaagatgaaaacagcgcgaaagattacgctgaaatcaaaccgtacaccccagcctggggtgagcaaattaccggcgtgccgcgccagtatattgaaaccatcgcccgtgaatttgccgataccgcccataaaacgcatgggcgttcgatgattattctcggtgctggcgtcaaccattggtatcacatggacatgaactaccgcgggatgatcaatatgctgatcttctgcggttgtgtcgggcaaagcggtggcggctgggcacactatgtcggtcaggaaaaactgcgcccgcaaaccggctggctgcctctggcttttgcgctcgactggaaccgaccaccgcgccagatgaacagcacctcgtttttctacaatcattccagccaatggcgctatgaaaaagtctctgctcaggagttactttcaccgcttgccgatgccagtaagtacagcggtcatctgattgatttcaacgttcgcgccgaacgtatgggctggctaccttctgcgccgcagttggggcgtaatccgctcgggattaaagctgaagccgacaaggccggattatctcccacagaattcaccgcccaggcgctgaaatcgggcgatttacgtatggcctgcgaacaacccgatagcggcagcaatcatccgcgtaatttgtttgtctggcgttctaacctgcttggttcctccggcaaaggccacgagtatatgcagaagtatctgctggggaccgaaagcgggattcagggcgaggaactcggtgccagcgacgggatcaaaccggaagaagtcgagtggcaaactgcggcgattgaaggcaagctcgacctgctggtgacgctcgacttccgcatgtccagtacctgcctgttctccgatatcgttctgcccaccgccacctggtacgaaaaagacgatatgaacacctcggatatgcatccgtttattcatccgctttctgcggcggtcgatccggcgtgggaatcacgcagcgactgggaaatctacaaaggtatcgccaaagcattttcgcaactgtgcgtgggtcatcttggcaaagaaaccgacgtggtattacaaccactgctgcatgactctccggcagaactctcccagccgtgtgaagtgctcgactggcgcaaaggcgaatgcgatctaatcccgggtaaaaccgcgcccaatattgtggcggtggaacgcgactaccctgctacctatgaacgctttacctcgctcgggccattgatggacaaacttggcaacggcggtaaagggatttcgtggaatacccaggatgaaatcgatttcctcggcaaactcaactacaccaagcgtgaaggcccggcacaggggcgtccgctgattgacaccgccattgacgcatcagaagtgattctggctcttgcaccggaaaccaacggtcatgttgcagtcaaagcgtggcaggcgctgggcgagatcaccggacgcgaacatacccatctggcgctgcacaaagaggacgagaagattcgctttcgcgatattcaggcgcagccacgtaaaattatctccagccccacatggtccggtctggaaagcgatcacgtttcctataacgcgggatacaccaacgttcatgagttaattccgtggcgcacgctgtcgggacgccagcagctctatcaggatcatccgtggatgcgtgcttttggtgaaagtctggtggcttatcgcccgcctatcgacacccgtagcgtcagtgaaatgcgccagataccgccaaacggcttcccggagaaagcccttaacttcctgacaccgcaccagaaatggggcattcactcaacctacagtgaaaacctgctaatgctgacgctctctcgcggtggaccgattgtctggatcagcgaaaccgatgcccgtgaactgaccattgtcgataacgactgggtggaagtgtttaacgccaatggcgcgctgacggcccgcgcggtggtcagccagcgtgtaccgccgggcatgaccatgatgtatcacgctcaggaacgcattatgaatattccaggttcggaagtaaccggcatgcgcggtggcattcataactcggtcacccgcgtttgtccgaaaccaacgcatatgattggcggttacgcgcagctggcctggggctttaactactacggcactgtcggctctaaccgcgacgaattcatcatgatccgcaagatgaagaacgttaactggctggatgatgaaggtcgcgatcaggtacaggaggcgaaaaaatga

SEQ ID NO: 6337 - DNA, 228 bp, Escherichia coli
atgccgcacatagacattaaatgttttccacgtgaactggacgaacaacaaaaagcagcacttgctgcagatattaccgacgttattattcgccatctgaacagtaaagacagttcgataagcattgctctacagcagattcaaccagaatcatggcaagctatctgggacgccgaaattgcgccccaaatggagacgctgataaagaaacctggttacagcatgtaa

SEQ ID NO: 6338 - DNA, 1977 bp, Escherichia coli
atgcagcttaatcatattgttaaaagtctgctaataacgggattattcaccaccagttctttgccactcctcgcggcggaagcccctaaagacgccaccgcagccacgcaacaagcaaacaatttactctacaaccagttgccgttttctgataacactgactttactgatgcccataaaggttttgttgcccctatccctcaagacgtgattaagggcgaaaaaggaaatgttatctgggatccacaacaatacgcttttattaaagaaggtgataaagcccctgatacggtgaatccaagtttatggcgtcaggcgcaactgataaatatcagcgggttattcgaagtaactgaaggtgtctatcagattcgcaatctcgatctatcaaatatgaccatcattgaaggcaaagagggtattaccatcgttgatccccttgtttcagcagaaacagccaaagtgggtatggatctctattacaaaaatcgcgacaaaaaaccggtagtagcggttatctacacacacagtcatgtcgatcactacggtggtgttcgcggcgtaattgatgaagctgacgttaaatcaggcaaagttaaaatctacgcgccagccggatttttggaggaagccgtttccgaaaatattatggctggcaatgtgatgagccgacgagccagttatatgtatggcaacttattgaaacctgatgttaaaggccaggttggcgcgggactgggaacaaccacttcagcaggaacggtcacgttgattgctcctactaactacatcaccaaaaccggacaaaaagaaactattgacgggttgacctatgatttcttgatggcgccaggctctgaagcgccttctgaaatgctgtggtttattgaagaaaagaaactgatcgaaaccgctgaagatgtcacgcacacccttcataacacctattcgctgcgtggggctaaaattcgccaaccgctgccgtggtcaaaatatattaacgaagctctcaatttatggggagataaagccgagattattctcgctcaacatcactggccaacctggggcaacgataacgtggtcaaactgcttaaaagccagcgtgatttgtatcgttacatcaatgatcaaactctgcgtatggcaaatcaagggatgacccgtgatgaaattgccgcaaactttaaactgccctcttcactggctaatacctgggcgaatcgcggctattacggttcggtaagtcatgacgtgaaagcaacttacgtgctttatctcggctggtttgatggtaaccccgcgacgcttgatgaactgccgccagaagaaggcgcaaaaaaattcgtcgagtatatgggcggtgctgatgccattttacagaaagccaaacaggattatgaccagggtaatttccgctgggttgcccaagttgttagtaaggtggtgtttaccgatccaaacaaccaggcagcgagaaatctggaagctgatgcgcttgagcagttaggctatcaggctgaatctgggccgtggcgtaatttctatctcactggcgcacaggaattgcgtaatggcgtacaaaaattaccaacaccaaatactgcaagcccagacaccgtgcgtgcgatgacgccggagatgttctttgattatcttgccgtccatattaatggtgagaaagcggcagatgccaaaaccgtgttgaatttcgattttggtgaagatggcggcacctataaagtggagcttgaaaatggtgttctcaatcataccgctggtgtagaggcttcggatgctgatgccactatcactctgtctcgtgttgtattgaacaaaattgtactgaaagaagagacgctgaaagaagccacggccaaagaagatgtcaaaattactggcaatgcggaaaaactcaacgagctgttaggttatatggataattttgaattttggttcaatatagtgacaccataa

SEQ ID NO: 6339 - DNA, 1050 bp, Escherichia coli
atggttattcgcggcatgacgattagtttgccatggtttgcttttatcaatgtcagttttgcattgataattttgctgcgccgtgttctgtttaatgaccttactccaccctggttaaatgaaaaaagccttatacattctattgatatatctgcaacgggtattctgctgatttgcagtggtttactactcatccctcggcaaaaaacattacctatccaggtgctattagttgccctgagcctgctatggtcatggtgtagttatcactttattgcgtactggacgctgcagtttgcttatccactatgtgtattattaatgcttagtggcgttatcgcactttatttccataccccatcattgctcgcatttgtcattcccttatggttcaccactccaatagcgagtcttatgcttaatcaacagatcaatattcattttgctgttgtatggtgtattttttcactggcgctatatggtgggcgactcattttgttacgttggtttgaagaagcatgggtacaaaacagttataacaaccagttaattaatcgccttgatgcattagcacatcgtgatcctttaactgggatagcaaaccgacgtgcaatgaacagtatcttacacgacgcgatagataacggcgggtcatttgctcttattatgctggatgtcgatttttttaaacgttacaacgacacttacgggcatcctgctggggatcgttgtctaatacaagttgccgacgctctacagcgttcaactcgccagtcggaggatgttgttgtccgttatggtggcgaagagtttgtcatcatactttttaatgcaacattgccggaagcagagacggtagcagccagagtgaagcaagaacttaaactggcagctatcccgcatcaggcatctgctgttaatgcattcgttacggttagtcaggggattacctgttctgctcccgcaaaaacggctgaacaaattatttcagatgccgacgctgcgttataccgggcgaaagaaagtgggcgaaatcgatgggaaaaataa

SEQ ID NO: 6340 - DNA, 666 bp, Escherichia coli
atgcctggaacggaaaaaatgaaacatgtcagtttgactctgcaggttgagaacgacctgaaacatcagcttagtattggcgcactaaaacctggcgcacgcctgattactaaaaatctggcggagcaattaggtatgagtattacacctgtgcgtgaagcattattacgtctggtttcggtgaatgcgctttctgtcgcaccagcgcaagcatttacagttccggaagtggggaaacgtcaattagacgaaatcaatcggatccgctacgagctggaattaatggcagttactctggctgttgaaaacctcaccccgcaagacctggcggaactagaggaattgctcgagaaattacagcaggcgcaagaaaagggcgacatggaacaaatcattgatgcgaacaggctatttcgcttagcgatttatcatcgttcaaatatgcccatcctgtgtgagatgattgagcaactgtgggtcaggatgggacctggtttacattatctctatgaagcgatcaatccagcggaattacgggagcgtatagaaaactatcatctattactcgccgcgttaaaagcaaaagacaaagagggatgcagacattgtcttgctgaaattatgcaacaaaatattgctattttatatcagcaatacaatcgttaa

SEQ ID NO: 6341 - DNA, 1038 bp, Escherichia coli
atggggcaacaaaagcagcgtaaccgccgttgggttctggcctcgcgtccgcatggcgcaccggttccggagaatttccgtcttgaagaagatgatgtcgccacaccgggtgaaggacaagtgttactgcgcacagtttatttgtcactggacccgtatatgcgtggacgtatgagcgatgagccatcttattcaccgccggttgatattggcggcgtgatggtcggcggtacggtgagccgtgtcgtggagtcgaatcatcctgattatcagcctggcgactgggtactgggctacagtggatggcaggactatgacatatccagtggtgatgaactggtgaaacttggcgatcatccgcaaaatccatcgtggtcgctgggtgtgctggggatgccaggctttactgcttatatggggctgctggatatcggtcagcctaaagagggcgaaacgctggtggttgcggcggcgacaggtcctgtgggagcaacggtggggcaaatcggcaaacttaaaggttgcagggtggtgggggttgccggtggcgcggaaaaatgccgccatgctaccgaggtgttaggctttgatgtttgtcttgaccatcacgcggatgattttgccgaacaactggagaaagcgtgcccaaaaggtattgatatctattatgaaaacgtgggcggtaaagtatttgatgcggtgctaccgttacttaatacatctgcgcgcattcccgtctgcggcttagtgagcagctataacgctacagagctaccacccggtccggatcgtttacctttgttgatggctacggtgctgaaaaaacgtattcgcttgcaagggtttattattgctcaggattatggtcaccgcatccatgagtttcagaaggagatggggcaatgggtgaaagaggataaaatccactaccgcgaagaaattactgacggtttagagaatgcgccacagacgtttatcggcctgctgaagggtaaaaacttcggcaaagtggtgatccgcgtggcgggtgatgattaa

SEQ ID NO: 6342 - DNA, 1002 bp, Escherichia coli
atgagtaaagttggtattaacggttttggtcgtatcggtcgactggtgttgcgtcgattacttgaagtcaaaagcaacatagacattgtcgctattaatgatctcacttccccaaaaattctcgcctacctgctgaaacatgattcaaactacggaccgttcccctggagcgttgattttacggaagattcacttatcgttgatgggaaaagtatcgcggtttacgccgaaaaagaggctaaaaatattccgtggaaagcgaaaggcgcagaaatcattgtcgaatgtactggcttttatacctccgccgagaaatcgcaggcgcatctcgatgctggcgcgaagaaggtgttgatttccgcccctgccggtgaaatgaaaactatcgtttataacgtcaatgacgacactctggatggcaacgataccattgtttccgtggcgtcatgcaccactaactgtcttgcaccgatggccaaagccttgcacgacagtttcggaatagaagtcggcacgatgacgaccattcatgcctataccggcactcagtcactggtggatggtccgcgaggtaaagatctacgcgcttcacgtgcagcggcagaaaatatcattccccacactacaggtgcggcaaaagccattggtctggtgatcccggaactgagcggcaaactgaaaggtcatgcgcaacgcgtgccggtgaaaacaggttcggtcactgagctggtgtccattctcggaaaaaaagtgactgccgaagaggtgaataacgcacttaaacaagcaaccaccaataacgagtcatttggttataccgatgaagaaatagtctcttccgatatcattggcagccatttcggttcggtgtttgatgccacgcaaacggaaattaccgccgtgggcgatttacaactggtgaaaacggtcgcctggtacgataacgaatatggcttcgtcacacagctcattcgcaccctcgaaaaattcgctaaactctga

SEQ ID NO: 6343 - DNA, 1269 bp, Escherichia coli
ttgttgctggccccgtttttcttctttacatatggatttcttaatcagttcaccgcgactcagcatcttaacaaccatgatatccccagtcaggtattcggttgggaaacggcgatcccttttcttccctggactattgttccttactggagtctggatcttttatatggattttcgctgttcgtttgtagctcgacatttgagcagcgccgtctggtccaccggcttattctggcaacggtaatggcctgctgcggtttttttctctatccgctgaagtttagttttatccgtcctgaagtgagtggggtgacaggatggttattttcgcaacttgaactgtttgatctgccttataaccagtctccttcgctgcatattattctctgctggctactttggcgtcactttcgtcagcatctggctgtgaggttgcgtaaagtctgtggcggatggtttttactcatcgccatttcgacgctgacgacctggcagcatcattttattgatgtcatcacggggctggcggtaggtatgttaattgactggatggtgcccgtcgaccgtcgttggaattatcagaaacctgatcaacgtcgaatcaaaatagcactgccatatgtcgtaggcgcgtgctcgtgcattgtgttgatggagctaatgataatgcttcagttatggtggtcagtctggttatgttggccagtattatcgctactcattattggccgtgggtacggtgggcttggcgcgataacaacagggaaagatagtcaggggaaacttccgcccgccgtttactggctgacattgccctggcgcatcgggatgtggctgtctatgcgttggttttgtcttcgccttgagccggtgagcaaaattacggctggtgtttatttaggggcgtttccacaacatattccggcacagaatgcggttctggacgtcacctttgaattccctcgcggacgagccacaaaagatcaactctatttttgtgtaccgatgctggatctggtggttccggaagagggggagctacgacaggccgtggcgatgctggaaacattacgcgaagagcaaggcggcgttctggtccattgcgcgttgggattatcgcgcagtgcactggtggtggcggcatggctgttatgttacggacattgtaaaaccgttgatgaagcgattagttatattcgagccagacgctcgcggattgtgcttaaggaagagcacaaagcgatgctgagattatgggaaaacaggtaa

SEQ ID NO: 6344 - DNA, 2301 bp, Escherichia coli
atgtttaaggccaggatttgcggctggataggtttacttcccctgtttatcctgagtcttccagtacaggcggaacttcgatgtgttgcaaatgcagttgatattgaaccatttttttctgcggctaccgctgaagataaacagcaagttgaacaagctatcaatagtagcgtgaatcttgtccccgtcggtttatctgcaccggactggaaagtgcatcgtggcaatttagtggtggaaggtaatatagagagtaatgaaaaattgattgttcttggcaatttgacagtcaaaggaaatatttccactttctctctttctaatccatgggttattctcggtgatgtgacggcaacgaatatagttacggattcaccactgttaattaccggttcgataaatgcaagtggactggtatttatcgactcatattacgataatccgtctacgattaagggaagtattaatgcgcgcgggatatttatcaatgacataattgcacctgttgttgtgtcttcgacaaatagtgaattcatggtccgagcgggagacaaaaatgacactgaaaatgtcaaaaaagcgctaacgataataaatcctgatgcatattattggggcctaataaatgatgaagatgctctgaaagaaatttttaagcgaagcaatattcgcatggcagggaatgtctgtaatcagatgaaaaaagaagcgctgtttcgccctaagccttctcctgaattagtgcaggaattgcaaatgctggatgaaggcaacgttgctgcatttgaaggacgagacattgcgacatttgatcttgccataatgcgaactctcccaaggcttaaaggaatttcagctaacctacgcaaacaacttattaatagcaatgatgaacaaacgattgaaagtatggcgagatatatgcctgacaatgagattctggagttgaccgatcagcaattgggttaccaacctgttgttctgggtttgctcaaccgtgaaccgctctctgtcgaaataatgacgcgaattagccgtctacctgatggtgccggtcctttgaatcttgcgctacgtgaaaatctccctctggatatcgtcatgactctggcgaaaagagattgggtcattcaggggctttataaagatgcgtggttattgcccgaatccattatagatggctatatccgcagtaatgattcctctattcgtcaggtcggtgctggaggacaactcacctacaatcaggcaatgcagttggcgaaagattcatcaaaaaatgttgtcacaaacttagcgttcaagctggcagagatgaaacaccatggtcaattgttgcggatgacgccacaagagagtgacaaaatagcagtatatttataccaaaaattcgagaatgacgatgatctaataggtgcgttatttttagcgttgccagataacttacagtttaattttgttaaaaggatggagaaaaaatcccctgcctacttttgctgtcgggatatgcagataattcactctgacgctgctttacaacggttattgacacgtttcaacgatcctgcggggtggagtaatctggcgaaaaatcagtatctgagtacggcgatgaaacaaaaaatttggcatcgcgctttatcgcatcgaaaaaataatccgaaagcagattctgcagcatatgaaaccagcgctgatatgattttgtctgagctgattagccacggtgaagttgatgaccagatgctattaaatgccacctctctgatacgttcggaaggctgggactttttagagagtgcattagttagttgggataatttacccgctgttgtcctcaaggaattacagcaaaatatgccacgcaatgatatttgggcgaagttttttctgaggcaggaaaacagctctcgtgcgcaggttaacgaagcgttacgtgtttattatgcacttgactccgatgcattagcgcaactggataaactggcaaaacaaccggatcgtatatggtggagtacgctggcgaaaagcaatcttacatttttcaagttcggcgcacttaacaatcgccatacaccgtctgcggcactagcggcagaaattgatcccgagtggtggattatggcgatgaatgatccccgtttcccagttgatgtattgaaggcgaggctgaaacgtgatcctttgctggcgttagagcttgttaaccctgaactggatttagtccgccagctggcgcttaacggtaagacgcgcgcaatacgggaacaagcgatgagaaaacttaatgagttgtattga

SEQ ID NO: 6345 - DNA, 2199 bp, Escherichia coli
ttggaaaacagtggtcacctgacaaccgatctgctgacgttgaatggcgcggtttccttctttaatgaaggcgaatttagtggttcaattaccggaaacagctatcaacagaatgtggtgaataccggtgaaatgacggtgaccgaagatggccattcacttgtcaacggaagtttcctgttcttcaatgaggctggcgcgaccctgacaaatagcggtaatgcggtaacgggcggggaaaacgcgattattcatgtaaccagaaccggtgattctgtttcgcaggttaaccgtggcaccatcacggccataaatggctatagcgcaatcaaaactgaaaatactggctcgtacagtaacgggaaatggatttggaatacggaaacgggagtgataaatggtattaatcctgcggctccgttggttgatttaggacgaggttataatttttctaacgctggcgttattaatgttcagggcgataatgcggtgggcatcagtggcggcataaccagctatactgtcaagttggtgaacagtggtaccattaatgtgggtactgaacaggggcaactggatggaaccaacggcgaaggcttaattggtattaagggcaatggtaaggacacgacaattaataacacgcaaacgggtgtaattaatgtctatgccgataactcctgggcgtttggtgggcaaacgaaagccatcattaataacggtgaaattaatttgctgtgtgacaccggatgcgatatttatgctcctggaacgacgggtacgaaaaacgatcacaacggtactgcggatatcaccgtaccagaggcatcaactacgccgtctcaaggtaatgttccaacgccgcctgccgatccaaacgcaccgcagttgctgagcaactataccatcggtaccaacagcgacgggagttcgggtacgctcagcgcgaataatctggttattggcgacaacgtgagtgttaacgccgggtttagtgccggaacagcggacaccaccgttgtcgttaacgatgtattcaaaggcgaaaacatcagcggtgtagataacattgtttcctctacggtcgtctggactgccaaaggcagtaccgacgccagcggcaacgttgacgtgaccatgagcaaaaacgcctacaccgatgtagcgaccgatggctcagtgagtgacgtggcgaaggcacttgatgcgggttataccaacaacgagctgtataccagtctgaacgtcggcactactgcagagctgaacagcgcgctaaaacaagtcagcgggagccaggctaccacggtattccgtaaggcgcgcgtgttgagcaaccgcttcagtatgctggccgaggcggcaccgaagatgggcaacggcctggcgttcaatgtggtggcgaaaggcgacccgcgtgcagagctggggaataataccgagtacgacatgctggcgctgcgcaaaaacctcgacctgagcgaaaaccagaccatgagcctggagtacggtatcgcccgtctggacggcgacggtgcgcagaaagccggtgataatggtgttacaggcggctacagccagttcttcggcctgaaacatcaaatgtcttttgacaacggtatgagctggaataatgcgctgcgttacgatatccatcaactggacagcagccgctcggtggcttacggcgacgtcagtaagacggcggataccaacatgaaacagcagtacctggagttccgcagcgaaggggcgaaaacctttgaaccgcgcgaagggctgaaaattacgccatatgcgggtctgaaactgcgtcacacgctggaaggcggttatcaggagcgtaatgccggagactttaacctgagcatgaacagcggtagcgaaacggcggtggacagcatcgtcgggctgaaactggactacgcaggcaaagacggctggagtgcgaacgccactctggaaggtgggccgaacctgagctacgcgaagagccagcgcacggcaagcctggcaggcgcaggcagccagcactttaatgtcgatgatggacagaagggcggcagtatcaacagcctggcaagcgtcggcgtgaagtacagcagcaaagagagctcgctgaatctggatgcctatcactggaaagaagacggcgtcagcgataaaggcgtgatgctcaatttcaagaaaacgttctaa

SEQ ID NO: 6346 - DNA, 3639 bp, Escherichia coli
atgcaaaagaaaacgttattatccgcctgtatcgcgctggctttaagcggatcgggctgggctgctgacattgatgatacagatagtgcaactcgtcagcgtaaggagacaaggataccctgtccgaccgctcactcctctgaaaaactaagtccgcaacaactaaaatcgctcccgtctgaatgttctacaaccaatgacaacaacctctattccttgattgccgttggcgctacttcactaatcaccactcttgcagtccttgaactaaaccacgatgacggtaaccacgctcattcctctgacaatcctccagtaccgcctgatgacgataatggcggcaacacaccggatgatggtggcaatacccctgacgatggcggcaatactcctgacgatggcggcaacacaccggatgatggtggcaatacccctgacgatggcggcaacacaccggatgatggtggcaatacccctgacgatggtgggaatactcctgacgatggcggcaacacaccggatgatggtggcaacacaccggacgatggcggcaatacccctgacgatggtgggaatactcctgacgatggcggcaacgtcaccccgcccaaagagtctaaaatcttcaataacaatgtcacgttcgacgaagataaaggcacgctgaaaattcgtaacgccacctttacctacagcaaaaacaccgatggaacttataccctgacggctggagatggccggaccacggttgtacaaggctgggatgtcgacacggctgccaatactgtagaaattactggcgtgaatacccagggcggtatgacgtggcgttacggtaaagacggcattatctatatcaccaaaaccgtcggcgcaacggtggatgaccccgcgaacagtaacgtatttaacctcagcgatgcggtgctcactgaccagggcggtaatgccgcgcgaaatggcgcaacggtgattgaaattaacggcagcaggatcgtccttaataacgacggtgacatttctgctacgggaaaagattctgtggttgtggcgatgaccggaaacgacattaccgttaacaataacggccatatggttgtcgatggcggcaccgcgggcgtggttaacggcgatcgtgcgatcctgaataaccgtggtgatgcggtgatcactaacgggggcgcgggtgtcattgtgacgggcgacaacgcggtcatcaacaacacggggcaaagcgatattgatggcgacaactcggtatcggtaaaagtcgcaggaaacgcaaccagaatcaaaatggaaggcgggctcaacgtcagcggtggcgcgcatggcattgatgccaccggtgacaataacgaagtcagcaacaagggcaacatttcggtggtggatgcgcattccacgggcgtgctgctgaacggcgatcgcgcgtcattcgttaatatgggtgatattaacgttagcggaggtgcagcggacgatcacgctattggtgtgcagattaacggcgataacagtacctttatcaacgttggagatttaaatgccgacgacacggcgaccggggtgaaaattaccggtgacgccagcgatattgccctggccggagcgatgcatgtcggggattttgccaccgggctggaggtgatgggtaagaacaatgatctgtcgttgtctaccaatgtgatggatgtgaccgggaaacagtccgccggggtgaccattacaggtgatgataataccattgatatcactggtgatatggtcgttgatcaaaactctgtcggggcgaagattgttggtgatcgcgtttcgttgcaacagaaaggtgatattaccgttaacggtgcagggcacggcgttgaagtcagcggtagtaaggtgacaatcagtaatcagggcaaactgaccgtaaaagatcaagactcaatcggtatcgctatcaccggggatgacgcgcaatttaccaccgagggtgagattgatgtctcgctgaacggtacgggtgttgcgatcagcggcgatcgtgaacaagtgaatttgagcggtgatattaatgtcattcaggagcgtgacggcagcggtactttccagggcggaacgggtatcagcataatgagcaacgacagcagcatgctgttggcgggaaacattaatgtgacgtccagcataggggaccaaccgtccacctcacacctgtcgttaaccggcgttaccatcgggggagaaaacaatactgtcgatctgcaaggcgacgtcaatattactgtcgattcggattacacggaggatgaaaacagtctttacggcgtggtggtttcggggtcaaataacatcatcagcctcgatggtggtatcaatatttccggcgatagtggcggacatgttatcaaaggcgtgcaggtaaccgggaataataccgtcaatattagtggtcattccgtaatgaatacccgacaggtattgggagccttctctctgatttcggtggctgatggcgggaatgtcgtatttgatgaaaatgcgataaccgagatccagagttcagtgagaaatactactgcccctctatttgttgattcatcgttaattgttgctacaggaaatcagtctgttattcagaacaaaggcattattaacacaaccgatgcccagggattaatgatggcgaattcgggggcgcaggttgtcaatgccggggtgattaatatcaggccagatgctgaatcacacagtttctttgctggaatgctggcaagaggcgatgactcgcaggcaaaaaatgtctccggagggacaatcaatctgacatccattacccagccttcttacggcggaggatttagtgaatacccggtgaaatggtatttcaacacgggttatgccttgctggccagtaattacggttcggtaattaatgaagcgggagcgaccattaatttgcatggggcaggaacctatggtgtttccgcgtcaaaaggaacggcgaccaatgcgggcgagataaatgtcgacgactttgtaccaacagtagatgaaaacggtaatattagtgatgaaacttactggcagaccaattccatatatctgatgggcggcggaatgttagccggttcaacggatgccggcagcggtgatgcaaaagcagttaataccggtaccatcaatgttaagaatgaaggcttcggcatgctggcaatgagcggcgggaccgttgtaaaccaggggacaatcaatctcaccgccgatgagggcgtgacgaagcagcaagataaccaactgttcgcgctgggtgcaattcaacgtggtctggcgattaatgaccagaatggggttattaatattaacactgatattggccaggcgttttataaagatagcaccggcaccattctcaactacggcaaaattaatcttttcggtaatccaatggatgaaagtgattcccatatgggggttacgccggatgacaaagatgttctcagtgagctgtctggcagcggcgagagcatcagcaaaaccacaactgccgacggttttatcgccgtaaatgacctggcaaactatggcgacgaaacgcttaatggcgacgttacacaaacggctggatattcaaccaacctgatgccagcctga

SEQ ID NO: 6347 - DNA, 2640 bp, Escherichia coli
atgctgggtaaatataaagccgttctcgcgctgttattactgattattcttgtgccgttgacgctgctgatgacgctcgggctgtgggttcccacgctggcgggcatctggctaccgctcgggacacgtattgcattagatgaaagcccacgcattacgcgtaaaggtttaatcattcccgatctccgttatctggtgggagattgtcagcttgcgcatatcaccaacgccagcctttcacatcccagccgctggttattgaacgtcggcacggtagaacttgattctacttgtctggcgaaattgccgcagacggagcaatcgccagccgctccaaaaaacctcgcgcagtggcaggccatgttgcctaacacttggatcaatatcgataaactgattttttctccctggcaggaatggcagggaaaactctctctcgcattaacctccgatatccagcaactgcgttatcagggcgaaaaagttaaatttcaaggccagctgaaagggcaacaacttacagtcagcgaactggatgtcgtcgcgtttgaaaatcagccgccggttaaactggagggggaatttactatgccgctcgtgccggatggacttccggtaagtgggcatgctactgcgacgttaaacttgccgcaggaaccgtcactggtggatgcagagctggactggcaggaaaatagcgggcaattgatcgtgctggcacgggataacggcgatccgttgctcgatttgccgtggcaaattactcgtcaacaattgaccgtaagcgatggtcgctggagctggccgtatgcaggttttcctttgagtggccgactgggtgtcaaagtcgacaactggcaggcagggctcgagaacgctctggtcagcggacgactgagtgtgctgacccaggggcaagcgggtaaaggcaacgcggtgcttaattttggcccaggaaaattaagcatggataacagccagctgcctatgcaactgaccggtgaagcgaaacaggcggacctcattttatatgcccgtttacctgcgcagctaagtggaagtctgtctgacccaacgttgacctttgagccaggcgcgttacttcgttcaaagggaagagtcattgattcgctggacatcgatgaaatccgctggcctttagcgggtgtaaaagtcacccaacgtggtgttgacggacgtttgcaggccattttgcaggcgcatgaaaatgaactgggcgatttcgtgctgcatatggatggactggcgaatgattttctccctgacgctggccgctggcagtggcgctactggggaaaaggcagttttacaccgatgaatgccacctgggatgtcgcaggaaagggtgagtggcatgacagcacgattacgctgaccgatctctccaccggtttcgaccagttacaatacggtacgatgacggttgaaaagccgcgactaattctcgacaagcccgtcgtctgggtacgtgacgcacagcatccctcctttagcggcgcgctgtcactggacgccgggcaaacgctgttcactggcggcagtgtgttaccgccatcaaccttaaaatttagcgtcgatggacgcgatccgacgtatttcctctttaaaggcgatttacatgctggtgagattggcccggttcgggtaaatggtcgctgggacggtattcgtctgcgcggtaacgcctggtggcctaaacaatcactgaccgtattccagccgctggtgccacccgactggaagatgaacttacgcgatggcgaactatatgcccaggtcgcattttctgctgcgcctgaacaaggattccgcgcgggagggcacggtgtgttgaaaggcggtagtgcctggatgccagataatcaggttaacggtgtcgattttgtcctgcctttccgttttgccgatggagcctggcatctggggactcgcggccccgttacgttgcgaattgccgaagtgattaatctggtgacagcgaaaaatattacggctgatttgcaaggtcgttatccgtggactgaagaagaaccattgctgttgactgatgttagcgttgatgtgttaggcggtaacgtgctgatgaaacaattacgtatgccgcaacatgacccggcgctgttgcggctgaataatctttcctccagcgaactggttagcgccgtcaatccgaaacaattcgccatgtccggggcatttagtggtgcattgccgttatggctaaacaacgaaaaatggatagtgaaagacggctggctggcaaatagcgggccgatgaccttgcggctggataaagacaccgcagatgcggtggtgaaagacaatatgaccgcgggttcagcaattaactggttgcgctatatggaaattagccgttcatcgacaaaaattaatttagataatctcggtttattaaccatgcaggccaacattacaggtaccagtcgcgttgatggtaaaagcggtacggtaaatcttaattaccatcatgaagagaatatttttacgctgtggcgcagtttacgctttggcgataatctccaggcatggctggagcagaacgcgcgtctgccgggaaatgactgtccgcaaggaaaagagtgtgaggaaaaacaatga

SEQ ID NO: 6348 - DNA, 1233 bp, Escherichia coli
atgattacgcacaacttcaataccctggacttactcaccagtcctgtctggatcgtttcgccctttgaggaacagttaatttatgccaacagcgcggcgcgactgttgatgcaagacctcacgtttagtcagctacgaaccggtccctattccgtctcctcacaaaaagaactgccgaaatacctctccgatctgcaaaaccaacacgatattatcgaaatcctcaccgttcaacgtaaagaagaggaaacagcattaagctgtcggcttgttttgcgagagctgacagaagcagaaccggtgattattttcgaaggtatcgaagcgccggcaacgctgggtttaaaagccagtcgctcggcaaattatcagcgcaaaaaacaaggtttttatgcgcgcttttttctgactaactctgcaccaatgttgttgattgacccctcacgagatggccaaatcgttgatgctaacctcgccgcgctcaatttctatggttataaccatgaaacgatgtgccagaaacatacctgggaaataaatatgctcgggcgtcgcgtcatgcctatcatgcatgaaatttcgcatttacccggtggccataagcctttgaattttgttcataaactggcggatggttcgactcgtcatgtgcagacctatgccggtccgattgaaatttatggcgacaagctcatgttatgtattgtgcatgatattactgagcaaaaacggctggaggagcagctggaacatgctgcccaccatgacgcgatgaccggattactgaatcggcgacagttttatcacattaccgagccaggccaaatgcagcacctcgccatcgctcaggattacagcttgttgctcatcgacaccgatcgttttaaacacattaacgatctctatgggcattctaaaggtgatgaggtgttatgcgccctcgcccgcaccctcgaaagttgcgctcgcaaaggcgatttggtgtttcgttggggaggcgaagagtttgtcttattgctaccaagaaccccactggataccgcgctttcgctggctgaaactatccgcgtaagcgtggcaaaagtgagtatttcgggcttaccacgctttaccgtcagcattggtgtggcgcatcacgaaggaaatgaaagcatcgatgagctgtttaaacgcgttgatgatgctttgtatcgggcgaaaaatgatggacgcaaccgcgtgctggcggcataa

SEQ ID NO: 6349 - DNA, 909 bp, Escherichia coli
atggcttttcaggtaaaaattcatcaaattcgggcttttgttgaagtggctcgtcagggcagcattcgcggagcgagccgaatgttgaatatgtcgcaaccggcactgagtaaatctattcaggagctggaagaagggttagcggcgcaactcttttttcgccgtagtaaaggcgtgacgttaactgatgccggtgaaagtttttatcagcacgccagtcttattcttgaagagctgcgcgcagcgcaagaggatattcgccaacgacaagggcaactggcagggcaaattaatatcggcatgggggccagtatttcccgcagtctgatgccagctgtcatatctcgttttcatcagcagcatccacaggtaaaagtacgcattatggaagggcaactggtgtcgatgattaatgaattgcgccagggagaactggatttcaccatcaatacctattatcagggaccctacgaccacgaatttacttttgagaaattactggaaaagcaattcgcgatcttttgccgcccgggacatcccgccattggtgcccgttcgatcaaacagttactggactacagctggacaatgccgacgccacacggcagctactacaaacagttgagtgaattgcttgacgatcaggcgcaaacgccacaggtcggcgtagtctgcgagacgttctcagcctgtatcagtctggtggcaaaaagcgattttctcagcatactacctgaagaaatgggctgcgatcccttgcacggacaggggctggtgatgttgccggttagcgaaattttaccgaaagcgacctattatttgattcagcggcgtgatagtcgccagacaccactgaccgcgtcattaatcacgcaatttcggcgagaatgcggctatctgcaaagttaa

SEQ ID NO: 6350 - DNA, 1311 bp, Escherichia coli
atggagtctttgaatcaatttattaattcgcttgccccaaaattatcgcactggcgacgtgattttcaccactatgcagagtctggctgggtggaattccgcactgccaccgttgttgcggaagaattgcaccagctcggttattcactggcgctgggccgcgaagtcgttaatgaaagtagccggatgggattacctgatgaattcactctacaacgcgaattcgagcgcgctcgtcaacagggggcgctagaacaatggattgcggcttttgaaggcggtttcactggcatcgtcgctaccctggataccggtcgccccggtccggtgatggctttccgtgtcgatatggacgcgctggatctcagtgaagagcaggatgtcagccatcgcccctaccgcgacggttttgcgtcatgtaacgccggaatgatgcatgcctgtggtcatgatggacataccgccattgggcttgggctggcgcatacccttaaacagttcgagtccggactacatggcgtcatcaaactgatttttcaacctgcagaggaaggtacgcgtggcgcgcgggcgatggtcgatgcaggagtagtggatgatgttgattattttactgccgtgcacattggcactggcgtacctgcgggcaccgtggtgtgcggcagtgataattttatggcaaccaccaaatttgacgcgcacttcaccgggaccgccgctcacgcaggcgcaaaaccagaagacggtcacaatgccttgttggctgcagcacaagcaactcttgcactgcatgcaatcgccccgcacagcgaaggagcttccagagtaaacgtgggcgttatgcaggcaggaagcggtcgtaatgttgttcctgcctcggcgttgctgaaagtggaaacacgcggggccagcgacgtcattaatcaatatgtttttgaacgtgcacaacaagcgattcagggcgcagcaaccatgtatggtgtcggcgttgaaactcgtctgatgggtgcagctaccgccagttctccttcgccgcaatgggtcgcatggttgcaaagtcaggcggctcaggtcgcgggggtcaatcaggccattgaacgtgttgaagcgcctgcgggttccgaagatgccacattaatgatggcccgcgtgcagcaacatcaagggcaagcctcctatatggtgtttggcacacagctggcggcaggtcatcacaacgaaaaattcgattttgacgagcaggttctcgctattgccgtcgaaacgctggcgcgcaccgcgctcaattttccctggacgcgaggtatctga

SEQ ID NO: 6351 - DNA, 1446 bp, Escherichia coli
atgcaggaaatctatcgttttattgacgatgcgattgaagccgatcgccaacgttataccgatattgccgatcaaatctgggatcatccagaaacacgttttgaagagttctggtcagcggagcatctggcttcggcgctggagtctgcaggcttcaccgttacccgcaacgtaggcaatatcccaaatgcctttattgcttcgtttggtcaaggcaaaccggttatcgccctgctgggggaatatgacgccctggcaggtttaagtcagcaagcaagttgcgcgcaacctacatccgcgacgcccggtgaaaatggtcacggttgcggacacaatttgctgggaaccgccgcctttgccgcagcaatagccgtcaagaaatggctggaacaatatgggcaaggcggcacggtgcgcttttatggttgtcctggcgaagaaggcggctcgggtaaaacgttcatggtccgcgagggggtatttgatgatgtggatgcggcactcacctggcacccggaagcctttgccggtatgttcaatacccgcacgctggcaaacattcaggcatcatggcgctttaaagggatcgcagcacatgccgcgaattcccctcatttgggacgcagcgcccttgatgccgtaacgttgatgaccactggcaccaacttcctcaacgaacatattattgaaaaagcgcgcgtacactatgccatcacagagagcggcgggatctcgcccaacgtggtccaggcgcaggcagaagtgctttatcttatccgcgcccccgaaatgaccgacgtgcagcatatttatgatcgggtcgccaaaatcgccgaaggtgcggcattgatgaccgaaaccacggttgaatgccgcttcgacaaagcctgttccagttatctcccgaatcgcaccttagaaaatgccatgtaccaggccctatcccattttggtactccggaatggaactgcgaagaactggcttttgcgaaacaaattcaggctacgctcacccccaacgatcggcaaaacagtctgaataatatcgctgcaaccggtggcgaaaacggcaaggcttttgcactacgtcatcgtgaaacggtactggcgaatgaagtcgctccatatgccgccaccgataacgtgcttgcggcatcgactgatgtcggcgacgtcagttggaaactgcctgttgcccagtgtttcagcccctgctttgccgtcggtaccccgctacatacgtggcaactggttagccaggggcgaacatctattgctcataaaggaatgctgctggcggcgaaaactatggcagcaaccacacttaatctcttcattgattcagggctattgcaagaatgccaacaagagcatcagcaagttacggacacgcaaccgtatcactgccctatcccgaaaaacgtgacaccgtcacctttaaaataa

SEQ ID NO: 6352 - DNA, 1527 bp, Escherichia coli
atgagtatgtcatccataccgtcgtcctcccaatccgggaagctctatggctgggtcgaaagaattggtaacaaggttccccatccttttttgctctttatctatttgattatcgtactcatggtgacgacggcaattttgtcggcctttggcgtcagtgcgaaaaacccgaccgatggtacgccggtggtggtgaaaaacctgctcagtgtggaaggattacactggtttttacccaatgttattaaaaactttagcggttttgctccacttggcgcgatcctggcgctggttttaggtgccggtctggcggagcgcgtcggcttactgccagcgttgatggttaaaatggcatcgcatgtgaatgcccgctacgccagttatatggtgctgtttattgcttttttcagccacatttcttccgatgcggcgttagtgatcatgccaccgatgggtgcgctaatttttctggcggtgggcaggcatccagttgcaggtttactggctgccattgcaggcgtaggttgcggttttacggctaatttactgattgtcacaaccgacgtgttgctgtcggggatcagcacggaggctgcggctgcgttcaatccgcaaatgcacgtcagtgtaattgataactggtattttatggccagctccgtagtcgtactgacgattgttggcggcctgataaccgacaaaatcattgagccacgtttaggtcaatggcagggaaacagcgatgagaaactgcagacattgaccgaaagtcagcgttttggtttacgcatagcaggtgtcgtatcgctactttttattgctgcgattgcgctgatggtgatcccggaaaacgggatattgcgcgatccgattaatcacaccgtgatgccatcaccctttattaaaggtatcgtgccactgatcattctttttttctttgtggtctcgctggcttatggcatcgctacccgcacaattcgacgtcaggcggatttaccgcatttaatgattgaaccgatgaaagagatggcgggatttatcgtgatggtttttcccctcgcccagtttgtcgccatgtttaactggagcaacatggggaaattcatcgccgtggggctgaccgatatactggaaagttcagggcttagcggcatcccggcgtttgtcggtctggcgttgctttcctctttcttatgcatgtttatcgccagcggttccgcaatctggtcgattctggcccccattttcgtaccaatgtttatgctacttggctttcacccggcatttgcgcaaatcctctttcgtattgccgactcatccgtattgcctttagcaccagtatctccttttgttccactgtttcttggattcctgcaacgctacaaaccagacgcgaaactgggtacttactattcgttagttttgccctatccacttatctttttggtggtatggctgctgatgttgctggcgtggtatcttgtcggtctgccgataggtccggggatttacccacgtttgtcttaa

SEQ ID NO: 6353 - DNA, 1266 bp, Escherichia coli
atgagcaacaatgaattccatcagcgtcgtctttctgctacccctcgcggggttggcgtgatgtgtaacttcttcgcccagtcggcagaaaacgctatgctgaaggacgtagagggcaacgaatacatcgatttcgccgcaggcattgcggtgctgaataccgggcatcgccaccctgatctggtcgcggcggtggagcagcaattgcaacagtttacccacacggcgtatcagattgtgccgtacgaaagctacgtcaccctggcggagaaaatcaacgcccttgccccggtgagcgggcaggctaaaactgcgttcttcaccaccggtgcggaagcggtggagaacgcggtgaaaatcgcccgcgcccataccggacgccctggcgtgattgcgtttagcggcggcttccacggtcgtacatatatgaccatggcgctgaccggaaaggtcgcgccgtacaaaatcggcttcggcccgttccccggttcggtatatcacgtaccttatccgtcagatttacatggcgtttcaacgcaggactccctcgacgccatcgaacgcttgtttaaatcggacattgaagcgaagcaggtggcggcgattattttcgaaccggtgcagggcgaaggcggtttcaacgttgcaccaaaagagctggttgccgccattcgccgcctgtgcgacgagcacggcattgtgatgattgccgatgaagtgcaaagcggctttgcgcgtaccggtaaactgtttgccatggatcactacgccgataagccggacttaatgacgatggcgaaaagcctcgcgggcggcatgccgctttcgggcgtggtcggtaacgcgaatattatggacgcgcccgcgccgggcgggttgggtggtacttacgccgggaacccgctggcggtggctgccgcgcacgctgtgctcaacattatcgacaaagaatcactctgtgaacgcgcgaatcaactgggccagcgcctgacaaacacgttgattgatgccaaagaaagcgttccggccatcgcggcggtacgcggtctggggtctatgattgcggcagagtttaacgatccgcaaacgggcgagccgtcagcggcgattgcacagaaaatccagcaacgcgcgctggcgcaggggctgcttctgctgacctgtggcgcatacggcaacgtgattcgtttcctgtatccgctgaccatcccggatgcgcaattcgatgcggcaatgaaaattttgcaggatgcgctgaaagattaa

SEQ ID NO: 6354 - DNA, 1281 bp, Escherichia coli
atgaccgaacataccagcagttactacgccgccagtgcgaataaatacgcgccattcgacacgctgaatgagtcgatttcctgcgacgtttgcgtggtcggtggcggctataccgggctttcctccgcgctgcatctggcggaagcgggctttgatgtagtggttctcgaagcctcacgcatcggcttcggcgcaagcggacgcaatggcgggctgcttgtgaactcctacagccgcgacatcgacgtgatcgaaaaaagctacggcatggacaccgcccgtatgctcggcagcatgatgtttgaaggcggagagatcatccgcgaacgtatcaaacgttatcagattgactgcgactaccgccccggcggcctgtttgtggcgatgaatgataaacagctcgccacactcgaagagcagaaagagaactgggaacgctacggcaataaacagctggagctgctggacgccaacgctattcgccgcgaggtcgccagcgatcgctacactggtgcgctgctggatcacagcggtgggcatattcatccgctaaacctcgccattggcgaagcggacgccatccgcctgaacggcgggcgcgtgtatgaactttctgccgtgacgcagatccagcacaccacgccagccgttgtgcgaactgccagaggtcaggtgacggcgaaatacgtgattgtcgccgggaatgcgtatctgggcgataaagtagagccggaactagcgaaacgcagcatgccgtgcggcacgcaggtgatcaccaccgaacggctgtcggaagatttagcccgttcgctgatcccgaaaaactactgtgtggaagactgtaactatcttcttgattactaccgcctgactgccgataaccgcctgctgtacggcggcggcgtggtctacggcgcacgcgacccggacgatgttgagcgccttgtggtgccgaaactgctgaaaaccttcccgcagctgaagggcgtgaaaattgattaccgctggacgggcaacttcctgctgaccctgtcacgcatgccgcagttcggtcgccttgataccaacatctattacatgcagggttacagcggccacggcgtcacctgtacccatcttgccgggcgtttgattgctgaactgctgcgcggtgacgccgaacgcttcgacgcctttgccaatctgccgcattacccgttccccggcgggcgcacgctgcgcgtgccatttaccgcgatgggcgcggcttattacagcctgcgcgatcgtctgggcgtttaa

SEQ ID NO: 6355 - DNA, 1488 bp, Escherichia coli
atgaattttcatcatctggcttactggcaggataaagcgttaagtctcgccattgaaacccgcttatttattaacggtgaatatactgctgcggcggaaaatgaaacttttgaaaccgttgatccggtcacccaggcaccgctggcgaaaattgcccgcggcaagagcgtcgatatcgaccgtgcggtgagcgcagcacgcggcgtatttgaacgcggcgactggtcactctcttctccggctaaacgtaaagcggtactgaataaactcgccgatttaatggaagctaacgccgaagaactggcgctgctggaaacgctcgacaccggcaaaccgattcgtcacagcctgcgtgatgatattcccggcgcggcgcgcgccattcgctggtacgccgaagcgatcgacaaagtgtatggcgaagtggcgaccaccagtagccatgagctggcgatgatcgtgcgtgaaccggtcggcgtgattgccgccatcgtgccgtggaacttcccgctgctgctgacttgctggaaactcggcccggcgctggcggcgggaaacagcgtgattctaaaaccgtctgaaaaatcaccgctcagtgcgattcgtctcgccgggctggcgaaagaagcggggctgccggatggtgtgttgaacgtggtgacgggttttggtcatgaagccgggcaggcgctttcgcgccataacgatatcgatgccattgcctttactggctcaacccgcaccgggaaacagctgctgaaggacgcgggcgacagcaacatgaaacgcgtctggctggaggcgggcggcaaaagcgccaacatcgttttcgccgactgcccggatttgcaacaggcggcaagcgccaccgccgcaggcattttctacaaccagggccaggtgtgcatcgccggaacgcgtttgttgctggaagagaacatcgccgatgaattcttagccctgttaaaacagcaggcgcaaaactggcagccgggccatccacttgatcccgcaaccaccatgggcaccttaatcgactgcgcccacgccgactcggtccatagctttattcgggaaggcgaaagcaaagggcaactgctgctggatggccgtaacgccgagctggctgccgccatcggcccgaccatctttgtggaggtagacccgaatgcgtccttaagccgcgaagagattttcggtccggtgctggtggtcacgcgtttcacatcagaagaacaggcgctacagcttgccaacgacagccagtacggacttggcgcggcggtatggacgcgcgacctctcccgcgcgcaccgcctgagtcgccgcctgaaagccggctccgtcttcgtcaataactacaacgacggcgatatgaccgtgccgtttggcggctataagcagagcggcaacgggcgcgacaaatccctgcatgcccttgaaaaattcaccgaactgaaaaccatctggataagcctggaggcctga

SEQ ID NO: 6356 - DNA, 558 bp, Escherichia coli
atgagtgatgagggactggcgccaggaaaacgcttgtcggaaatccgccagcagcaggggctttcacaacgtcgtgccgccgaactctccgggctgactcacagtgctatcagtacgatagaacaagataaagtcagccctgccatcagtacgctgcaaaagctgctgaaggtgtatggtctgtcactctcggaattcttttccgagccggaaaaacctgatgagccgcaggtcgtcattaatcaggacgacttaattgagatgggcagtcagggtgtgtcaatgaagctggttcataacggtaacccgaatcgcacgctggcgatgatctttgaaacttaccagccgggcacaaccactggggaaagaattaagcatcagggtgaggaaataggcactgtactggaaggtgaaattgttctgacgattaatggtcaggattatcatctcgtcgcggggcaaagttatgccattaataccggcatcccgcacagtttcagtaatacgtcggcaggtatttgccgaattatcagcgcccatacgcccaccacgttttaa

SEQ ID NO: 6357 - DNA, 765 bp, Escherichia coli
atggaaaatataatgaacaatccggttatcggtgtcgtaatgtgcaggaacaggcttaagggtcatgcgacccagactctgcaagaaaagtacctgaatgccatcatccacgcaggcggtttgccaatagcgctaccacatgcgctggcggaaccgtcgttacttgaacaacttttgccgaaacttgatggtatttatcttcctggtagtcccagcaatgtgcagccgcacctatatggtgaaaacggcgatgagcctgacgccgatcccgggcgtgatcttctgagcatggcgttaattaatgccgcactcgaaaggcgcatccccattttcgccatctgccggggtttacaggaactggtggtggcaaccggtggttcgttgcatcgcaagctgtgcgaacagcctgaattgctggaacatcgggaagatcccgaactgccggtggagcagcaatatgcaccgtcgcatgaagttcaggttgaagaggggggattgctgtctgcgttgttacctgaatgtagcaacttttgggtaaactctctgcatggacaaggggcgaaggtcgttagcccacggttgcgtgttgaagctcgctcgccggatggcttagttgaggcggttagcgtcatcaatcatccttttgcgctgggcgtacagtggcacccggaatggaacagtagcgagtacgcgctttcgcgtatattgttcgagggctttatcaccgcttgtcagcaccatatcgctgaaaaacagcgactctga

SEQ ID NO: 6358 - DNA, 1419 bp, Escherichia coli
atggaaaccaatatcgttgaagtagagaactttgttcagcagtcagaagagaggcggggtagcgcctttacgcaggaagtgaaacgctacctggagcgctacccgaatacgcaatatgttgatgttttacttaccgatttgaatggttgcttccgtggaaaacgtattcctgtttcaagcctgaagaagctcgagaaagggtgttatttcccggcctcggtgtttgcaatggatattctgggcaacgtagtagaagaagcgggcctgggtcaggaaatgggcgagccggatcgtacctgtgttcctgttctcggttccttaaccccttctgccgccgatccagagtttatcggtcagatgctcctgaccatggtcgatgaagatggcgctccctttgacgttgagccgcggaacgttcttaaccgcctgtggcagcagctgcgccagcgcggattgttcccggtcgtagcggtagagctggagttctatttactggatcgccagcgcgacgctgaagggtatctgcaaccgccctgcgcgcccggcaccgatgaccgcaatacacaaagccaggtttactccgttgataacctcaaccacttcgccgacgtgctcaatgatattgatgagctggcgcagttacagctgattccggcagatggcgcggtcgctgaggcctccccgggtcagtttgaaatcaatctttaccataccgataacgtgctggaagcttgcgatgatgcgctggcactaaaacgcctggtgcgtctgatggcagaaaagcataagatgcacgccacttttatggcgaagccgtatgaagagcacgcgggcagcgggatgcatatccatatcagtatgcagaataaccgtggcgagaacgtgctttctgacgcggaaggcgaagattcgccgctgctgaaaaagatgcttgccgggatgattgacctgatgccgtcatcaatggcgttgctggcaccaaacgtgaactcgtatcgccgcttccagccaggtatgtatgtaccgacgcaggcgtcgtggggccataacaaccgcaccgtcgccctgcgtattccctgcggcgatcgccataatcaccgcgtggaatatcgcgtggcgggtgccgatgccaacccgtatctggtgatggcggcgatttttgccggtattttgcatggccttgataacgaactgccattacaggaagaagtcgaaggtaacgggctggaacaggaaggcttacccttcccgattcgccagagcgatgccctgggtgagtttatcgagaatgatcacctgcgccgctatttaggcgaacgcttctgccatgtctatcacgcctgtaaaaatgatgagctgttgcagtttgagcgcctcatcacagaaacagaaattgagtggatgttgaaaaacgcgtaa

SEQ ID NO: 6359 - DNA, 1386 bp, Escherichia coli
atggctattaattcaccactgactattgctgcgcaatctggcaaaacccgtctgcgaaaatcactgaaattgtggcaggtggtgatgatgggtctggcctatctcacgccgatgaccgtatttgatacttttggtattgtctccggcattagcgacggtcacgttccggcgtcctatttgctggcgctggcgggcgtgctgtttaccgctatcagctacggcaaactggttcgccagtttccggaagccggttcggcctatacctacgcgcaaaagtcgattaacccgcacgtcggatttatggtcggctggtcatcgctgctggattatctctttttgccgatgatcaacgtcttgttggcgaaaatctatctctccgccctcttcccggaagtgccgccgtgggtgtgggtggtaaccttcgtcgccattttaaccgccgcgaatctgaagagcgtcaacctggttgctaacttcaataccctgtttgtgttggtgcaaatctccatcatggtggtgtttatcttcctggtggttcagggactgcataaaggagaaggcgttggcaccgtctggtcacttcagccgtttatcagcgagaacgcgcacctgatcccgattattaccggggcgacgattgtctgtttctccttcctcggtttcgatgcggtgaccacgctttcggaagagacgccggacgccgcacgcgtgatcccgaaagccatcttcctgacggcggtatacggcggcgttatctttatcgctgcgtcgttctttatgcagctgttctttcctgatatcagccgctttaaagacccggacgccgcactgcctgaaattgcgctgtacgtcggcggcaagctcttccagtcgattttcctctgcaccacgtttgtgaacacgttagcgtctggcctggcgtcgcatgccagcgtgtcgcgtctgctgtatgtgatggggcgtgacaatgtgtttccggagcgcgtgtttggctatgtgcacccaaaatggcggactccggcactgaacgtcattatggtcgggattgtcgcgttgtcggcgcttttctttgatttagtcaccgcgacagcattgattaacttcggtgctctggtggcgtttaccttcgtgaatctgtcggtgtttaatcatttctggcggcgcaaaggaatgaataaaagctggaaggatcacttccactatttgctgatgccgctggttggcgcgctgacggtgggtgtgctgtgggttaaccttgagtcaacgtcactgacactcggtctggtatgggcttcgttaggcggcgcatatttgtggtatctgatccgccgctatcgcaaagtgccgttgtatgatggtgacagaacgccgttgagcgaaacgtaa

SEQ ID NO: 6360 - DNA, 1050 bp, Escherichia coli
gtggaattgttgtctgaatatggtttgtttttggcgaaaatcgttaccgttgtgctagcgattgcggcgattgccgccattatagtcaatgttgctcaacgtaataaacgccagcgtggcgagttacgggtcaacaatctcagcgaacagtataaggagatgaaagaagaactggccgcggcgctgatggactcacatcagcaaaaacagtggcacaaagcgcagaagaaaaagcacaagcaagaagcgaaagcagcaaaagcgaaagccaaactgggcgagatggcaactgacagtaaacctcgcgtctgggtgctggattttaaaggcagcatggacgcccatgaagtgaactcgctacgtgaagagataacggcggtactcgcagcattcaaaccgcaggatcaggttgtgctccgtctggaaagccctggtggcatggtgcatggttacgggttggcggcttcgcagctgcagcgtctgcgtgataaaaacattcctttaactgttacggtagacaaagtcgctgccagcggcggttacatgatggcctgtgtggcggacaaaattgtttccgcaccgtttgctattgtgggttccattggcgtggtggcacaaatgcccaactttaaccgcttcctgaaaagcaaagatattgatatcgaactgcacaccgccgggcagtataagcgcacgctgaccttgctgggtgaaaacaccgaagaagggcgggagaaattccgcgaagagctgaacgaaacgcatcagttatttaaagattttgtgaagcgtatgcgtccgtctctggatattgaacaggtggcaacgggtgaacactggtacggacaacaggcggtagagaaaggcctggttgatgaaatcaacaccagtgatgaagttattcttagcctgatggaaggccgtgaagtggtcaatgtacgctatatgcaacgtaaacgactcattgaccgattcaccggcagcgcggcagagagcgccgatcgattgttgttacgctggtggcagcggggtcaaaagccattgatgtaa

SEQ ID NO: 6361 - DNA, 309 bp, Escherichia coli
atgaacgatgtgcaaaatcgtagaatactggcattacttgatatgctgtataataccctgggcaataaaaccacatgtaatgtttgtcataaatattttatccatatcctcacagttatgaacaacctgacgattaactatggtactgaaacttcgccagagttagcagggataaattatgacgatgctaatgcgctaattactgaactgatattatttattgaagatgttgacgctgagaatcatgaaacatatcagagacatttcaatgagattatacgcattctgaattttgctattgccgcttga

SEQ ID NO: 6362 - DNA, 801 bp, Escherichia coli
ttgcgacctgattataccatagatataggcggtgatggtaatggcggaaaattatgccagcgccctgggccaaatacaaaaaaagtacaattagtccctttcgagaaagaaaaattactggcttcaatggaagtcattaatagcatgagcgcttatgtagaacttctgactgaggacatggcaacgacagaaagtcagcaagtggcattacttaaacaggctctggatcacgcaaataacgcacaaacactacttggtatttcacatagcaaagatttagcacaatctgcagcagcggttaaagatttggtaaattatttcaatgagttatatataataaaagtcaattctggaaaaataggcaaaacggtagatgaaaactgggtaagacttatagggaacatgacagttttgcgtaatgatatttatacaaaaagcaataagattgaaaattatacctttgcgaatgtgcatgataatatgttttattataatacggcatctaaaaacgctaagaatacagagtttaacactctgaaaaacaggaaggagtttctaagttcagtaatcaatgtgaatgaaaccaggctacaggcatcggcacctgccatgcccgcaattgaggctttaaatgcctttatagataagggtgattatctgaataatttatatgttaataaaacacgcacggcagctgaacaaaaaaggttaaatgagatattgcgcgcacaggtcattagtgggttaaaggcgtctgaggggctggcaaaattacttattgccagcggaataatgttatag

SEQ ID NO: 6363 - DNA, 858 bp, Escherichia coli
atgttgtacctgacgaaaatacgcaatgcggaaagtgaatttaccgggaacgagcaaaaaattgctgactttctgcgggccaacgtgagtgagctgaaatccgtctcttcgcgcaagatggcgaaacagctcggcatcagccagtcgagtattgtgaagtttgcccagaagctcggcgcgcaaggatttactgaattgcgtatggcgttaattggcgaatacagtgccagccgggagaaaacgaatgccacggcgctgcacctgcacagttcgattaccagtgatgattcgctggaagtgattgcccgcaaactgaatcgcgaaaaagagctggcgctggagcaaacctgcgcgttgttcgactacgcgcggctgcaaaaaatcattgaggccatcagtaaagcaccgcttatccagataacgggcctgggcgggtcggcgctggtggggcgcgatctgtcgttcaaactgatgaaaattggctatcgcgtggcctgtgaagccgacacgcacgtacaagccaccgtttctcaggcgctaaaaaaaggcgatgtacaaatcgctatctcttacagcggcagtaaaaaagagattgtcttgtgcgccgaggcagcgcgaaagcagggggcaacggtgattgccattacctcattaaccgattccccgctgcggcggctggcgcattacaccctcgataccgtttctggcgaaaccgaatggcgtagctcgtcgatgtctacccgcacggcgcaaaattctgttaccgacttactgtttgttggccttgtgcaactcaatgatgtggagtcattgaaaatgattgagcgcagcagtgagctaacacaacgcctgaaatga

SEQ ID NO: 6364 - DNA, 1305 bp, Escherichia coli
atgaaacggacaatgctctatctttctctgctggctgtcagctgtagcgtcagcgccgcaaaataccctgttctgacagaaagttcgccagagaaggcagggtttaacgtcgaacggcttaatcagatggatcgctggataagccagcaagttgatgccggttatcccggcgtaaacctgctgattataaaagataatcagattgtttatcgcaaagcctggggcgcggcgaaaaagtacgatggcagcgcgttaatggcgcagcctgtaaaagccaccaccgggacgctgtatgatctggcctcaaacaccaagatgtacgccactaacttcgcgctgcaaaagctgatgagcgaaggcaaactgcatcctgacgatcggattgcgaaatatattccagggtttgccgacagcccgaacgatgcgatcaaaggcaaaaacacgctgcggatttctgatctgctgcatcacagcggcggtttcccggcagatccgcaatacccgaataaagcggtcgcgggcgcgttatattcccaggataaaggccagacgctggagatgatcaagcgcacgccgctggagtatcagcccggcagcaagcatatctacagcgatgtcgattatatgctgcttggatttatcgtcgagtcggttaccggtcagccacttgaccactatgttgaagagtcgatttatcgcccgctcggcctgacgcatacggtgtttaatccgctactgaaaggctttaaaccgcaacaaattgccgccacggaactcaacggcaatacccgcgatggcgtgatccatttcccgaatatccgcacctccactctctggggtcaggtgcacgatgaaaaagccttttattcgatgggcggcgtttccgggcacgcaggtttgttttccaataccggcgatattgcggtgttaatgcaaacgatgctgaacggcggtggctatggtgatgtgcagctgttcagtgcggaaacggtgaagatgttcaccaccagctctaaggaagatgccacttttggcctcggctggcgcgtgaatggtaatgccaccatgacgccgacgtttggcacgctggcaagcccgcaaacctacggtcacactggctggaccgggacggtgaccgttatcgatccggtgaatcatatggcgattgtgatgttaagcaataagccgcattcgccagtagccgatccgcaaaagaatcccaatatgttcgaaagcggtcagttgccgattgcaacttatggttgggttgttgatcaggtatatgcggcgttgaagcagaagtaa

SEQ ID NO: 6365 - DNA, 765 bp, Escherichia coli
atgaatcaacaggatattgaacaggtggtgaaagcggtactgctgaaaatgcaaagcagtgacacgccgcccgccgccgttcatgagatgggcgttttcgcgtccctggatgacgccgttgcggcagccaaagtcgcccagcaagggttaaaaagcgtggcaatgcgccagttagccattgctgccattcgtgaagcaggcgaaaaacacgccagagatttagcggaacttgccgtcagtgaaaccggcatggggcgcgttgaagataaatttgccaaaaacgtcgctcaggcgcgcggcacaccaggcgttgagtgcctctctccgcaagtgctgaccggtgacaacggcctgactttaattgaaaacgcgccctggggcgtagtggcttcggtgacgccttccactaacccggcggcaaccgtaattaacaacgccatcagcctgattgccgcgggcaacagcgtcatttttgccccgcatccggcggcgaaaaaagtctcccagcgggcgatcacgctgctcaaccaggcgattgttgccgcaggcgggccggaaaacttactggttactgtggcaaatccggatatcgaaaccgctcaacgtttgttcaagtttccgggcatcggcctgctggtggtgaccggcggcgaagcggtagtagaagcggcgcgtaaacacaccaataaacgtctgattgccgcaggcgctggcaacccgccggtagtggtggatgaaaccgccgacctcgcccgtgctgcttag

SEQ ID NO: 6366 - DNA, 246 bp, Escherichia coli
atgcaaagaaaatcacatacatcacatgaatacaaacaggagtcgataagttttatttatcatatgttacccaccccatttttaatggttcttcgcataaccctatgtagcatttataataattatcagaatacatatcccatgaactgttgtattctgaaaatattattatactcaccccatttaaggtacaacataaacgatgagtttattcagggcataaaagaaatggatggatacctgtaa

SEQ ID NO: 6367 - DNA, 1071 bp, Escherichia coli
atgaaaattcactaccttgtcaccactctcgaaacgggaggcgctgaatttgcgattcctgatattgtgactactctacaagatcttggtcatgaggtgaaaatttatgtatgtgaaccccgagatatgggcgcggcaccgcgtctgaaagcggccggtttatcctggtgtttattatcaaatcggcggcgttctgttccagtgcttgtcggtgcttatctggcaaaaatcatttacgacaaacccgatctcatctggacttcgttaagttgggggacgcgtattggacaatggggcggccgacttatgggcattccggttatcagttttaaacatagcgccagcgtaaaaccagcaacctggcgtatgcgcagcatgtcacgtttatggattggcgattctgcaaccgtaactcaatacctgcatgaaaccatgcggatcccgaagcaacaagtgatgtgctggcctttttttcaggctaatccgcaagctgctcaagcgaaaaagtgggacggggtatcagttttacaattaggcaccgttggtcgcctgcatgaagttaaaaattacgcaggattaattactgcactcgcttcgtttgtcgataaaaacccgcaattgcgctcgcgaatccgactaacccttctcggtgagggagccgaacaagaggttttgaaaaagaccataacacaacacgccatggaggatgtagtttgtttagcggggttttctgcggatatcgaaaattttcttgccggattacatgtctatatccaaacttcccgctacgaagggatgtgcctcgccgcacacgaagccatgaatgcagggcttgcgatcattacgacccctgtaggtgaacttaaagaatcggtaattgatggtcataccggctatatacttaatggcgaactaactccagcactggaggaagtacttaaccgtattttcaatgaacccacagaattacaacactatgggcaaaatgcgcgtcagtatgtattacagaaattcagccatgaaaattttgtccagtctgcaatcaacattgttaatagacttattcactga

SEQ ID NO: 6368 - DNA, 1044 bp, Escherichia coli
atgcgctatcgcattttccttctcttttttttcgctttgttgccgacgtctttggtgtgggcggcaccagcgcaacgggcgttttccgactggcaggtcacctgtaataaccaaaacttttgcgtggcacgtaatacgggcgatcataacggactggtgatgaccctgagccgcagcgccggggcgcataccgatgccgttttacgtattgagcgcggcgggttgaagtcgccggatgcgtctgaaggggagatagcgccacggctgctgttagatggtgagccgttggcgttaagtggtgacaagtggcggatttcaccatggttactagtaaccgatgatacggcaaccatcaccgcgtttttgcagctgattcaggaagggaaggcaatcaccttacgcgatggcaatcagaccatttctctgaatggcttaaaagcggcgttgttgtttattgatgctcagcaaaagcgcgttggcagtgaaaccgcgtggataaagaaaggggacgaaccgccgctcagcgtaccgcccgcgcctgcgctgaaagaggtcgcggtggttaacccaacgccgacgccactctcactcgaagaacgcaacgatttgctggattatggaaactggcggatgaatggtctgcgctgctcgcttgatccgttacgtcgtgaggtgaatgtcactgcgctgaccgatgataaagcactgatgatgattagctgtgaggcaggggcctataacaccattgatttggcatggattgtgtcgcgtaaaaagccgctagcctcgcgcccggttcggttgcgtttgccgttcaacaacggtcaggagacgaatgaactggaactgatgaacgcaacatttgatgagaaatcgcgtgaactggtgaccttagcgaaagggcgcggattaagcgattgtggcattcaggcgcgctggcgctttgacggtcagcgttttcgcctggtgcgttacgccgcagaacccacctgcgataactggcatgggccagacgcctggcccacgttgtggatcacccgttaa

SEQ ID NO: 6369 - DNA, 576 bp, Escherichia coli
atgacgcaacaaatcaccctcattaaagacaaaattctctccgataactatttcaccctgcacaacattacctacgatctcacgcggaaagatggcgaagttatccgccataaacgtgaagtttacgatcgcggtaatggtgcgacgatcctcctgtacaacgcgaagaaaaagaccgtggttctgattcgtcagttccgcgtcgctacctgggttaatggcaatgaaagcgggcaactgattgaaacctgcgccgggctgctggataacgacgaaccggaagtgtgcattcgcaaagaagcgattgaagagacgggctatgaagttggcgaagtgcgcaaattatttgaactgtatatgtcgcctggcggtgtgactgagctaatccacttttttatcgccgaatacagtgacagccagcgcgctaacgccggtggtggtgtcgaagatgaagatattgaagtgcttgagctgccgttcagccaggcgctggagatgattaaaaccggcgagatacgtgacggtaagacggtgttattgcttaactatttgcaaacgtcacatttaatggactga

SEQ ID NO: 6370 - DNA, 618 bp, Escherichia coli
atgaaccgctttgtggtggccgaaccactgtggtgtacaggatgtaatacctgtctcgctgcctgttcggacgtgcataaaacgcaaggtttacagcaacacccgcgcctggccctggcgaagacgtcaacactcactgcccctgtcgtgtgtcatcactgtgaggaagccccttgcctgcaggtctgcccggtcaatgccatctcccagagggatgatgcgatccaactcaacgaaagcctttgtattggttgcaagctttgcgccgtggtctgcccatttggcgcaatcagcgcttcaggaagccgtccggtgaatgcccctgcgcaatatgtttttcaggctgagggctcactcaaagacggcgaagaaaacgtgtcgacccaacatgctttgctgcgctgggaaccgggtgtccagaccgtcgcggtgaaatgcgacctgtgtgatttcttgccagaaggtccggcctgcgttcgcgcttgtccgaatcaggcgttacggctgatcaccgacgatagcctgcaacgtcagatgaaagaaaaacagcgccttgccgcaagctggtttgccaatggcggggaggatcccctttccctcactcaggagcaacgctaa

SEQ ID NO: 6371 - DNA, 2019 bp, Escherichia coli
atggatgccctgcaattattaacctggtcgctgatcctctatctgtttgccagtctggcttcgctgtttttactcggtctggacagactggctattaagctttccggcatcacatcgctggtgggcggcgcgattggcatcatcagcggaattacgcaattacatgcaggcgtaactttagtcgcccgttttgccacaccttttgaatttgccgatttaaccctgcgaatggatagcctctcggcatttatggtgctggttatctccttgctggtggtggtttgttcgctctattcattgacttatatgcgcgaatacgagggtaaaggcgcggcggcgatgggcttctttatgaatcttttcatcgcatcgatggttgccctgctggtgatggacaacgctttttggttcatcgtgctgtttgaaatgatgtcgctgtcttcctggtttctggtcattgccaggcaggataaaacgtcgatcaacgctggcatgctctacttttttatcgcccacgccggatcggtgctgattatgatcgcctttttgctgatggggcgcgaaagcggcagcctcgattttgccagtttccgcacgcattcactttctccggggctggcgtcggcggtgttcctgctggccttcttcggttttggcgcgaaagccgggatgatgccgttgcacagctggttgccgcgcgctcaccctgccgcaccatcgcacgcttcggcgttgatgtctggcgtaatggccaaaatcggtattttcggcatccttaaagtagcgatggatctgctggcgcaaacgggtttgccgctgtggtggggcattctggtgatggcgatcggcgcaatctccgcgctcctgggcgtgctgtatgcgctggcggaacaggatatcaaacggctgctggcctggagtaccgtcgaaaacgtcggcattattttgctggcggtcggtgtggcgatggtcggtctgtcactgcacgacccgctgctcaccgttgttggactgctcggcgcgctgtttcatctgctcaaccatgcgctgttcaaagggctgctgtttctcggcgcgggtgcgattatttcgcgtttgcatacccacgacatggaaaaaatgggggcactggcgaaacgtatgccgtggacagccgcagcatgcctgattggttgcctcgcgatatcagccattcctccgctgaatggttttatcagcgaatggtacacctggcagtcgctgttctcactaagtcgtgtggaagccgtagcgctacaacttgcgggtcctattgctatggtgatgctggcagtcactggtgggctggcagtaatgtgcttcgtcaaaatgtacggtattactttctgtggagcgccgcgcagtacacacgctgaagaggcacaggaagtgccaaatacgatgatcgtcgccatgctactgctcgcggcactctgcgtattcattgcgcttagtgccagttggctggcaccgaagataatgcacattgcccatgcgtttaccaatacccctcccgtcactgtcgccagcggaatagcacttgtacccggcacgtttcatacacgggtcactccctcattactgttgctgttactactggcgatgcctttgctgcctggcctttactggctgtggtgtcgttcgcgccgcgcagcgtttcgtcgcacaggagatgcctgggcatgcggctacggctgggataatgcgatggccccgtcaggcaatggcgtgatgcagccgctgcgtgtggtcttttgtgcgctatttcgtctacgacaacagctcgaccctacgctgaggctgaacaaaggtcttgcgcacgtcaccgccagggctcagagcacagaacccttctgggatgagcgggtgatccgccccatcgtgagcgccacccaacggctggccaaagaaatacagcatctgcaaagcggcgactttcgtctctattgcctgtatgtggtcgccgcactggttgtgctgctaatcgctattgccgtctaa

SEQ ID NO: 6372 - DNA, 948 bp, Escherichia coli
atgagacaaactctttgcgacggatatctgatcatttttgcgttagcacaggccgtgattctgctggcgctaaccccgctttttacggggatttcccggcagatacgcgcgcgaatgcactcccgtcgcggaccggggatctggcaggattatcgcgatatccacaaactgtttaaacgccaggaagttgcgccgacatcttcaggtctgatgttccgcctgatgccgtgggtattaatcagcagcatgctggtgctggcgatggccctaccactatttattaccgtttccccttttgcgggcggcggcgatctgatcacccttatctatcttcttgccctgtttcgttttttctttgctctttccgggctggataccggaagcccgtttgcgggagtcggtgccagtcgcgagttgacgctcggcattctggtcgaacccatgctcattctctcactgctggtattggcgctgatagcggattccacgcatatcgagatgatcagcaagacgctggcgacgggctggaactcgccgctaaccaccgtactggcgttactggcctgtggttttgcctgcttcattgagatgggaaaaattccctttgatgttgctgaagcagaacaggaattacaggaaggcccgctgaccgaatattccggtgccgggctggcgctggcgaagttggggctggggctgaaacaggtcgtgatggcatcactgtttgtggccctgtttctgccctttgggcgcgcgcaagaactttctctcgcctgcctgctgacttcacttgtcgttacgctgctcaaggttttgctgatttttgtactggcctcaatcgcagaaaacacgctggcacgcgggcgttttttactcattcaccatgtgacctggcttggcttcagccttgctgcgcttgcctgggtcttctggttaaccggtctgtaa

SEQ ID NO: 6373 - DNA, 1440 bp, Escherichia coli
atggaaaatcttgctctgacgacgttattgctgccttttatcggcgcactggtcgtttcgttttcgccacaacgtcgggccgccgaatgggggattttgttcgccgcgctgaccacgctgtgcatgttgtcgctgatctccgcgttttatcaggccgataaagttgccgtcacgttaacgttggtccacgtgggggatgtggcgttgtttggcctggtcattgatcgcgtgagtacgctgattctgtttgtggtggtgttcctcggtttgctggtcacgatctactccacgggttatctgacggataaaaatcgcgaacacccgcataacggcacgaatcgttattacgcatttttgctggtttttatcggcgcgatggcgggactggtactctcctcgacgctgctcggtcagttgttgttttttgaaattacgggcggctgctcctgggcgttgatcagttattaccagagcgataaagcgcagcgttcagcactaaaagcgttacttatcactcatatcggttcgctggggttgtatcttgccgccgccacgctgtttttgcagaccggaacgtttgcgctcagcgctatgagcgagttacacggcgacgcacgttatctggtttatggcggcatcctgtttgccgcgtgggggaaatcggcccagctaccgatgcaagcgtggctaccggatgcaatggaagcgccaacaccgatcagcgcctatctccacgccgcatcgatggtgaaagtgggcgtttacatttttgcccgtgccattatcgacggcggcaatatcccgcatgtgattggcggcgttggcatggttatggcactggtcaccattctttacggcttcctgatgtatttgccacagcaggatatgaagcggttgctggcctggtcgaccatcactcaacttggctggatgtttttcggcttgtcgctctccatcttcggctcgcgactggcgctggagggcagcatcgcctacatcgtcaaccacgcgttcgctaaaagcctatttttccttgtagcaggtgcgctgagttacagctgcggcacgcgcttgttgccgcgtctgcgtggcgtattgcacaccctgccgttgccaggcgtgggtttctgcgtagccgcgctggcgattactggcgtaccgccgttcaacggcttcttcagtaaattcccgctgtttgctgccggtttttcgttgtcagtggagtactggatcctgctgcccgccatgattctgctgatgattgaatcggtcgccagtttcgcctggtttattcgctggtttggtcgcgtcgtgcctggcaaaccgagcgaggccgtcgccgatgccgcaccgctgccaggatcaatgcgcctggtgttgattgtactgattgtgatgtcgctgatttccagcgtaatcgccgcgacctggttgcagtaa

SEQ ID NO: 6374 - DNA, 651 bp, Escherichia coli
atgaccggttctatgatcgtaaataatctggcgggactgatgatgctgacatcgctgtttgtgattagcgtcaaaagctatcgcctgtcatgcggattttacgcctgccagtcgctggtgctggtgtctattttcgccactctctcgtgtctgttcgtcgcagagcaactgctgatctggtccgccagcgcctttatcaccaaagtgctgctggtaccgttaatcatgatttacgctgcacgaaatattccccagaacatcccggaaaaagcgttattcggtccggcaatgatggcattgctcgcggcattaattgtcctgctttgcgcatttgtcgttcagcccgtgaagctaccgatggctaccgggctgaaaccggcgctggcggtggcgttaggtcattttctgcttggcctgctgtgcattgtcagccagcgcaatatcctgcggcaaatttttggttactgcctgatggaaaacggctcccatctggtgctggcgcttctagcctggcgtgcaccggaactggtggaaattggtatcgctaccgacgccatcttcgccgtcattgtgatggtgttactggcaagaaaaatatggcgtacccacggcacgctggacgtgaacaacttgaccgcgctgaagggataa

SEQ ID NO: 6375 - DNA, 1581 bp, Escherichia coli
atgagttattctgtgatgttcgctttactcctgctcacgccgctgcttttttcgctgctctgttttgcctgccggaaacgggggcactctccgactcgcgcggtgacagtattacatagcttagggatcacactgctgctgattctggcactctgggtggtccaaactgccgctgatgcgggagaaatattcgcagcgggactgtggcttcatattgatggtctgggcggtttgttcctcgccattcttggtgtgattggctttctcaccggtgtttactcgattggctacatgcgtcatgaagtggagcacggcgagctttcacccgttacgctgtgcgattactacggtttcttccatctgtttttgttcaccatgctgctggttgttaccagcaataacctgattgtgatgtgggcggcgatcgaagccaccaccttaagctcggcgtttctggtaggcatttacggtcagcgttcatcgctggaagctgcatggaagtacatcattatttgtactgttggtgtcgcttttggtctgttcggtaccgtgctggtatacgccaacgccgccagcgttatgccgcaggcagaaatggcgatattctggagcgaggttcttaagcaatcgtccttgcttgacccaacattaatgctgttggcctttgtgtttgtgctaattggctttggcactaaaaccgggctattccccatgcacgcctggctgccagatgctcacagtgaagcgccgagtccggtcagcgccctgctctccgccgtattgctgaactgcgcgctgttggtgcttattcgctattacatcattatttgccaggccatcggcagcgatttccccaaccggttgttgctcatcttcggcatgttgtcggttgccgtggcggcatttttcattctggtacagcgggacattaagcgtctgctggcgtactccagcgtggagaacatgggactggtcgcggtggcgctaggcattggcgggccgctgggaatttttgctgcgctgctgcacaccttaaaccacagtctggcaaaaacgctgctgttctgcggttccggcaatgtactgctcaagtacggcacgcgcgatctcaacgtcgtctgcggaatgctcaaaatcatgccatttaccgccgtgctgtttggcggcggtgcgctggcgctggccgggatgccgcccttcaacatttttcttagcgaatttatgaccgttaccgccggactggcgcgtaatcacctgctgattatcgtcctgctgttattgctgttaacgctggtgctggcgggcctggtacggatggctgcgcgggtgttaatggcgaaaccgccgcaggccgttaaccggggtgaacttggctggttgaccacctcgccaatggtgattctgctggtcatgatgctggcgatgggaacgcatattccacaacctgtcatcaggatcctagcgggcgcttccactatagtcctctcagggacgcacgacctgcctgcacaacgtagcacctggcatgattttttgccttcaggcaccgcatctgtttcggagaaacacagtgaacgttaa

SEQ ID NO: 6376 - DNA, 1716 bp, Escherichia coli
gtgaacgttaattcatcgtcaaatcgtggcgaagcgattctcgccgccctgaaaacgcagttccccggcgcggtgctggatgaagagcgacaaacgcctgaacaggtcaccattacggtgaaaataaatctgctgcctgacgttgtacattatctttattatcaacatgatggctggcttccggtcctgtttggcaacgacgagcggacacttaacggtcattacgcggtttattatgccctttcaatggaaggggccgaaaaatgctggatcgtggtgaaggcactggtcgatgccgacagtcgggagtttccgtcagtcacaccgcgcgtccctgccgcggtctggggcgagcgagaaattcgcgatatgtacgggttgattccggttggcctgccggatcagcgtcggctggtgttgcccgatgactggccggaagatatgcatccactgcgcaaagacgcgatggattatcgactgcgcccagaaccgacgactgataccgaaacgtatccgtttatcaacgagggcaacagcgatgcgcgggtgatccctgtcggcccgctgcatatcacctccgatgaaccaggtcacttccgcttgtttgtggatggcgagcaaattgtcgatgctgattaccgcctgttttatgtccatcgcggcatggagaaactggcagaaacgcggatgggctacaacgaagtgaccttcttgtcggaccgcgtgtgtgggatttgcggttttgcccacagtgtggcctataccaactcggttgaaaatgcactggggattgaggtgccgcaacgagcgcatactattcgctcgattctgctggaagtcgaacggctgcatagtcatttgctcaaccttggcctctcctgccattttgttggttttgataccggctttatgcaatttttccgcgtgcgggaaaagtcgatgacgatggcggaattgctgaccgggtcgcgtaaaacctacggtctgaatctgattggtggtgttcgccgcgatattctcaaagagcaacgtctgcaaacgctgaaactggtgcgcgagatgcgtgccgacgtgtcggagctggtagagatgctgcttgccacgccgaatatggaacaacgcactcagggcattggcattctcgaccgacaaatcgcccgtgattatagccccgtagggccgctgatccgcggcagtggttttgcccgtgatttgcgctttgatcacccctacgccgactacggcaatattcccaaaacgctgtttacctttaccggcggcgatgtcttctcccgcgtgatggtccgtgtcaaagagacgtttgattcgctggcaatgctggaatttgccctcgacaacatgccggataccccactgctgaccgaaggctttagctataaacctcacgcattcgcgctgggctttgttgaagcgccacgcggtgaagacgtgcactggagcatgctcggtgataaccaaaaattgttccgctggcgctgtcgtgccgccacctacgccaactggccagtgctgcgttacatgctgcgcggcaataccgtttctgacgcaccgctgattatcggtagccttgatccctgttactcctgtaccgaccgtgtgacgctggttgatgtgcgcaagcgccagtcaaaaaccgtgccgtataaagagatcgaacgctacggcattgatcgtaaccgttcgccgctgaagtaa

SEQ ID NO: 6377 - DNA, 546 bp, Escherichia coli
atgctgaagttactgaaaactattatgcgcaccggaaccgcgacggtgaaatatcccttcgcgccactggaggtcagcccaggctttcgcgggaaaccggacctgatgcccagccaatgtattgcctgcggtgcctgcgcctgtgcttgtccggcaaatgcgctgactatccagaccgacgaccagcaaaatacgcgcacctggcagctctatctggggcgttgtatttactgcggacgttgtgaagaagtgtgcccgaccagagccattcagcttaccaataactttgaactgaccgtcaccaataaagccgatctctatacccgcgcgacgttccatctacaacgttgcagccgttgcgaacgcccgtttgccccgcaaaaaaccgtcgcactggctgcagaactgttggcacagcaacaaaatgcaccacaaaaccgcgaaatgttacgggcgcaagcgagcgtctgcccggaatgcaaacaacgcgcgacgctgatcaacgacgacacaaatgaaccgctggtggctaaggagcagctatga

SEQ ID NO: 6378 - DNA, 759 bp, Escherichia coli
atgagtccagtgcttacgcaacatgtcagccagcccattacgctggacgagcaaacgcaaaagatgaagcagcatttgctacaggatatccgtcgctcggcttacgtttatcgcgtcgattgcggcggctgtaacgcctgcgaaatcgaaatttttgctgccatcacacccgtattcgacgcagaacgttttggcattaaggttgtttcatcaccgcgtcacgccgatattttgttatttactggcgcagtcacccgggcgatgcgtatgcctgcacttcgggcatatgagtctgcccccgatcataaaatctgtgtttcctacggcgcgtgcggtgtcggcggcggtattttccacgatctttacagcgtctggggcggcagcgacaccattgtccccattgatgtttggatccccggctgcccgccaacaccggtcgccaccattcacggtttcgccgtggcgctcggtttgctgcaacagaagattcacgcggtggattatcgcgatcccaccggggtgaccatgcaaccgctgtggccgcagatcccgccatcacagcgtatcgccattgagcgagaagcgaggcggttggcgggctatcgtcaggggcgagaaatttgcgatcggctcctgcgccatttaagcgacgatcctacaggaaatcgggttaacacctggttgcgcgaagctgacgatccacgtctcaatagtatcgttcagcaactctttcgcgttctccgggggttacatggctga

SEQ ID NO: 6379 - DNA, 414 bp, Escherichia coli
atggctgaggcgtgcggggaaattgttttctggacgctgcgaaaaaagtttgtcgccagtagcgacgagatgccggaacacagctctcaggtaatgtattactcgctggctatcggccatcacgttggcgtgattgattgtctgaatgtcgccttccgctgcccactgacggaatacgaagattggcttgcactggtcgaagaggagcaagcccgacgtaagatgctgggggtgatgacttttggtgagattgttattgacgccagccacaccgccctgttgacccgggcattcgcgccagtggcagatgacgcgacgtcggcgtggcaggcgcgtagcattcaattcattcatctgttggatgaaattgtgcaggaaccggccatctatctgatggccagaaaaattgcgtga

SEQ ID NO: 6380 - DNA, 2013 bp, Escherichia coli
atggctatgtcagacgaggcgatgtttgccccgccgcaaggaataacaattgaagcggtaaacggaatgctcgcggagcggttagcgcagaaacacggcaaggcgtctttattacgcgccttcatcccgctgccgccgccgttcagcccggtacaacttattgaactgcatgttctcaaaagcaacttctattaccgctaccatgatgatggcagcgatgtgacggcaacaacagagtatcagggtgagatggtcgattattcgcgccacgccgtccttctcggcagtagtggaatggcggagctacgctttattcgcactcacggcagccgttttactccccaggattgcacactgtttaactggctggcacacataatcactccggttctgcaatcatggctcaatgatgaagaacagcaggtggcgctgcgtttgctggagaaagatcgcgatcatcatcgggtactggtggatatcactaatgcagtgttgtcacatcttgatctcgacgatctgatcgctgacgtcgctcgtgagatccatcattttttcggtctggcttcagtcagtatggtactgggcgatcatcgaaagaacgagaagttcagcctgtggtgcagcgatctttctgcctcacattgtgcgtgtctgccacgctgtatgcctggcgaaagtgtattgctgacacaaacgctacaaacccgacaaccgaccttgacgcaccgtgcagacgatctgtttctctggcaacgcgacccgttattacacttacttgcatctaacggctgcgaatctgcgctccttataccgctcacctttggcaaccatacaccgggtgcattgttgctggcgcatacctcttccactctctttagtgaggaaaactgccagctactacaacatattgccgatcgcatcgctattgccgttggcaatgccgatgcctggcgtagcatgaccgatttgcaggaaagcttgcagcaagaaaaccaccagcttagcgagcagctcctttcgaatctgggcgtcggtgacattatctatcaaagccaggcaatggaagatttgctccagcaggtagatattgtggcgaagagcgacagtacggtgttgatttgtggtgaaaccggaaccggcaaagaggtgatcgccagagcgatccatcaacttagcccacgacgcgacaagccactggtcaaaatcaactgcgctgccatccccgccagtcttctggaaagtgagttattcggtcatgacaaaggggcatttactggtgcgattaatacccatcgtggtcgttttgaaattgccgatggcggcacgttgtttctcgatgaaattggcgatctgccgttagaacttcagcctaaactgctgcgcgtattgcaggaacgggagattgagcgtctcggcgggagtagaacgatcccggtaaatgtcagagtcattgccgccaccaaccgtgatttgtggcaaatggttgaagatcgccagtttcgcagcgatctcttttatcgcctgaatgtcttcccactggaactgccgccactgcgcgaccgtccggaagatatccctcttttagcaaagcatttcacgcaaaaaatggcgcgccatatgaatcgcgcaattgacgccatcccgaccgaggcgctacgccagttgatgtcgtgggactggccgggcaacgtgcgcgagctggaaaacgtgattgagcgagcggtactactgactcgcggtaacagtctgaatttacatcttaatgtccgacaaagccgtttactgccgacgctaaatgaagattcagcgcttcgcagttcaatggtgcagttgctgcacccgacgacgccagagaatgacgaagaagaacgtcagcgcattgttcaggtattgcgagaaaccaatggcattgttgccgggccccgtggcgcggcgacgcgattagggatgaagcgcaccacgctgctgtcacgaatgcagcgtctggggatctcggttcgcgaggtgttgtaa

SEQ ID NO: 6381 - DNA, 849 bp, Escherichia coli
atgagaaacaaactctctttcgacttgcagttgagcgccagaaaagcggcaatcgctgaacggattgccgcccataaaattgcccgcagcaaagtgtcggtctttttaatggcgatgtccgcaggtgtgtttatggcgatcggatttactttttaccttaccgttatcgccgatgccccgtcttcacaggcattaacccatctggtgggaggcctttgctttacactcggctttattttgctggcggtttgcggcaccagcctgttcacctcgtcggtaatgacggtgatggcaaaaagtcggggcgttattagttggcgaacatggctgattaacgcacttctggtggcctgcggtaatctggcaggtattgcctgtttcagtttgttaatctggttttccgggctggtgatgagtgaaaacgcgatgtggggagtcgcggttttacactgcgccgagggcaaaatgcatcatacatttactgaatcagtcagcctcggcattatgtgcaatgtgatggtttgcctggcgctgtggatgagttattgcggacgttcgttatgcgacaaaatcgtcgccatgattttgcccatcaccctgtttgtcgccagtggctttgagcactgtatcgccaatttgtttgtgattccgttcgccattgccattcgccatttcgcccctacctccttctggcaactggcgcacagtagcgcagaccattttccggcactgacggtcagccattttattaccgccaatctgctcccggtgatgctgggtaatattatcggcggtgcagtgctggtgagtatttgttatcgggctatttatttacgtcaggaaccctaa

SEQ ID NO: 6382 - DNA, 855 bp, Escherichia coli
atggcgctgccagtgaacaaacgcgttctcaaaattctgtttattctctttgttgttgccttctgcatttatttaataccgcgcatcgccatcaattttttctattaccctgacgacaaaatctacggtcccgaaccctggtcggcggaatccgtcgaatttacggctaaggacggtactcatctgcaaggctggtttatcccttcttcgacgggccctgctgataacgccattgctaccattattcatgctcacggcaatgccggaaatatgtccgcccactggccgctggtcagttggttacccgagcgtaatttcaacgtttttatgtttgattatcgcgggtttggtaaatcaaaaggtacgccgtcccaggccggattgctggacgatacgcaaagtgccatcaatgtggtgcgccatcgcagtgatgtaaacccacaacggctggtgctgttcgggcagagtattggcggggcgaatattctggatgttattggtcaggatgatcgtgaaggcatacgtgcggtgatcctcgactccacatttgcctcttatgcgaccatcgccaaccagatgatccccggcagtggctacttacttgatgagagttacagcggcgaaaattacatcgccagcgtcagcccgatcccgcttttactcattcacggtaaagctgatcacgttatcccatggcagcacagcgaaaagttgtatagcctggcaaaagagccaaaacggttgatcctaatcccggatggcgaacacattgatgctttttctgatcgtcacggcgatgtttatcgcgaacagatggtggattttatccttagcgcgttgaatccgcagaactaa

SEQ ID NO: 6383 - DNA, 1281 bp, Escherichia coli
atgatgcctacgcttgctccaccatctgtcctttcggctccccagcgccgctgccagatcttgctgacactctttcagccggggttgaccgccaccacggcaactttcagcgagcttaatggtgtggatgatgatattgccagtcttgatatcagcgaaacaggacgggagatcctgcgctatcatcaactcacactgactactggttatgacggtagctaccgggttgaaggtacagtgcttaaccaacgtttgtgtttatttcactggctacgacgtggtttccgtctgtgtccgtcatttattaccagccatttcacccccgccctgaagagtgaactgaagcggcgcggaattgcgcgtaacttttacgacgataccaatctacaagcgttagtgaatctctgctcccgacggctgcaaaaacgctttgaaacacgcgatattcatttcctgtgtctgtatctgcaatattgtttgctgcaacatcacgctggaattacgcctcagtttaatccgctccaacgtcgctgggcggaatcctgccttgaatttcaggtagcgcaggaaattggacgccactggcagcgtcgggcactccagcctgtaccgcctgatgagccactgtttatggctctactgttttccatgttgcgggttcccgatccactgcgggatgcgcatcagcgggacagacaactgcgtcagtctatcaaacgtctggtaaaccattttcgtgagctgggaaatgttcgtttttatgatgaacaggggttatgcgatcagctttatacccacctcgcccaggcgttaaatcgcagtttgtttgccatcggtattgataacaccctgccggaagagttcgcccgcctgtatccacgcctggtgcgtaccacccgcgcggcgctggtcggatttgaaagtgaatacggcgtccatctttctgatgaggaaagcggtctggtcgcggtgatttttggtgcctggctaatgcaggaaaacgacctgcatgagaaacagattattctactaaccgggaatgacagcgagcgagaagcgcagattgagcagcagctacgcgaactaacgttactgccgctcaacattaaacatatgtcggtaaaggcatttttgcagacaggcgctccgcgcggcgcggcactgattattgcgccttataccatgccgttaccgctcttttcaccaccgctgatctatacggacctgacgttgacaacacatcaacaggagcagatccgcaaaatgctcgaatcagcatga

SEQ ID NO: 6384 - DNA, 891 bp, Escherichia coli
atggaactacggcatttacgctatttcgtcgcagtggcgcaggcactgaactttacccgtgcggcggaaaaactgcatacctcacagccttcgttaagcagccagatccgcgatcttgaaaactgtgtcggtgttccgttactggtgagggataagcgcaaagtcgcgttgacggcggcgggagaatgttttctccaggacgcgctggcaatcctcgaacaagcggaaaatgccaaattacgggcgcggaaaattgttcaggaagacagacaattaaccattggctttgtgccatcggcggaagtgaatttactgccaaaagtattaccgatgtttcgtctcagacagccagacaccttaattgagctggtgagtttaatcaccacggaacaggaagaaaaaattcgccgtggtgaactcgacgtcggcttaatgcgccatcccgtttatagcccggagattgattatctggagctttttgacgaaccattagtggtggtgttaccggttgatcaccctttagcacatgaaaaagagatcactgccgcgcaactggatggcgtgaatttcgtcagtactgatccagcgtattccggttcgcttgcgccgatcgttaaagcgtggtttgcgcaagaaaacagccagccaaatattgtccaggtggcaacgaatattctggtgaccatgaatctggtggggatggggctgggcgtcactttgatacccggttatatgaataattttaataccggccaggtggtatttcgacccattgccggaaatgtgcctgccattgctttactgatggcgtggaagaaaggggagatgaagccggcattacgcgatttcatcgccattgtgcaggaacgtttggcatgcgtaacggcataa

SEQ ID NO: 6385 - DNA, 1362 bp, Escherichia coli
atgaccacaccctcagatttgaacatttaccaactgattgacacccaaaacggtcgggtcactccgcgtatttataccgacccggacatttaccaactggagcttgagcgcattttcggtcgttgctggctatttctcgcccacgaaagccagatcccaaaaaccggtgatttctttaacacctacatgggagaagatgcggttgtcgtggtgcgccagaaagacggcagcatcaaggcgtttctcaaccaatgccgccaccgggccatgcgtgtgagttatgcagattgcggcaacacgcgcgcctttacctgcccgtatcacggctggtcttatggcattaacggcgagttgatcgatgtaccgctggaacctcgcgcctacccacaagggttgtgtaaatcccactggggactaaacgaagttccttgtgtggagagttataaagggctgatttttggcaactgggataccagcgcaccgggcctgcgtgattaccttggtgacattgcctggtatctggatggcatgctggatcgtcgcgaaggcggcaccgaaattgtcggcggcgtacaaaagtgggtgatcaactgcaactggaaattcccggcagagcagttcgccagtgaccagtatcatgctctgttcagccatgcttctgccgttcaggtattaggggcgaaagatgatggcagcgataagcgtctcggtgatggacaaactgcccgcccggtgtgggaaaccgccaaagatgcgctgcagtttggtcaggacggtcacggcagcggtttcttctttactgaaaaaccggatgctaatgtctgggtcgatggcgcagtttccagctattaccgcgaaacctatgccgaagcagaacaacgtttaggtgaagttcgcgccctgcgcctggcgggtcataacaatattttccccacgctttcatggctcaacggcactgccacgctccgcgtctggcatccgcgcggccctgatcaagtcgaagtgtgggcgttctgtattactgacaaagccgcctccgatgaagttaaagccgcttttgaaaacagcgccactcgtgcttttggtcctgctggttttctcgagcaggatgactcggagaactggtgtgaaatccagaaattgcttaaaggccaccgcgcccgcaacagcaaactgtgtctggaaatggggcttggtcaggaaaagcaccgcgacgacggcattcctggcattactaactatatcttttcagaaacggccgctcgtggaatgtaccaacgctgggccgatcttctgagtagcgaaagctggcaggaagtgctcgataaaaccgccgcttaccagcaggaggtgatgaaatga

SEQ ID NO: 6386 - DNA, 519 bp, Escherichia coli
atgagtgcgcaagtttcactggagttacatcaccgcattaaccagtttctctttcacgaagccagtctgctggatgactggaaatttcgtgactggctggcacagctcgacgaagaaattcgttacaccatgcgcaccacagttaacgcgcaaacacgcgaccgccgcaaaggcgtccagccaccaacgacctggatttttaatgacactaaagaccagctggagcggcgaatcgcccgtctggaaacgggcatggcctgggcagaagagccgccatcacgcactcgtcacttaatcagcaactgccaggtaagcgaaaccgacatcccaaacgtatttgctgtgcgggtgaattatctactttatcgggcacaaaaagagcgcgatgaaacattctatgttggaacgcgtttcgacaaagttcgccgtctggaagatgacaactggcgcttgctggaacgggatatcgtcctggatcaagcggtgatcacttcccataacctgagtgtactgttctga

SEQ ID NO: 6387 - DNA, 321 bp, Escherichia coli
atgaatcgaatttatgcgtgtcccgttgcggatgtgccggagggtgaggctctccggatcgatacctcgcccgtcatcgccctgttcaacgtaggcggcgagttttatgccattaacgatcgttgcagccatggtaatgcgtcgatgtcagaagggtatctggaagatgacgccacggtggagtgcccgctgcacgccgccagtttttgcctgaaaacggggaaagcattatgcctgcccgccaccgatccgctaaccacttatccagtacacgttgaaggtggtgacatcttcatcgacttaccggaggcgcagccatga

SEQ ID NO: 6388 - DNA, 813 bp, Escherichia coli
atgagcgatctgcataacgagtccatctttattaccggcggcggttcgggattaggcctggcgctggtcgagcgatttatcgaagaaggcgcgcaggttgccacgttggaactgtcggcggcgaaagtcgccagtctgcgtcagcgatttggtgaacatattctggcggtggaaggcaacgtgacctgttataccgattatcaacgcgcgatcgatcagatcctgactcgttccggcaaactggattgttttatcggcaatgcgggcatctgggatcacaatgcctcactggttaatactcccgcagagacgctcgaaaccggcttccacgagctgtttaacgtcaacgtactcggttacctgctgggcgcaaaagcctgcgctccggcgttaatcgccagtgaaggcagcatgattttcacactgtcaaatgccgcctggtatcctggcggcggtggcccgctgtacaccgccagtaaacatgccgcaaccggacttattcgccaactggcttatgaactggcaccgaaagtgcgggtgaatggcgtcggcccgtgtggtatggccagcgacctgcgcggcccacaggcgctcgggcaaagtgaaacctcgataatgcagtctctgacgccggagaaaattgccgccatattaccgctgcaatttttcccgcaaccggcggattttacgggtccgtatgtgatgttggcatcgcggcgcaataatcgcgcattaagcggtgtgatgatcaacgctgatgcgggtttagcgattcgcggcattcgccacgtagcggctgggctggatctttaa

SEQ ID NO: 6389 - DNA, 1203 bp, Escherichia coli
atgaaagaaaaaacgatcattattgtcggtggcgggcaagcggcggcaatggctgcggcctcgctacgccagcaagggttcaccggtgagctgcatctgttttccgatgagcaacatcttccttatgaacgccccccgctctcgaaatccatgttgctggaagattccccacagttgcagtctgtgttacccgctcactggtggcaggaaaacaatgttcatctgcattccggtgtaaccatcaaaacattgggccgcgacacacgagagttagtgttagctaacggcgaaagctggcactgggatcagctttttatagcaaccggcgcggcagcccgaccgctgccgttgcttgatgcactgggagaacgctgctttactctgcgccatgccggcgatgccgccagactgcgagaagttctgcagcccgaacggtcagtcgtgattgtcggtgccggaactattggtctggaactggctgccagcgccacgcagcgcggatgtaaggtgacagtgattgaactggcggcaaccgtcatgggccgtaatgcaccaccgcccgtgcaacgctatcttttgcagcgccatcagcaggctggtgtgcacattctgctcaataatgccattgaacatgtggtcgatggtgaaaacgtagaactgacgctgcaaagtggcgaaacgcttcaggccgatgtggtgatttacggtattggtatcagcgccaacgaccaactggctcgcgaggccaaccttgatactgccaatggcattgtcattgatgaggcttgccgcacctgcgatcccgcgatctttgccggtggcgatgtggcaatcacccgtcttgataatggtgcactacaccgctgcgaaagctgggaaaacgccaataaccaggcgcaaattgccgcttccgcaatgttggggctaccgcttccgcggctgccgccgccgtggttctggagcgatcagtacagtgataacttacagtttattggcgatatgcatggcgatgactggctttgtcgtggcaacccggaaactcagaaggcgatttggtttaatctgcaaaacggcgtgcttatcggtgcagtcacgctgaatcagggacgtgagattcgcccaatccgcaaatggatccagagcggcaaaacgtttgatgcgaaactgctgacagatgaggacatcgcgcttaaatcactgtaa

SEQ ID NO: 6390 - DNA, 1062 bp, Escherichia coli
atgaaaacgatgctggcagcttatttaccaggaaattcgaccgtcgatctgcgggaagttgcggtgccgacgccgggtattaaccaggtactgatcaaaatgaaatcctccggaatttgcggaagcgatgtccactatatctaccaccagcaccgcgctacggcggcggcacccgataaaccgttataccagggatttatcaacggtcatgaaccgtgcgggcaaattgtggcgatggggctaggctgccaccattttaaagagggcgaccgtgtgctggtgtatcacatttctggctgtggtttttgcccgaactgccgtcgtggttttcctatctcttgtactggcgaaggaaaagcggcttacggctggcagcgtgacggcggccatgctgaatacctgctggcggaagaaaaagatctgatcctgctcccggacgcgctgagctatgaagatggtgcgtttatcagttgcggcgttggtacagcgtatgaagggattttgcgcggcgaagtttccggcagtgataacgtgctggtggtcggtctggggccggtcggcatgatggcgatgatgctggcgaaaggtcgcggtgcaaaacggatcatcggcgttgatatgctgccggaacgtctggcgatggcgaaacagttaggggtgatggatcacggctatttagcaacgaccgaaggtctgtcgcagattatcgccgaactcacccacggcggcgcggatgttgcgctcgattgttccggtaatgccgcaggtcgcttgctggcactgcaatccactgctgactggggacgcgtggtttacattggtgaaaccggaaaagtcgagttcgaggttagcgccgacctgatgcaccatcaacggcggattatcggctcctgggtgaccagtctgttccatatggaaaaatgcgcccacgatttaacggactggaaactgtggccgcgtaacgccattacccaccgtttctcgctggaacaggcgggagatgcttatgcactgatggcaagcggcaaatgtgggaaagttgtgattaatttcccggattaa

SEQ ID NO: 6391 - DNA, 1512 bp, Escherichia coli
atgttcacggcaacagaagcagtcccggtagcaaaagtggtggcaggaaataagcgttatcccggcgtcgttgcgttggataacgttaacttcacgctcaataaaggcgaagttcgtgcgctgttaggcaaaaacggcgcgggcaaatcgaccctcattcgaatgcttaccggcagtgaacgtccggatagcggtgatatctggattggcgagacgcgactggaaggtgacgaagctacgctgactcgccgtgccgctgaactgggggttcgtgcggtttatcaggagttaagtctggtggaagggctgacggtggcggaaaacctctgcctcggtcagtggccccgccgcaacggcatgattgattacctgcaaatggcgcaggacgcccaacgttgcttgcaggcgttgggcgttgacgttagccctgaacaacttgtttcaacgctaagcccggcgcaaaagcaactggtggaaattgcgcgggtgatgaagggcgagccgcgcgtggtcattcttgatgaacccaccagctcgcttgccagtgcggaagttgaactggtgatcagcgcggtgaaaaagatgtcggcactgggcgtggcggtgatttatgtcagccaccggatggaagaaattcgccgcattgcctcctgtgccaccgttatgcgcgatggtcaggtagcgggcgatgtgatgctcgaaaacacctctacgcatcatattgtgtcgctaatgctcgggcgcgatcacgttgatattgcgccggttgcccctcaggaaattatggatcaagccgtgctggaagtccgtgcgttacgccataagcccaagctggaggatatcagctttacgctacgtcgcggcgaagtgctcggcattgctggcctgctgggggcagggcgcagtgaattgttgaaagccatagttgggctggagacgtatgaacagggcgaaattgttatcaacggcgagaaaatcacgcgccccgattacgacgacatgctgaaacgcggcattggctatacgccagaaaaccgcaaagaagcggggatcattccctggctgggcgttgacgaaaatacagtgctgaccaatcggcaaaaaatcagcgccaacggtgtgctgcaatggtccaccatccgccgcctgaccgaagaggtgatgcagcggatgacggtcaaggccgccagtagcgaaacgcccatcggcacgctttctggcggcaatcagcaaaaagtggtgatcggtcgttgggtctatgccgccagccagattttgttgctcgacgagccaacgcgtggcgtcgatatcgaagccaaacagcagatttaccgtattgtccgcgagctggctgccgaaggaaaaagcgtggtgtttatctccagtgaagtggaggagttgccgctggtgtgtgaccgcatcctgttattacagcacggtacgttctcgcaggagtttcactcgccggtcaatgtggatgagctgatgtccgccattctgtctgtgcactga

SEQ ID NO: 6392 - DNA, 3282 bp, Escherichia coli
atgactccagtaaaagtgtggcaagagcgcgttgagatcccgacctatgaaaccgggccgcaggatatacatcccatgttcctggaaaatcgcgtttatcagggatcgtccggcgcggtttatccctacggcgtgaccgatacgctgagcgagcagaaaaccctgaaatcctggcagacggtgtggctggaaaacgactacatcaaagtgatgatcctgccggaactgggcggtcgggtgcatcgcgcatgggataaagtgaaacagcgcgattttgtctatcacaatgaagtcattaaacctgcgctggtggggctgctgggaccgtggatctccggcgggattgagtttaactggccgcaacaccatcgcccgaccacctttatgcccgttgatttcaccctcgaagcccatgaagacggcgcacagacggtgtgggtaggcgaaacggagccgatgcatggtttacaggtgatgacaggtttcaccctgcgccctgaccgggcggcgctggaaatcgccagccgcgtctataacggcaacgccacgccgcgtcatttcttgtggtgggccaacccggcagtgaaagggggtgaagggcatcagagcgtcttcccgccggatgtaacggcggtgtttgatcacggcaaacgggccgtctccgctttccccatcgccaccggcacttactacaaagtggactactccgccggagtggacatctctcgctataaaaatgtgccagtgccgacttcgtatatggccgaaaaatcgcagtacgattttgttggcgcatggtgtcacgatgaagatggcggtttgctacacgttgccaaccaccacatcgcgccaggtaaaaaacagtggagctggggacacagtgaattcggccaggcgtgggataagagcctgaccgacaataacggcccatatatcgaactgatgaccggtatttttgccgataaccagcctgattttacctggcttgatgcgtacgaagagaagcgtttcgagcagtatttcctgccttaccattctctgggcatggtgcaaaatgcctcccgcgatgcggtgataaaactccagcgtagtgagcgggggattgagtgggggctgtatgccatctctccgttgaacggataccgcctggcgatccgcgaaatcggcaaatgcaacgcgttacttgatgatgccgtggcactgatgccagcgaccgccatccagggcgtgttgcacggtatcaatcctgacagactaaccattgagctctccgatgccgacggcaatatcatactgagttatcaggaacatcagccgcaagcgttgccgttgccggacgtcgccaaagcgccactgtcagcacaagacattaccagtacagatgaagcctggtttatcggtcagcatctggagcaatatcatcacgccagccgttcaccgttcgattactacctgcgcggcgtggcgctggatccgctggattatcgctgtaacctggcgctggcgatgctggaatataaccgcgccgatttcccgcaagcggtggcgtatgccactcaggcgctaaaacgcgcacatgcgctgaacaaaaatccgcagtgcggacaggccagtttgattcgcgccagtgcttacgaacgtcagggacaatatcaacaagccgaagaggatttctggcgggcggtctggagcggcaacagcaaagccggtggctattatggtctggcacgactggcggcgcgtaatggtcacttcgacgctggtctggatttttgccaacaaagtcttcgcgcctgcccaaccaatcaggaagtgctttgcctgcataatctgctgctggtgttaagtggtcgtcaggacaacgcgcgtttgcagcgcgagaaactgctgcgcgattatccgctgaacgccactctgtggtggctgaactggttcgatggtcgtagcgaatcagccctcgcgcagtggcgcggtctgtgtcagggacgagacgttaacgccctgatgaccgccgggcaactgattaactggggcatgcccgccctggcggcagagatgctgaacgcactggactgccagcgcacgctgccgctttatctgcaggcgagtttattgccgaaagctaaacgcggcgaactggtcgcaaaagccattgatgtcttcccacagtttgtccgtttcccgaatacgctggaagaagtggcggcgctggagagtattgaagagtgctggtttgcccgtcatttattggcctgcttctactacaacaagcgtagctacggcaaagccattgccttatggcaacgttgcgtagagatgtcgccggagtttgccgacggctggcgcgggttagcgatccatgcgtggaataagcagcacgattatgagctggccgcgcgttatcttgataatgcttatcagcttgcgccgcaggatgcacgtctgcttttcgaacgggatttgctggataagttaagcggagccacaccggagaaacgactggcgcgtctggaaaataatctggaaattgcgctgaaacgcgacgacatgaccgcagaactgctcaatttgtggcatctcacggggcaggcagacaaagcggcggacattctcgccacgcgcaaattccacccgtgggaaggcggggaagggaagatcaccagtcagtttatcctcaaccagttattacgcgcctggcagcatcttgatgccagagagtcgcagcaggccagcgaactgcttcatgccgcgctgcattatccggagaatttaagcgaaggccgtttaccggggcaaactgataacgacatctggttctggcaggcgatatgcgccaacgcgcagggtgatgaaactgaagcgatgcgttgtttacgtctggcggcgactggcgatcgcaccattaacattcacagttattacaacgatcagccggttgattatctcttctggcaaggaatggcgctgcgactgctgggtgaacagcaaaccgcacagcaactgtttagtgaaatgaaacagtgggcgcaagagatggcgaaaaccagtattgaggcggatttctttgctgtttcacaacctgacctgttgtcgctgtatggcgatttacaacagcagcataaagaaaaatgcctgatggtggcgatgctggcgtccgcgggactcggggaggttgcgcactatgaatctgctcgcgctgaattgacggcgattaatccggcctggccgaaagcagcattattcaccaccgtgatgccttttatttttaaccgcgttcactaa

SEQ ID NO: 6393 - DNA, 1035 bp, Escherichia coli
atgagagcctgcattaataatcaacagattcgccaccataacaaatgcgtgattctggaactgctgtaccggcaaaagcgcgccaataaatcaacgctggcccggctggcgcaaatttcgattccggcggtcagtaatattttgcaggaactggaaagcgaaaaacgggtagtgaatatcgacgatgaaagtcagacgcgcggacatagtagcggtacatggctgattgcgccggaaggtgactggacgctgtgtctgaacgtgacgcccaccagcattgagtgtcaggtcgctaatgcctgtttaagtccgaaaggcgaatttgagtatttacagattgatgcaccgacgccgcaggcgctgctgtccgaaatcgaaaaatgctggcatcgccaccgtaaattgtggccggaccgtaccatcaacctggcgctggcaatccacggtcaggttgatccggtgactggcgtgtcgcaaaccatgccgcaagcgccgtggacaacgccggttgaggtaaagtatctgctggaagagaagctcggcattcgggtgatggtcgataatgactgcgtgatgctggcgctggcggagaaatggcaaaataattcgcaggaacgggatttctgcgtgatcaacgttgattacggtattggctcgtcgttcgtgattaacgagcaaatttatcgcggcagtttgtatggtagcggacagattggtcacaccatcgttaatccggatggtgtcgtctgcgactgcggacgttacggctgcctggaaaccgtcgcctcgttaagcgcattaaaaaaacaggcgcgggtatggctaaaatcacaaccggttaatactcagcttgatcctgaaaaactgacaacagcgcagttaatcgctgcctggcagagtggagaaccgtggatcaccagttgggttgatcgctctgccaacgccattggtttgagtctgtataacttcctcaacatcctcaatattaatcagatttggttgtacggtcgcagggtgatgctgccaacttactga

SEQ ID NO: 6394 - DNA, 945 bp, Escherichia coli
atgagtcctgataatatcggttcggctgtcaatcgcttctcaggttggccatctaatgatcctctaaaaacagataacgaatcaatgacatcacccgtggctgtgcaggtaataaagatgattgccgccatccttgacccatatcggatagtcgttggaatcgatacactttatacaacgcagcgcgaaacatttacctcagagagtcaacagctcattgaatcagcattgcaaacacttcatgtgataaatttaaataacctggaaacaaatctcgatgaggacggtcactatctggcttttggatataacgttgacactcctgacagaataaccgtttctgcttataatgaaaaaaagcctggctgctatggccaatgtcttttaatacaggatgacgaaacagacttatttaacctgataaaagttaaaatttttgaagccaggcataattatgtcgctcaattgatgagcgatccggaatttatgttcaaatttagttatagcgctcaacaaaatagattagaacctcatcttctggttcccacttatttccctctaaaaacaaacgaaccggttacgcaagaggatgtactgttactttatcgtttctttaaaatggatggtgattttaatatattaacatcagatgaatacatgagtatcatgacacctctgatgaagtgtgagcgcagcatccacgaccacaacaggtatgtgacgggcaaagatacccttcttctggactatcctccttctggtaaccagatatatttccatatttttcctgacgaatcagcaacactagtcctttatttttcaaacaatgacattgaatgtttcgtctttgaaagagatattccgagccagtatcgctttttcaaaatgtttaccaatctggcactggttattgatcagttaaccgatgccaatcaaatactttaa

SEQ ID NO: 6395 - DNA, 423 bp, Escherichia coli
atgctcccatctcaaatctctttcaacacccttcctgtcaatgcaacatacgcttcagagacaacagttaacacacaaaaattctctgacatcctctactcagcggggtgttccctaaaggatctggcttatctgagcagatgtctggcatcaatacatccgactatcgccaaaaacatttatgaaacagaaaatctcagcgatcaaaaattactacatattgattgccgtagtacaaatgaaatcaagataaatatcttttttggtcaacaacgagaaggattaattgaaattaattctgacactgtcattttttcgatattgtcttcattaattgactccgccatttctaaatttcaacaccaaatccccgttaacggttcagttaatcgtgaactattgtatgaggattatactgattaa

SEQ ID NO: 6396 - DNA, 450 bp, Escherichia coli
atgaagaaagcaacacttgtgattggcgttattggcgcggactgccatgcagtaggcaataaagttctggaccgcgtttttagcaaccatggcttcagagtcattaatctgggcgtaatggtcagccaggacgaatatattgatgcggccattgaaactggcgctgacgcgattgtcgtctcctctatctatgggcatggcgatatcgactgtctgggcatgcgcgaacgctgcatcgagcgtggactgggggacatcctgctctatgtgggcggtaacctggtggtcggaaaacatgacttcgctgacgtggaaaccaaattcaaagagatgggatttgatcgcgtctttgccccaagtcatgacttagaagatgtttgtcagctgatggcacacgatatcaaccaacgtcatgacgttgatactcgtattcttgaagaggcaatctga

SEQ ID NO: 6397 - DNA, 1389 bp, Escherichia coli
atgcaaatcgtctctgtcgatattggatcgacgtggaccaaagcagccctcttcgcccgggagggggacgcgttaacgttggttaaccacgtactgaccccaaccaccacccatcatctggcgaaggggtttttctccagcctgaacctggtgttaaacgtagataatgccctccccctgtttaacaacggtgaggttgcattgaagtattcctcctctgccaaaggtgggctggcggttgccgcaatgggattggtgccttctatcaccctggaaaccgcgaaagtaaccgctcactctgcgggggctaaaattgcgcaatattactcctacaagctgaaccgccgtgatatccaggcactggaagaaacgcagcccgatattctcttgttcaccggcggcaccgacggcggagaagaaagctacggcctgaataacgcccgtgtgctggcagaatccaaactcgactgcgccattatttatgccggaaaccgggatattcaggacgaggtgcaggagatcctagggcataaagacctgaccatcgtcgacaacgttctgcccgatcttgaccatccgaaccctttagctgcacgccaggctatctgcgacatattccttaaacgcatcgttaaagggaaagggctggatgtcgttgttgataaaacaggcgaagaaccaatgccgacaccgtggacagtctttgaactggttaaggcaatcagtaatgtcgatcacagctggaaagagttcatactgatcgacatgggtggcgcaaccaccgatgtctattccgcctgtgccaacacgctctcgcccgacaccgttttacacggcgtaccggaacccttcgtgaaacggacggtggaaggcgatctgggaatgcgcgtctcggcaatggtggttggtgaaagtgcgaaagagttagtcaatgtgaattttgctcagcaacccgcacagctggacgctttttatcattacctccgtcatctagtcgctcatcccgactacttacccgcgaatgcagaagaaaaatatttcgatacagtcctggccggactgtgtgtgggttatgccaccgaaagacatgcgggcaccaaaaaagaggtctgcacctgcgtcggcaatgtcgatttacagatgggacgtgacctgacaaccgtgcgtaaagtcgtcggatccggcggatggctctcgcgtgccagtcagttcgatatgcatcactggttgaaataccgcgagttaaacgacgacggtaaacgcattctcttaccgaccgaatttgaatattaccgcgattcccgggggctattaccactgctggcaaacgtcgccagagtcgatccgctggccgccgcgcgcaccagtattcaatgcttaaccctataa

SEQ ID NO: 6398 - DNA, 1446 bp, Escherichia coli
atggaacttcgaaataagaaattaacccatgacgaattcatgaccgagcggcaacaggtactgaaaacctgggaaaccggcaaggatgttgaaaactttgaagatggcgttaaataccaacaaaccattcctgagcataaacgcttctctcttgccctgctgaaagcagacaaggaaggtaaaactcttagccaaccgcgcgcaggcgtggcgctgatggacgaacacatcgaactactgaaaacactacaagaagaatgcgatctgctgccgagcaccatcgacgcatatacccgtctgaatcggtacgaagaagcggctgtagggattaaaaaatccatcgaagccggaacctctaaactgaacggtttaccggtcgttaaccacggcgtcgcagcttgccgtcgcctcaccgaaactttgcaaaaaccgctacagatccgccacggcacgccagatgcgcgtctgctggctgaaatctcgatggccagcggctttaccagttatgaaggcggcggcatttcctacaacattccgtatgccaagcgcgtaacgctggaaaaatcgatccgcgactggcagtactgcgaccgtttaatggggatgtatgaagaacacgggatccgcatcaaccgcgaaccgtttggcccactaacgggtaccctgatcccgccgtttatctcgcactctatcgcgataatcgaaggattactggcgctggaacagggtgtgaaatctatcaccgttggttatggacaggtcggcagcctgacgcaggatgttgcggcgatccagtctctgcgtgaacttgcacacgaatattttcagagctatggctataccgactatgaattaagtaccgtgtttcaccagtggatgggcggctttccggaagacgaatcgaaagcgttcgctattatctcctggggcgcagccgtcgcggggatgtctggtgccaccaaagtcatcaccaaaagtccgcacgaagcctggggcatcccgactgccgctgccaacattcaggggctgaaagcctcccgccagatgctcaacatggtcaacgagcagaaattcccgccgtgccctgcggttgaactggaaattgaactgattaagagcgaggttcgcgcggtactgaataaagtgttcgaactgggtaatggtgatattgcgcgcggtacggtgctggcatttgaagcgggcgtactggatgtgccgtttgcgccagccgcctgcaacgcgggcaaaattcttccggtccgtgacaacaccggcgcgatacgcgtactggaagccggagccgttccattgccaaaagatattctcgacctccaccacgattacgttgcggaacgcgcacgctttgaaggacgccaaccgacattccagatggttgtagatgacatcaatgctgtatcccacagtaaattaataggaagaccataa

SEQ ID NO: 6399 - DNA, 1242 bp, Escherichia coli
atgaaaataaaacaggctctgttcaccgctggctactcctcattctatttcgatgaccagcaggcgataaaaaacggagcgggtcatgacggctttttttataccggggagccggtaacacaggggtttaacgccgttcgtcaggccggggagtgcgtatcggtacagttgattctggaaaacggcgcggtcgccgtaggtgactgtgctgccgtacagtattccggggcaggtggtcgcgatccactgttcctcgctgagcactttattccgttcctcaacgaccatatcaagccattactggtaggccgcgatgtggatgctttcctgccgaatgcccgtttcttcgacaaattgcgtattgacggcaacttgctgcataccgccgtgcgctacggattatcacaggcgctgcttgatgctaccgcgctggcaaccggccgtctgaaaactgaagtggtctgtgatgaatggcagttgccacgcgtggcggaatccattccattatttggtcagaacggggacgatcgatatatcgccgtcgataagatgatccttaagggcatcgacgtgctgccccatgcactgattaataacgtcgaagagaaactgggctttaaaggtgaaaaactgcgcgaatatgtccgctggctgtcggatcgtattctgagcaagcgcaccagcgcacgctaccacccaaccctgcacatcgatgtatacggcactatcggcctgatcttcgatatggatccgcttcgctgtgcgcaatacatcgccagcctggaaaaagaagcgcaaggcctgccgctctacattgaagggccggtcgatgccggtaacaagcccgatcaaattcgcctgctgaccgcgattaccaaagagctgacgcgcctcggttccggcgtgaaaattgtggccgatgaatggtgtaacacctaccaggatattgttgatttcactgatgccgccagttgtcacatggtgcaaatcaaaaccccggatctgggcagtattcacaacatcgtcgatgcggttctttactgcaacagccacagcatggaagcgtaccagggcggcacctgcaatgaaactgatgtcagtgcccgcacctgtgtccacgtcgcccttgccgctcgccctatgcgtatgctggtaaagccagggatgggctttgacgaaggcctcgatatcgtcttcaacgaaatgaatcgtactatcgcgctgttgcaggctaaggattaa

SEQ ID NO: 6400 - DNA, 1371 bp, Escherichia coli
atggctcgttcttttaaagtcttatcgccaacggcaatcctcgggtatggattcccggaagagagcttccgcaaagcgatggcagaatcgcccgatctgatcgccgttgatgcaggctcttccgatccaggcccccactacctcggggcaggcaaaccgtttaccgatcgcgcaggggtcaagcgcgatctgcgctatatgatcaccgcaggcgtgcaaaataatataccggtggtgatcggaacagctggcggttctggtgccgcaccacacctagagtggtgccgagaaataattcatgagattgcccaggaagagcacctctcgttctcgatggcgttgatcccggcagacgttgacaaagccatcgtccaccaggcgctggataacggcaaaatcacggcgctggattttgtcccgccgttaacccacgacgcgattgacgaaagtacgtatatcgtcgcgcaaatgggcatcgaacccttccagcgggcgctgaaagaaggcgcgcaagtggtgctgggcgggcgcgcttacgacccggcctgctttgctgcgctcccgatcatgcaaggctttgatgaaggtctggcgctgcattgtgggaaaatccttgaatgcgcggcaatcgccgcaacgcccggctcaggctctgactgtgcgatgggcatcattgatgacaacggctttacgctgaagacatttaatccgaagcgtaaatttaccgaaacgtcagcggctgcacacacactgtatgagaaatccgatccctacttcctgcctggacctggcggcgtgttgaacctgaaaggctgcacatttaaagcggtcaatgacggcgaagtgtacgtcagcggttctaagcatgaagaaacgccgtatgccctgaaactggaaggtgcgcgacgggtgggcttccgctgtctgaccatcgcaggaacgcgcgacccgatcatgatcgccgggatcgataaaatcatcgatgaagtcaaaaccagcgtttggcgtaacctgtcgctcgacgatgacagcattcgcatcaatttccacctgtacggcaaaaacggggtgatgggcgaccatgaaccgatgcaaactgccgggcatgagctggggattgtccttgatgtagttgcaccgacccaggaaattgccaatagcgtttgctcgctggtgcgctctaccatgctgcactacggctatgaaaaccgcatcgctaccgcaggcaatctggcgttcccgttctccccttctgatatccagggcgggccggtatacgaattttccatatatcacctgattgaagccaacgacgctctgcgttttgatttccatattgaacaggtgacgccagaaggagttcaggcatga

SEQ ID NO: 6401 - DNA, 318 bp, Escherichia coli
atgaaacagtcaattgtctcactggcgcaagtcattcgttcgaaaaatgccggaccttacgaactggttttagatattttatttaaaacgaaagaaaactatgagcgagttaaatcatcagggcaattaaccccagaactgattgcgcgcttatatcatgttgaacctgactttattcaccgtattgtctggtttgatccttctaacgcagtaaaaatcgtcatgccacgagatattatctccgggaatgtaggtgacaatgatgtctatggtgcacagcaacatgcacctttattaaatatgagtttcgatttgtaa

SEQ ID NO: 6402 - DNA, 1281 bp, Escherichia coli
atgaagaaaataagtttaaccacgatgattcttttggcgctggtacttggaatgattatcggcgtagtgctcaataacactgcttcaccggaaaccgcaaaactctatgcgcaagaaatatcgatattcacgacgattttcttacgactgataaaaatgattatcgctccgttagtggtctctaccctggtggtaggtatagctaaaatgggagatgccaaagcccttggtcgtattttttctaaaacactctttttatttatttgcgcctcattgctgtcaattgccttaggcttgataacggtaaatttcttcatgccaggcacaggaattaattttgttgcacacggtgccgaaaccaccggagtggtcgcgtcagaaccctttacactaaaagtatttatttcgcatgctttccccaccagcattgtcgatgccatggcgcacaatgaaattttgcaaatcgtggtgttctcaattttcctcggctgtagcctgacggcgattggtgagaaaggcagcgccatcgttcacgccttagattcgctggcacatgccatgttaaagctcactggctacgtcatgctcttcgctcccctgaccgtattcgccgctatttcagcattgattgctgaacgaggactggcagttatggtgagcgccgggatctttatgggtgaattttatttcaccatgttgttactttgggtgctgcttatcggtctggccatcgtttatgtcggcccctgcatcagacgcctgacccgtgccctttcggaacccgccctgctggcatttaccacatccagttctgaagcggcttttccgggaacgcttgaaaaactggagcaatttggcgtttcccccaaaattgccagctttgtcttacccattggctactcatttaatctcgttggatcaatggcctactgctccttcgccacagttttcatcgcccaggcctgcaatatccatttatccatcggtgagcaaatcaccatgctgttgatcctgatgttgacctcgaaaggaatggctggcgtaccacgcgcctcaatggtggttatcgccgccacgctcaaccagttcaatattccggaagcggggctgatcttgctgatgggcgttgatccgttccttgatatggggcgttccgcgacaaacgtcatgagcaacgcaatgggcgctgcgatggtgagtcggtgggaaggcgaacatttcggcgagggctgtcggggtaaagcattaaaacccaatgaatcgaacgttgctctgccctga

SEQ ID NO: 6403 - DNA, 1653 bp, Escherichia coli
atgtccaaaccatttatctggcaagaaccgtttctacaaaataaagacggtacagaatatacattaattagcgatcaacatattacagtaacggaattagacggcgaagaagtgataaaaatcgctcctgaagcattaacgctgcttgcccggcaggcattttatgaagcctcttttttcttacgttccgctcatttgcaacaggtcgccagcattcttaacgatccgcacgccagtagtaatgataaatacgttgcgttgcagttattacgtaatgctgaagtctcagcaaaaggggtattacccaactgtcaggataccggcaccgcaactattgttgccagtaaagggcaacagatatggaccggaggtaacgacgctgaagccttaagcaaaggcatttacaccacttttcaggaaaataatctgcgcttttcacaaaatgcgccactggatatgtttaccgaagtcaatacgcaaaccaatctcccggcgcagattgatatcagcgccgtcgctggtgatgagtaccattttctctgtattaataaagggggcggctctgccaataaagccgcgctttatcaggaaaccaaatccctattgcaaccagaaaaactgaccgcatttttaatcgaaaaaatgaaatcgctgggcaccgctgcctgcccgccttaccacatcgcctttgtcgtcggagggctttcagccgatcaaaccttaaaagttgccaagctggcctcaacgaaatattacgacaatttgcccaccagcggaaacgagcaaggacaagcattccgtgatattgagctggaaaaagtattgctcgaggccagtcagcaatttggtattggtgcgcaatttgggggtaaatatttcgctcatgatattcgcgtcattcgtctgccgcgtcacggtggctcttgcccgatagctatgacgctctcctgttctgcggatcgcaatatcaaagcaaaaattaacaagcacggtatctggctggaaaaactcgaacacaatccggggcaatatattccagcctcactgcgggaagaaaatcacgcgcaacatgtacagctggatctaaatcgtccgttgcgtgacgtgatgcaggatctcgccagattaccggtaggcacccgcgtgtcgttaagtggtcccatcgtagtggcgcgcgatatcgcccacgccaaaataaaagcgcggctggatagcggcgaaccgatgccggattacctgaagcatcatattgtctattacgctggcccggcgaaaacaccggagaacatggcctgcggttcactgggtccaaccacgggcggtcgaatggacggttatgtcgataccttccaggcggctggcggcagtctggtgatgttatcgaaaggtaaccgcagccagcaggtcaccgatgcctgtcacaaacatggcggcttcaatctgggaagtattggcggtgcagctgcgttactggcgcaagaatatgtcaaaagtctgcgttgcctggaatacccggagctgggtatggaagcggtgtggatgatggaagtggaaaatttacccgcattcatcctggtagatgataaaggcaataatttctttagtcagtttgagcagaaacaccgctgcgccagttgccctgcgggacattaa

SEQ ID NO: 6404 - DNA, 603 bp, Escherichia coli
atggaagcgcgaatttcaactgaacggcatgtgcagcgccagcagaaattgaaggaacaggtcgatacgcgcgtcgcggcggcgatagagaaaaaagggatcttgattgttttcaccggcaacggcaaagggaaatccactgccgcgtttggtactgtgacgcgcgcggtgggtcatggcaaaacggtgggggttgcgcagtacatcaaggggcaatgggacaacggcgaatacaaccttctccagccgctgggggttgagtttcatattatgggaaccggttttacctgggagacacagaaccggcaagcggatatcgacgcggcgaaagaggtctggtcggaaagcaaacggatgctggctgacaagcgttacgacttagtggtgcttgatgagctgacctatatgctggcttaccattatctggacaccgaagaagtgatcgcttctctgcaaaaccgcccggcacaacaaagtgtcattgtcaccggacgcggttgccacagtcagatattaaaaatggcggatacggtaagcgaaatccgccccgtcaaacatgcttttgataacggcattcaggcccagccgggtatcgactggtaa

SEQ ID NO: 6405 - DNA, 468 bp, Escherichia coli
atgcgcgaaaatttttgcgcgccctgggcggaagtagagtatctctttgaagaggagattttgccggtatgcagcggcagtttgcttgcaatgtccgatcaaaaactgtcagtggcagaactgcttactgagttaccacttctgcatcaaagcacccgtattactggctgggaagagtggtttgctttatctggcgttagcagtccgctggtcaataacggaccacgtttcgatttgctttcaatgctgattgccgccgtgcgctctaatctcggcgtggcgctgttaccacggttcgctattcaacatgatttggatagtggcgatatggtgattccctgtgatgtgcctattcgtaccggtaatcgttttattatgacgtggcaggaagagaagtctgactcaccgcacttgcagcaatttcgtgaatggttgctggcgaaatcggtcgtaccgcaggagatgtaa

SEQ ID NO: 6406 - DNA, 270 bp, Escherichia coli
atgcgaggaaaaatacctaaaacggaactgctggtgacttttgaggtcgtcgcacgtcatgaaagttataccagagcggcagaggagttagcgttaacccaaagtgcagtattcagacaagtaagtgcgctggaggaatttttacatactccgttattttcacactctaaaaaacgcatttttcttaatgatgcagggaagtattacctggggatagtaaaagaaacattaaataagctggaacgcgataccaataccattatgacctag

SEQ ID NO: 6407 - DNA, 597 bp, Escherichia coli
atgcatcatctttcaaggcttgataaagcctttctgcgcaaagggatccaactttcccgcgccaacaatattgtttcattatctcgtccatcaggtgccagtgcccgcgtactgctgccggacgaactgccgctggaagaaaaagcagtaacacaactgcttgattttgcagaagtgaagctaccagaccacccaggttatgtgcgccagacgtgcgcgacgccagattttcatcccggcaatggcgtccccgttggcgctgtggtggccacaacaccggcacgcgcgggcgatctggcgttaatccccggttccatgggtgattattcctggcttgcggttggttacggcaacccggagtggctgtggtcttgcagtcacggagcaggacgcagccagcgtcggcaggccatgcgctcacgcgcgactgcagagtcaacgttgccgtggcaatgcgtcacattgcgcgaagaacggcgtattgaagaagcgccagctgcttataaagatattggtccggttatcgaagcccaacaagaagccggattaattcagccagcggtcagatttcgaccgaggttaacgtttaaggggtaa

SEQ ID NO: 6408 - DNA, 1194 bp, Escherichia coli
atgaagaaaattgttctgccggttgctctggccctgatgggtataaatgcggacgtttatgcggccgatgtaaagatcgatattttaagtgcaacagtgaaagataaacgcattgagggggcatcggtgacgctgcaacgcaatggcgcacaatctgtttctggcaccacaaatgcctcgggcagcattaatctgggctcttcctttgccgatgatcaagatgctttgttaatcgtcaaaaaagagggctattctaatctggtggtcaaatgcccgtgtgcgggcatgacttatgcgattagtccggtaatgactagtctggatggcatgcgtgtcgtattgagctggggcgaaaagccttttgatcttgattcgcatttgatcttccctggcggacatatttattttgatagtaaagaggggactgatgccaatctggatgttgatgatacggatagctatggaccagaaactgtcactatcagcaaaaagcattttggcgaaagttacatctatgccgtgcaggactatagcaataaagggttgcccaacagtaattatctctctgccagtaaggcaaaagtgtttgtttatgtagggggctccctggtgcgtagttatagtgtccctgctggaaaacgagggaacatctggaccgtgtttaaactcaatccaaacggcgagtttgaagatatcaactctgttaccagcgccaattttaacgacaccacattaggcgtcagggatttagccactgtgataatgcctgcgacgggttcttcaactccggcttcacctgcgatgcaaaacagtggatatactcaactggcaagaaaatataatcgtgaaggcgaagctgtttacaaaaccggtcaacttgagcaagccattcaactcttccaacaggcaacagaattagacggcaattacggtcaggcatttagtaacctgggtctggcttatcagaaaaatggcaacatcgcggaagcgatttgggcaaatcgtaaagcgatctcgttagccagtggagcaaatgcggcgacaacgcgcgctaactcctattataacattgccaaaatttatgaaactgcaggacagaacgctgatgcattgcagcattatcaactcgcttatgcggaaaaaaataagccctcttatgaagaggccatcgcacgggtaaaagcgaaaatgtag

SEQ ID NO: 6409 - DNA, 2685 bp, Escherichia coli
atgaataacgaacccttacgtcccgaccccgatcgtctgctggaacaaactgccgcgccgcatcgggggaagctgaaagttttcttcggtgcctgcgcaggcgtcgggaagacctgggcgatgctggcggaagcccagcgactgcgggcgcaagggctggatattgtggttggcgtggtagaaacccacgggcggaaagataccgccgcaatgctggaagggctggctgttctgccgcccaaacgccaggcgtaccgtgggcggcatatcagcgagtttgatctcgatgccgccctcgcccgccgtccggcactgatcttaatggacgaactggcgcacagtaatgcgccaggttctcgtcatcccaaacgctggcaggacattgaggagctgctggaagctggcattgatgttttcactaccgttaacgttcagcatctggaaagtctgaatgatgtggtcagcggcgtcaccggaattcaggtacgggagaccgtgcccgatcctttttttgatgccgccgacgacgtagtactggtggacttgcccccggacgatctgcgccagcggctgaaagaaggcaaagtctatattgccgggcaggcggagcgcgccattgaacatttttttcgcaaaggcaatctgatcgccctgcgcgaactggcactgcgccgtactgccgatcgcgtagatgagcaaatgcgcgcctggcgggggcatcctggcgaagagaaagtctggcacacacgcgacgcgatccttttatgcatcgggcataacaccggcagtgagaaactggtccgcgcggcggcgcggttggcctcgcgcctgggcagtgtctggcacgcggtgtatgttgaaacccctgccctgcatcgcttaccggagaaaaaacgtcgggcaattctcagcgccttacgtctggcgcaggagctgggcgcggagacggcaacactttctgatccagcggaagaaaaagcagtagtgcgttatgcccgtgaacataatctcggcaagattattctcggtcgcccggcctcgcgccgctggtggcgtcgggaaacgtttgctgaccgactggcgcgtatcgcccccgaactcgatcaggtgctggtcgcacttgatgccccccccgcccgcacacttaacaacgcgccggatagccgctcttttaaagacaagtggcgggtacagattcagggatgcgtggttgccgccgcgttatgcgccgttatcaccttaattgccatgcagtggctgatggcgtttgatgccgccaacctggtgatgctgtatctgcttggcgtggtggtggtggcgctattttatggacgctggccttcagtggttgccaccgtcattaatgtggtgagtttcgatctcttttttatcgccccacgcggcacgctcgccgtctctgatgtgcaatatctgctgaccttcgcggtgatgttaaccgtcgggctggtgatcgggaaccttactgctggcgtgcgttatcaggcgcgggtagcccgttaccgcgaacaacgcacacggcacttatatgaaatgtccaaagctctggctgtgggccgcagtccgcaggacatcgccgccaccagcgaacaatttattgcctccacgtttcatgcccgcagtcaggtgttgttgcccgataacaacggtaaattgcagccgttaacacatccgcaaggaatgacgccgtgggacgatgccatcgcgcagtggagttttgataaaggtcagcctgcgggcgcgggcaccgacacgttacccggcgtaccgtaccagattctgccgttaagaagcggcgagaaaacctacggactggtggtggtagaaccggggaatctgcgtcagttgatgatcccggaacaacagcgcctgttggagacatttacgctgttagtcgccaatgcgcttgagcggctgacactgaccgccagcgaagaacaggcgcggatggcaagcgaacgtgaacagatccgcaacgccctgctggcggcactttcgcatgatttacgcacgccgcttacggtgctgttcggtcaggcagaaatcttaacgctcgatctggcaagcgaaggatcgccccacgcccgccaggccagcgagattcgccagcatgtgctgaacacgacccgactggtgaataatctactggatatggcgcgaattcagtccggcggctttaatttgaagaaagagtggttaacgctggaagaagtggtcggcagcgcgctgcaaatgctggaaccgggattatcatcgcccatcaacctgtctttgccagaaccgctgaccttaatccacgttgatgggccactctttgaacgggtgctgattaatctgctggagaacgcggtgaaatacgcgggtgcgcaggccgaaattggtatcgatgcccacgttgagggcgaaaatctacaactggatgtctgggataacggccccggtcttccgccaggccaggagcagacgatattcgataagtttgcccgcgggaataaagagtcggcagtgccgggcgtcgggcttgggctggcaatttgtcgggcgattgtggatgtacacggcggcaccattaccgcattcaaccgaccggaaggtggtgcctgttttcgtgttacacttccccagcaaactgcccctgaacttgaagaatttcatgaggatatgtga

SEQ ID NO: 6410 - DNA, 258 bp, Escherichia coli
atgcagaaacccttatcagtccggtggctgataatacaagggttaacagagaatgagcactgcggaatacaggcatatgcctgtaatacagagagtcaggaagacctgtacgctgaagtgcccttagtcggtagactaacgggcattgaagaagtgaaagtcgaagctattgcgatgagcaaacttcataatatgagttgtccgccttatatggggcatagtgcggctgttattttccatttaatttacctttcctga

SEQ ID NO: 6411 - DNA, 954 bp, Escherichia coli
gtggatagtaataatcaaattgaaacctgtttaagcagaaagtcgtcagaaggtaaaccacaaatatttacaaccttacgaaatattgatcttaaccttctgactatttttgaagctgtatatgtacataaagggatcgttaatgcagcgaaagtgcttaatctgacaccctcggcaatcagtcagtctattcagaaactgcgcgttatattccctgacccattgtttattcgcaaaggccagggtgtcactcctaccgcatttgcgatgcatctacatgagtatatcagtcagggccttgagtccattcttggcgcgctggatatcgaaggaagctatgataagcaacgaacgataactattgcgaccaccccctcggtcggagccctggtccttcctgtcatctatcgggcgattaaatctcactatccgcagcttttactgcgcaacccacccatcagcgacgcggaaaaccaactcagtcagtttcaaaccgatctcatcatcgataacatgttttgcaccaatcgtacggtgcaacatcatgttctgttcaccgacaatatggtgttaatttgccgcgagggaaatccgctactctctttagaagatgacagagagactatcgacaacgctgcgcatatactcctgttaccggaagggcaaaatttcagcggtctgcggcagagagttcaagagatgtttccggaccggcaaatcagtttcaccagctacaacattttgacaatcgctgcactggttgccaacagtgacatgttagcgattattcccagccgtttttataacctgtttagccgttgctggccgctggaaaaactgccttttccgtccttaaatgaggagcaaatagatttctctatccactacaacaaattcagcctgcgtgatcccatcctgcacggggtaatagatgttatccggaatgcattttga

SEQ ID NO: 6412 - DNA, 153 bp, Escherichia coli
atgctgacgaaatatgcccttgtggcagtcatagtgctgtgtttaacggtgctgggatttacgcttctggtcggagactcgctgtgtgagtttacggtgaaggaacgtaatattgagtttaaggctgttctcgcttacgaaccgaagaagtag

SEQ ID NO: 6413 - DNA, 894 bp, Escherichia coli
atggatttagagggtgagaataaacataaatacagcgacggcacctatattgaaggtggcctggagatgaagtacggctcctggttcggcctgatttacggcgaaggctggaccgtgcaggccgaccacgacggtaatgcctgggtgcctgaccatagctggggcggtttcgaaggtgggattaaccgtttctatggcggttatcgtaccaatgatggcaccgaaatcatgctcagtctgcgtcaggattcctcgctggatgatctgcaatggtggggcgatttcacgcccgatctgggctacgtcattcccaatacccgcgacattatgactgcgctgaaggtacagaacttaagcggcaactttcgttatagcgttaccgccacacctgccggacatcatgacgaaagcaaagcctggctacattttggcaagtacgatcgctacgacgacaaatacacctatccggcaatgatgaacggttacatccagtatgaccttacagaaggtatcacctggatgaacggtctggaaatcaccgacggcacaggccaactctatctcacgggcctgcttacccctaactttgccgctcgcgcctggcaccataccggacgcgccgacgggctggacgtaccgggaagtgaaagcgggatgatggtgagcgccatgtatgaagcgttaaagggcgtttatctctccaccgcttacacctacgccaaacatcgccctgaccacgctgacgatgaaaccacctctttcatgcagtttggtatctggtacgaatacggcggcggacgtttcgcaacggcttttgatagccgcttctacatgaaaaatgcctctcacgatcccagcgaccaactcttcctgatgcaatatttttactggtaa

SEQ ID NO: 6414 - DNA, 1083 bp, Escherichia coli
atgagaagtcgattatggattttattattatgtctaataactggcatcaatgttacgcaagcggcgaaaaatgtcactgctgaagtgacctacaacttagccaatggccgcgctaactattacatctggaatcgtgaagatcctccagtggttagtcacggtacaacatggtcaatttatcaatgcagttttcctgatttgcagcagagctgtacgtcatcaggtaatagtacgagtgtgcaggtttatttgacagaaaaacgcagcggcatgcgctggcctgttaaattgaaagggtatatgaatgcagaggtttgggacaacaattcatgtaagggatggagcacgcagctgtccttaacggacggtactggttacttctgtggtaagggtggtgtgcaataccttgctgaggcaaagcccttaacgctctatcttgaacaggcggagatgaaaaaactaccgattggcggcgtttgggaaggtgcggtcaaactgcattttaacgagccaagcactgattattatgctgatatcgtgcttaacgttctcgatcccaaccatatcgacgtgttcttcccggagttcgcccacgccacgccacgcgtacaactggatttgcatccaacaggcagcgttaacggcaacaactacgcgcaagatctgactatgttggatatgtgcctgtacgatggctttaacggtaacggtcttagctatgaaattttgctaaaagatgagggaagaacggcggcaggacgcagtaatggtgagttttcgatttatcgtcagggtgcgagctcaacggatgaaggggagcgtattgattaccgtgtcaaaatgtatgacccggaatcaggtgggcaaattgatgtgcgcaacaatgagagcatggtctggaccaacatcaaccttaaacgtgtccgcccggtggtgcttccaggcatccgttacgctgtgatgtgtgttcccacaccgctgacgctggtggtcgacaaatttaacgtgacggcaaaacaggcgggatattatatgggtaaattgtcggtcatctttaccccgtcattaccgacgatcaattag

SEQ ID NO: 6415 - DNA, 717 bp, Escherichia coli
atggtggcgaaaattaatcgattattacggctcgggcctgtcttacttctgtgcacatcatttttcgcacaatctaatatgactgtatatcctatgtctgtatctataaacagtcagggagaaggaagtgttcgtgtaatatcgaaaacgaatgaagtccaatatataaaggcaaccgtatttcgtatcgataatccatcaacaccacaagaaaaagaaatcgaagtaacttcaggcgatgcaaaccaacttgtgataatgccgcccaaatttgctttgcctggcggtagtagcaaaaccgtgcgttttgtggcaatggaacctgagcaaaaagaaaaaaactatcgggttaaatttgaagctgtacccagcattgatgatgcaacagataataaaaaagatctctccatgcaattaacggttaacttaatttgggggattgttgtcagcgtgccacctcagcagcctgtggcaaagttagatattaacgccgataaaaagctaatcaataatggcaatcaacgtctgaagatattaaccattgcctattgtaaaaatagtggttctgcggagtgcagaacacagaccgtaaataaaaacattttccctggtcaggaaagagttttagaaagcatatctggctacgataaaatcgttgtcaaatataataactggatcaccaaggacaatggcgagtttgagctggcggtccattaa

SEQ ID NO: 6416 - DNA, 987 bp, Escherichia coli
atgggtcaactgattgacggcgtctggcatgacacctggtacgataccaaatctaccggcggtaaatttcaacgttcagcttccgcatttcgtaactggctcactgccgatggcgcgccaggccccactggcacaggcggttttgccgcagagaaagatcgttatcatctctatgtttcactcgcctgcccgtgggcgcaccgcacgctgatcatgcgtaaactcaaaggactggaaccgtttatttccgtttccgtagtgaacccgctgatgctggaaaacggctggacctttgatgacagttttccgggagcaaccggagacacgctctatcaacatgaatttctgtatcagctttatctccacgccgatccacactacagcggacgagtgactgttcccgtgctgtgggacaaaaagaaccacaccatcgtcagcaacgaatcagcagaaatcatacgcatgttcaataccgcgtttgatgcgctgggcgcgaaagcgggtgattactacccaccagccctgcaaacgaaaattgacgaacttaacggctggatttatgacactgttaacaacggcgtgtataaagctggttttgccaccagccagcaagcttacgacgaggcggtggcgaaagtgtttgaatcgctggcgcgactggagcagattttaggccagcatcgttacctgaccggcaatcagctaaccgaagccgatattcgcctgtggaccacgctggtccgttttgatccggtgtatgtgacccacttcaagtgtgataagcaccgcatcagcgattacctgaatctgtatggcttcctgcgcgatatctaccagatgccgggaattgccgaaacagtcaatttcgatcacatccgtaatcattacttccgcagccataagaccatcaaccctacggggattatttcaattggtccgtggcaggatctcgatgaaccgcatggacgagatgttcgcttcggttaa

SEQ ID NO: 6417 - DNA, 357 bp, Escherichia coli
atgcagtggtatttagccgtattaaaaaattatgttggtttctctggtcgtgcacgtcgtaaagagtactggatgtttactctgattaacgccatcgtcggcgctattatcaatgtcattcaattgattttaggtttagagtttccattcctttctctcatttacctggcagcaacaatcattccggtcattgctctgtgcgttcgtcgtctgcacgatactgaccgttcaggtgcgtgggcgcttctctatctggtaccggtcattggctggttagttctgtttgtatttgcctgtttagaaggcaattctggcagcaatcgttacggaaacgatccgaagttttgttcaaattaa

SEQ ID NO: 6418 - DNA, 1332 bp, Escherichia coli
atggaaattgcatcgaataaaggcgtcattgcagacgcttcgaccccggcgggtcgtgctggaatgagtgagagcgagtggcgagaagcgatcaaattcgacagtactgacaccggctgggtgattatgagtatcgggatggcgattggcgcggggattgtttttctcccggtgcaggtcggtttgatgggattgtgggtatttttgctctcatcggtgattggttacccggcaatgtatctgtttcagcggttgtttattaatacgctggcagaatcaccggagtgtaaagattacccgagcgtcatcagcggttatttaggtaaaaactggggcatcctgttaggtgcactctatttcgtaatgctggtgatttggatgttcgtctattccaccgccatcaccaacgatagtgcttcctacctgcataccttcggcgtgacggaagggttgctgtcagacagtcccttttatggtctggtactgatttgcattctggtggcgatctcctcacgcggcgagaaattgttattcaaaatttcgaccggcatggtgctgaccaagctgctggtggtcgcggcgctgggcgtgtcgatggtgggaatgtggcatctgtataacgtcggttcgctaccgccgctggggctgctggtgaaaaacgccattattacgctgccgtttaccctgacgtcgattctgtttatccagacgttaagcccgatggtgatctcttatcgttcgcgggaaaaatcaattgaagtggcgcggcataaagcattgcgggcaatgaatatcgcgtttggcattttgtttgtcaccgtctttttctacgccgtgtcattcacgctggcgatgggacatgacgaagcggtaaaagcctacgagcagaatatttccgcgctggcgattgccgcacagtttattagcggtgacggcgcagcgtgggtgaaagtggtcagcgtcattctcaatatctttgctgtaatgactgcattctttggcgtctatttaggctttcgcgaagcaacgcaagggatcgtaatgaacatcctgcgtcgcaagatacctgccgagaagattaacgaaaatctcgttcagcgcggcatcatgattttcgccattttgctggcctggagcgccatcgtactgaacgcaccggtgttgagcttcacctctatctgtagcccgattttcggcatggtagggtgcctgatcccggcgtggctggtttacaaagtaccggcattgcacaaatacaaagggatgtctctgtacctgattatcgtcactggtttgttgctttgtgtttctccgttcctggcattttcttga

SEQ ID NO: 6419 - DNA, 990 bp, Escherichia coli
atgcatattacatacgatctgccggttgctattgatgacattattgaagcgaaacaacgactggctgggcgaatttataaaacaggcatgcctcgctccaactattttagtgaacgttgcaaaggtgaaatattcctgaagtttgaaaatatgcagcgtacgggttcatttaaaattcgtggcgcatttaataaattaagttcactgaccgatgcggaaaaacgcaaaggcgtggtggcctgttctgcgggcaaccatgcgcaaggggtttccctctcctgcgcgatgctgggcatcgacggtaaagtggtgatgccaaaaggtgcgccaaaatccaaagtagcggcaacgtgcgactactccgcagaagtcgttctgcatggtgataacttcaacgacactatcgctaaagtgagcgaaattgtcgaaatggaaggccgtatttttatcccaccttatgatgatccgaaagtgattgctggccagggaacgattggtctggaaattatggaagatctctatgatgtcgataacgtgattgtgccaattggtggtggcggtttaattgctggtattgcggtggcaattaaatctattaacccgaccattcgtgttattggcgtacagtctgaaaacgttcacggcatggcggcttctttccactccggagaaataaccacgcaccgaactaccggcaccctggcggatggttgtgatgtctcccgcccgggtaatttaacttacgaaatcgttcgtgaattagtcgatgacatcgtgctggtcagcgaagacgaaatcagaaacagtatgattgccttaattcagcgcaataaagtcgtcaccgaaggcgcaggcgctctggcatgtgctgcattattaagcggtaaattagaccaatatattcaaaacagaaaaaccgtcagtattatttccggcggcaatatcgatctttctcgcgtctctcaaatcaccggtttcgttgacgcttaa

SEQ ID NO: 6420 - DNA, 540 bp, Escherichia coli
atgaaaggcttcccaattgcacatatttttcacccttcaatcccgccaatgcacgcagtggttaacaatcacaacagaaatattgattattggacggtaaaaagaaagtttgcagaaattgtctccaccaatgacgttaataaaatatacagtataagtaatgaactgcggagagtattatctgcaattactgcattgaatttctatcaaggcgatgttccttctgtcatgattcgaatccaaccggaaaatatgagtccattcatcatagatatttctacaggagaacatgacgattatatcatacaaacattagatgtaggcacttttgcaccttttggcgaacaatgtacttgctcagccgtcaataaaaaagagctggagtgtattaaggagacgatttctaagtattgtgcaaaattcacccgaaaagaagccatcttacccccccctacgtattttaataaaacatccattccttcagattgttggcaaattctctttttttcacccgatcattttaataatgatttttattga

SEQ ID NO: 6421 - DNA, 1188 bp, Escherichia coli
atgtcccctgtttcatcaattggtaatgatattagtagtgatttagcccgtcgaaaaatgaatgaccttcctgaaagccccataggaaataacctcgaagcactagcaccaggcatagaaaaactaaaacagacctctattgaaatggtcactttacttaacgcgttacaaccaggtgggaaatgcattatcactggtgattttcaaaaagaattagcgtacttacaaaatgtaattctttataatgattcgtctcttcgtatggatttttttggttataacgcccgaattattcaacgatcagacaatacctgtgaacttacaattaatgaaccgttaaaaaaccaggaaatatccacaggcaatatcaatgttaattgcccattgaaagacatttacaatgaaatcaggaggttgaacgtaatctttagttgtgggactggaggtatagttgatctatcctctctggacttacggaatgtcgatttagaactttatgattttacagataaacatatggccaatacaattttaaatccttttaaattggatgacacagattttactaatgccaacatgtttcaggtaaatttcgttagttcaaaacaaaacgccacaatctcatgggattatttactaaaaataacgcctgttataacaagcattaacgatatgtattctgaagaaaaaattaagcttgtcgaaagttgtttaaatgcgcttggagatattaccgaagaacaattaaaaatcatgagacttgcaattatagaatctataccaagagcaactctaacagatcaattagaaaatgaattaacaaaagaaatatataaaagctcatcgaaaattaacaattacttgaacagaattaaattaccagagatgaaaggattctcatcagaaaaaatagattattacatcgatataatcattaaagattatgaaagcgtcaaagaaaatgcttatctaatcgttccaaaaattaattacaatacagatttaaacatagaggattctagctcagaggaattcctttcagataatacactagagaaagacgaaaattctcatgacaattgctttgaggtcgtaaaatataacacatatgaagcttataactcagagaagcaatattttaccagagaggactatacgtatgattacgaccttttaaatgcaatatag

SEQ ID NO: 6422 - DNA, 363 bp, Escherichia coli
atggaatcgctctcagaaggaaccacagcaggctaccagcaaatccacgacggcattattcatctggtcgatagcgcccggacggaaacggtacgtagtgttaacgcgttaatgaccgccacatactgggaaattggccgacgaattgtcgaatttgaacaaggtggcgaggccagggctgcgtatggtgcgcagctaatcaagcgactatcaaaggatttacgtctaaggtataagcgtgggttttccaccaggaatttatggcagtttaagaatttttatatttgttttcaacgaattgaaattgtgcagacactgtctgcacaattcaccagacactatctggcgaatcttgccatttag

SEQ ID NO: 6423 - DNA, 549 bp, Escherichia coli
atgctgcaacaacacgctcctgccgagacgcatattcttccgcaacgggcgatacgcgatccctttgtgctcgaatttctggaattgaaagatgaatattcagaatccgattttgaggaggcgctgatcaaccacctgatggatttcatgctggaacttggggatgattttgcctttgttagtcgacagcgaaggttacgcattgatgacaactggtttcgtgtcgatctgctgtttttccaccgccgtttacgctgcctgctaatcgtcgatctaaaagtgggcaaattcagctatagcgatgccggacagatgaatatgtatctcaactacgccaaagagcactggacgctaccggatgaaaatccgcccatcggtctgattctctgtgcagagaaaggagtcggagaagcgcattatgcactggctggtttgcctaacaccgttctggcgagtgaatataagatgcaactacctgatgaaaaacgactcgcggatgaactcgttcgaacacaggcggtgttagaggaaggctatagacgccgttaa

SEQ ID NO: 6424 - DNA, 1368 bp, Escherichia coli
atgttcggcataattatatctgtcatcgtattaattacgatgggctatttgatcctgaaaaactacaaacctcaggtggtgctggctgccgcaggtatcttcctgatgatgtgcggtgtctggttagggttcggtggtgtgctcgatcccgccaaaagcagcggctacttgatcgtcgatatttataatgaaatcctgcgcatgctgtccaaccgcattgccggattggggctgtcgattatggcagtgggtggttatgcccgctatatggagcgcataggggccagtcgcgcgatggtgagcttgttaagccgcccgttaaaactcattcgctcgccgtatattattctgtcggcaacttacgtcatcggccaaatcatggcgcagtttattaccagcgcctccggtctgggtatgttgctgatggtcaccttatttccgacgctggtgagtctgggagtaagtcgcctctctgcggtggcggttatcgcaaccacgatgtccattgagtgggggattctggaaacgaactccatttttgctgcccaggtcgcaggaatgaaaattgccacttacttcttccactaccagcttccggtcgcctcttgcgtcattatctcggtggcgatctcccactttttcgtgcaacgcgctttcgacaaaaaagataaaaatatcaatcacgaacaggcagagcaaaaagctctcgataatgtcccgccgctctattacgccattttaccggtgatgccgttaatcctgatgctcggctcgctgttccttgcccacgtcgggctgatgcagtcagaactgcatctggtggtggtgatgttactgagtttgacggtgacgatgtttgttgagttcttccacaagcataacttgcgcgaaacaatggacgatgtgcaggcgttttttgacggcatgggtacgcagtttgccaacgtggtaacgctggtggtcgcgggtgaaatatttgcgaaaggcttaacgacgattggcactgtcgatgcggttatcaggggggcggagcattctggtctgggcggtattggcgtgatgattattatggcgctggtcattgccatttgtgccattgtgatgggctcaggcaatgcgccgtttatgtcatttgccagtcttattccgaatatcgcagccggactacatgtaccagcggttgtaatgattatgccgatgcattttgccacgacgctagcgcgcgctgtttcgccgattactgcggtggtggtcgttacgtcaggaattgcaggcgtttcgccttttgcggtagtgaagcggacagcgatccccatggcagtcggtttcgtggtgaatatgattgccactatcacgctattttattaa

SEQ ID NO: 6425 - DNA, 888 bp, Escherichia coli
atgaaaactgaacgaaaaaacgagcattacctggcgctacaacaggcgtttgacgcgccatggcctgggcctgtaggagagttagtgacgctggaaaaaggcaatattcacctgcagatttatccgcatgatggtgccaggataacctcgttaaaggcatttggttctgaagtattacgccaatggcagccgcagcgcagagcttttcagtatggctgtttcccaatggtgccgtgggcagggcgactggggaatgcgacgctgaatgctggtgggcaatgttattctttacccgccaataaaccaccacatgcgttgcatggtatggcttgttactcaacgtgggaaatcatcgacaaaacagcagattccctgactttacgtatgcccctggcttcaccgtggccctggcaaggggaagtgattcagacttttttgctggagaacgatgcgctggttttgcaactggaagtccattcatatgccgatacattcccggcctccgcaggctggcatccgtggtttgcgaaaaagctgactccgcaaaatacagaatcgttgcaggtgctttttgatgcggactggcaagaagaagcgggtagtgatgaactgccaactggaaatcgtatctctcctcaagccggtccctgggatgactgttttggtttttataacggggtgaaggttaagttactgtggcctggtaaactcgcgatgaccatgatctcttctgcaaacagtctggtggtatttgataaacagcccgatgccacctgtattaacccgctgactcaggcacctaacgcaataaatctaacgccggaattggtgacaccagataggccgctggtcatcgaaactcgttggcaatttacacctgaatcttaa

SEQ ID NO: 6426 - DNA, 1815 bp, Escherichia coli
atggttgccaatattaatctcattaaacaagaaagttattctattgttaatttagaaaaacaactaatgagtaatgaatcaccgaagcaaacgctattaaatgatttttcacatcgccttaaaatggaaggtgaggagcaactgtgcgattgtgttaacgaacttaaactcgggttgtcgagtaataataaatatgacctgtttaaaaataaagaaacctcactgtggaaacgcaaagtaccagaaagtgcagcgctggcaatgacgggaacagtatataaattatttggtagtcgcttgctcaacgtccgcaatcagttagataaaaatctcctcgaaatggctatgcaaatggtttatggcaaagatatggtgacaaagtccggggatatattgattgatatacaattaaacaaggatggcagcctccagagtaagcactacacatttgatgtaggtgaagttataaacagttataatattgacctctttgtgaatgcttcgagtattaatcaaacttacttacatgataaaaatcctggtgacgttattagcctgtatgacactttagataacattcctcttgtagttaaggaatgcacgggtaaaaatcatcaaattaacgttaaagccaaattgcctcaagaacgaagtgaaaaagttgaggatatgtgtgaaagaatgagaggtggcatctctatgtttaatcacactacaaaaacagctggtaatatagagcataatttgcagctaagttttctcgtggattcacgaccgtcgatcacaaataaatactcagtcaaagatgtaggtccagatatacttgcattacccgtcaacgtatatcatgcagattttaaaattaaaatcaataatgcagtagagaaggcttcgtcaattgtgttatgtgctgtgcaaaaaaatctccatgcagcaagaaaggttcttggcgggataataggaaatgtgccaaaaaataataaaccaaaaacaatcatttttgatttacgttttcttagtgcaattaagcagaaagtttttttgggcagtgaaaaaccgttgtttgtaaagcataccgcaatgatgagggaggcatgtgaggaattaccgcagtcagtggaatatgttcctttagcctgtgaagcgcatagccatcgcagcgtcgcccttgccaaaaccgtggctgcgcccatcatggcgacaggtgtgggctcggctttaatgtatgcaacatcatcaggaccgtattatgcacaaagtctttctggttcgccggatatcgagatgataaaaaatcgcatggctcaattgtttacccaattggatgcttctgtgcgcaacaaatatcgcccggcttttgataaatggaatgagctggtagataaattaaatcacgaaagaaatacagttccgtttgcgtgtttgaccaccattttagcgacggcgataaatgaaactcctgagggggatacgaatgttgccgttgtgatggggtgtaaatctgcgaaagatcgcacgatatccattgtccttggcaactcgatgttgcaaacactctttgaaaaacgcctcgctgatgatggagaaatagaaaatcttgttgatcaacagggatattttaactgcgattcattaacagccgaagaattaatgatattaaaagacctttttgatattcgagttcttcatgtctctaacaaattcaatgttgggtttcaaggtaatatcaacactgatgttttacaagattcgttttttaaaaatgtcgatttcattcatgaatctagctcgtataccgtagggatgggagtctga

SEQ ID NO: 6427 - DNA, 243 bp, Escherichia coli
atgaactctctggcaggtatagatatgggcagaattttactcaatttatcgaatgagttgtttaagcaacttgatgatctcgagatgcagcgtaatcttcctcgtgcggaactattacgggaagcggtagagcaatacctggtaaatcaatcgcaaacagcaagagccagtgcttttggcatctggcaagggagtgaggaagatggtgtcgaataccagcgtaagctgtgcgaggaatggtaa

SEQ ID NO: 6428 - DNA, 1158 bp, Escherichia coli
ttgcgtaatcagcttactgacacatggcctgaatatcccggtagcgagataaaacagatcgttgaatatagcggcctgtttcttggtgataacgctgtaagaacgttgacggggttgatagaaaaacagcatcaacaggcgcaggttatttgtgtcgataatgtgctggcattgctgcaaagggtgccgggcattgcgtcattgaatattattgatacgcaactggttgagaatattaccgggcatttattacgttgccttgccgcgccggtgtggattggagagcaccgccaaagcagcatgaataccctgaaagccgcctggcctgcggcctttgatatgagtctgcactttattacgctactgcgtgaacaactcgatattccccttttcgacagcgatctgattggtttgtattttgcctgtgcgctggaacggcatcaaaacgaacgccagccgatcattttgctctctgatcagaacgcgattgccaccattaatcagctcgccattgagcgcgacgttttaaattgtcgggtgattattgcccgtagtttaggtgagcttgttgccattcgcgaagagattgagccgttattgatcattaataacagccattatttactggatgatgcggtcaataattgcatcaccgtaaaaaacattattactgccgccggtatcgaacaaataaaacattttctggcgacggcgtttattcgccggcaaccggagcgttttttctctgtccccggaagttttcattattcgaatgtacgcggtgaaagctggcaacatattacccggcaaatttgtgctcaattagtcgcacaacaccatattaccgccgatgaagcgcaacggatcatcgcccgcgaaggcgaaggtgaaaacctgattgttaatcgcctcgccatcccacattgctggagcgaacaggagcgacgttttcgtggattttttattaccctcgcccaatcagttgaggtgaataacgaagtcattaaccatgttttgatcgcctgcgccgccgccgatgcgcgtcatgagctaaaaatatttagctatctggcaagcgtattgtgtcagcatccggcagaggttattgccgggttaacaggatatgaggcatttatggagttacttcacaaggggtga

SEQ ID NO: 6429 - DNA, 981 bp, Escherichia coli
atggcaattaagaagctcgatgatggtcgctatgaagtggacattagacctcgcggtcgcgacggaaaacgcatccgcaggaaattcgaaagaaaagctgaagcactagcatttgagcgatacacaatcgccaatgccagtcagaaagaatggggaggccagcgagcagaccgccgaactttgagtgagttgctggacatctggtggaaatatcacgggcaaaaccacgagcatggaacaaaagagtttaatcatctactcaaaaccatcagcggcataggtgatataccagtgagccggatgagcaaaagggctttgatggattatcgttccatacgactacgtgatggtatcagtgccgcaacgataaaccgtgacatgtaccgattatccggcatgttcacaaaattaattcaattggatgaattttccgggcaacacccaattcacggactgccgccactggcggaggccaaccctgaaatgacgttcctggaaaaagcagaaatcgaaaaactgttaaatgttttggctggtgatgacttacttgtcgcgcttttatgtctgagcactggaggaagatggacggaagttgccacgctaaaaccagcacagattacaaattgcagggttaccttcctgaaaaccaaaaacggtaaaaagcgaaccgtgccgatttctgaggaactggagaaaaaagttaaagaggaggcaagcgccaaattattcaaagttgattatgagaaattttgcgggattttacgcagagtgaaacctgatataccacccaatcaggcaacccacatcctgcggcatacattcgcaagccatttcatgatgaacgggggcaatataatcgcactgcaacagattctgggacatgcgagcattcagcagacgatggcctatgcgcaccttgcgcctgactacctgcaaaatgccgtcgctctgaatccactaaaaggcggagtgacgttataa

SEQ ID NO: 6430 - DNA, 294 bp, Escherichia coli
atgaaattaagcgaaaagattaaggccttgcgtgaggctgaagggctaagccaatcaaaattctgtgaaatcatagagttaccgctaagcacacttaaaaaatatgaaggaggaaactttgaaccgggtggcacagctttgctaaaaatcactatgcatcccacattccaaaaatatgctctatggcttatgacagataaaaccgcgccggacgcaggacaaatcgcaccggctctcgcgcacattgggccagagtcaacagagtccaaccactccgcgaaaaggattggctaa

SEQ ID NO: 6431 - DNA, 273 bp, Escherichia coli
atggacgctgaaaattatgtgattcagtatccgcttgatgcggttcatgtggataaatttgctgatttattagggaagccaaagacagccgtcagtgaaatggtgaaggcaaataaattaccaattattgaattgcgtgatccttgcaaaccgaaggctcgtgccggtgaaaaatgggttttcattcctgagtttaatcgcgctgtacgtgaggcgttttataaccgaccggttgaacagcgtgatgcatggcttttgtggatggggttgtga

SEQ ID NO: 6432 - DNA, 501 bp, Escherichia coli
atgacagtgatgacgcttaatctcgttgagaaacagccagcagctatgcgccggataattggtaagcatcttgccgtccctcgctggcaggatacatgtgattattataatcagatgatggagcgcgaacggttaacggtttgctttcatgcgcagttaaaacagcgtcacgcaacgatgcgttttgaagaaatgaacgacgtcgaacgtgaacggctggtttgtgcaattgatgaattgcgtggggcattctcaaaacgccgtcaggttggcgcaagtgagtatgcatatattagttttttaacagtcagtcagcgtcgtactttatttatgcatgccggattgactgaaaaagaattcaaccagccatactggcgaattaatgaagaatcatgttactggcgtgatgctttattccgtgcattacgtgaattattcagtctgtttgagtatgcaccgacaattctgacgtcggtaaaaccagagcaatatctgcattaa

SEQ ID NO: 6433 - DNA, 225 bp, Escherichia coli
atgcatacagtttctgaaaatcagtgcggtaaatacgcattactgctgcaacaggccagagccgaagcacaggccgacgcagcgacgcgcttttcttctcatcttgacgccatgattcgccacatcacaaaggcggagttatcccgcgtggagatagtcgagctgctcagtcaggagtcggaaaaatttcacaacatcggattgtctcgcggggaggtgctttga

SEQ ID NO: 6434 - DNA, 303 bp, Escherichia coli
atgtcctgttctcattcagttgtattactgaacaatgccttaaaaatcgccgttatgaaaaatggcgatttgtctcttattcaacttggtcttgataaagaaaaacgcgaaataactgaatctgttttcgcgatttatcagaacgaattaaatctcctgtctgatgtggtcaatttacttgttaaacgcgctgtatttcataagcaaatttcatccgtggatgaactgacaaaattaacgacagaaatcgccagctattgcgctgatgaatttaagaagctgaacgacaaaaggagctggtaa

SEQ ID NO: 6435 - DNA, 225 bp, Escherichia coli
atgccggacaacgtagattttattcaggaacaacaggctgaattactggagcgccagattaacgcggcaagggtaaagcattgcggtgtttctgcgctggtttgcgaagagtgtgacgcgccaatacctgctgcccgtcgtgcggcttatccgtcagtcacgcgttgtgtttcctgccagtcagtctttgaagcaaaaaacaagcattaccggagaatggcatga

SEQ ID NO: 6436 - DNA, 276 bp, Escherichia coli
atgagtattcgtattgaaattggcgaacgttatgtcgttaccagtgacagctttcagtttattctccacgagaaaaagagagctgaaagtggtaaaaacgccggtcaggaatggctggcggtggttggttattacccgaaattaagccagctcgtttccggcatgatgcatcacgatattctgaccggaagcgcaaagtcttttgctgatttaaacgcgcaggttgagcaactcagcaagcgttgttcagaggcttttggctcacatggccgttaa

SEQ ID NO: 6437 - DNA, 2277 bp, Escherichia coli
atggccgttaaagcctccgggcattttgtccctccgtcagcatttgccgcaggcaccggtaagacgtttaccggtgcttatgcatggaacgcgccacgcgaggccgtcgggcgcgaaagaccccttacacgtgacgagatgcgtcaggtgcaaggtgttttatccacgattaaccgcctgccttactttttgcgctcgctgtttacttcacgctatgactacatccggcgcaataaaagcccggtgcacgggttttatttcctcacatccacttttcagcgtcgtttatggccgcgcattgagcgcgtgaatcagcgccatgaaatgaacaccgacgcgtcgttgctgtttctggcagagcgcgaccattatgcgcgcctgccggggatgaatgacaaggagctgaaaaagtttgccgcccgtatctcatcacagcttttcatgatgtatgaggaactctgcgatgcctgggtggatgcgcatggcgagaaagaatcgctgtttacggatgaggcgcaggctcacctctatggtcatgttgctggcgctgcacgtgctttcaatatttcccctctctactggaaaaaataccgtaaaggacagatgaccacgaggcaggcatattctgccattgcccgcctgtttaacgatgagtggtggactcatcagcttaaaggccagcgtatgcgctggcatgaggcgttactgattgctgtcggggaggtcaataaagaccgttctccttatgccagtaaacatgccattcgtgatgtgcgtgcgcgccgccaggcaaatctggagtttcttaaatcgtgtgaccttgagaacagggaaaccggcgagcgcatcgaccttatcagtaaggtgatgggcagtatttctaatcctgaaattcgccggatggagctgatgaacaccattgccggtattgagcgttacgccgctgcagagggtgacgtggggatgtttatcacgctgaccgcgccgtcaaagtatcacccgacacgtcaggtcggaaaaggcgaaagtaaaaccgtgcagcttaatcacggctggaacgatgaggcatttaatccaaaggatgcgcagcgttatctctgccgtatctggagcctgatgcgcacggcattcaaggataatgatttacaggtctacggtttgcgtgtcgtcgagccacaccacgacggaacgccgcactggcatatgatgcttttttgtaatccacgccagcgtaaccagattattgaaatcatgcgtcgctacgcgctcaaagaggatggagacgaaagaggagccgcgcgaaaccgttttcaggcaaaacatcttaaccggggcggtgctgcggggtatatcgcgaaatacatctcaaaaaatatcgacggctatgcactggatggtcagctcgataatgataccggcagaccgctgaaagatactgccgcggctgttaccgcatgggcgtcaacgtggcgcatcccgcaatttaaaacggttggtctgccgacaatgggggcttaccgtgaactacgcaaattgcctcgcggcgtcagcattgctgatgagtttgacgagcgcgtcgaggctgcacgcgccgctgcagacagtggtgattttgcgttgtatatcagcgcgcagggcggggcaaatgtcccgcgcgattgtcagactgtcagggtcgcccgtagcccgtcggatgacgttaacgagtacgaggaagaagtcgagagagtggtcggcatttacgcgccgcatctcggcgcgcgtcatattcatatcaccagaaccacggactggcgcattgtgccgaaagtgccggtcgttgagcctttgactttaaaaagcggcatcgccgcgcctcggagtcctgtcaataactgtggaaagctcaccggtggtgatacttcgttaccggctcccacaccttctgaacacgccgcagcagtgcttaatctggttgatgacggtgttatcgaatggaatgacccggaggtcgtgagggcgctcaggggcgcattaaaatacgggctgagaacaccaaatcgtcagcagagaaacggaagcccgttaaaaccacatgaaattgcaccatcggccagactgacccggtcggaaagaatgcaaattacccgtatccgcgttgaccttgctcagaacggtatcaggccgcagcgatgggagcttgaggcgctggcgcgtggcgcgaccgtaaattatgacgggaaacctttcacttatcaggtcgctgatgattggccgggatttttgttacccatttga

SEQ ID NO: 6438 - DNA, 486 bp, Escherichia coli
atgagctatgcagctaaaaaactgcttgaccgctattgggatcgccgactacctgtcgatccgtttaagcttgctaaagcgtggggtgctcgtgttgaagcacttgaggaatcggcttataacaacgatgggttaagcggtctggctgtcatcaaaaagggtgtccataggatttattttgattctagtgaacattctaatcgtcaacgttttactgttgcacacgagttaggtcatcatgtgctggggcatacccaggacggagagtaccatcgggataatgtcgggaattattcaacaggtgctcgtgattaccgtgaggttgaagcaaacaagtttgctgctgagttgttaatgcctgagtctgctatacgtcaattggtatccagagaaggtattgatagcactttgagattagcaagcatctttaatgtatcagaagccgctatgcattggcgcttaaagagcttaggaatggcttattaa

SEQ ID NO: 6439 - DNA, 600 bp, Escherichia coli
atggctgatattgatttatctggacagtccccagagcaaggaaccactcctaagggcgatttagatcctgatatccttataaggcgagatcgacgcgatggtatagagcgtagaagtatgcgattagtgctctctgccgttgtgctttgttttgcttgtacatttctatggcaggggcttaactttgctttggctgttggaaatggcttgctggaagcgaaaagcagtattgccacagcgataacacaaaaagtagatgcacaaacttgtgtttcagcagaaaaatgttctgctttatctgcggatccgaagatggctgatgagaggataacaccatcttcagacactaataaagttagaaaatctatttctggtttatccaccgattggttatcggccagttctctaatagctattgttgcattcatccttggtgtgggtttaactttgcttttgactcttcttaaatcagcatttcaacacccgacagataaagactttagaacaaagtcgacatctaatactattgagttggccacgccaatcagtgaattaataattggtgttctgaatataattaaagacaaactatctaagtaa

SEQ ID NO: 6440 - DNA, 942 bp, Escherichia coli
atgcaaggtaaagttgacgaacagcaatccaatgatattgaagctgagtttggatactatccagtagaggttaacgttgaaactgatgatttttctttacttactttacccggtctagcggaaaaaacaaatcttataaacaatcacagaaatgttattaacggttggatatacccaggaaaccaagaagtatataacctcaatggaggcatatccacaatgccttttagccaacgagtatttggcttacccaaaacacactcactaaaattaaaaaatacatcttcactagaaactctcaattttgctgtgtggtgtctgtcttttttcaaagggataagattaacaactactgatgccggttttttagacgcaaccccaataaaacccagcaaattaactgactttattctggtcaagtgctctgaaaaagaggttatagaattagcactcaaatacatgtctagcgagaaaaaaaccaaacacgcaccaataaatatagcagcaatagtgcatgcactatttttatcccaaaacccacaataccttagcttcgaaaaattccagtatctttatatggcactggatagttgctttgctttaacatgggcagaaaagaacaagtgtacagaaaagactctaaatcactccaggcgcttgaagtggatctgcaaaacttatggcataccacgaccatcatgggttacaggcaaaaaaaacattacaaacatccgcaatgaaaactttcatgaagctatgtttcatggtcaaccacttggctttaccactattaacaattatcaatatggagatgacatattacaacaaatgcaggctttaatttgccgattgctcgttgcgattcttggtgttaacgcccccgattacatcacatcgaacgtgaactctcgtgaatatcattcactaacattaaaaatataa

SEQ ID NO: 6441 - DNA, 1035 bp, Escherichia coli
atgagcaagaaaaaagggaaaacaccgcaacctgcggcaaaaaaaatgaccgccagcgccccgaaaatggaggcattcacctttggtgagccggtgccggtactcgaccgccgtgacattctggattacgtcgagtgcatcagtaacggcagatggtatgagccaccaatcagctttaccggtctggcaaaaagcctgcgtgctgccgtgcatcacagctccccgatttacgtcaaacgtaatattctggcctcgacatttatcccgcatccgtggctttcccagcaggatttcagccgctttgtgctggattttctggtgttcggtaatgcgtttctggaaaagcgttacagcaccaccggtaaggtcatcagactggaaacctcaccggccaaatatacccgtcgtggcgtggaggaggatgtttactggtgggtgccgtccttcaacgagccgacagccttcacgcccggctccgtgtttcacctgctggagccggatattaatcaggagctgtacggcctgccggaatatctcagcgcccttaactctgcctggctgaatgagtcggccacgctgttccgccgcaagtattacgaaaacggcgcacatgccggatacatcatgtacgtcaccgatgccgtgcaggatcgcaacgatatcgaagtgctccgcgaaaacatggtgaagtcgaaaggccgcaacaactttaaaaacctgtttctctatgccccgcaggggaaagccgacggcattaaaattatcccgctcagtgaagtggcgacgaaggacgatttttttaatatcaaaaaagccagcgccgctgacctgctggacgcgcaccgcatcccctttcagttgatgggcggcaagccggagaacgtcgggtcgctgggtgatattgagaaagtggcaaaggtctttgtccgcaatgagcttatcccgctacaggacaggatccgcgagataaacggctggctcggtcaggaggtcatccgctttaaaaactactcactggacactgacaacggctga

SEQ ID NO: 6442 - DNA, 1773 bp, Escherichia coli
atgaccatcaccacagacaccactcttttacacgacccgcgtcgtcaggcggcgctgctgtactggcagggtttttccgtgccgcagattgccgccatgttgcagatgaaacgcccgacggtgcagagctggaaacagcgcgacggctgggacagtgttgcccccatcagccgtgtcgaaatgagcctggaagcgcggctgacccagctcatcatcaaaccgcagaaaaccggcggtgacttcaaggaaattgacctgctcggacgccagattgaacgactggcacgggtaaaccgctacagccagaccggcaacgaggcagaccttaatccgaacgtcgctaaccgcaacaaaggcgggcgtcgcaaaccgaaaaagaattttttcagtgacgaggccatcgaaaagctggagcagattttctttgagcagtctttcgaatatcagttgcactggtatcgcgccgggcttgagcaccgcatccgcgatatcctgaaatcccgccagattggcgcaacgttttatttttcccgcgaggcgctgctgcgcgccctgaaaaccggtcataaccagatttttctgtcggccagtaaaacgcaggcgtatgtgttccgcgaatacatcatcgcctttgcccggctggttgacgttgacctgaccggtgacccgattgtcctgggcaataacggcgcaaaactgatttttctcggcaccaactccaacaccgcacagagccataacggtgacctgtacgtcgacgagattttctggatcccgaattttcaggtactgcgtaaggtggcatcaggtatggcctcacagagtcacctgcgctcgacctatttctccaccccgtccacgctggcgcacgacgcctacccgttctggtcgggtgaactgttcaaccggggacgcgccagcgccgccgaacgtgtggaaatcgacgtcagtcataacgcccttgccggtgggcttctctgtgcggacggccagtggcggcagattgtcaccattgaggacgccctgaaaggtggctgcacgctgttcgacattgagcagcttaaacgcgaaaacagcgccgacgattttaaaaacctgttcatgtgtgaatttgttgacgacaaggcgtcggtgttcccgttcgaggagctgcaacgctgcatggtcgacacgctggaagaatgggaagactatgcgccgtttgccgcgaatccgttcggctcccgcccggtctggattggttacgacccgtcacaccgtggcgacagcgccggatgcgtggtactggcaccgccggtagtggccggaggcaaattcagaatacttgagcgtcaccagtggaaaggcatggactttgccacccaggctgaatccatccgcaaactcaccgaaaaatataacgtcgaatacatcggtattgatgccaccggcctcggtgtcggcgtgttccagctcgtgcgctcgttctatcccgccgcgcgcgatatccgctacacaccggaaatgaaaaccgcaatggtgctcaaggcaaaagacgttatccgtcgtggctgtctggaatatgacgtcagcgccaccgacatcaccagctcgtttatggctatccgcaagaccatgaccagcagcggacgcagcgccacctatgaggccagccgcagcgaggaagccagccacgccgacctcgcctgggcgaccatgcacgccctgttaaatgagccactcaccgccggtatcagcaccccgctgacatccaccattctggagttttactga

SEQ ID NO: 6443 - DNA, 855 bp, Escherichia coli
atggcaaaaaaagtctcaaaattctttcgtatcggcgttgagggtgacacctgtgacgggcgtgtcatcagtgcgcaggatattcaggaaatggccgaaacctttgacccgcgtgtctatggttgccgcattaacctggaacatctgcgtggcatcctgcctgacggtatttttaagcgttatggcgatgtggtcgaactgaaggccgaaaagattgacgacgattcggcgctgaaaggcaaatgggcgctgtttgcgaaaatcaccccgaccgatgaccttatcgcgatgaacaaggccgcgcagaaggtctacacctcaatggaaattcagccgaactttgccaataccggcaaatgttatctggtgggtctggccgtcaccgatgacccggcaagcctcggcacggaatacctggaattctgccgcacggcaaaacacaaccctctgaaccgcttcaaattaagccctgaaaacctgatttcagtggcaacgcccgttgagctggaatttgaagacctgcctgaaaccgtgttcaccgccctgaccgaaaaggtgaaatccatttttggccgcaaacaggccagcgatgacgcccgtctgaatgacgtgcatgaagcggtgaccgctgttgctgaacatgtgcaggaaaaactgagcaccactgagcagcgcctcgctgagatggaaaacgccttttccgcacttaagcaggatgtgactgacagggcggatgaaaccagccaggcattcacccgcctgaaaaacagtctcgaccacaccgaaagtctgacccagcagcgccgcagtaaagccaccggcggtggcggtgacgccctgatgacgaactgctga

SEQ ID NO: 6444 - DNA, 1074 bp, Escherichia coli
atgcgccaggaaacccgctttaaatttaatgcttacctgtcccgtgttgccgaactgaacggcatcgacgccggtgatgtgtcgaaaaaatttaccgttgaaccgtcggtcacccagaccctgatgaacaccatgcaggagtcctctgactttctgacccgcatcaacattgtgccggtcagcgaaatgaaaggggaaaaaattggtattggtgtcaccggctccatcgccagcaccagcgacaccgccggtggcaccgagcgtcagccgaaggacttctcgaagctggcgtcaaacaagtacgaatgcgaccagattaacttcgatttttatatccgctacaaaacgcttgacctgtgggcgcgttatcaggatttccagctccgtgtccgtaacgccattatcaaacgccagtcccttgatttaatcatggccggttttaacggcgtgaggcgtgccgaaacctctgaccgcagcagtaatccgatgctacaggatgtggcggtcggctggctgcagaaataccgcaatgaagcaccggcgcgcgtgatgagcaaggtcactgacgaggaagggcacaccacctctgaggttatccgcgtgggtaagggcggtgattatgccagcctcgatgcactggtgatggatgcgaccaacaacctgattgaaccgtggtatcaggaagaccatgaccttgtggtgattgtggggcgtcagctactggcggacaagtattttcccatcgtcaacaaggagcaggacaacagcgaaatgctggccgctgacgtcatcatcagccagaaacgcatcggtaacctgccggcggtacgcgtcccgtacttcccggcggatgcgatgctcatcacaaagctggaaaacctgtccatctactacatggatgacagccatcgccgcgtgattgaggaaaacccgaaactcgaccgcgtggagaactacgagtcaatgaacattgattacgtggtggaagactacgccgccggttgtctggtggaaaaaattaaggtcggtgatttctccacaccggctaaagcgaccgcagagccgggagcgtaa

SEQ ID NO: 6445 - DNA, 744 bp, Escherichia coli
atgacgagtcccgcacagcgccacatgatgcgggtctcggcagcgatgaccgcgcagcgggaagccgccccgctgcgacatgcaactgtctatgagcagatgctggttaagctcgccgcagaccagcgcacactgaaagcgatttattcaaaagagctgaaggccgcgaaaaaacgcgaactgctgccgttctggttgccgtgggtgaacggcgtgctggagcagggcaaaggtgcacaggatgacattctgatgacggtcatgctgtggcgtctggataccggcgatattgccggtgcgctggagattgcccgttatgccctgaagtacggtctgaccatgccgggtaaacaccgccgtaccccgccgtacatgttcaccgaggaggtagcgcttgcggccatgcgcgctcacgctgccggtgagtctgtggatacccgcctgctgacggagacccttgaactgaccgccacggctgacatgcctgatgaagtgcgcgcaaagctgcacaaaattaccggtctgtttctgcgtgacggtggtgatgccgccggtgcgctggcgcacctgcaacgtgcgacacagctcgactgccaggccggcgtcaaaaaagagattgaacgactggagcgggagctgaaaccgaagccggagccgcagccaaaagcggccacccgcgccccgcgtaagacccggagcgtgacaccggcaaaacgtggacgcccgaaaaagaaagccagttaa

SEQ ID NO: 6446 - DNA, 510 bp, Escherichia coli
atgatgacgctgattattccgcgaaaggaggctcccgtgtccggtgagggtacggtggttatcccgcaaccggcaggcgacgagccggtgattaaaaacacgttcttttttcccgatatcgacccgaagcgcgtccgggaacgtatgcgccttgagcagaccgtcgcccccgcccgtctgcgtgaggccatcaagtcaggcatggcggagacgaatgcggagctgtacgagtaccgcgaacagaaaattgccaccggttttacgcgtctggcggacgtcccggcggacgacatcgacggtgaaagcatcaaagttttttactacgagcgcgccgtgtgtgcgatggcgaccgcgtcgctttatgagcgttatcgcggcgtggatgccagtgcgaaaggtgacaagaaggctgacagcattgacagcaccattgatgaactgtggcgggatatgcgctgggcggtggcgcgtatccaggacaagccgcgctgcatcgtgagtcaaatctga

SEQ ID NO: 6447 - DNA, 204 bp, Escherichia coli
atgaagacctttgcgctacagggcgacacgctcgacgccatttgtgtccggtattacgggcgcactgagggcgtggttgagaccgtgctcgccgcaaatccgggactggctgaactgggtgcggtgctgccacacggcaccgccgtcgaactgcccgacgttcagaccgcacccgtggctgaaactgtcaatctgtgggagtaa

SEQ ID NO: 6448 - DNA, 282 bp, Escherichia coli
atgacagcagaagaaaaaagcgtcctgtcgcttttcatgattggggtgctgattgttgtcggcaaggtgcttgccggtggtgaacccatcaccccgcgtctgtttatcgggcgcatgttgctcggtggttttgtctcgatggttgccggtgttgttctggtgcagtttcctgacctgtcactgcctgcggtgtgcggtatcggctccatgctgggtatcgccggttatcaggtgattgagattgccattcagcgccgttttaagggcagggggaaaccgtaa

SEQ ID NO: 6449 - DNA, 498 bp, Escherichia coli
atgccggtaattaacacgcatcagaatatcgcggcctttctcgacatgctggccgtgtccgaagggacggcgaatcatccgctgacgaaaaaccggggctatgacgtgatagtcaccggactggacgggaagccggaaattttcactgactacagtgaccacccgttcgcgcatggccgaccggcgaaggtgtttaaccgtcgcggtgaaaaatccacggcctccggtcgctatcagcagctttacctgttctggccgcactaccgcaaacagcttgccctgccggatttcagtccgttgtcacaggacaggctcgccattcagttgatccgcgaacgcggtgcactggatgacatccgggcgggacgcattgagcgcgccatttcacgctgtcgcaatatctgggcgtccctgccgggtgccggttacggtcagcgtgagcattcactggaaaaactggtcaccgtctggcgtaccgccggcggtgtaccagcttaa

SEQ ID NO: 6450 - DNA, 426 bp, Escherichia coli
atgaagaaattatccctttcactgatgctgaacgtgtcgctggcgctgatgctggcactgtccctgatttacccgcagagcgtggccgtcaattttgtcgccgcctgggcgattctggcgacggttatctgtgtggttgccggtggtgtcggcgtgtatgccactgagtatgtgctggaacgctacgggcgggagctgccaccggaatcgctggccgtgaagattgtcacgtcgctgtttttgcagccggtgccgtggcgcagacgggcggcggctctggtggtgatggtggcgacgtttatcgcgctggtcgctgccgggtggatttttaccgcgctgatttatctcgtggcgtcgctgtttttccggctgatacgtacggcctgccgtcagcgtattgaggggcgggaaccatgtcaaagctga

SEQ ID NO: 6451 - DNA, 426 bp, Escherichia coli
atgtcaaagctgatgactgtgctggttgtgttgttatcgctggcggtggcgggtctgtttctggtgaaacacaaaaatgacagcctgcgcgcctcgctggacagggcgaataacgtcgccagtgaacagcagacgaccatcaccatgctgaaaaatcagcttcatgttgccctcaccagggcagacaaaaacgagctggcgcaggtggcactgcgtcaggaactggagaacgccgcgaagcgtgaagcacagcgcgagaaaaccatcacgaggttactcaatgaaaacgaagattttcgccgctggtacggtgctgacctgcctgatgctgtgcgccggttgcaccagcgcccggcctgcaccgacgccagtgattgtccacaacgcctgcccgaaagtgagtctttgcccgatgccgggcagtga

SEQ ID NO: 6452 - DNA, 159 bp, Escherichia coli
atgccgggcagtgacccggagacgaacggcgatttaagtgccgatatccggcagcttgagaacgcgctggcacgctgtgccagccaggtaaaaatgattaaacactgtcaggacgaaaacgatgctcaaacccgacagcctgcgcagggcgctgactga

SEQ ID NO: 6453 - DNA, 468 bp, Escherichia coli
atgctcaaacccgacagcctgcgcagggcgctgactgatgccgtcacggtgctgaaaaccagtcccgagatgctgcggatattcgtggataacgggagtattgcctccacactggcgacgtcgttgtcattcgaaaagcgttacacgctcaatgtgattgtgaccgactttaccggtgattttgacctgctcatcgtgccggtgctggcgtggctgcgggaaaatcagcccgacatcatgaccactgacgaaggtcagaaaaagggcttcacgttttatgcagacatcaacaatgacagcagctttgatatcagcatcagcctgatgctgaccgagcgcacgctggtcagtgaggtggacggcgcgctgcatgtgaagaatatcccggaacccacgccgccggagccggtcacccgcccggtggagctttatatcaatggcgaactggtgagcaagtgggatgaatga

SEQ ID NO: 6454 - DNA, 453 bp, Escherichia coli
atgaatgagtttaagcgttttgaagaccggctgaccggactgattgaatcgctgtcaccgtcagggcgtcggcgactgagcgccgaactggcgaaacgtctgcggcagagtcagcagcgtcgggtgatggctcagaaagccccggacggcacaccctacgcgccacgccagcagcagagcgccagaaaaaagactggtcgtgttaagcgaaaaatgtttgcgaaacttatcaccagtcgttttttgcatatccgcgccagcccggagcaggcatcaatggaattttacggcgggaagtcgccgaaaatcgccagtgtgcatcagttcggtctgtcggaagaaacccggaaagacggtaagaaaattgattatccggcgcgtcctctgctcggctttaccggtgaggatgtgcagatgattgaagagattatcctggctcacctcgaccgttag

SEQ ID NO: 6455 - DNA, 636 bp, Escherichia coli
atgaacactctcgcaaatatccaggaactcgcgcgcgcactgcgcaacatgattcgcaccggccttgtcgtcgaaaccaaccttaaagccggtcgctgccgtgtgcagaccggtggcatgtgcaccgactggcttcagtggctgacctgtcgtgccggtcgttcgcgcacatggtgggcaccttccgtgggggaacaggtgctgattctggccgtgggcggtgaactcgacactgcgttcgttctgccggggatttattccggcgataaccccgcgccgtctgcgtcggcggatgccctgcatatccgtttccctgacggggcggtgattgagtatgaacctgaaaccagtgcactgacggtaagcggaattaaaacggccagcgtgacggcttctgattctgttactgccacggtgccggtggtcatggtgaaagcatcaacccgcgtcaccctggacacaccggaggtggtctgcaccaacaggctgattaccggcacgctggaagtgcagaagggcgggacgatgcgcggcaacattgaacacaccggcggtgaactctcatcaaacggtaaggtactgcatacccataaacaccccggcgacagcggcggcacaacagggggacctctatga

SEQ ID NO: 6456 - DNA, 348 bp, Escherichia coli
atgactgcgcgttatctcggaatgaatcgcagtgatggcctgactgtcactgaccttgagcatatcagccagagtatcggcgatatcctgcgcacaccggtcggctcacgggtgatgcgtcgtgattacggctcgttgctggcgtcaatgattgaccagccgcagaccccggcgcttgagttgcagattaaagtcgcctgttacatggcagtgctgaaatgggaaccccgcgtcaccctgtcatccgtcaccactgagcgcagttttgacgggcgaatgactgtcactttgaccggccagcacaacgacaccggccagccactttcgttaaccatccctgtgagttga

SEQ ID NO: 6457 - DNA, 909 bp, Escherichia coli
atgccgattatcgacctgaaccagctacccgcaccggatgtggtcgaggagctggactttgaaaccattcttgctgaacgcaaggcgacactgatttccctttacccggaggaccagcaggaggcggtcgcccgtaccctgatgctggaatccgagcctctcgtcaaactgctggaggaaaatgcttatcgtgagcttatctggcgtcagcgtgtgaatgaggccgcacgggcggtgatgctggcctgtgccgccggtaatgaccttgatgtgattggtgccaattacaacaccacgcgcctgactatcaccccggcagatgattcgaccattccgccgacactggcagtgatggaatctgataccgattatcgtctgcgtattcagcaggcgtttgaaggtttaagcgtcgccgggtcagtgggagcctatcagtatcatggtcgcagtgccgacgggcgtgtcgcggatatctctgtcaccagtccgtctccggcctgcgtcaccatctctgtgctgtcacgtgaaaataacggtgtcgcatccgaagacctgctggcggtggtgcgtaacgcccttaatggcgaggacgtcaggccggtggccgaccgtgtgaccgtgcagtctgccgccatcgttgaataccagataaacgccacgttgtatctttaccctggtcccgaaagcgaacccattcgcgctgccgccgtgaaaaaactggaagcgtatatcacggcacagcaccggctggggcgcgacatccgtctgtctgccatttatgccgctttgcatgtggaaggcgtgcagcgtgtcgaactggctgcaccgctggccgacatcgtgctcaacaatacgcaggcgtctttctgtaccgaatacagcgtcgtgaccggaggctcggatgagtga

SEQ ID NO: 6458 - DNA, 612 bp, Escherichia coli
atgagtgattcgcgactgctgccgactggctcatcaccgcttgaagtcgccgccgcaaaagcctgtgcggaaattgaaaaaacgccggtcagtattcgtgagctgtggaacccggacacctgcccggcaaatctgctgccgtggctggcgtggtcattttcggttgaccgctgggatgataaatggccggaagcgacaaaacgcgctgttatctgcgatgcgtatttcattcactgtcataaaggcactataggtgcaatccggcgtgtggtggagccgctcggctatctgattgaggtgagggagtggtggcagctcaacgaggagccggggacgttccgcatcgttgttggcgtgcttgagcagggtattaccgaggaaatgtatcaggagctggagcgtctcgttgctgatgcaaaacctgcaagccgccatctgacgggactggctatcagtttaagtacaaccggcaacatttttgccggtgcgggatgctatcacggcgacgccctgacggtttatccctacaccccggaggccattattgtcggaggggattatttcccggcctcggccattcatttaattgataacctgagagtaaacgcatga

SEQ ID NO: 6459 - DNA, 1308 bp, Escherichia coli
atgacagtgaaatactacgccattctgactaatcagggcgcagcacggctggctaacgcgacgatgctcggcagtaagctgaatctgacgcaaatggccgttggtgatgcaaatggtgtgttaccaacaccagacccggcacagacaaaactgattaaccagaaacgcattgcaccgctgaatcttctgagtgttgacccgaataaccagagccagattattgcggagcaaatcatccctgagaacgagggcggattctggatccgtgagattgggctttatgatgatgaaggcgtactcattgcggtggcaaactgcccggaaacgtacaaaccgcagttgcaggaaggaagcggtcgtacccagactatccgcatgattctggttgtctcgaataccgaagccatcacgctgaaaatcgacccgtcggtggtactggcgacccgtaaatacgtggatgatgaagtcctggaattaaggctgtatgtggatgaccagatgagaaaccacattgccgcacaggatcctcatacccagtatgcacagaaacataatccgacatttaccggagaaccaaaagcgccgacgcctgccgcaggaaataacaccacgcggattgcgactactgcgtttgttcaggccgctattaccgctctgattaacggtgcgccagccacgctggacacactgaaagaaattgccgcagccattaacaatgacccgaaattcagcaccaccattaacaatgcgctgtcaggtaagcagccactggatgagacgctgactcatttgagtgggaaggatgttgccggtcttcttgcataccttggtttgggagaaggttcggcattacccgttggcgtgcctgttccgtggccttccgccactccgccaacaggctggctgaaatgcaacggtgcggctttttctgctgaagaatacccggaactggcaaaggcttatccgacaaataaattgcctgatttacgtggtgagtttattcgtggctgggatgacgggcgcggtattgatgcaggacgtgttttattgagcattcagacagggatgctggaaaaacaccgccatattgttgttgccaatgatggttacgacacaaaagatgaatgggaactggctacgattttcaaaaagacatacacacaaggacggggacttgatgccgcaaatacaggagggagtctgatcccatcaccgacacttcattcacgagggagtatcggtaatactggcgggagtgaaacccgtccacgaaatattgcatttaactatatcgtgagggctgcataa

SEQ ID NO: 6460 - DNA, 603 bp, Escherichia coli
atggataacgccgtattaaatagcgagcttattgccacgaaggcggggaatattaccgtctataactatgatggtaaaactcgggaatatatttctacttcaaatgaatatcttgccattggtgtcggtatccctgcatattcctgtctggatgaacctggtatacataaggcgggttatgctatctgccgttcgatggatttaaactcatgggaatatgtgccagaccatcgcggtgaaatcgtctataacaccgaaacgggagacgccaaagaaatcacagctccgggtgattatcctgaaaatacaaccactatcgccccgttaacgccattcgataaatgggatggtaagaaatgggtgaccgatactgaggcacagcatagcgccgcagtagacgcggcagaagcacagcgtcagtcactgattgatactgcaatggcttccatcagtctgattcaactgaaattgcaggccgggcggaagctgacgcaggcagaaaccacccgacttaacgctgtgctggattacattgacgcggtgacggcaacagataccagcaccgcgccggatgtcatctggcctgaactgccggaggcgtag

SEQ ID NO: 6461 - DNA, 594 bp, Escherichia coli
atgcttattggctatgtacgcgtgtcaacaaatgaccagaacacggaattgcagcgtaacgcgctggagtgcgcaggatgcgagcggatttttgaggataaaatcagcggcacgaagtccgaccgaccgggactgaaaaaactgctcagaacattatcagcaggtgacactctggtagtctggaagctggaccggctggggcgtagtatgcggcatctggtcattctggttgaggagctgcgcgaacgcggcgttaattttcgcagcctgacagatgctattgataccagcacgccgatggggcgttttttctttcatgtgatgggtgccctggctgaaatggagcgagaactcattgtcgagcggacacgcgccggactggaagcggccagagccaaagggcgtattggtggcagacgtccgaagctcaccgcgagtgagtgggaacaggcaggacggttgctggctgcgggtgaatcacgtcaacgcgtggcgctgatttttgatattggcctgtccacgctctataaaaaattcccctcatcagcggcaaagaataaattgtgtcatcccttagccaaccgggacaaatag

SEQ ID NO: 6462 - DNA, 1191 bp, Escherichia coli
atgagtgactatcatcacggcgtgcaggtgctggagattaacgacggcacccgcgtcatttccaccgtatccaccgccattgttggcatggtctgcacggccagcgatgcggatgcggaaaccttccccgtcaataaaccggtgctgatcaccaatgtgcagagcgcgattgcaaaggccggtaaaaaaggcacgctggcggcatcgttgcaggccatcgctgaccagtcaaaaccggtcaccgttgtcgtgcgcgtggaagacggaaccggcgacgacgaagaaacgaaactcgcgcagaccgtttccaatatcatcggcaccactaacgaaaacggtcagtacaccggactgaaagccctgctggcggcggagtcggtaaccggtgttaaaccgcgtattctcggtgtgccgggactggataccaaagaggtggctgttgcactggcatccgtctgtcagaagctgcgcgctttcgggtatatcagcgcatggggctgtaaaaccatttccgaggtgaaagcctaccgccagaatttcagccagcgtgagctgatggtcatctggccggatttcctcgcatgggatacggtcaccagtaccaccgccaccgcgtatgccaccgcccgtgcgctgggtctgcgcgctaaaatcgaccaggagcagggctggcataaaacgctgtccaacgtcggggtaaacggtgttaccggcatcagcgcctctgtattctgggatttgcaggagtccggcaccgatgctgacctgcttaacgagtcaggcgtcactacgctgattcgccgcgacggtttccgattctggggtaaccgtacctgctctgatgacccgctgttcctctttgaaaactacacccgcaccgcgcaggtgctggccgacacgatggctgaggcgcacatgtgggcggtggacaagcccatcaccgcaacgctgattcgcgacatcgttgacggcatcaatgccaaattccgtgagctgaaaacaaacggctatatcgtggatgcgacctgctggttcagcgaagaatccaacgatgcggaaaccctcaaggccggaaaactgtatatcgactacgactataccccggtgcctcctcttgaaaacctgaccctgcgccagcgtattaccgataaatacctggcaaatctggtcacctcggttaacagcaattaa

SEQ ID NO: 6463 - DNA, 519 bp, Escherichia coli
atggcaatgccgcgcaaactcaagttaatgaacgtctttctgaacggctacagctatcagggcgttgcaaagtccgtcacgctgccaaaactgacccgtaagctcgaaaactatcgcggtgcggggatgaacggcagcgcaccggtagacctcggccttgatgacgatgcgctgtcaatggagtggtcgctcgggggcttcccggattcggttatctgggagctttacgccgcaaccggtgtggatgccgtaccgattcgttttgcaggctcttaccagcgcgacgataccggcgaaacggtggccgtcgaggtggtcatgcgtggccgtcagaaagaaatcgacaccggcgagggtaaacagggagaagacaccgagtcgaaaatctccgtggtctgcacctatttccggctgacgatggacggtaaggagctggtcgaaatcgacaccatcaacatgattgagaaggtgaacggcgtcgaccggctggagcaacaccgccgcaatatcggcctgtga

SEQ ID NO: 6464 - DNA, 276 bp, Escherichia coli
atgaacaaagaaaacgtcattaccctggataatccggttaaacgtggtgaacaggttatcgaacaggtcacgctgatgaaacccaatgccgggacgctgcgcggtgtcagtctggctgcggtcgcaaactccgaagtcgatgcactgattaaagtgctgccgcgcatgacggcaccgatgctgaccgagcaggaggtcgccgcgctggaactgcctgaccttgtggcgctggccggtaaggtggtcggttttttgtcgcagaactcggtgcagtga

SEQ ID NO: 6465 - DNA, 2448 bp, Escherichia coli
atgagtaacaatgtaaaattacaggtattgctcagggctgttgaccaggcatcccgcccgtttaaatccatccgcacagcgagcaagtcgctgtcgggggatatccgggaaacacaaaaatcactgcgcgagctgaacggtcaggcatcccgtattgagggattccgcaagaccagtgcacagctcgccgtgactggtcatgcacttgaaaaggctcggcaggaagcagaagcccttgccacacagtttaaaaacaccgaacgtccgacccgtgctcaggcgaaagtgctggaatccgcaaagcgtgcggcggaggacttacaggcgaaatataaccgcctgacggattccgttaaacgccagcagcgggaactggccgctgtgggaattaatacccgcaatcttgcacatgatgagcagggactgaaaaaccgtatcagtgaaaccaccgcacagcttaaccgtcagcgcgacgcgctggcgcgtgtcagtgcgcaacaggcaaaacttaacgcagtcaaacagcgttatcaggccggaaaggagctggccggaaatatggtctcggtgggcgctgccggtgtggggattgctgctgcgggaacgatgaccggagttaagctgctgatgcccggttatgagtttgcgcagaaaaactcagaattgcaggctgtgctgggagtggcaaaagactccgccgaaatgaccgcactccgcaagcaggcgcgccagctcggcgacaataccgcagcctcggcagatgatgcagccggtgcacagattatcattgcgaaagccggtggagatgttgatgccattcaggcggcaacgccggtcacgctgaatatggcgctggcgaaccgccgcacgatggaagaaaacgccgccctgctgatggggatgaaatccgcctttcagctttcaaacgataaggtcgctcatatcggggatgttctctccatgacgatgaacaaaaccgccgccgattttgacggcatgagcgatgcgctgacctatgccgcacctgtggcaaaaaatgccggtgtcagcattgaagaaaccgccgcaatggtcggggcgctgcatgatgcaaaaatcacaggctcaatggcggggacgggaagccgtgccgtgttaagccgcctgcaggcaccgacgggaaaagcatgggatgcactcaaagagcttggagtgaaaacctcagacagcaagggaaacacccggccaatatttaccattctgaaagaaatgcaggccagttttgataaaaaccggctcggtactgcccagcaggctgaatacatgaaaaccattttcggggaggaggccagctcagccgccgctgtgctgatgactgccgcctcaaccggaaagctggacaaactgaccgctgcgtttaaagcctcagacgggaagaccgcagagctggtaaatatcatgcaggacaacctcggcggtgactttaaggagtttcagtccgcttatgaggcggtggggactgacctgtttgaccagcaggaaggcgcactgcgtaatctcacgcagacggccacaaagtatgtgttaaaactcgacggctggatccagaaaaacaaatcactggcgtcaaccatcggcatcattgtcggtggtgcactggcactgattggtgtcatcggtgccattggcctcgtagcctggccggttatcaccggcatcaatgccatcatcgcggcagcaggcgcaatgggggcaatcttcacgacggttggcagtgctgttataaccgccatcggggcgattagctggccggttgtggccgtggtggccgccattgtcgccggggcgttgcttatccgtaaatactgggagcctgtcagcgcattctttggcggtgtggtggaagggctgaaagcggcatttgcgccggtgggggaactgttcacgccacttaaaccggtgtttgactggctgggtgaaaagttacaggccgcgtggcagtggtttaaaaacctgattgccccggtcaaagccacccaggacaccctgaaccgttgccgtgacacgggcgtcatgttcgggcaggcactggctgacgcgctgatgctgccgcttaatgcgttcaacaaactgcgcagtggtattgactgggtactggaaaaactcggtgttatcaacaaagagtcagacacacttgaccagaccgccgccagaactcaagccgccacgtatggcagcggtggttatattccggcgaccagctcttatgcaggttatcaggcttatcagccggtcacggcaccggctggccgctcttatgtagaccagagtaaaaacgaatatcacatcagcctgacgggtggtactgcgccggggacacagctcgaccgccagttacaggatgcgctcgaaaaatacgagcgggataaacgtgcgcgcgcccgtgccagcatgatgcatgacggttaa

SEQ ID NO: 6466 - DNA, 480 bp, Escherichia coli
atgatgctcgcgttaggtatgtttgtttttatgcgccagacgctgccacaccagaccatgcagcgtgaatcagattatcgctggccgtcaaattcccgtatcggtaaacgggacgcttttcagtttctcggtgtgggtgaggaaaacatcacgcttgccggtgtgctttatcccgaactgaccggcggcaagctgacgatgaccacgctcaggctgatggcagaggaggggcgggcgtggccgttgctggatggcaccggcatgatttacggcatgtatgtcatcagcaaggtgagtgaaacagggagtattttctttgcagatggcacaccccggaaaattgattttacgctgtcgctcacccgcgttgatgaatcactggccgcgctttatggcgatatcggtaaacaggcggaatcgctcatcggtaaggctggcagtatggcgactaaattcacgggtatgacgggggcgggataa

SEQ ID NO: 6467 - DNA, 1164 bp, Escherichia coli
atgctggatgcactgacatttgatgcaggcagtacgctgacgccggattacatgctgatgctcgacagcagggatattaccggcaatatcagcgaccgtctgatgagcatgaccctgacggataaccggggctttgaggctgaccagcttgatattgaactgaacgatgccgacgggcaggtcggactaccgattcgtggcgctgtcctgacggtgtatatcggctggaaaggttttgccctggtatgcaaagggaaatttaccgttgatgaggttgaacaccggggcgcaccggatgtggtcaccatccgcgcccggagtgcagattttcgcgggacgctcaattcccgccgtgaaggctcatggcatgacaccacgctcggtgcgattgttgaggcgatagcctcccgtaacaggctggaagccagtgtcgctccgtcactggacggaattaaaatcccgcacatcgaccagtcgcaggagtctgatgcgaaatttctgacccgtcttgcagaacgcaacggcggtgaggtgtcggtaaaaatgggaaaactgctgtttctcaaagcggggcagggggtgacggccagcggtaaaaaaatcccgcaggtcaccatcacccgcagcgacggcgaccgtcatcattttgcgattgctgaccgtggagcctataccggcgtaacggcaaagtggcttcacaccaaagacccgaagccgcaaaagcagaaggtaaaactgaaacgcaaaaagaaagaaaaacacctgcgcgcactggagcacccgaaagcgaaaccagtcacgcagaagaaagcgccaaaagtaccggaagcgcgcgaaggtgaatacatggccggtgaggctgacaacgtttttgccctgaccacggtatatgccacgaaagcgcaggccatgcgcgccgctcaggcgaagtgggataagctgcaacggggtgttgcggagttctccatcagccttgccactggtcgtgctgatatttacacggaaacaccggtcagagtgtcaggctttaagcgcgtcatagacgagcaggactggacaatcactaaggtgacacattttctgaataatagcggcttcacgacgtccttagagcttgaggtcaggctttctgatgtggagtacgaaacagaagatgatgagtga

SEQ ID NO: 6468 - DNA, 219 bp, Escherichia coli
atgtttcattgtcctttatgccagcatgccgcacatgcgcgtacaagccgctatatcactgacacgacaaaagagcgttatcaccagtgtcagaacgtgaattgcagcgccacgttcatcacctatgagtcggtacagagatacatcgtgaagccgggagaagtccacgccgtaaggccgcacccgttgccgtcagggcagcaaattatgtggatgtga

SEQ ID NO: 6469 - DNA, 627 bp, Escherichia coli
atggttggcgagtatatcggttcagtatttctggggccgttgttacttcccgtgcttgtgtcaggtattctgtgcgcatttattaaaaaaacacgtaacttcgccagttttactcgcgggtgctgttgggtattgggaatcctgcttttatccaaagtcggcaatacgtttcgtatgtttaccccgtggcaatatacctttgagaatgctgcgataaccgtgactatcccgaaccgacactggaatacggtttccattagtactaataaaaccattgatataagaagtgaggataatagcgtcttcatttctgctttccgtctgcccgcaggacgtagcgccgatgacccgctggaagcgttaaagaagaagcagcgagacaatctcaaggatcaatacaatgaggaagccttccagtttcatgattgtaatgccaaacatttcacctgtaagtatcaggatgtgttgataaattttgatggtcagcagaaaagaaccatcagtgtttatcttgaagacacccccagggctgtggggatcattgcattaatggcgccagatacggcagataaatatcgccaacaggcgatggagattatgctttccgctaaaaatgcagtgaagtaa

SEQ ID NO: 6470 - DNA, 675 bp, Escherichia coli
atgcagaatattattcttttatttatatatttattacttatagtcgttaaccatttccgctacaaattccttttgtctggcaacacgggtgaaatgattttatattttgctaacgtattttttaacccacttgccttatcatttattatcgccacaatcatctgtataacgataaaaaaaagaagcagccacagctttattcgcggcacttgttggttaatgggattatttcttatctatagcagctatacagtgtgggaacgacacagcacatgggattatactttcccggggccaggtatcaccgtcacagttccgagcaaacagtgggttgccaatatagtaaaacaaggaccaatcctggtgactcgggatgcccatgctattttagttattgttgccttctcacaaaatgaactcggtgtgcattcaatcgaggaacttaccgcgactcaaaacggaactgcagaaatgcatgtttgtgatgttaagggatttgcctgcgcttatcaggaaggaattcaaacaatgagtgatggcaaaataagacatgctattttcatgactctactggataacactaatttgatacgactggtcgcagctatcgacccagattatttggacgaatatcaagaagaagtaatgaaaatgatactttctgcccatcaataa

SEQ ID NO: 6471 - DNA, 360 bp, Escherichia coli
atgaaacaagcaaatcaagatagaggtacgctgctgctggcgctggtggctggcttatcgattaatggtactttcgcagcgctgtttagctccattgtgccattttctgtattcccgattatttccctggtgctgacagtttactgcctgcatcaacgttatcttaatcgcactatgccggtaggcttgccgggtctggctgctgcttgttttattctcggcgtactgctgtacagcacggtagttcgtgcggaatatccggatatcggctctaacttcttcccggcagtactgtccgtcattatggtgttctggattggcgcgaagatgcgtaaccgtaagcaggaagttgctgagtaa

SEQ ID NO: 6472 - DNA, 1845 bp, Escherichia coli
atgattaaaaaagcttcgctgctgacggcgtgttctgtcacagccttttctgcttgggcacaggataccagcccggatactctcgtcgttactgctaaccgttttgaacagccgcgcagcactgtgcttgcaccaaccaccgttgtgacccgtcaggatattgaccgctggcagtcgacctcggtcaatgatgtgctgcgccgtcttccgggtgtcgatatcacccaaaacggcggttcaggtcagctctcatctatttttattcgcggtacaaatgccagtcatgtgctggtgttaattgatggcgtccgcctgaatctggcgggagtgagtggttctgccgaccttagccagttccctattgcgcttgtccagcgtattgaatatatccgtggaccgcgctccgctgtttatggttccgatgcaataggcggggtggtgaatatcatcacgacgcgcgatgaacccggaacggaaatttcagcagggtggggaagcaatagttatcagaactatgatgtctccacgcagcaacaactgggggataagacacgggtaacgctgttgggcgattatgcccatactcatggttatgatgttgttgcctatggtaataccggaacgcaagcgcagacagataacgatggttttttaagtaaaacgctttatggcgcgctggagcataactttactgatgcctggagcggctttgtgcgcggctatggctatgataaccgtaccaattatgacgcgtattattctcccggctcaccgttgctcgatacccgtaaactctatagccaaagttgggacgccgggctgcgctataacggcgaactgattaaatcacaactcattaccagctatagccatagcaaagattacaactacgatccccattatggtcgttatgattcgtccgcgacgctggatgagatgaagcaatacaccgtccagtgggcaaacaatgtcatcgttggtcacggtagtattggtgcgggtgtcgactggcagaaacagactacgacgccgggtacaggttatgttgaggatggatatgatcaacgtaataccggcatctatctgaccgggctgcaacaagtcggcgattttacctttgaaggcgcagcacgcagcgacgataactcacagtttggtcgtcatggaacctggcaaacgagtgccggttgggaattcatcgaaggctatcgttttatcgcttcttatggcacgtcgtacaaggcacctaatcttgggcaactgtatggtttctacggaaatccgaatctgaatcctgagaaaagcaaacagtgggaaggcgcgtttgaaggcttaaccgctggggtgaactggcgtatttccggatatcgtaacgatgtcagtgatttgatcgattatgatgatcacaccctgaaatattacaacgaagggaaagcgcggattaagggggtcgaggcgaccgccaattttgataccggaccactgacgcatactgtgagttatgattatgtcgatgcgcgtaatgcgattaccgacgtgccgttgttacgccgtgctaaacagcaggtgaaataccagctcgactggcaattgtatgacttcgactggggtattacttatcagtatttaggcactcgctatgataaggattactcatcttatccttatcaaaccgttaaaatgggcggtgtgagcttgtgggatcttgcggttgcgtatccggtcacctctcatctgacagttcgtggtaaaatagccaacctgttcgacaaagattatgagacagtctatggctaccaaactgcaggacgggaatacaccttgtctggcagctacaccttctga

SEQ ID NO: 6473 - DNA, 453 bp, Escherichia coli
atgcagcaactgaacattgtccccggcgcacttcccgactggctggttagcacagaggatctgaaaaatgttacccgtgacccattagctgaggccagacgggtgctggtggtggggcagggcggagaggcagataaccaggaaatcgctatgctggcagaaaagctgggagccgaagtgggctacagtcgggcgcgagtaatgaacggtggcgttgatgccgaaaaagtgattggtatttccggacatctgctggcacctgaggtgtgtattgttgttggcgcttctggcgcagcagcgttaatggcgggcgtatgcaatagcaagtttgtggtggcgattaatcatgacgccagcgcagcggtattttcacaggcagatgttggcgtggttgatgactggaaagtggtgctggaggcaatggtgacaaacattcacgcagattgccaataa

SEQ ID NO: 6474 - DNA, 1800 bp, Escherichia coli
atgacgacacaggtctcaccttccgcgttgcttccgttgaacccggagcaactggcacgccttcaggcggccacgaccgatttaactcccacccagcttgcctgggtttctggctatttctggggcgtgctcaaccagcagcctgctgcgcttgcagcgacgccagcgcccgccgcagaaatgccgggtataactattatctccgcctcgcaaaccggcaatgcgcgccgggttgctgaagcattacgcgatgatttattggcagcaaaactgaacgttaagctggtgaacgcgggcgactataaattcaaacaaatcgccagcgaaaaactgcttatcgtggtgacgtcaacgcaaggagaaggggaaccgccggaagaagccgtcgcgctgcataagttcctgttctccaaaaaagcgccaaagctggaaaacaccgcgtttgccgtgtttagcctcggcgatagctcttatgaatttttctgccagtccgggaaagattttgacagtaagctggcggaactgggcggtgaacgcctgcttgaccgtgtcgatgccgatgttgaatatcaggccgctgccagcgagtggcgcgcccgcgtggttgatgcgcttaaatcgcgtgcgcctgtcgcggcaccttcgcaatccgtcgctactggcgcggtaaatgaaatccacaccagcccgtacagcaaagacgcgccgctggtggcgagcctctctgttaaccagaaaattaccgggcgtaactctgaaaaagacgttcgccatatcgaaattgacttaggtgactcgggcctgcgttaccagccgggtgacgcgctgggtgtctggtatcagaacgatccggcactggtgaaagaacttgtcgaactgctgtggctgaaaggcgatgaacctgtcaccgtcgagggcaaaacgttgcctctgaacgaagcgctacagtggcacttcgaactgaccgtcaacaccgccaacattgttgagaactatgccacgcttacccgcagcgaaacgctgctgccgctggtgggcgataaagcgaagttacagcattacgccgcgaccacgccgattgtcgacatggtgcgtttctctccggcgcaactggatgccgaagcgctgattaatctgctgcgcccgctgaccccgcgcctgtattccatcgcctcctcgcaggcggaagtcgagaacgaagtacacgtcaccgttggcgtggtgcgttacgacgtggaaggccgcgcccgtgccggtggtgcctccagcttcctcgcggaccgcgtggaagaagagggcgaagtccgcgtatttatcgaacataacgacaacttccgcctgccagccaacccagaaaccccggtgattatgattggcccaggcaccggcatcgcgccgtttcgcgcctttatgcagcagcgcgccgctgacgaagcgccgggtaaaaactggttgttctttggcaacccgcactttacggaagatttcctctaccaggtggagtggcagcgctacgtcaaagagggcgtgctgacgcgtatcgatcttgcctggtcgcgcgaccaaaaagaaaaagtttatgtacaagacaaactgcgcgaacagggcgcagagctgtggcgctggatcaatgacggtgcccacatttatgtctgcggcgacgctaatcgcatggcgaaagacgttgaacaggcacttctggaagtgattgccgaatttggtggcatggacaccgaagcggcggatgaatttttaagtgagctgcgcgtagagcgccgttatcagcgagatgtctactaa

SEQ ID NO: 6475 - DNA, 2700 bp, Escherichia coli
atgcgtaaatatcctttaagtttactgaaggataaaaatattgtgactttttttgatttctggggaaaaacccgacgcggcgagaaagacgggggcgacgactatcaccttctttgctggcattcgctggatgtagccgcgatgggctatttaatggttaaaagcaattgcttcggactggctgactattttcgtcaattaggtttcgctgacacggagctggcagcacaatttttcgcctggctgctgtgctggcacgatattggaaaatttgtccgctcttttcagcaactttacctgcacccacaactcaaggttccggaaggcgcaagaaagaattacgaaaagatctctcattcaacgctgggctactggttgtggaaccattatttaagtgaatgtcaggagttgcttccttcatcttcactctctccgcgcaaacttaaacgggtgatggagatgtggatgcccatgactaccgggcatcatggtcgaccccctgagcgtatggatgaactggataattttctgcctgaagacaaaggtgccgcacgagattttctccttgcaatcaaggtactgtttccgctcatagagatccccacattctgggatgatgacgagggcgttgaacttataaaacaactttcctggtatatctctgcaaccgtcgtacttgcagactggacgggatcgtcaacgcgatattttccacgcgtcgcacagacaatggatattgaagattactggcagaaaactttagttcaggctcaaaacgccttaaccgtctttcctccaaaagcagaaagcgcgcctttcaccggaattaatacgctgtttccttttattgagaatccgacaccgctacagcaaaaggtgctggatctggatatcagccagccgggaccacagttatttattctggaggatgtaaccggcgcaggtaaaacagaagcggcgcttatcctggcgcacaggttgatggctgcggggaaagcgcagggtttgttttttggcctgccaacaatggcaacggccaatgccatgtacgatcgactggtcaaaacctggcttgctttctattcgccagagtcccgccccagcctggtgctggcacacagtgcccgaacattaatggaccgctttaatgaatcactctggtccggtgatttagtcgggtcagaagaaccggatgaacaaacgttcagtcagggatgtgcggcctggtttgccgacagtaacaagaaggcgctactggctgaaattggcgtcggcacgctggatcaggcgatgatggctgtgatgccgttcaaacataataatctgcggcttctgggactgagtaacaaaatcctgctggctgatgagatccatgcctgtgacgcttacatgtcatgcattcttgaagggctgatcgagcggcaggcgcgtggcggaaacagcgtcattttgctttctgccacgttatctcaacagcagcgcgacaaactcgttgctgcctttgcgcgtggtatagagggccagcaagaagctccgttcctggaaaaggatgattacccctggctgacgcacgttacgaaatccgatgtgcattcacaccgggtagcgacgcgcaaagacgttgagcgcagcgtgagtgtgggttggcttcatagcgaacaagagtgtattgcgcgtatcgaatcggcggtaagtcaggggaaatgtatcgcctggatccgaaattctgtcgatgacgccatccaggttcatcgtcagttacttgcccgcggcgtcattcctgcttccagcctttcactttttcatagccgctttgcttttagcgatcgccagcgaattgaaacggagacgctggcacgctttggtaaagaagactgttcacagcgtgccggaaaagtcctcatttgtactcaagtcctggagcagagcgttgactgcgacctggacgaaatgatttccgaccttgcccctgttgatttactgatccagcgagcagggcgattacagcgacatatccgcgatatgaatggccagttaaagcgtgacggtaaagacgagcgtcaccctcctgaattgctgattctggcccccgtctgggacgactctccgggtgacgaatggtttggcagtgccatgcgtaacagtgcatttgtctatcccgatcatgggcgaatctggctgacgcagcgtgtgctgcgtgagcaaggtgctattcagatgccacactcagcccggcttctgattgaatcagtctacggtgaggacgtagtaatgccggaagggtttgcccgcagcgagcaggagcaagtgggcaaatattactgcgatcgcgcaatggctaaaaagtttgtactgaacttcaggcccggctatgccgccaatatcaacgattacctcccggaaaaactgtcgacacgtctggctgaagagtctgtttccctgtggctggctacctgtattgacggtgtggtgaagccttatgccacaggtgcacacgcatgggaaatgagcgttgtcagagtgcgccgaagctggtggaaaaaacatcgggatgagtttgctttactggaaggggatgcgttcaggcagtggtgcgttgaacagcggcatgatccggagatggcaaacgtgattttagtcaccgatgacgaaagttgtgggtattcggctacggagggattgattggcaaggttggttga

SEQ ID NO: 6476 - DNA, 1563 bp, Escherichia coli
atgaactcgttttcacttctgacaaccccgtggttgcctgttcgtttcaaagacggaacgacaggcaagctggcatcagtcgatctggctgatgagaatgttgtcgatatcgccgcaccgcgagcagatttacaaggtgcggcctggcagtttttgctgggactactacaaaccagcttcgcgccaaaagatcatcgtcgttgggatgatatctgggaagacggactggaagctgaaaagctacgagaagcattgctgtctttagaacatgctttccagtttgggcctgattcatcttcatttatgcaggattttgaggcgctcacgggagataaagttccggtcgcttcgctactgcctgagattcccggctctcaaacgacgaagtttaataaagaccattttatcaagcggggtgtaacggaatatctgtgcccccattgcttagcattggccttgttctctttacagttgaatgcacccgcgggcggcaaaggctatcgcaccggtttacgcggcggtgggccgatgacgactctcattgaattacaggaatatcagggcaatcaacaaacacccttgtggcgcaaactgtggctcaacgtgatgccgcaggatgaagccgacttaccgctacccaaaaaatttgacgatctgattttcccctggctaggcccgacgcgtaccagcgaactggccggtgcggtggtaacccatgatcaggtcaataaactccaggcgtactggggaatgccgcggcgtatacgtattgattttaataccacgacagtcggcaactgcgatatttgcgacgagcagaacgacgcgctcctgagcctgatgacgaccaaaaattatggtgccaattatgccatgtggcagcatcccttaacgccttaccgtgtaccacttaaagagggtggcgagttttactccgttaaaccacaaccgggcggtttaatctggcgcgactggttaggccttatcgaaacgggtaaatcagaaaacaatacggaacttcccgcgctggtggtgaaactctttaatgccagcagtctgaaacaggcaaaagtgggcctatggggatttggttatgattttgacaacatgaaagcgcgctgttggtacgaacaccatttcccgctactgctcaataaaaaagaaggccagataccgaagctgcggctggctgcgcaaacggcttcacggattctgagtctgttacggagtgcattgaaagaagcatggttctccgatccaaaaggtgcaaggggtgatttcagttttgtggatatcgacttctggaacaaaactcagcatcgcttcctgaggttagtgcgccaaattgaagaaggtcaggatgcggatgaattactcggcaaatggcaaaaggaaatttggttattcgcgcgtcaggattttgacgagcgtgtattcactaatccttatgagcccgttgatttgaaacgcgtcatgaccgcgcgcaagaaatattttacaacatcggcggagaagcaaagtgctaaagccgccagggagaaaaagcaggaggctgctgaatga

SEQ ID NO: 6477 - DNA, 537 bp, Escherichia coli
atgagtattgtaaaagaggagcacaaagccacgctgcgtaaatggcacgaagagttgcaggaaaaacgcggcaatcgtgccagtctgcggcgtagcacaacggttaatgatgtttgtctgtcagaaggttttcgttctctgctgatgcagacccacacgttgtggaaaattgaatcacaggagtggcgttttaccgcactggcgctggttgccgccgttgccgccaatgtaaaagccattgatgaacggcagccttttgccgcgcagttggcggcggtaatgtctgaggggcgttttactcgcctgtcggcagtcaaaacgccggatgaattactgcgccagttacgtcgcgcggtcaaattattaaatggttccgtcaatcttatctctttggcagacgatattttccgctggtgccaggagagtgacgacctgctcaatcatcaccgccgccagcagcggccaacagaatttatccgtatccgctgggcgctggaatattaccaggctggcgacgccgataacgaacaaaattaa

SEQ ID NO: 6478 - DNA, 1056 bp, Escherichia coli
atgacgacatttattcagcttcatttgttaaccgcttaccctgctgccaaccttaaccgtgatgacaccggtgcgccaaaaactgtggtactgggtggagcaacgcgtctgcgcgtttcctcgcaaagtctgaaacgtgcgtggcgcacttctgcactttttgaacaggcgctggcgggccatattggtattcgtagtgggcgtatcgcgcgcgaggcagcaactatcatgattgagaaaggaatcgaagaaaaaaaagccatcgaatgggcggcagatattgccgattatcttggtaaagcaaaaaaagacaaaaaaccaaaagatccgctcactaacgctgaaactgaacagctcgtccatatcagcccggcagaatttgacgccgtaaaagcgctggcccatcaactggcagaagaaaagcgcgcgccaaaagaggacgatctcgctttgttacgtaaagatcgtatggcggtaggtatcgccatgtttggtcgtatgctggcgaataaacccgagtttaatgttgaagccgcctgtcaggtcgcgcacgcgtttggtgtcagtgaaacgattgtcgaagatgattttttcaccgccgttgatgatttgcgccaggcctctgaagatgctggtgcagggcatcttggtgaaactggatttggttctgcgctgttctacacctatatctgcattgataaagatctgctggtcgaaaacctcggcggtgacgaagcattagctaatcagaccctgcgcgcctttacggaagcagcgtttaaagtttccccaaccggtaaacaaaacagctttgccagccgtgcctacgcctcctgggcgctggcagaaaaaggcaccgaacaaccgcgttctctggcggcggctttctatgaacccattaatggcacacgtcagttagatgtggcggtgcagcgtattacaacgcttcgcgaaaacatgaatacggtttacgaacagaagaccgaatgcgcaagttttgacgtgatgaacaaacagggaagcatgaaggacgtgctggactttatctgcgcgtaa

SEQ ID NO: 6479 - DNA, 747 bp, Escherichia coli
atgagccaatatctgatttttcagcttcatgggccaatggcatcctggggcgttgatgcacccggtgaggtgcgtcatacccatgaactgccttcgcgttcagcattgctggggctgctggctgccggggtagggatacggcgtgatgacaccgaatgcttaaacgcgtttaatcgccactattcactggtggtttgcgccagccgtaacccgcgctgggcacgggattatcacacggtccagatgccaaaagaggtgcgtaaagcgcgttatttcagccgtcgcgaagagttgagcgaccctgatcttctaagcgcgattatctcccggcgcgactactacaccgatgcctggtggatggtggccgtggcaacaacagctgatgcgccttacagcctcgaacagttgcaggaaggtttacgccatccggcttttccgctttatctggggcgaaaaagccatccgctggcattaccccttgagccgttactgcttgaaggtaacgcgtctgatgccttacgtaacgcataccaacagtatcaggatcgtttccacgaactgaaagtctcactcccgaaacttcaggatgaatgctggtgggaaggggagcacgatggcctggtctcgagcaaaatattacgccgccgggatgttcctttaaatcgtcagcagtggctgtttggggaacgcaccgtcaatcaggggccgtggctcagcaaggaggaaccatgtacctctcaagaataa

SEQ ID NO: 6480 - DNA, 651 bp, Escherichia coli
atgtacctctcaagaataaccttacataccggtcagctttcgcctgcgcagttgctgcatttggtggatcgcggtgaatatgtgatgcatcagtggctgtgggatctttttcctggcggcaaagaaaggcaatttctttatcgtcgggaagaactccagggcgcgtttcgcttttttgtcctgtcgcaggaacgcccggcggaaagtgaaacgttcaccatcgaatgccggtcatttgcgcctgaactgcataccggacaatccctttgtttcaacctgcgggcgaatccaacagtctgtaaagcgggtaagcgccacgatctgctgatggaggcgaaacggcaggtgagggggcaggcggaaggaagaaatgtctggttgcatcaacaacaggcggcgctggactggctggcagcgcagggggagagaagcggttttacactgctggatacctcggtcgatgcctaccgacaacagcaactgcggcgggaaaactcccggcaactgatccagttcagtagcgtggattatacggggatgcttacggtcaccgatcctgggttatttctgcaacgtctgagccaggggtatggcaaaagccgggcgttcggttgtggtctgatgctgatcaaacctggagcagaggcgtga

SEQ ID NO: 6481 - DNA, 924 bp, Escherichia coli
gtgacgtttgtaccgctgagcccgatcccgttaaaagatcgcacctccatgatcttcctccagtacggtcagatcgacgtactggacggcgctttcgtgctgatcgacaaaacagggatacgcacgcacattccggtgggagcggtcgcctgtattatgctcgaaccgggaacgagagtttcccacgcagcggtgcatctggccgccacggtggggacgctactggtctgggtcggtgaagcgggtgttcgcgtctactcttccggacaacccggtggggcgcgtgctgataagttactctaccaggcaaagctggctttaacggaagatctacgcctgaaggtggtgcgcaaaatgtatgaattacgttttcgtgagccaccccccgctcgccgttcagtggagcagctacggggaatcgagggatcccgcgttcgccaaacctatgcattactggcgaaacaatatggtgtgaaatggaatggtcgcaaatacgatcctaaagactgggaaaaaggcgatgttgtcaatcgctgcatcagtgctgccacatcatgcctgtacggtatatctgaagcggctgtattagccgcgggatatgcgcccgctattggttttatccaaagtggcaaaccgctttcatttgtttatgacatagccgatatcattaaatttgatttggttgtgccaaaggcatttgaaatagcggcaagacacccggcagaacctgataaagaagtgagactggcctgccgtgataatttccgtagtagtaaattaacgggcaaattaattccgttaattgaggaagtccttgccgccggtgaaattgaaccaccacaacctgcgccggatatgttaccaccagctatcccggaacctgaattgctaggtgatagtggtcaccgggggcgcagcggatga

SEQ ID NO: 6482 - DNA, 294 bp, Escherichia coli
atgagcatggtcgtggttgttacagaaaatgtccctccgcgcttacgtggacggcttgcaatctggctcctggaagtacgtgccggtgtttatgttggtgatacatcaaaacgtattcgggagatgatctggcagcaaatctcccaactggcaggttgcggaaatgtggtcatggcctgggcgaccaataccgagtcgggttttgaatttcagacctggggtgaaaacagacgtattccggtggatttggatgggttacggttggtttcgtttcttcctgttgagaatcaataa

SEQ ID NO: 6483 - DNA, 1038 bp, Escherichia coli
atgttttccgcattgcgccaccgtaccgctgccctggcgctcggcgtatgctttattctccccgtacacgcctcgtcacctaaacctggcgattttgctaatacccaggcacgacatattgctactttctttccgggacgcatgaccggaactcctgcagaaatgttatctgccgattatattcgccaacagtttcagcaaatgggttatcgcagtgatattcggacatttaatagtcggtatatttataccgcccgcgataatcgcaagagctggcataacgtgacgggaagtacggtgattgccgctcatgaaggcaaagcgccgcagcagatcatcattatggcgcatctggatacttacgccccgctgagcgatgctgacgccgatgccaatctcggcgggctgacgttacaaggaatggatgataacgccgcaggtttaggtgtcatgctggaattggcagaacgcctgaaaaatacgcctaccgagtatggtattcgatttgtggcgaccagcggcgaagaggaagggaaattaggcgctgagaatttactcaagcggatgagtgactccgaaaagaaaaatacactgctggtgattaatctcgataacttaattgttggcgataaattgtatttcaacagcggtgtaaaaacccctgaagcagtaaggaaattaacgcgcgacagggcgctggcaattgcgcgtagtcatggaattgccgcaacgaccaatccgggtttgaataaaaattatccgaaaggcactgggtgttgtaatgacgcagaaatattcgacaaagcgggcattgctgtactttcggtggaagcgactaactgggatcttgggaataaggatggttatcagcaacgcgcaaaaacaaccgcattccctgcaggaaatagctggcatgatgtaaggcttgataatcaacagcatattgataaggcgcttcctggaagaatagaacgtcgctgccgtgacgttatgcggataatgctaccgctggtgaaggagctggcgaaggcgtcttga

SEQ ID NO: 6484 - DNA, 1428 bp, Escherichia coli
atgaacaccgcacttgcacaacaaatcgccaatgaaggcggcgtcgaagcctggatgattgcgcaacaacataaaagcctgctgcgttttctgacctgtggtagcgtcgatgacggcaaaagtaccctgattggtcgcctgctgcacgatacccgccaaatctacgaagatcagctctcatcgctgcataacgacagtaagcgtcacggcacccagggcgaaaagctggatctggcgcttctggtggatggtctgcaagccgagcgtgaacagggcattactattgatgtggcctaccgctatttctctaccgagaagcgtaaatttattatcgccgacacacctgggcacgagcagtacacccgcaatatggcgaccggcgcatcgacatgcgaactggcgatcttactgatcgacgcccgtaaaggcgtgctcgatcaaacccgtcgtcacagttttatctccacactgttggggatcaaacatctggtcgtggcgatcaacaaaatggatctggtggattacagtgaagagacgttcacccgtattcgtgaagattatctgacttttgccgggcagctgccgggtaatctggatatccgctttgtgccgctctctgcactggaaggcgacaacgtggcttcgcaaagtgaaagtatgccgtggtacagcggtccgacactgctcgaagtgctggaaaccgtggagatccagcgagtggtggatgcccagccaatgcgcttcccggtgcagtacgttaatcgcccgaatctcgattttcgtggctacgccggaacgctggcatccggtcgcgtggaagtcgggcaacgtgtcaaagtgctgccctctggtgtggaatcaaacgtcgcgcggatcgtgacctttgatggcgatcgcgaagaagcctttgccggagaagcgatcaccctggtgctgacggatgaaatcgacatcagccgtggcgatctgctgctggcggcagacgaagcgttaccggctgtgcagagcgcgtcggtggatgtggtatggatggcggaacagccgctttccccgggccagagttacgacatcaaaattgccggtaagaagacgcgtgctcgtgttgatggcattcgttatcaggttgatatcaataaccttacccaacgcgaagttgaaaacctgccgctgaacggcatcggcctggtagatctcacctttgacgagccactggtgttagatcgttatcagcaaaacccggttaccggtgggctgatttttatcgatcgcctgagtaatgtgaccgtaggtgccggtatggtgcacgaaccagttagccaggcaactgctgcgccatctgaattcagtgcattcgaactggaattgaatgccctggttcgccgccatttccctcattggggtgcgcgcgatttactgggagataaataa

SEQ ID NO: 6485 - DNA, 993 bp, Escherichia coli
atgagtcagaatacgctgaaagttcatgatttaaatgaagatgcggaatttgatgagaacggagttgaggtttttgacgaaaaggccttagtagaagaggaacccagtgataacgatttggccgaagaggaactgttatcgcagggagccacacagcgtgtgctggacgcgactcagctttaccttggtgagattggttattcaccactgttaacggccgaagaagaagtttattttgcgcgtcgcgcactgcgtggagatgttgcctctcgccgccggatgatcgagagtaacttgcgtctggtggtaaaaattgcccgccgttatggcaatcgtggtctggcgttgctggatcttatcgaagagggcaacctggggctgatccgcgcggtagagaagtttgacccggaacgtggtttccgcttctcaacatacgcaacctggtggattcgccagacgatcgaacgggcgattatgaaccaaacccgtactattcgtttgccgattcacatcgtaaaggagctgaacgtttacctgcgaaccgcacgcgagttgtcccataaactggaccatgaaccaagtgcggaagagatcgcagagcaactggataagccagttgatgacgtcagccgtatgcttcgtcttaacgagcgcattacctcggtagacaccccgctgggtggtgattccgaaaaagcgttgctggacatcctggccgatgaaaaagagaacggtccggaagataccacgcaagatgacgatatgaagcagagcatcgtcaaatggctgttcgagctgaacgccaaacagcgtgaagtgctggcacgtcgattcggtttgctggggtacgaagcggcaacactggaagatgtaggtcgtgaaattggcctcacccgtgaacgtgttcgccagattcaggttgaaggcctgcgccgtttgcgcgaaatcctgcaaacgcaggggctgaatatcgaagcgctgttccgcgagtaa

SEQ ID NO: 6486 - DNA, 408 bp, Escherichia coli
atggcgttacgaaataaagcgttccatcagttacgacagctttttcagcagcatacggcccgctggcagcacgagttacctgacctgaccaaaccacagtacgcggtgatgcgcgccattgctgataagcctggtatcgaacaggtggcactgatagaagcagcagtcagcaccaaagcaacgctggcagaaatgttggcaagaatggaaaatcgtggcttagtcagacgtgaacatgacgccgctgataagcggcgacgctttgtctggctgactgccgaaggagaaaaggtacttgctgcggcgataccgattggcgacagtgtggatgaggaatttttggggcgtttgagtggagaagagcaggagctgtttatgcagctggtgcgcaagatgatgagcaaatag

SEQ ID NO: 6487 - DNA, 594 bp, Escherichia coli
atgaaactgatcgtcgggatgacaggggctaccggtgcgcctcttggtgtggcattactgcaagcgctgcgggagatgccgaatgtcgagactcatctggtgatgtcgacgtgggcgaaaaccaccattgaactggaaacgccttacagcgctcgcgatgttgctgccctcgcagacttcagccataactcggcggatcaggcggcgaccatctcctcaggttcctttcgtaccgacggcatgatcgttattccgtgcagtatgaaaacgctcgccggtatccgtgccggttacgccgatggcctggtagggcgcgcggcggacgtcgtgctcaaagaaggccgcaaactggtgctggtgccgcgtgaaatgccgcttagcaccatccatctcgaaaatatgctcgcactttcgcgcatgggcgtggcgatggtgccgccgatgcctgccttttataaccatcccgaaacggtagatgacattgtccagcacgtggtagcccgcgtgctggatcaatttggcctcgaacatcctcacgccaggcgctggcaaggattgtcgcagacccggaatttttctcaggagaatgaataa

SEQ ID NO: 6488 - DNA, 1428 bp, Escherichia coli
atggcatttgatgatttacgcagctttttacaggcgctcgacgaccatgggcaattgctgaaaatcagcgaagaggtgaacgcagaaccggatctggcagccgcagccaacgccaccgggcgtatcggcgacggcgcgccagcgctgtggtttgataatattcgcggctttaccgatgcccgcgtggcgatgaacaccatcggttcctggcagaaccacgcgatttccctcggcctgccgccaaataccccggttaaaaaacagatcgatgagtttatccgccgctgggacaacttcccgattgccccggaacgccgagccaatccagcctgggcgcagaacaccgtcgatggagacgagatcaacctgttcgatatcctgccgctgtttcgtttaaacgatggcgatggcggtttctatctcgacaaagcgtgcgtggtttcccgcgatccgcttgatccggataacttcggcaagcagaacgtcggtatctaccgcatggaagtgaagggcaaacgtaagctcggcctgcaaccggtgccgatgcacgatatcgccctgcatctgcataaagcggaagagcgcggtgaagagctgccgattgcgatcaccctcggtaacgatccgatcatcacgctgatgggggccacgccgctgaaatatgatcagtccgagtacgaaatggcaggcgcgctgcgtgaaagcccgtacccgatcgccaccgccccgctgactggttttgatgtgccgtggggttcagaagtgatcctcgaaggggttatcgaaagtcgtaaacgtgagatcgaagggccgttcggtgagtttaccggccactactccggtgggcgcaacatgaccgtggtgcgcatcgataaagtctcttaccgcacgaaaccgattttcgaatcgctgtacctcggcatgccgtggacggaaatcgactatctgatggggccagccacctgcgtgccgctgtatcagcaactgaaagccgagttcccggaagtgcaggcggtgaacgccatgtacacccacggcctgctggcgattatctccaccaaaaaacgctacggtggctttgcccgcgcggtgggcctgcgtgcgatgaccacgccgcacggtctgggctatgtgaagatggtgattatggtcgatgaagacgttgatccgttcaacctgccgcaggtgatgtgggcgctctcctcgaaagtgaacccggcaggggatttggtgcagttgccgaatatgtccgtgctggaactcgacccaggctcaagcccggcggggatcaccgacaagctgattatcgacgccaccacgcctgtcgccccggacaaccgtggtcactacagtcagccggtggtggatttaccggaaaccaaagcctgggctgaaaaactgaccgctatgctggccgcacgtcaataa

SEQ ID NO: 6489 - DNA, 237 bp, Escherichia coli
atgatttgtccacgttgtgctgatgaacagattgaagtgatggcgaaatcgccggtaaaagatgtctggacggtctaccagtgccagcattgcctctatacctggcgcgataccgaaccgctgcgccgcaccagccgcgaacattatcccgaagcgttccgcatgacgcagaaagatattgatgacgcgccgatggtgccgagcatcccgccgctgctggcggaaggtaagcgctaa

SEQ ID NO: 6490 - DNA, 1365 bp, Escherichia coli
atgtccacaattacattgttatgcattgcgttaactggcgtaatcatgctgttgctgctggtcatcaaggcaaaggtacaaccattcgttgctctgctcctcgtcagcctgttagtcgcacttgcggcgggtataccggcgggcgaagtgggtaaagtgatgatcgccgggatgggcggtgtgcttggttccgtcactattattattggtctgggcgctatgctggggcgtatgatcgaacactctggtggtgcagagtcactggctaattatttcagtcgcaagttaggtgacaaacgaactatcgctgcgctgactctggcagcgttcttcctcggtatccccgtcttctttgatgtcggctttattattcttgcgccaatcatttacggttttgccaaggttgccaaaatatcgccactcaaatttggcctgcctgtcgctggaatcatgctaactgttcatgtggcggtaccgccgcatccaggccctgtcgccgcagcggggttactccacgcagacatcggctggctaaccatcatcggtattgcgatttctattcccgtagggattgttggctactttgcagcgaaaataatcaataagcgccaatatgcgatgtcggtggaagtactggaacagatgcaactggctccggccagtgaggaaggcgcgacaaaattaagcgataaaataaatccaccgggcgtcgcgctggtcacctcgctaattgttattcctatcgcgattatcatggcgggtacggtttccgcaacactgatgccgccttcgcatcccctgcttggtacgctacagctgatcggctcaccaatggtagctctaatgattgcgctggtgctggcattctggttattggctttacgtcgcggctggagcttacaacacaccagcgacattatgggctcagcccttcccaccgcggcggtagtgattttggttactggtgctggaggggtatttggcaaagtgctggtggaatcgggcgtcggcaaagcccttgccaacatgctacaaatgattgacctgcctctgttaccagccgcatttattatttcactggcgctgcgtgcatcgcaggggtcagcaaccgtagcaatcctgacaaccggcgggttactctcagaagcggtgatgggattgaatccgattcagtgcgtattggtgacgctggcagcctgctttggtgggcttggcgcgtcacatattaatgactcagggttctggattgtgaccaaatatctggggttgtcggtagcagacggtctgaaaacctggacagtgttaacgaccattctcggttttaccggattcttaattacctggtgcgtatgggcggtaatttga

SEQ ID NO: 6491 - DNA, 234 bp, Escherichia coli
atggctctgaaggaggaggtttattcaaccgacgcaattttgcgtacttgcttcataagcatcacgcaaaagctgcaaaacagcatctttcccggaatcaccatcaagaactcgccgttcgcttcttcccctgaaatgattaactccggtatcatgtgcgccttatgtgataacaacgaaaataaaaaccatcacaccccatttaatatcagggaaccggacataaccccatga

SEQ ID NO: 6492 - DNA, 357 bp, Escherichia coli
atgtcatatacaccgatgagtgatctcggacaacaagggttgttcgacatcactcggacactattgcagcagcccgatctggcctcgctgtgtgaggctctttcgcaactggtaaagcgttctgcgctcgccgacaacgcggctattgtgttgtggcaagcgcagactcaacgtgcgtcttattacgcgtcgcgtgaaaaagacacccccattaaatatgaagacgaaactgttctggcacacggtccggtacgcagcattttgtcgcgccctgatacgctgcattgcagttacgaagaattttgtgaaacctggccgcaggtggactataccccaaatttggtcactattgcctga

SEQ ID NO: 6493 - DNA, 1011 bp, Escherichia coli
gtgaataatatccaactcgcccacggcagcggcggccaggcgatgcagcaattaatcaacagcctgtttatggaagctttttccaatccgtggctggcagaacaggaagaccaggcgcgccttgatctggcgcaactggtggcggaaggcgaccgtctggcgttctccaccgacagttacgttattgacccgctgttcttccctggcggtaatatcggcaagctggcgatttgcggcaccgcgaatgacgttgcggtcagtggcgctattccgcgctatctctcctgtggctttatcctcgaagaaggattgccgatggagacactgaaagccgtagtgaccagcatggcagaaaccgcccgcgcggcaggcattgccatcgttactggcgatactaaagtggtgcagcgcggcgcggcagataaactgtttatcaacaccgctggcatgggcgcaattccggcgaatattcactggggcgcacaaacgctaaccgcaggcgatgttctgctggtgagtggaactctcggcgaccacggggcgactatccttaacctgcgtgagcagctggggctggatggcgaactggtaagcgactgtgcggtactaacgccggttattcagacgctgcgtgacattcccggcgtgaaagcgctgcgtgatgccacccgtggtggagtgaacgcggtagttcatgagttcgcggcagcctgcggttgtggtattgaaatttcagaagcggcactgccggttaaacctgctgtacgcggcgtttgcgaactgctgggactggacgcccttaattttgccaacgaaggcaaactggtgatcgccgttgaacgcaacgcagcagagcaagtgctggcggcgttacattcccatccattgggaaaagacgcggcgctgattggtgaagtggtggaacgtaaaggtgttcgtcttgccggtctgtatggcgtgaaacgaaccctcgatttaccacacgccgaaccgcttccgcgtatatgctaa

SEQ ID NO: 6494 - DNA, 567 bp, Escherichia coli
atgtacgagcgttatgcaggtttaatttttgatatggatggcaccatcctggataccgagcctacgcaccgtaaagcgtggcgcgaagtattagggcactacggtcttcagtacgatgttcaggcgatgattgcgcttaatggctcgcccacctggcgtattgctcaggcaattattgagctgaatcaggccgatctcgacccgcatgcgttagcgcgtgaaaaaacagaagcagtaagaagtatgctgctggatagtgtcgagccgcttcctcttgttgaagtggtgaaaagttggcatggtcgtcgcccaatggctgtaggaacggggagtgaaagcgccatcgctgaggcattgctggcgcacctgggattacgccgttattttgacgccgtcgtcgctgccgatcacgtcaaacaccataaacccgcgccagacacatttttgttgtgcgcgcagcgtatgggcgtgcaaccgacacagtgtgtggtctttgaagatgccgatttcggtattcaggcggcccgtgcagcaggcatggacgctgtggatgttcgcttgctgtga

SEQ ID NO: 6495 - DNA, 2253 bp, Escherichia coli
atgttttctataaaaccaggaccaggaaatttacctatcgacaaccccacattgttatcatggaacattactgacggggatctaaattccaaattaaatacattagaatatctaaactgtataacaaatattattaatgcttgtggagtttatcctcaggatttaaaagacagagaaattatatcaacttttcacgcagaaaaagtcattaatgatctgttaaaaaacgattataaaatttccctttctccagatacaacttaccgagagctgaataaagctgcacagcgtagcattacagcgccagacaggataggagaagggaaaacatgggtttatcaacgagatacaatggttgaaagaggtgataacagcggcgttcatcagtatggtccagctgaacatttcactcacattatatctgacaaaccatccccaaaagataagtatgttgcatatgctattaacattcctgactatgagctagcagccgatgtatataatattaacgtgacgtcaccttccggacagcaagaaacatttaaaatactaatcaatccagaacatctacggcaaacacttgagcgtaaatttcttactgctgttcagaaatcacaatgtgaaatcatcacccccaaaaaacctggcgaagcgattcttcatgcttttaatgccacctaccagcaaatcagggaaaatatgtctgagtttgcacgttcccattatgggtatatacaaattcctccagtgacaactttccgcgccgacggaccagaaactcccgaagaagaaaaaggttactggtttcacgcttatcaacccgaagatctttgtaccatccataatccaatgggagatttgcaggattttatcgcattggttaaagatgctaaaaaatttggtatcgatatcattcctgattatacctttaactttatgggaattgggggtagtggtaaaaatgacctggattatccctctgctgatatacgagcgaagatcagtaaagatatagaaagtggtatccctggctattggcaaggtcaggttttgattccatttactatagatccagtaacaaaagaacgtaaacaaatccatccagaagatatacatctcactgcaaaagactttgaaacaagtaaagataacatctctaaggatgaatgggaaaacctccatgcattaaaagaaaagcgtttaaatggaatgcctaaaacaccccccaaaagtgaccaggttattatgttgcaaaatcaatacgttcgtgaaatgcgaaaatatggcgtacgaggtttacgttacgatgcagcaaaacactcaaaacatgaacaaatagaaagatcaataaccccaccgcttacaatttataatgagcgattacacaatactaacttatttaacccaatatatcatgaaaaagccgttatgaattacatggaatacctggtaacttgtcagttggatgaagaacaaatgtcatcgctgctttatgaaagagatgatttaagcgccattgatttttcattgctcatgaagacgataaaagccttttcatttggtggcgatctccaaacccttgcatcaaaaccgggttcaacaatctcaagcatcccgtcaaaaagacggatattgattaacattaaccacgattttcctaacaatggcaatcttttcaatgactttctatttaaccatcaacaagatgaacaattagcaatggcatatatggccgctctcccgttcagcaggcctttagtttactgggatggccaagtattaaaatcaacgactgaaattaaaaattatgatgggtcgacgcgtgtcggcggtgaggcgtggcttaataaaggttgctctacctatcagcagctctacaatgaattccacgcattatatatagataaagcaggaatatggagcgcatttgagggtgtatttgcaactaaaaacgttctggcctttagtcgtggggattctgtgaacattaatcactctcctcatgatggactagttataataaataaaggaaacgaagaagttgaaggtacctggcctaacaaattgcaacctggagtatataaaaacatggggagtaatagcgttaacattattattaataatacccgaaaaattatcccccctggtaaagcatttatgcttagaggcggaactctaaatatcaatattcctgggcgtagcgctcttcttttagggaaaactggagaaccgccgaactatctctatttgtaa

SEQ ID NO: 6496 - DNA, 1455 bp, Escherichia coli
atgttagttagtaaaagtaatggtcataacgttaatacagttttgggtagtggaagttgtaatgaaaacaattcttccaaccccatggagctactagcttatagtattataaatttaatttgtaaggaagctgcctcagggatgtatcgcggtgctcttgaaactttacaaaaaataatgtctgaatgtatatatcaagaaggcaacgcctttgtcattatgggagctggagaacaattaaaacgtattaaatatgatgttgatgaaaataacttaaaagtattcaacgtacactttgataataatgaagagctagttactgatggtgagcctgacgtagtatgtttaagcaagcaggagtgggaaaatcttctcattaaattaaaaccggagattaaagaaaatgtgttttctgaaaataacaaattatcgagagaaaataatgttgatcagtatgttcaatccgctaaaagaaatgaacaggcccttttcgataatataataaaaagtgattttcatgttgcttcacttcagccaggtagaacacgtagtgttatttcagaaacgccgccaaatgactgtatggaatcacataatttatatgaaaaccacacagataaggtttcaactgtaactaaaaattctcagcaagttaaaggtcactatggagataagttgaaagaaatgcagttgttcctcaaccagatgagcaatgcacttcaacaggattcatctttgttagagtcaaaggaacacaccatagatattcaagaaaaaacgaataagtttgtgcagcattttcagcgggtattatttgataaaaatggaaggtcatcagagtttctacttaatttttatgagtgttgctataagtttttaccaagagcgcagcctcaagataaaatcgatagctataattcagcactgcaagctttttccatcttttgttcatctacgttgacacataataatgtagggtttaatttcaaattatttccagaagtcaagctgtctggaggagatcttgaaacggtattcaaatacaaaaatggcaattttgtctgggagatagccagaattaaaattactctcccaaaagaagagggtggtttatacaatttaggtggattggactttaaggggtgcttcttttctggacagaacttcagtaactatgatattaaatatgtgaactgggggacgtcattgtttgatgttgatactccgtgtatttttaatacgcctgctaacaatgagagttatgaaaaatcattaaagcctgtgagcgaaaacggtttaaatggagtcttatctgatcgtaataaaaaaataaaaatgatcacgggcgtggcaccattcgatggtatttcatctatggatgatgactttgatgatagttcctctgaggatgagcccgttgagaatagtcctgttgtgactagtccccttgtataa

SEQ ID NO: 6497 - DNA, 4569 bp, Escherichia coli
atgaacaggaccagtctccattattgtcgccgctcagtactttccttattgatatctgccttgatatatgccccgcccgggatggcggccttcactcctgatgttattggtgtggtaaacgatgagactgtagatggcagccaaaaagtagatgaacgaggtacaacaaataacactcatattatcaaccatggccagcagaatgtttatggtgggatatctaatgaaagtcttattgaatctggtggatatcaagatataggacgtcataacaattatgtggggcaggctaataatacaaccattaacgggggcagacagacaattcatgacgggggtatttccacaggtacaataatcgagagtggcaatcaggacgtttatacaggtggtatcagcaatggaacgacaattaaggggggtaattcacacataagtggggggactgcgaatggaacaatcattgatggtggcagccaacgagtaacaactcaggggcatgtcgacagtacaacgataaataagtctggctctcaggacgtagtacaaggaagtctggcaacgaacacaaccataaatggtggtcgacagtatgttgaacagagcacagtagaaacaaccaccatcaaaaatggcggtgagcaaagagtatatgagagccgtgcgctggacactacgattgaaggcggaactcagtctctgaatagtaattcaacggcaaaaaatacgcagatctattctggtggtacgcaaattgttgattacaccagcacctcggatgttattgaaatttattccggtggcgtgcttgatgttagaggtggtatggcaacaaatgttactcagcacgatggagccgctttaaaagtaacgacttacgatttgacggtgagcggtacgaatagtgaaggggcattctccatccacaataacgtggcagacaatgtgttgctggaaaacggtggtcatttagacgtatatggttcggcaaccaggacgataattaaagataaaggaacaatgtcagttttaacgaatgctaaagctgatgcgacccgaatagataatggcggggttatggatgtcgccggaaacgcgaccaataccataatcaatggtggtacacagaatattaataatcatggtattgccactggcaccaatatcaacagtggaacgcaaaatatcaagagcggcgggaaagctgacacgacaaatatctcctccgggagccggcaggttgttgagaaagatggtacggcaactggcagcaatattagcgccggaggctcgctgattgtctataccggtggtatcgcacatggggttaaccaggagacgggcagtgctttagttgccaacacgggcgcagggactgatattgaaggatacaacaagctctctcacttcactattaccggaggggaggctaattatgttgtgctggaaaataccggcgaactgacggtagtggctaaaaccacggcgaaaaatactaccgttgatgctggcggtaagctgattgtccagaaggaggctaaaacagataccatcagacttaataatggtggcgttctggaggttcaggacggtggtgaggctaagcatgttgagcaacaatccggcggcgcattaattgcttccacgacttccggaacacttatcgaaggaaccaacagttatggtgatgttttctacatcaggaattcagaagctaaaaatgtagtgctggaaaacgctggctcattaacagtcgtcactggttcccgggcagttgacacgattattaatgccaacggcaaaatggatgtttatggaaaagatgttggtactgtacttaatagtgcgggtacccaaacaatatatgccagtgccacttctgaaaaagcaaatatcaaaggtggcaagcaaacggtatatggtttagccactgaggcaaatatcgaaagtggtgaacaaattgttgatggtgggtcaacagataaaacgcacatcaaaggcggcacgcaaaccgttcagaattatggtaaggcgatcaataccgatatcgtctctggcctacaacaaattatggcaaacgggacagcggaaggttccattattaatggcggttcacaggtagttaatgaggacggtctggctgaaaactcggtacttaatgacggcggcacactcgatgtgcgggagaaaggcagcgctacggggatacagcagagtagccagggcgcgttggtggcaaccaccagggcgacgcgggtcacagggacacgcgctgatggcgtcgcgttcagcatcgagcaggatgcggcgaacaatatcctgctggcaaatggcggcgtgttaaccgtggagtcagacaccacttccgccaaaacacaggtcaatgcgggcggacgggagatcgtcaaaacaaaagccactgcgactggcacgatgcttaccggcggtgaacaaatcgtcgagggtgtggcgaatgagacaacgattaacgacggcagaatacaaacagtttcggctaacggtgaggcagtaaaaacaacgattaatgaaggcggtacgctgacagtcaacgataatggcaaagcgacagatatcatccagaacagcggtgccgctctccagacgagcacggctaacggtattgaaatcagcggtactcaccagtacggcaccttttccattgccggcaatttagcgaccaatatgttgctggaaaatggcggtaatttattggtattagcaggtaccgaagcccgtgactccaaggttggcaagggtggtgcaatgcaaaacctgggtcaggactccgccacaaaggttaactctggcgggcaatatacccttgggcggtcaaaagatgagtttcaggctctggcccgggcagaagatctccaggtcgctggcgggacggcaatcgtctatgcaggtacgctggcggatgcatcggtcagtggcgcgacaggaagcctgtcgttaatgacgccacgggataatgttacgccagttaaactcgaaggggcgatccggattaccgatagcgcgacattaactatcggaaatggcgtcgatacgacgcttaccgacctgacggctgccagccggggcagtgtctggcttaacagcaataattcctgtgcaggtaccagcaactgcgaatatagagtaaacagtttgctcctcaacgacggtgatgtttatttatcagcacaaacagcagcgcctgccacaactaacggtatctacaatacgctgacaaccagtgaactttccggcagcggtaatttctacctgcataccaacgttgcaggctcccggggcgatcaactggtcgtcaacaacaacgccactggtaattttaaaatctttgttcaggataccggcgtcagccctcagtctgacgacgcgatgacgctggtgaaaacagggggaggggatgcttcgtttacgctgggtaataccggcggtttcgttgatcttgggacctatgagtatgtcctgaaaagcgacggcaacagcaactggaacctgaccaatgatgtcaaacccaacccggaccccaacccaaatccgaagccggatccaaaaccagacccaaaaccggatccgaaaccagacccgactcccgatccaacgccgacacccgtcccggagaaacgcatcacgccttctacggcagccgtactcaatatggcagcaacattaccgttggtctttgatgctgagctaaacagtattcgcgagcggttgaacataatgaaagcgagtccacacaacaataatgtctgggggacgacgtataacacccgtaataatgtcaccaccgatgcgggtgccgggtttgagcagacgctgaccggaatgacggtggggatcgatagccgtaatgatattcctgaggggattgcgacgctgggcgcttttatgggttattcccattcacatatcggttttgatcgtggaggacatggcagtgtgggcagttattctctggggggctatgccagctgggaacatgaaagtggtttctatctggacggtatcgtgaagctgaaccgctttgaaagtaacgtagccggtaaaatgagcagcggtggagccgccaacggcagttatcgcagcaacgggctgggcggtcacattgaaaccgggatgcgatttaccgatggtaactggaacctgacgccgtatgcatcgttaacggggttcaccgctgataaccccgaatatcatttatccaatggcatggaatcgaaatcagtcgatacccgcagtatatatcgtgaactgggcgcaacgctgagttacaacatgcgtctggggaacagcatggaagttgagccgtggctgaaggcggctgtgcgcaaagaatttgtcgatgataaccgggtgaaagtgaataatgacggtaattttgtcaatgatttgtcgggcagacgtggaatataccaggcaggtattaaagcctcattcagcagttcgttaagcgggaatctcggggtggggtatagccatggtgccggtgtggaatccccgtggaacgcagtggctggtgtgaactggtcgttctga

SEQ ID NO: 6498 - DNA, 2334 bp, Escherichia coli
atgaaaatgaacgtaaccgccaccgtcagccatgcgctcggccactggccgcgtattctcccggcgctggggattcaggtgctgaaaaaccgtcatcagccctgtccggtctgtggcgggagtgaccgcttccgttttgatggcagggaggggcgcggcacctggtactgcaatcagtgtggtgccggtgacggcctgaaactggttgaaaaggtgtttggtgtctccccgtccgacgcggccacaaaggtggctgccgtgaccggcagcctgcccccggctgacccggcagtgacggctgccgccgttgctgaaacagacgctgcccggaagaacgccgccgcactggcacaaaccctgatggcaaaaacccgtcccggaaccggtaacgcctacctgacccgcaagggctttcccggccgggaatgccggatgctgaccggcacacacagagccggtggcgtgagctggcgcgccggtgaccttgtggtgccactgtatgacgacagcggcgaactggttaaccttcagttaatcagtgctgacggccgtaagcgcaccctgaaaggcggacaggtcaggggcacctgtcacacccttgaaggacagaatcaggcaggaaaacgtctgtggatagcggagggatacgcgaccgcacttaccgtgcatcacctgaccggtgaaacggtgatggtggcgctttcttccgtgaacctcctttctctggccagccttgcccgacagaagtatccggcctgtcagattgtccttgccgcagaccgtgacctcagcggtgacggccagacaaaagccgccgcagccgcagatgcgtgtgagggcgttgttgccctgccgccggtcttcggtgactggaatgatgccttcacgcagtacggcggggaggccacccgtaaggccatttacgatgccatccggccaccggctgaaagcccgttcgacaccatgagcgaagcggagttttccgccatgagtaccagcgaaaaggccatgcgtatctatgagcattacggcgaggcgctcgcggtcgatgccaacggccagcttctgtcccgttatgaaaatggtgtctggaaggtgctgccaccacaggactttgcccgggatgtggccgggctgtttcagcggctgcgcgcgccgttctcctccgggaaggtggcctccgtggtggacaccctgaagctgattattccgcaacaggaagccccctcccgccgcctgattggctttcgtaacggcgtgctcgacacgcagaacggcacgttccacccgcacagtccgtcacactggatgcgcaccctgtgcgatgtggatttcaccccgccggtggaaggtgaaacgctggaaacccacgctcccgcgttctggcgctggcttgaccgtgccgccggtggccgtgcggaaaaacgcgacgtgattctggccgcactgtttatggtgctggcaaaccgctacgactggcagctctttctggaggtgaccggtcccggcggcagcggcaaaagtatcatggccgaaatagccaccctgctggctggtgaggataacgccacgtcggccaccatcgagacgctggaatccccgcgtgaacgtgccgcgttaactggcttctcactgatacgcctgccggaccaggaaaaatggagcggcgacggagccggactcaaggccatcaccggcggcgatgcggtgtccgttgacccgaaataccgggatgcgtactccacgcacatcccggcggtaattctggccgtgaacaataacccgatgcgcttcaccgaccgcagcggcggcgtgtcacgccggcgggtgattattcacttcccggaacagatagccccgcaggagcgcgacccgcagcttaaggacaaaatcacccgcgagctggcggtcatcgtgcgtcacctgatgcagaagttcagcgacccgatgctcgcccggtcactgcttcagtcccagcagaactcagacgaggcactgaacatcaaacgggatgccgacccgacgtttgattttatcggctatctggaaaccctgccgcagaccagcggcatgtatatggggaacgccagtatcatcccgcgtaattaccgtaaatacctctatcacgcctatctggcctacatggaggcaaacggctaccggaatgtactcagtctgaaaatgttcgggctggggctgccggtgatgctgaaggaatacggactgaattacgagaagcgccataccaaacaggggatacagaccaacctgacgctgaaagaggaaagctacggcgactggctgccaaaatgtgacgaccctgcaacaacctga

SEQ ID NO: 6499 - DNA, 321 bp, Escherichia coli
atgaaaacacccttaccgcccgtcttacgcgcagccctttaccgtcgcgctgtcgcctgtgcctggctgaccgtgtgcgaacgtcagcaccgctacccgcatctcacccttgaatcactggaggcggccatcgccgctgagctggaaggcttttatctgcgccagcacggtgaggaaaaagggcgtcagatagcctgtgccctgctggaagatttaatggaatccggccccctgaaggccgcgccgtcgctgtcctttctcgggctggttgtgatggatgaactctgtgcccgtcacataaaagcgccggtactgcactga

SEQ ID NO: 6500 - DNA, 456 bp, Escherichia coli
atgtttgattttccccagcccggtgagatttaccgttctgccggttttcccgatgtggccgtggtcggcattctggaagacggtattccgtgggaaatgccgtaccgctgcccggaaattgtctggaacccgtaccgccgtaaattcagtatccttgtgcgtatcctcgccgacgggcgcaccacagacatcccgctggggcgttttctgcgggaatttacctgtgaccgtcctgacctgtttaaacgcagccccgtaaaccggcatgcggtactgaaagaaatggccggagacccggaattacagaaatggcgggagaaatatctggatatttacccgcaggacactgttccggtcagccgggcggcaccggtggcgcgggaatggcgggaaattccccgcacggagcctgacccggaaatcaccccggataacagttaccgcaattatctgtaa

SEQ ID NO: 6501 - DNA, 288 bp, Escherichia coli
gtgcgtaataaaaaagcccctcagaccgtctcagcgcgtcatgacgcccgtgaacacctcagcattgaggcttaccataagctcaaccgcgccagcgccgtatcccagtttgttgggggtgatttgattcaccgtgaactctccggcctgcatcagctctacattccgcatattttcagctacctgaatgaagatattgattttgtgctgaatgagctgaaagccaaaggcctgtgccgcgattttctcgcccagcagaaagaccggggagacaggacgcatgtttga

SEQ ID NO: 6502 - DNA, 414 bp, Escherichia coli
atggtgtggtgtgtggtcagtcgtgcagatggcattccgtgcatcctgcccgcgtccgctcattatgccgcagagtcaatggtagctcaggcggggcagcctccgggctggccggtattcttcgaggccggtatttccacccccgtctgggctatcgccattgagcgtggaaactccggctatagcagttatttgctactcgaaggaggctgccttatggctacaacccttaccccctcacaccctgaatttgtctttgtgtttgcggctgtccgtcgtgcagaccgtcatccccgtatctgtatgcttcgcaccgtcgccggtgatgaacgcagtgcccgccgttcccttgtccgtgactatgtgctctcccttgctgcccgtctgccggtgatgggggtgtcccgtgcgtaa

SEQ ID NO: 6503 - DNA, 267 bp, Escherichia coli
atgcaagctgttttttcttccccgtctcccgcccctgtgacaccactgatgccgctgccggacatcacgcaggagcgttttttacgtctgccggaagtgatgcacctgtgcggcctgtcacgctcgaccatctatgaactcatccgtaagggggaatttccgccgcaggtgagtcttggcggtaaaaatgtggcctggctgcactctgaagtcaccgcatggatggccgggcgcatcgccggacgcaaacgggggtacgacgcatga

SEQ ID NO: 6504 - DNA, 735 bp, Escherichia coli
atgtctgaccacactatccctgaatatctgcaacccgcactggcacaactggaaaaggccagagccgcccatcttgagaacgcccgcctgatggatgagaccgtcacggccattgaacgggcagagcaggaaaaaaatgcgctgacgcaggccgacggaaacgacgctgacgactggcgcacggcctttcgtgcagccggtggtgtcctgagcgacgagctgaaacagcgccacattgagcgcgtggcacgccgggagctggtacaggaatatgacaatctggccgtggtgctgaattttgaacgcgaacgcctgaaaggggcgtgtgacagcacggccaccgcctaccggaaggcacatcatcaccttctgagtctgtatgcagagcatgagctggaacacgccctgaatgaaacctgtgaggcgcttgtccgggcaatgcatctgagcattctggtacaggaaaatccgctcgccaacaccaccgggcatcagggctacgtcgcacccgatacggctgtcatgcagcaggtgaaatcatcgctggaacagaaaataaaacagatgcaaatcagcctcaccggcgagccggttctccggctgaccggactgtcagcggcaacactcccgcacatggattatgaggtggcaggcacaccggcacagcgcaaggtgtggcaggacaaaatagaccagcagggagcagagcttaaggccagaggactgctgtcatga

SEQ ID NO: 6505 - DNA, 501 bp, Escherichia coli
atgatttactgcccgtcgtgtggacatgttgctcatacccgtcgcgcacatttcatggacgatggcaccaagataatgattgcacagtgccggaatatttattgctctgcgacatttgaagcgagtgaaagctttttctctgactgtaaagattcaggaatggaatacatttcaggcaaacagagataccgcgattcactgacgtcagcctccggcagcatgaagcgcccgaaaagaatgcttgttaccggatattgttgtcggagatgtaaaggccttgcgctgtcaagaacatcgcggcgtctgtctcaggaagtcaccgagcgtttttatgtgtgcacggatccgggctgtggtctggtgtttaaaacgcttcagaccatcaaccgcttcattgtccgcccggtcacgccggacgagcttgcagaaagcctgcatgaaaaacaggaactgccgccagtacggttaaaaacacaatcatattcgctgcgtctggaatga

SEQ ID NO: 6506 - DNA, 423 bp, Escherichia coli
atggaaagcacagccttacagcaggcctttgacacctgtcagaataacaaagcagcatggctgcaacgcaaaaatgagctggctgcggccgaacaggaatatctgcggcttcagtcaggagaaggcagaaacgtcagtcgcctggacgaattacgcaatattatcgaagtcagaaaatggcaggtgaatcaggccgccggtcgttatattcgttcgcatgaagccgttcagcacatcagcatccgcgaccggctgaatgattttatgcagcagcacggcacagcactggcggcggcactggcaccggagctgatgggctacagtgagctgacggccattgcccgaaactgtgccatacagcgtgccacagatgccctgcgtgaagcccttctgtcctggcttgcgaaggggggaaaaaattaa

SEQ ID NO: 6507 - DNA, 2742 bp, Escherichia coli
atggccaggccgttaccactgaataaagatttgatagtttgtgtacctagtaattattccaatacctcgagagggaagtttttcgagaatttttgcgctgatatactccgccggcaatcgtatagaattgatggtatggaagtcagaaaatctggcatggaaattgatattcaggctactcatacaccatcaaatgaaaagctgtatgtagaatgtaaattcatgcagcaaaaagttgattcatctgtggttgatttggcattttctcaagcatttaggttgagagttaaaaaaattgcacttttttcaatttctgatttgggtaaagatgctcagtcaacgcttgaggattatagacttgatgagcgtatagattattctttttttgataaaaaagagattcttatatctatacttgcaacaggtaaggttgaggatattccaacagatgacattccggcaaaatatactagtgcaacacttttagttcatcctgaaatagaaatgacttggcttttgcaagaagttgaaaatggtagccctataagagtggtgccgttcgctataaataaaaatagtaaaattccaagtgtcagtcgcataagtgatattataaaggagcaagggctttttgaagggttggaagtaactgatttttatatattatctgaaccggaacaaactgtttcgtcttcaaaattatctgaaaattacgaaagggaaattgtcagtgaaataattcttgctgacgattttatggattataagccatgtcagccgaaagactttgttggtcgcgaatatatacagaaagaagtttgggattatcttgagaatgttagaggaaatagctctcaaagtagagtcctatcacttataggcggttcaggaaatggaaagtcatctttaatagcaaggctatcctcaagatttaaaaatcaaaaatggaagaataaattcttccttacaccagtcgatgtccgttctgctagaggcggacgttttgtggcagaagctgtcgttaaagctttcagcagtgcgatcaaagaaggttttatcgaatatgaaaaaccattcctgattgagagtgttacggatatcataggatctgagagtgttcaggaatgtttaaaatacctttccgaacatgataaggtattgactattttctttgatcagttcgaagaagtctttatgaaagaggaactattcgggctatttaaagaatttgaacgattcgcactcgatgtctcggcactacaaagcaatttagttgtagggttctcatggagaactggtattactttaggggatgaaaatccagcgtactcaatgtggaatcggctaaaagattatagggttgaaaagaaacttgagccttttgatctaaaagattcatctaaattaattaatagtttcgagctaaatacagggtttaaattaaataaacctttacgcacgcgtcttattcagcaagctcaaggttatccatggttattgaaaaagctttgtattcatgtattcaaaaaactaaaaggaggtatctcacaggatcaaatgttggttagtcaactacagatctcaaatttatttcatgaggatttagataggcctgaaaaacaaaattcatgtttaaaatttgtggcaaagaactctccgattagtcaatatgaagttactaaagagtttgggagtgatactgttttagagctaatttcagataggatggtaattaaaacaggtgaaaaattatcagtgtattgggacgtttttcgagattacttgaaaggaaatgaccttccagttataccatggtcatatatgccatcaacatctccgaaaatggttttgttaattcttgatgttgtaaactcgttcaaaaccattagcttggatgaactgcaaactaaactaaaatatagtcggggaacattaataaatgttttaatggatttgcagtattttgttctcatagacagagatttaaatgggaatatagtttgtaaacagactatcacaaatgtccctgagtttcttcgtgagcattttaagagtcatagtgttttgttagaattggcagagaatattgttgatgccgatttaagaagagttcctatcgataagtatgaatctataatagcccatacttataagaataaagacggtggttatcctaagtcttatagttcaaaattattggcttggttacaatttacggggctgatagcggttatcgggaaatctgtggttatatatgatggcgagttgttttccccagcatttggggcgattgatctagataaaagaggggcacgtaatagaagaggatcacttttcttagctgctacttcgccagaaaaaacactcgaagttgccgagtatctgtgcgccaataaaaaaatgagccattcattcattcaggcgaataaacataggaatgcagtgcaggatttaatttctttaggtttttgttctcgacaagatgatggtgtggtgataaataataaaatagaagttatattagaaagcatcagccttgaaagggctttagctaggttagtcactgaatctccagctatcaaaatattaaatgcttatgtaaataaatttggcgatgatgataagaaaatgatgggggcagcactagcaaaagaacttgagagaacatggacacctgcatctactactagatatatttatgcactaatgagatatcgaaatttcgcattggaaactttataa

SEQ ID NO: 6508 - DNA, 1191 bp, Escherichia coli
  misc_feature (925)..(934): n is a, c, g, or t
gtggcacggacaacacgcccccttaccaacaccgaagttcttcgcgctaaagcgttagagaaggatctaactctgcatgatggcgatggccttttcctgatagtgaaaaccagcgggaaaaagctctggcgtttccgttatcaacgtccagcgacaaaacagcggacaatgatggggcttggtgctttccccgccctttcacttgctgacgcccgagggttaagagcggattaccttgccttgttagccaacggaattgacccacaaattcaggccgaagttgcagaggaacagcagcaaatcgctctggacagtattttctcaatggtcgccgctaactggttccagctcaaaagtaaaagcgttacccctgattacgcaaaagacatttggcgctcattggagaaagatgtattccctgccatcggtgagatccccgttcagcaaattaaagcccgaatattagttgaagcattggaaccaatcaaagctcgtggagcgcttgagactgtacgtcgactagtgcagcgtattaacgagataatgatttatgccgtaaacactggtctgattgatgccaatccagcatcaggtattggaatggcctttgagaagcccaaaaaacaaaacatgccgacgctgcggccagaagaattgccgaagctgatgcgttctttagtcatgtcaaatctgtctgttccgactcgctgtctcattgaatggcaactcctgacgctcgtgcgcccttctgaggcctctggtgcccgttgggcagagatcgatctcgatacgaagctctggactattccagccgaacggatgaaagctaagcgggaacacattgttcctttatcaccacaggcattagagattctggatgtaaagaagccaattagcgctcaccgagaacatgtttttcccagcnnnnnnnnnnatcctaaacaacctatgaatagccaaactgctaatgctgctcttaaaaggattggttatggcggtaaactcgttgctcatgggcttcgttctatagctagcacagcgttgaacgagtctggttttaattccgatattatagaatcagctttagcgcatatagataaaaatgaagtacggcgggcgtataatcgttctatttatttagaacaacgcagagaattgatgtcatggtggggtataaaagtaaaatcatag

SEQ ID NO: 6509 - DNA, 273 bp, Escherichia coli
  misc_feature (195)..(204): n is a, c, g, or t
atgaaggataggatcgtcgaaatactacaatacaccctgaaaaaagattctggtgaggagttccatcagatcatgtatgaagtcagtgttccacttcatacccggaacggtatagatgtggttgcgtatggaaactctctgcacgatgctgacagctactacctcatacgggcttttgaaagtgaagaacagatnnnnnnnnnnatgatttctacgcaagtgcgggttggcgtagtggcccacgagaagcaatcatcagtcgaattgaagtaa

SEQ ID NO: 6510 - DNA, 867 bp, Escherichia coli
atgacaagaacagaaatagtaaaggtagtgactaaatggttcgacgttgacaagtataatgtgctgaacgagctgacggttgaacagatatacatagaagtagaaagacgtgttcttgcttacaatctgctcacccaatacgattcgcttaaaccccaacttaaagctcttgttgatgatcatgagcagaagatacagtccgggcaagtcctctttaatgaggacgctaaaattgacaagccagaagaaatcctttcatcaagctacatagcaaatccactgactattgctggtgcgaaagatgttattggggctgttgatatggtgaatagacttattggcccgcaagaagaggctaagaggtcaaggcagctttcgcaataccttaatcaagcgggcatcagtaaagatgtcatgtttgttgaaattcatctctcagaggcttctacagaagacatcattgagcatctgaaaacgatgataccgcgatggaagaaggagcttaaggtgaggccccatgaagaaagaggttatcgttttggggtcggtacgatcaaaaaagttatgaaatataatcttataccgatgtttgatctcatgttctgggagaaaaagaacaacaccaaaattggtatagcgctgctgacgaggttgctttaccctcatctgattagtgaaaataaccgcagtgaaggcatggtaaaagatactgattatcctttggctgtaggttttatgaccaaccagagctacatcaaatcgttaggcgattttatagttaaatacgactctgacagggattggaaagtgtggagtttcatcaactactacttacccgaagacgagcaagaagaacaagaaaagtaa

SEQ ID NO: 6511 - DNA, 234 bp, Escherichia coli
atgaatactaatgtagtatcaaacagtaaaagacttattcgtttaccagaagtattaaatcgtactggtttatgtaaagcgtggatttatcgtttgattagtcgtaatgaattcccatcgccaataaaacttggtgaaagagcaatagcattcttagagagtgatatagataagtggattgatgaaaagattactttatcacgtaataaagtaaacgtgggaggtcatatgtaa

SEQ ID NO: 6512 - DNA, 315 bp, Escherichia coli
atgaatactgaagaactaaataacattaaggactcatcgactaaagcttttactgctatggcgaagaatctttatatcacaggaatacgtatatataaagaacaagaagaacttgaggtgttagcagctattatgttggatagcgagagaacggaatcatatctttcgcatgttaaagaatatctggcaaaacgctttgatgagcatatggaagaagtgggtaaaagagaaagactgatttatgttgatatggataaagtcatgtctgaaatgagatatgtgcatactaaagcattactttttagtatgagttaa

SEQ ID NO: 6513 - DNA, 174 bp, Escherichia coli
atgtctaaaggaagtattgctagtaataaatcaactgaactgttctatgatcttgcctgcaggtcatttaccgcaagctggaatatgttcatggaagtcaatggtgatggggatgccaatgcttatctggatgatccagagtttatgaggccatttattattttatgttattga

SEQ ID NO: 6514 - DNA, 738 bp, Escherichia coli
atgtatcccgtcgaccttcatatgcataccgttgccagcacgcatgcatatagcacattgagtgattacattgcccaggccaaacaaaagggcattaaactttttgctatcaccgatcatggcccggatatggaagatgcgccgcatcactggcacttcattaacatgcgtatctggccgcgagtggttgatggagtagggatcctgcgcggcatcgaagctaacattaaaaatgttgatggtgaaattgattgcagcggcaaaatgtttgattcgctggatctgattattgccggttttcatgagccggtttttgcgccgcatgataaagcgaccaatacacaagcgatgatcgccactatcgccagcggcaatgtgcatataataagccatcccggaaatccgaaatatgaaatagatgttaaagccgttgctgaagcagccgcgaaacatcaggtggcgctggaaatcaataattcctcttttttacactcacgtaagggaagtgaagacaattgtcgtgcggtagccgcagcggtacgtgacgctggaggttgggtggcattaggctcggattctcacaccgcgtttaccatgggtgaatttgaagagtgtcttaaaatcctcgacgcggtagattttccgccagagcgcattttgaatgtttctccgcgccgcttactgaacttccttgaatctcgcggtatggcaccgattgcggaatttgcagacctttaa

SEQ ID NO: 6515 - DNA, 687 bp, Escherichia coli
atgagctttatggtttttgtaacttgtttgacaattgcatttgtcgccggttttactgttgccagaaaattgacactccgaaaagttgcctcatcggtaatcatcactaaatcgcaaccagttccttcctctgcaacttcccctgctgttaaggcgtcgacaaggagctatacaccgcagaaaacctatcgtgactctcgttggcaagaacgagatgagttgttccagggaatggttgccgaaggtattttattggaaggaaaagagtggttaattacgcgttgtgaaaaaatctattttgataatcttgagaaatggtttggacattattgtcatatccattgccaggtctctctggggcgcttgatcaactttccagaacaacccgagtttagcgaagaagaaagaaagcgtttctttgcaatttataatggaatggcaatggattatgttctggtttcaaagaagaacaataaaatagtctgtgttattgagctggatgatccgagtcatgaaagggcagatcgcattattcgtgaccgttggttgaatacgattatgactattgcacgggtgccttttgtacgagcttctgtcactaaattggatgaaatccctccggtctgggatacccgtgacaaaatgcgcccattagccgcggcgacaaagggtgaaccgttgcattaa

SEQ ID NO: 6516 - DNA, 1329 bp, Escherichia coli
atggcaatgttcggttttcctcactggcagttaaaatcgacctctacagagagcggcgtggtcgcgccggatgaacgattgccgtttgctcagacggcaataatgggcgttcaacacgcggtggcgatgtttggcgcgacggtgttaatgcctattctgatggggctggatcccaatctttccattttgatgtcggggatcggcacgttactgtttttctttattaccggcgggcgcgtccccagttatctcggctccagcgcggcttttgtcggcgtggtgattgccgcgacgggctttaacggtcagggcattaacccgaatatcagcatcgcgctgggcgggattatcgcctgtgggctggtttataccgtcattggcctggtggtgatgaaaatcggtacgcgctggattgaacggctaatgccgccggtggtgacgggtgcggtggtgatggcgattggcctgaacttagcgcctatcgcagtgaaaagtgtatcggcttcggcctttgatagctggatggcggtaatgacggtgctgtgtattgggctggtagcggtatttacccgtggcatgatccagcggttattgattctcgtaggattaattgtcgcctgtctgctgtatggcgtgatgaccaacgttttagggctgggaaaagccgtcgattttactctcgtcagccatgctgcctggttcggtttgccacatttttccactcctgcttttaatggtcaggcaatgatgctgattgcgcccgtggcggtgattctggtggcggaaaacttaggccatctcaaggcggtcgccgggatgaccggacgcaatatggatccgtatatgggacgggcattcgtcggtgatggtctggcaacgatgctttccggctctgtcggcggtagcggcgtcaccacctatgctgaaaatatcggtgtgatggccgtgaccaaagtctactcgacgctggtgtttgttgctgctgccgtcatcgccatgctgttgggcttttcgccgaaatttggcgcgctgatccataccattccggccgcggtgattggtggtgcatcaattgttgtgttcgggctgattgccgtcgcaggcgcaaggatctgggtacaaaaccgtatcgatttaagccagaacggtaatttgattatggtcgcagtaaccttagtgctgggcgcgggtgattttgctctcacgctgggcggttttacgttgggagggatcggtacagcaacctttggcgcgattttactcaatgcgttattaagcagaaggttggttgacgttccaccgccagaagttattcatcaggagccataa

SEQ ID NO: 6517 - DNA, 597 bp, Escherichia coli
atggctaaagttctggtgctttattattccatgtacggacatattgaaacgatggcacgcgcagtcgctgaaggtgcaagcaaagtggatggcgcagaagttgtcgttaagcgtgtaccggaaaccatgcagccgcaattatttgaaaaagcaggcggtaaaacgcaaactgcaccggttgcaaccccgcaagaactggccgattacgatgccattatttttggtacacctacccgctttggcaacatgtccggtcaaatgcgtaccttcctcgaccagacgggcggcctgtgggcttccggcgcactatacggaaaactggcgagcgtctttagttccaccggtactggcggcggtcaggaacaaactattacttcaacctggacgacccttgcgcatcacggcatggtgattgtccccattggctacgcagcgcaggaattatttgacgtttcacaggttcgcggcggtacgccatacggcgcaaccaccatcgcaggcggtgacggttcacgccagcccagccaggaagaactgtctattgctcgttatcaaggggaatatgtcgcaggtctggcagttaaacttaacggctaa

SEQ ID NO: 6518 - DNA, 1257 bp, Escherichia coli
atgggtagtaatatacatggaattagttgcactgcaaataattatttgaaacaagcctggcacaatataaaaaaagagcacgaaaaaaatcaaacatattcaatcacgctttttgaaaacacactggtgtgttttatgcggttgtataaagaaatcagacgtcaaaaagctgaagactacattccatgcctggaatgcgaatcactagaaaaagaatttgaggaaatgcagaatgataatgatctatcattatttatgagaacattgcgtactaatgatacacaaatttattcaggggtttcaggaggtattacatatactatacaatatgttcgagatattgatattgttagagtatccttgccgggcagagcttcagagtctatcacagattttaaaggttattattggtatggctttatggaatatattgaaaacattaatgcgtgtgatgatgttttttctgagtgttgtttagaagatgaaaatataagtgtccagccaaaacagatacatacgccgggaatatctaatttagatactggtattgatttgtctggtatatcttttattcagagtgaaattaataaaacttatgaattaaaatacgctccagtagatggcgatggatattgtctgttaagagccatactggttttaaaacaacatgattattcatgggcgctgggcagtcataagacgcaaaaggaagtatacgaagagtttattaaaattgttgataaaccaacaatcgaggctcttgttgatgctgcattttgtgatctcagggaagatgttaagacattatttggcgttgatctgcaatctgacaacaaaattcagggtgtgggtagtcttatgtcatggagctttctgttttttaaaaaagaattcattgatagttgcttgaataacgaaaaatgtatcctgcatttacccgagtttatatttaatgataacaagaatttgcttgctttagataccgacacgtcggataggattaaagcggtgaagaattttcttgctgttctttcagatagcatttgctcattatttattgttaccagtaatgtggcatcaatctccttgggaaatgaatccttttcaacagatgaagatcttgaatatggttatttaataaataccggcaatcattatgacgtttacctccctcctgaactttttgctcaggcttacaagttaaacaatcaggaaatgaatgcgcaacttgactatttaaattgttatgtaatttaa

SEQ ID NO: 6519 - DNA, 1908 bp, Escherichia coli
atgtcattaatcagtatgcatggcgcatggctgtcgttcagcgacgcgccgcttctcgataacgcagaactgcatatcgaagataacgaacgtgtttgtctggtaggtcgtaacggcgcaggcaaatcgacgttaatgaagatcctcaaccgtgaacaggcgctggatgacggtcgcattatttacgagcaagatttgattgtcgctcgtctgcaacaggatccgccgcgtaacgttgagggtagcgtttatgatttcgttgccgaaggcattgaagaacaagcggaatacctgaaacgctatcacgatatttcgcgcctggtgatgaacgacccgagcgagaaaaatctcaacgaactggcgaaggttcaggaacagctggatcaccacaacctgtggcagctggaaaaccgcatcaacgaagtgctggcgcaactgggattagatcctaatgttgcgctgtcgtcgctttccggcggctggttgcgtaaagcggcattgggacgcgcgctggtgagcaatccgcgcgtattgctgctcgacgaaccgactaaccacctggatattgaaaccatcgactggctggaagggttcctcaaaaccttcaatgggacaattattttcatttcccacgaccgttcgtttatccgcaatatggcgacgcgcattgttgatctcgatcgcggcaagctggtgacctatccagggaattacgaccagtacctgctggaaaaagaagaagccctgcgcgtggaagaattacaaaatgccgagttcgatcgcaaactggcgcaggaagaggtgtggatccgccaggggatcaaagcgcgccgtacccgtaatgaaggccgcgtacgcgccctgaaagcaatgcgccgtgaacgtagccagcgccgtgaggtcatggggacggcaaagatgcaggtggaagaagccagccgctccggaaagatcgttttcgaaatggaagacgtttgctaccaggttgacggtaagcaactggtgaaagatttttctgcccaggttctacgtggcgacaaaattgccctgattggcccgaatgggtgcggcaaaaccacgctgctgaaactgatgctcggtcagcttcaggcggacagcgggcgtattcacgttggcaccaaactggaagtggcttatttcgatcagcaccgtgcggaactggatcccgataaaacggtgatggataaccttgccgaaggtaagcaagaggtgatggttaacggcaagccacgccacgtattgggctatttgcaggacttcctgttccatccgaaacgggcgatgacgccggtacgtgcgctttctggcggtgagcggaaccgcttgctgctggcgcgtttgttcctcaaaccaagcaacttattgattcttgacgaaccgaccaacgatcttgatgtcgaaacgctggaactgctggaagaactgatcgacagctaccagggcacggtattgctggtaagccacgatcgtcagtttgtcgataacaccgttacagaatgctggatcttcgaaggcggcggtaaaattggtcgttatgtcggcggttatcatgatgcccgtggtcagcaagagcagtatgtggcgctcaaacagcctgcggtgaaaaaaaccgaagaagccgccgcggcaaaagcagaaactgtaaaacgcagcagtagcaaactaagctataaattgcagcgcgaactggagcagctaccgcaattgcttgaagatctggaggcgaagctggaagccctacagacgcaggtggcggatgcttccttcttcagtcagccccatgagcagacacaaaaagtgctcgctgatatggctgctgcagagcaggagctggagcaagcctttgaacgctgggagtatcttgaagcgttaaaaaatggtggctga

SEQ ID NO: 6520 - DNA, 1110 bp, Escherichia coli
gtggcgacattaacccggctttttattcatcctgttaaatcgatgcgcggcattggtcttacacatgctctggcagatgtcagtggtctggccttcgatcgcatctttatgatcacggaacctgacggtacgtttattactgctcgccagtttccccagatggtacggtttattccttcacctgtgcatgatggcttgcatctcaccgcaccagatggcagtagtgcatatgttcgttttgctgatttcgccacacaagacgcaccaaccgaagtttggggcacacattttaccgcgcgaattgcgccagacgcgatcaacaaatggctaagtggatttttctcccgcgaagtgcaattacgctgggtggggccacaaatgacccggcgcgtgaaacgccacaacactgtacccctgtcatttgctgatggttatccttaccttcttgctaacgaggcctcgttacgtgatctccaacaacgttgtccggccagtgtaaaaatggagcaattccgccccaatctggtggtttccggtgcatcggcctgggaagaagatagctggaaagtgattcgcattggtgatgtcgtgtttgatgtggttaagccttgtagccgctgtattttcaccaccgtcagcccagaaaaagggcaaaaacatccggcaggcgaaccattaaaaacgctgcaatctttccgtactgcccaggataacggcgatgtcgattttggtcagaatttaattgcccgtaatagcggcgtgattcgcgttggcgatgaggtggaaattctggcaacggctccagctaaaatttacggcgcaggtgccgccgatgatactgccaacatcacgcaacaaccggacgcaaacgtagatattgactggcagggacaggcatttcgtggaaataaccaacaggtgctgctggagcaattagaaaatcagggaattcgtatcccttattcttgccgcgcgggcatttgtggaagttgccgtgttcagcttttagaaggcgaagtcacgccgctgaaaaaatcagcaatgggtgatgatggcactattctttgctgtagttgtgtaccgaagactgcacttaagctgacgcgttaa

SEQ ID NO: 6521 - DNA, 690 bp, Escherichia coli
ttggcgctcttgattttcgccgttttatcgctgctggtggcgagtgaattgcaggcaggagtggtggtcggcggaacgcgatttatctttccggcagacagagattcgatatctatttcactgactaataccagtcaggaatcctggcttattaacagtaaaatcaatcgcccaacgcgttgggctgggggtgaagcgtcgacagtaccagcaccattactggccgctccgccacttattctcctgaagcccggtactacaggcacattgcgcttgctgagaacggaaagcgacatcttgcccgtggatcgcgaaacgctatttgagttaagcattgccagcgtgccatccggcaaagttgaaaatcagagcgtaaaagtggcgatgcgctcggtatttaaactgttctggcgacccgaaggtttgccgggcgacccgctggaagcttatcaacaattacgctggacacggaattcgcagggtgtacaactcactaacccaacgccttactacattaacctgattcaggtgagcgtaaatggtaaagcgttaagtaatgcgggagttgtgccacctaaaagccagcgtcagacaagctggtgtcaggctataacaccgtgtcatgtcgcctggcggacgataaatgattacggcgggttgagtgcaaagaaggagcaaaatctgccctga

SEQ ID NO: 6522 - DNA, 564 bp, Escherichia coli
atgcgacggcggttctctattttgatctggtttaccagtgaaggagtgatgttgaaacagacaatctggattctgttcttactgggattaacggggggctgtgagctatttgcccatgatggcacggtcaacattagcggatcgtttcgccgtaatacatgcgtgctggcacaggatagcaagcaaatcaatgtgcagttaggcgacgtctcgctgacacgtttttctcatgggaattatggcccggagaaatcgttcatcattaatttgcaggattgcggaacagatgtcagcacggttgacgtcaccttttcaggaacccccgacggagtacagagcgaaatgctgtccattgaaagtggtacggatgcagccagtgggctggcaattgcaattctggatgatgcgaagatattgattccgcttaaccaggcgagtaaagactacagcctacatagcggtaaggtgccattaactttttacgcgcaattgcgacctgtcaatagcgatgtgcagtcgggtaaagtgaatgccagcgcgacatttgtacttcattatgactaa

SEQ ID NO: 6523 - DNA, 489 bp, Escherichia coli
atgcatgtcgggatagctggacctgaacaagtcagtatgcatatttatggtaatgtggtcgatcagggctgtgatgttgccaccaaaagtgcattacaaaatattcatattggtgattttaatatcagtgattttcagaccgcgaataccgtaagcactgctgctgatttgaatatcgatatcaccggttgtgccgctggtattactggcgcggacgtcctttttagcggcgaggctgacacccttgtgccgacactgctcaaattaactgacacaggcggaagcggtggtatggcaacggggattgctgtgcaaattcttgatgcgcaaagtcagcaagaaatcccgctcaatcaggtcctacttcttacgcccttaaaagccggggataacacactcaaatatcaacttcgttataagtccacaaaggcgggagcaacgggcggtaatgcgacggcggttctctattttgatctggtttaccagtga

SEQ ID NO: 6524 - DNA, 1071 bp, Escherichia coli
atgcgaataatttcaggggatagtagtgtgttaagactccggcttcttttgactgctgttttaatgctgtggggatttcatgccgccgcttataccgggcagtgtcataccactcaggggaatccgtatattggcgtcaattttggcgttaaaaccctggaggaggaagagaatacggctggaaaagtcaaagatgaattttatcagtggagtgaatcgaatgattattatgtttcctgcgattgcgataaagacaatgtcagaagtggtctatgggcattcgctgcggattctccgttagtttatttgggcgacaactggtacaaaattaacgattatcttgccgcaaaggtgctattaggagtgaaaggtagcacaccttcggccgtaccttttgaaaatctcggtacaggaagtgatacccgatggcatatttgcgatcccggtggtcaacgtttgggcggcaagggggcaagcggcaatagcggaagtttttcactgaaaatattgcagccgtttgtcggttcggtcgtcattcctcctatggcgctggcgcgactatatgagtgttacaacatacccgcaagtgattcctgcacgactacaggtacaccggttttagtgtattacctgtctggtacgattaattcacttggctcatgttctgtcaattctggagagacaatagaggttgatttgggggatgtatttgctgccaatttccgtgttgtagggcataaaccgcttggatccagaacggcagaactctcaattccagtcaggtgtaataccggaaacgcagagctggttaatgttaatttgagtctgacggcaaccagtgatcccgattatcctcaggcaatcaagacatcacgaccaggtgtcggtgttgtggtcaccgacagccaaaacaacattatttcgcctgccggtggcacactgccgctatccatccctgacgacgcggacagcttcgctcgaatgaatgtttatccggtcagcacgacaggtgtaccaccggaaaccgggagctttgaagccacagcaacggtgagaataaactttgactga

SEQ ID NO: 6525 - DNA, 1371 bp, Escherichia coli
atgtttggtctgggttttaacctcggcgatttcggagcaatttcgttcgacgcgacccaagctaaaagtacgctggcagaccaaagtgaacataaagggcagtcatatcgttttctgtatgccaaaacgctcaaccaattgggcaccaactttcaattgatgggctaccgctattcgacgtcgggtttctacaccctttccgacactatgtataaacacatggatggctacgaatttaatgacggtgatgatgaagatacgccaatgtggtcgcgttattacaatttgttttacaccaaacgtggcaaactgcaggtcaacatctcccagcaattaggcgagtacggttcgttttatttaagcggtagccagcaaacttactggcataccgatcaacaggatcggctattacagtttggctacaacacgcaaattaaagatctctcgctgggggtttcctggaactacagtaagtcccgtggtcaacctgacgctgaccaggtgtttgcacttaatttttccctgccgctcaatctgttgctccccaaaagtaatgatagctataccaggaaaaaaaattacgcctggatgacctctaataccagtatcgataacgaagggcacactacacaaaacctgggtttaacggagacactactcgatgacggtaatctgagctacagcgtgcaacagggatataacagcgaggggaaaacggctaatggtagcgccagcatggactacaaaggggcgtttgcagatgctcgagtgggctacaactacagcgataatggcagtcaacaacaactgaactacgctctttcaggcagtttagttgcccattcgcagggtattacgttgggtcaatcattgggtgaaactaatgtcctgattgccgcgccaggcgccgaaaatactcgtgtggcgaacagcaccgggctgaaaactgactggcgtggatataccgttgtgccttatgccacttcttatcgggaaaatcgaattgcacttgatgcggcgtcgttaaaacgtaacgtggatcttgaaaatgccgtagtaaacgtggttcccaccaaaggggcattggttctggcggagttcaatgcccatgcgggggccagggtattaatgaaaacatcaaagcagggtatgccgctgagatttggtgcaatggcaacactggatggcgcacaaacaattagcggtatcattgatgatgatggttcgctctatatgtctggtttgccggcgaagggaacgataactgtacgctggggcgacgctcccgatcaaatttgtcatatcagttacgagcttaccgaacaacaaattaacgctgcgattacgcggatggattcagtatgcgaataa

SEQ ID NO: 6526 - DNA, 1215 bp, Escherichia coli
atgtatagaactcaacgacaacacagcctgttaagctctggtggagtgccatcgtttattggtgggctggtggtgtttgtgtcggcagcgttcaatgcacaagctgaaacctggttcgatccagcctttttcaaagatgatccctcaatggtggctgatttgtcccgtttcgaaaaagggcaaaaaataacgccaggggtttatcgagtcgatattgttctgaatcagacaattgtagatacgcgcaacgtcaattttgttgagataacgccagagaaggggattgccgcctgtttgacgactgaaagcctggatgcaatgggcgtgaatactgatgcgtttccggcttttaaacaactggataaacaagcgtgtgcgccattggcggaaattattccggatgccagcgtaacttttaatgtgaataaactccgtctggaaatttcagtaccgcaaatcgccatcaaaagtaacgctcgtggttatgtcccccctgaacgttgggatgaagggatcaacgcgctattactgggatattcatttagcggggctaacagtattcatagcagcgcaggtagtgattctggcgacagctattttctgaatttaaacagtggcgttaatttaggcccatggagattgcgcaacaattcaacatggagtcgcagtagtggccaaaccgcagaatggaagaatctcagcagctatttgcagcgggcggtgattccattaaaaggcgaactgaccgtcggtgatgattatacggcaggcgatttttttgatagcgtcagctttcgtggcgtgcagctggcgtcagatgacaacatgctgccagacagcttgaaagggtttgcgccagtggtgcgtggtatcgccaaaagcaatgcacaggtaacgattaagcaaaatggttacaccatctatcaaacttatgtttcgcctggcgcttttgagattagtgatctctactctacgtcgtcgagtggtgatttgttggttgaaatcaaagaagctgacggtagtgtcaatagttacagtgtgcccttttccagcgtgccattactccagcgtcagggacgcatcaaatatgcggtgacgctggcgaaatacagaaccaatagtaatgaccagcaagaaagtaaatttgctcaggccacgctgcaatgggggggggccgtggggaacgacctggtatggcggagggcaatatgctga

SEQ ID NO: 6527 - DNA, 702 bp, Escherichia coli
atgaaaacttgcataacaaagggaattgtgaccgtaagtttaacggcaatattactcagctgttcgttcacatgggcggcaggtaaaggtggggtcggacttgcagcaacacgtcttgtttattcggaaggtgaagagcaaatttcactgggtgtacgtaacaccagtccggatgttccttatctgattcagtcatgggtgatgacaccagataataaaaagtcagcggactttattattacaccaccgctatttgtgctgaatccggcaaacgagaacctgctacgcattatgtacattggcgcgccgttggcgaaagacagagaaactcttttcttcaccagcgtacgggcagtcccttcaacaacgaagcgggaagaaggcaataccctgaagattgccacacaaagcgtcatcaaacttttctggcgaccaaaaggtttagcgtatcccttagccgaggctccggcgaaactgcgttgcacttcgtcagctgacatggttacggtcagtaacccaacaccttatttcattaccctgacagacctgaaaataggtggaaaagtagttaaaaatcaaatgatttccccctttgataaataccaattctctctgccaatgggtgccaaaaacagcagcgtaacgtaccgaactatcaatgactacggggcggaaacgccgcaactcaactgtaaatcgtaa

SEQ ID NO: 6528 - DNA, 540 bp, Escherichia coli
atgaaaaaaagtgtattgacggcgtttataactgtggtatgtgcaacgtccagcgttatggctgctgatgataatgctatcacggatggctcagtaacatttaatggtaaagttattgctccagcttgtactctggtagctgcgacgaaagattccgtggtgactttgccagatgttagtgccacgaagttgcaaaccaatggtcaggtttctggcgtgcaaactgatgtgccaattgaattaaaagattgtgatactaccgtaacaaaaaatgcaacgttcacctttaatggcactgcggatactactcagattacagcgtttgctaaccaggcctcatctgatgctgctacaaacgtggccctgcaaatgtatatgaatgatggtacaacggccatcacgccagacacagaaaccgggaacattttgttgcaagatggagatcagacgttgacttttaaagttgattatatcgctacgggtaaagcgacgtcaggtaatgtcaatgcggtaacaaatttccatattaattattattaa

SEQ ID NO: 6529 - DNA, 960 bp, Escherichia coli
atgcgtaagctcattaaactggcgctggcgggcttacttagcgtctctacacttgcggttgctgcagagtcttcgccagaggcgttacgaattggctatcagaaaggcagtattggtatggtgctggcaaaaagccaccaattactggaaaaacgctatccgcaaacaaaaatctcctgggtggagttcccggctggcccacagatgctggaggcgttaaacgttggcagtattgatctcggcagtaccggggatattccgccaatctttgcccaggctgccggggctgatttgctgtacgtgggcgtcgagccgccgaagcccaaagccgaagtgattctggtggcagataacagcccaatcaaaaccgtagccgatcttaaaggtcataaagttgcctttcagaaaggttccagctcgcacaatcttttactacgcgcactacgccaggccgggcttaaattcacggatatccagcccacttacctgacgcctgccgatgcccgcgccgcgttccagcaaggtaacgtcgacgcatgggctatctgggatccctactactccgctgcattattacagggcggcgtgcgggtgctgaaagacggcaccgatctcaatcaaacaggttcgttttatctggcagcccgtccctacgcagaaaaaaacggcgcttttattcagggtgtgctgacaacctttagtgaggccgatgcgttaacccgcagccagcgcgaacaaagcatcgctttactggcaaaaacgatgggcttaccggcaccggttattgcctcgtatctggatcatcgtcctcccaccaccatcaaaccgttgagcgctgaagttgccgccttacagcagcaaacggcagatctgttttatgaaaaccgtctggtgccgaaaaaagtcgatattcgccagcgcatctggcaacccactcaactggaaggaaaacaattatga

SEQ ID NO: 6530 - DNA, 1146 bp, Escherichia coli
atgagtctgaatatgttctggtttttaccgacccacggtgacgggcattatctgggaacggaagaaggttcacgcccggttgatcacggttatctgcaacaaattgcgcaagcggcggatcgtctgggctataccggtgtgctgatcccgacggggcgatcgtgtgaagatgcgtggctggtggcggcgtcgatgatcccggtgacacaacggctgaagtttcttgtcgccctgcgccccagtgtgacatcgcctaccgttgccgcccgccaggccgccacgcttgaccgtctctctaacggacgtgcgttgtttaacctggtcacaggcagcgatccccaagaactggcaggcgacggcgtgttccttgatcatagcgagcgttacgaagcctcggcagaatttacccaggtctggcggcggttgttgcttggcgagacagtggatttcaacggcaaacatattcatgtacgcggagccaaactgctcttcccgccgattcaacagccttatcctccgctttactttggcggatcgtcagatgtcgcccaggagctggcggcagaacaagttgatctctacctcacctggggcgaaccaccggaactggtaaaagagaaaatcgaacaagtgcgggcgaaagctgccgcgcatggacgcaaaattcgtttcggtattcgtctgcatgtgattgttcgtgaaaccaacgacgaagcgtggcaggccgccgagcggttaatctcgcatcttgatgatgaaactatcgccaaagcacaggccgcattcgcccgcacggattccgtaggacaacagcgaatggcggcgctacataacggcaagcgcgacaatctggagatcagccccaatttatgggcgggtgttggcttagtgcgcggcggtgccgggacggcgctggtgggcgatggtcctacggtcgccgcgcgaatcaacgaatacgctgcacttggcatcgacagttttgtgctttcgggctacccgcatctggaagaagcgtatcgggtcggcgagttactgttcccacatctggatgtcgccatcccggaaattccccagccacaaccgctgaatccgcaaggcgaagcggtggcgaatgattttatcccccgtaaagtcgcgcaaagctaa

SEQ ID NO: 6531 - DNA, 795 bp, Escherichia coli
atgatggcaacgccagtgaagaagtggttattgcgcgttgccccctggtttttaccggtgggcatcgtggcggtgtggcaactggcctcctcggttggctggctatcgacgcgtattttgccctcaccggaaggagtggtgatggcgttctggacgctctctgccagcggcgaattgtggcagcatctggcgatcagctcctggcgggcgttgattggcttttcaattggcggatcgctgggcttgattctgggactgattagcgggctgtcgcactggggagaacggctgctggatacctccattcagatgttgcgcaacgtgccgcatctggcgctgatcccgctggtgattttgtggtttggcattgatgaatccgcaaaaatctttctggtggcgctcggtacgctattccccatttatatcaacacctggcatggcatccgtaatatcgaccgtgggctggtggagatggcacgtagctatggattatccggcataccgctgtttatccatgtgatcctgcctggtgccctgccctcaattatggtcggtgtgcgttttgctttgggcctgatgtggctgacgctgatcgttgccgaaactatttctgccaattccggcattggttatctggcgatgaatgcgcgggagtttctgcaaacggacgtggtggtagtcgctattattctttacgccctgctcggcaaacttgctgacgtcagcgcgcagctgttagagcgtctctggttgcgctggaacccggcttatcatttgaaggaggccacggtatga

SEQ ID NO: 6532 - DNA, 747 bp, Escherichia coli
atgaatactgctcgtctgaaccagggcacaccattgttgctcaatgcagtaagcaaacattacgcggaaaataccgtcctgaaccaactggatttacatattccggcaggtcagtttgtggcggtggtgggccgcagcggtggtggcaaaagtaccctgctgcgcctgctggcaggtctggaaacgccaacagcaggcgacgtgttagcgggcaccacaccgctggctgagattcaggatgatacgcgaatgatgtttcaggacgcgcgtctgctgccgtggaaatcggtgattgataacgttgggttaggccttaaaggccagtggcgcgatgcggcgcgtcaggctctggctgcggtaggactggagaatcgcgcgggggaatggcctgccgcactttctggcgggcagaaacaacgtgtggcgctggcaagggcgctgattcatcgaccgggtttattgttacttgatgaaccactcggtgcgctggacgctttaacgcgactcgagatgcaggatttgattgtgtcgctttggcagaagcacggttttaccgttttgctggtgacgcatgatgtgagcgaagcggtagcaatggctgaccgggtgttgttaattgaagagggaaaaattggtctggatttaacagtggatatcccccgtccgcgtcggttagggtcggttagggtcggtacgattagcagagctggaagcggaagtattgcagcgggtgatgaagcgtggtga

SEQ ID NO: 6533 - DNA, 1011 bp, Escherichia coli
atgaaaataacgacagtcggcgtatgcataatttgcggaatttttccgttgctggttttgccccaattgcctgggacattaacccttgcgtttctgactgtcttcgcctgcgtactggtatttatcccttttaaagccgtccgttatatcgcgctgacgttgctgttttttctttggggcatatcagcggcaaagcaaattttgtgggcaggagaaaccttaactggcgcgacgcaggatgcaatagttgagatcactgctactgacggcatgaccactcattacggtcaaatcactcatctacaaagtcgacgtatattccctgcgccaggcctcgtgctgtatggcgaatatcttccgcaagcggtttgtgctggacaacaatggtcaatgaaactcaaagttcgtgcagttcatggccaacttaatgatggcggctttgatagccagcgttatgccattgcccagcatcagccgctcaccggccgctttctgcaggcaagtgtcattgaaccgaattgtagcttgcgtgcacagtatctggcgtcattacaaacaacgctgcaaccctatccgtggaatgcagttattcttggtttaggtatgggggaacggttatccgtccctaaagaaatcaaaaatatcatgcgcgatactggaacggcgcatttaatggcgatatcgggattgcacatcgcttttgcggcgttgctggctgccggactcattcgcagtggacaaatttttctgcctgggcgctggatccactggcaaatgccattaattggcggaatctgctgtgctgctttttatgcctggctgacgggaatgcaacctcctgcattgcgtaccgtggtggcgcttgctacgtggggaatgcttaagttaagtgggcgacagtggagtggctgggatgtatggatatgttgtctggcggcaattttgctgatggatcctgttgccattctctcgcaaagtttatgctctctgccgctgcggtcgcggcactga

SEQ ID NO: 6534 - DNA, 222 bp, Escherichia coli
atgaaaatcatcacccgtggtgaagccatgcgtattcaccgtcagcatcctgcatcccgtctttttccgttctgtaccggtaaataccgctggcacggtagcacggatacatataccggccgtgaagtacaggatattcccggtgtgctggctgtgtttgcagaacgccgtaaggacagttttggtccgaatgtccggctgatgagcgtcaccctgaactga

SEQ ID NO: 6535 - DNA, 369 bp, Escherichia coli
gtgtcagacacactccccgggacaacgcatcccgacgataacaacgaccgcccctggtgggggctaccctgcaccgtgacgccctgttttggggcatgtctggtgcaggagggtaaccggttgcattaccttgccgaccgcgccggtatcagaggccggttcagcgacgcggatgcgtaccatctggaccaggcctttccgctgctgatgaaacaactggaactcatgctcaccagcaatgaactgaatccccgccatcagcataccgtgacactgtatgcaaaagggctgacctgcgaagccgacaccctcggcagttgtggctacgtttatatggctgtttatccgacgcccgaaacgaaaaagtaa

SEQ ID NO: 6536 - DNA, 378 bp, Escherichia coli
atgaaaacattacccgacacgcatgtacgggaggcatcgcgctgcccgtctcccgtcaccatctggcagatactgctgtcccgactgctggaccagcactacggcctcacactgaatgacacaccgtttgccgatgaacgtgtgattgagcagcatattgaggcaggcatttcactgtgcgatgcggtgaactttctcgtggaaaaatacgcactggtacgaaccgaccagccgggattcagcgcaggaacttcgtcgcagttaatcaacagcattgatattctccgggctcgcagggcgaccggcctgatgacccgcgacaattacagaacggtaaataacattacccgggggaagcatccggaggcgaaacaatga

SEQ ID NO: 6537 - DNA, 489 bp, Escherichia coli
atgaaactttccctgacgctggaagcagacagcgttaacgtgcaggcgctgaacatgggacgaattgtcgttgacgtcgatggtgttaatctcgctgaactgattaacgtggcctgcgacaatggctactcccttcgtattgttgatgaatctgaccggacatcagcagagcgcacgccaccatttgctgccctgaccggcatacgctgcagtaccgctcatatcacggcaaaggacaacgcctggttgtattcgctgtcacatcagacaaatgacaccggcgaatcagaatggattcatttcacaggtagcggatatctgttacgtaccgatgcgtggtcatacccggttttgcggcttaagcgcctgggcctgtcaaaaacgttccgccgtctggttgtcacacttacccgacgttatggcgtcagtctcattcatctggatgccagcgctgaatgtctgccggacctgcccactttcgactggtaa

SEQ ID NO: 6538 - DNA, 198 bp, Escherichia coli
atgaaatcattaacaacggaaaccgcactggatattctgattgcgtggctgcaggacaatattgactgcgaatcggaaattatctttgacaacgatgaggataaaacggattcggcagcactgctgccctgtatcgaacaggcgcgacaggatatccgtaccctgcgtcatctgcagcttcagcacccgaaccggtga

SEQ ID NO: 6539 - DNA, 867 bp, Escherichia coli
atgtctgaaatcacagcctcacgtccggaagtggtcaacgggcatacggacgttatctgctcaaccagtatccgccacattctggctgtacgaaagagtgcgctgctgcaaatcgacacacttatccggcaactggcagaaatctcagcaatgacagaaagcatcggaggaaaaaccgcactggactgggcgatgaaacaggattttcgctgcggctgctggctcatggagaaaccggaaaccgcaatgaaagccatcacccgcaatctcgatcgcgaaatctggcgtgacctgatgcaacgttccgggatgctgtcattaatggatgcgcaggcccgtgatacagggttcaggtcactggagtacgataactttccggaaatcagtgaagcgaacattctgagcacatttgaacaactgcaccagaataaggatgaggtgtttgagcgaggggtgatcaacgtcttcaggggactgagctggaattacaaaaccaattgcccctgcaaatttggcagtaaaattatcgtcaacaacctggtgaggtgggaccggtggggggttcatcttatcaccgggcaacaggctgaccgggttgctgacctggaaaggatgctgcacctgttcagcggcaggcccatccccgacaaccgggaaaatatcatcatccgtctggatgaccacattcagtccgttcagggtcaggagtgctatgaagatgagatgttcagcatcagatactttaagaagggctccgcacacatcacgttcaggaagccacaactggttgacaggcttaatgatattattgccagacactacccggaagccctggcaagcacagtgaacaaaagccgcaagacataa

SEQ ID NO: 6540 - DNA, 264 bp, Escherichia coli
atgcctaccagtgtatccctcagtccttactttgaaacgtttatccgcgaacaaatagaaagtggtcggtataacaatacaagtgaagtcattcgtgccggacttcgtgctctggaagaacgggaacagcagataaagcttgaatcactccagagcgccgttaccgcaggcatcaacagcggtgaaagtaaaagtgctgaagaggtattcgggcgactgacgcacaaatacaaaaagatggcagaaggtgaacagccaatatga

SEQ ID NO: 6541 - DNA, 327 bp, Escherichia coli
atgaaactgactgtttcaccattagcagaacacgatcttgaagctataggtgactggatcgctcaggataatcctgtccgtgcaatcagttttaccgaagagctttaccaacaatgtctgttgatagccgaatcgccagtactctgcagagaaagacccgagttaggggctgggatcagaggttgttcgtatggtcgttaccttctgctgttcagggtactggatactgaagttcgtatcgaacgtatcgttcatggttcccgggatatcaacagggtacttgcagagccagacgacaaaccatcagatcatttctggcagctataa

SEQ ID NO: 6542 - DNA, 2052 bp, Escherichia coli
atgagcgcgctcaactccctgccattaccggtggtcaggctactggcgttctttcatgaagagttaagcgagcggcggccaggtcgtgtgccgcagaccgtgcaactctgggtaggctgcctgctggtgattctgatctcgatgaccttcgagatcccctttgtggcgttatcgctggcggtgctgttttacggtattcagtccaacgcgttttacaccaaatttgtcgcgatcttgtttgtggttgccacggtgctggagatcggcagcctgtttttgatctacaaatggtcatacggcgaaccgttgatccgattgatcatcgcagggccgatcctgatgggatgtatgtttttgatgcgcacccatcggctgggactggtctttttcgctgtcgccattgtcgccatttacgggcaaaccttccccgccatgctcgactatccggaagtggtcgtgcgcttaacgctgtggtgtatcgttgttggcctctatccaaccttgctgatgacgttaatcggcgtgctgtggtttcccagccgcgctatcacgcagatgcatcaggcgcttaatgatcggcttgatgatgccattagccacctgacgaacagcctcacaccgctacccgaaacgcggattgaaagagaggcgctggcgctgcaaaaactcaatgtcttttgcctcgcggacgatgccgactggcgtactcagagcgcatggtggcaaagctgtgtggcaacggtaacctacatttactcgacgctgaatcgctacgatcccacctcttttgctgattctcaggcaattattgaattccggcaaaaattagcctcagaaatcaacaagctgcagcatgccattgccgaaggtcagtgctggcaaagcgactggcggatcactgaaagtgaagcgatggcggcacgggaatgtaacctggagaatatctgccagacattgttgcaactgggtcagatggacccgaatacgccgccaacgcccgccaccaaaccgccatcaatggtcgccgacgcttttaccaatccagactatatgcgctacgcggtaaaaacgctgctcgcctgtttgatctgttacaccttctacagcggcgtggactgggaaggcattcacacctgtatgctgacctgcgtgatcgtcgctaacccgaatgttggttcgtcgtaccagaagatggtgctgcgttttggcggggccttttgcggcgcgattctggcgctgttattcacgctactggtcatgccctggctggacaatattgtcgaattgctgtttgtgctggcaccgattttcctgttgggcgcatggattgccaccagctctgaacgctcttcttatatcggcacacagatggtggtcaccttcgcgctcgccacgctcgaaaacgtttttggcccggtgtacgacctggtggaaattcgcgatcgcgccctgggtatcatcattggtaccgtggtgtccgcggtgatttacacctttgtctggcctgaaagtgaagcgcgcaccctgccgcaaaaactggctggcgcgctgggtatgttaagtaaagtaatgcggatcccacggcagcaggaagtcacggctctgcgcacttatctgcaaattcgcataggtctgcatgcggcgtttaatgcctgtgaagagatgtgccaacgcgtggcgctggagcgtcaactggacagcgaagaacgcgccttactgattgaacgttcgcaaacggttattcgtcagggtcgcgatattcttcacgcctgggatgccacctggaactcggcgcaggcgctggataacgcactacagccggacagagctggtcagtttgccgacgccctggagaaatacgccgccggtctggcaaccgcactcagtcgttctcctcaaataacgcttgaagaaacacccgcctcgcaggccatcctgccgaccttattaaaacaggagcaacacgtctgccagcttttcgcccgcttgccagactggacagccccggcattaacgcccgccacggaacaggcacaaggagccacgcaatga

SEQ ID NO: 6543 - DNA, 1467 bp, Escherichia coli
atgatcaatcgtcaactttcacgcctgctgttgtgcagcattctcggcagcacgacgctgatttccggctgtgccctggtacgtaaggattctgcgcctcatcaacagctcaaaccggaacaaatcaaactggccgatgatattcatcttgccagctccgtctggccgcaggcgcagtggtggaaacaactcaatgacccgcagttggatgctttgatccaacggacgctaagtggttcacacaccctcgccgaagcgaaactgcgggaagaaaaagcgcaatcgcaggccgatttgttagatgccggttcacagttgcaggtggcagcgttagggatgcttaaccgccaacgcgtctcggcgaacggctttttaagcccttatgcgatggatgcgcccgcactggggatggacgggccgtactatacggaagccacagtaggtttgtttgccggactggatctcgatttgtggggtgtgcatcgctcagcggttgccgccgccattggcgcgcataatgccgcgctggcagaaaccgcagcagtagagctatcgctgaccacgggcgtagcgcagctttattacagtatgcaggccagctatcagatgctcgatctgttagaacaaacacgcaatgtgattgattacgcggtaaaagcgcaccagagtaaagtggcgcacagtctggaagcgcaagtgcctttccacggcgcgcgggcacagattctggcggtcgataaacaaattgctgccgttaaagggcaaatcactgaaacgcgggaatctctgcgcgcattgattggcgcgggcgccagcgatatgccggagatcaaaccggtggcattaccgcgagtccagaccggcattccggcaacactctcttatgagttgctcgccagacgcccggatctgcaagccatgcgctggtatgttcaggcgtcattagatcaggtggattccgcgcgggcgctgttctatccgagctttgatatcaaagcgtttttcggcctggattctatccacctggataccttattcaaaaaaaccagtcgccagttcaactttatcccaggtctgaaattgccgctgtttgacggtggacggttgaatgccaatctcgaaggcacgcgcgccgccagcaacatgatgattgaacgttacaaccagtcagtactgaacgcggtgcgcgacgttgccgtcaacggcacgcgtctgcaaacgcttaacgacgagcgagagatgcaggctgaacgcgtggaagcaacgcgcttcacccagcgcgctgccgaggccgcctatcaacgcggcttaaccagccgcttacaggccaccgaagcccggttgccagtgcttgccgaggagatgtcattactgatgctggacagccgccgggtgatccaaagcattcagttgatgaaatcgctgggcggcgggtatcaggcggctcccgtcgtcgagaaaaaataa

SEQ ID NO: 6544 - DNA, 690 bp, Escherichia coli
atgaaaaaaattatcgcattgatgttgtttttgacattctttgcccacgcgaacgactccgagcctggcagccagtatttaaaggcagcagaggccggggaccgacgcgcacaatattttcttgccgacagctggtttagctccggcgatttgagcaaagccgaatattgggcacagaaagccgccgacagcggtgatgctgatgcctgcgcgctgttagcgcagatcaaaatcaccaatccggtcagtctggactatccacaagcaaaagttcttgcagagaaagcggcgcaagcgggcagtaaagaaggtgaagtaacgctggcgcatattctggtaaatacgcaagcgggtaaaccggattatccaaaggcgatttcgctgttagaaaacgcctcggaagatctggagaacgactctgccgtcgatgcccaaatgctgcttggtttgatttacgccaacggcgtgggcattaaggccgacgatgacaaggcaacctggtatttcaaacgcagctctgcgatttcccgaaccggttattccgagtactgggcgggaatgatgttcttaaacggtgaagaaggttttatcgagaagaacaagcaaaaggcgctgcactggttgaatctgagctgtatggaagggtttgataccgggtgtgaagagtttgaaaaattaactaacggttaa

SEQ ID NO: 6545 - DNA, 1623 bp, Escherichia coli
ttgcgctggcctgccatgatgcgactcacttgcatcggcattctggcgcagttcgcgctcctgctgctcgcctttggcgtactgacgtattgttttctcatcagcgatttctcggtcatttatgtcgcccaacatagctacagcctgctgtcgtgggaactcaaactggcggcggtgtggggcggtcatgaaggttcgctgctgctttgggtgctgctgctttccgcctggagcgcgctgtttgcctggcattatcggcagcaaaccgatccgctatttccgctgacgctagccgttttatctctcatgctcgccgcactgctactgtttgtagtgctgtggtccgatcccttcgtgcggatatttccgccagcaatcgaaggccgcgatctcaatccgatgctgcaacatcccggtcttatctttcatccaccgctgctttatctcggctacggcggtttgatggtggcggcgagcgtggcgctggcgagtttactgcgcggcgagtttgatggtacctgcgcccgaatttgctggcgctgggcactaccaggctggggggcattaacggcggggatcatcctcggttcctggtgggcctattgcgaactgggctggggcggctggtggttctgggatccggtggaaaacgcctctttattaccctggctttctgccactgcgctgctgcacagtttgtccctgacacgccagcgggggattttccgccactggtcgctgttactggcgatagttactctgatgctgtcgctgctgggcaccttaattgtccgttctggcattctggtttcggttcatgcgttcgctctggataacgtccgcgccgtgccgttgttcagcctgtttgcactgattagccttgcgtctctggctctgtatggctggcgagcgcgggacggtggcccggcggtgcgtttttcggggttatcgcgggaaatgttaatcctcgctacgctgttgctgttttgcgcagtgctactgatcgtgctggtgggaacgctttatccgatgatttacggcctgctgggctggggacgcctctccgttggtgcgccatattttaaccgcgcaacgttaccgtttggtctgttgatgctggtggtgattgtgctggcgacgtttgtctctggcaaacgcgagcagcttccggcgctgctggcgcatgcgggcgtgctgttatttgccgcagggatcgtggtctccagcgtcagccgtcaggagatcagcctgaatttacagccgggtcagcaggtgacgctggcaggatacaccttccgttttgagcgtctcgatctgcaagccagaggcaattacaccagcgaaaaagcgatagtggcactgtttgaccatcagcaacgtattggtgaactgacgccggagcggcgtttttacgaagcacgtcgtcagcaaatgatggaaccgtcaattcgctggaacggcatccatgactggtatgcggtcatgggcgagaaaaccggaccggatcgttacgcttttcgtttgtatgtacaaagcggtgtgcgctggatctgggggggaggattgttgatgattgcgggcgcattgttaagcggatggcgggggaggaagcgcgatgaataa

SEQ ID NO: 6546 - DNA, 504 bp, Escherichia coli
atgaatatatcatatgtgaatagcaacaaaatgacatctttacctgttgagctagatgcactaaataataaagatatctcttattccaaagatttttcttatgccaaagatttctttttatatatagaaacacagttaaaaattgcaaaagatttttgtagacctggagaagaagtatcaagttctattgcaagtacagtttttcatgcatttattgatttagttaacaaaatcagaggcaagaaagattatatgtatatttgcacactttgctgttttgccgaggaggttaaaggtgattattctcattacaggacctttttatttgatattggtaatcaatataaggttaaacttacacaaagcggaaaaaaagagttctctttaacattagaatttaacgatactataattgaatctcagaaagtcacaggcaataaggcaaagcatattcttgaggatatagaaatattctatcgtaacaaacccgatacttattattaa

SEQ ID NO: 6547 - DNA, 273 bp, Escherichia coli
ttgatagataaaaaagaattggattttaatgtaattctgcaggagatgaaaaatcaggccggagaagaaaaagaagacatcaaaaacattacaaaaatgcaggctgcaggtgagactttaattaaatttattcaatcatttgacccggactcaacgggaccaattataattggtaaagatatggatgacaaaaatataaatgacaacgatctaattaacgaagatattattaagttcatttatgtcctattaggtactgagttagaaaaataa

SEQ ID NO: 6548 - DNA, 726 bp, Escherichia coli
atgtcaggtataatttcaagtgcaacagaattcttcaataatacactccattcaaatcaatacgaaattaaagatgcgagcaaagaaaaaataaaggatatatataataaatcggttgattatgcaacgatgagtaatcgcgctgcgattattgcaaaaatagatttgtttattcagagaatcacccataatttatggactgcaagtgataataatgtttccttaattaagcgaatagatgctctcaaaaattgggttgaggagtgtattgatcagtgcactaatgagcaattaggtgatcgtgactatatttctgcatttgtggatcgggcgatttttcattacgcgatgaattttgtttgtaatccaatggaaaatagcgatgtaactctaatagacaagtgcactttcgacgtaataaatcataatggccttccctccacgattcagctattttatgataaatcctattgtaaagcacctgtagcgtcattacatctaaaaacagtaagcgaaggctttttaaatttggaaaatgcatataatgtaaagaaagatactcgcttaagacccctggcctcccttttactttcattttcatatgatagtgcatcagcagatatcataggagcagcagagagagttaatgatgattgtgaaaactacataaaaagtcagatgaaaatattatctcgtcaagtgatgaaaaaaaactggcggagctga

SEQ ID NO: 6549 - DNA, 1581 bp, Escherichia coli
atgataggtcatatcacaaattctggcggcaatgactctttgatgaaacatgatgtggtgcaaggaaataataaattagatcttgatttactacgtaattttaatggggtgccaggtttaaatagagataactttatttatatcagtgatatatttttaaatataaaacaacggaacgaaaaaaatcatgcaataaatatgtttcgtgaagtctcaatcagtaatgatattataagcgtaaaattttatagaaatgaagaaatagaatgtgcttgtgattttctgatggataaagatgcgcagaggtatactgacctgtctgatttggatttaacaagttgtcattttaaaggtgacgttatttcgaaggtgtctttcatatcatcaaatctacaacatgtaacattcgaatgtaaagaaataggggattgcaattttactactgcaacagttgataatgtcatatttaaatgtcgacgtttacacaatgtgatttttatcaaagcgactggcgaatatgtcgattttagccaaagtattcttgatacagttgacttctcgcggagccagcttactcatagtaattttcgtgaatgtcagattagaaattcaaagttcaataattgttatctttatgcttcgcacttcaccagagcagagtttctttctgacaaagaaatatcatttattaaatcgaatttgacagctgttatgtttgatcatgtgcgaatatcgacagggaattttaaagacagcgttacacaactcatggtattatctattgattactcagatatatttggaaatgaatatctcgatggttatatcaataacattataaaaatgattgatacattgccagatgatccagcgatattgaaatccgttctggcagtaaaactggtgatgcaattaaaaattcttaatattgttaataaaaactttattgagaatatgaagaaaatatttagccattgtccttatataaaagatccaattatacgtagttatatccatcctgatgaagataacaagttcgataattttatgcgtcaaaatcgattcagtaagatgcatttcgatacccaacagatgatcgattttattaacagatttaatatgaataaatggctgattgatcaaaataacaatttttttatccaacttatcgatcaggctctacgatcaacgaatgatacgatcaaagaaaatgcctggcatctttataaagagtggattcgtagtgatgatgtttcacctttatttatagaaattgaagataatttaagaacctttaacacgaatgaattaacacgaaacgataatatctttatcctgttctcctctgtcgatgatgggccagttatggtggtaagctcccagcgcttacatgatatgttgaatcctacaaaagataccaattggaattccacgtatatctacaaatccagacatgagatgttgcctgttaatcttactccggaaacacttttcggctccaaatctcaggataaacatgcgcttttccccatttttactgcgagttggcgagctaatcgtataaagaataaaggtatttaa

SEQ ID NO: 6550 - DNA, 348 bp, Escherichia coli
atgatacgaaaatcaaaagagatggcccggacaccggagatcattaacgacctggcttttcatgcatcgcaagttctgattgaaagcatcaatctcgacagttcatcggcagaaaatgtgggctttgccattgccgaccgaatgatgcgtaactggggcggacaaagcatttatttccctaaggggatctccggacgagcatcggagcgtgactaccaaatctatagcgagtgcgatgggcgcaactacgccgaattagcgaagaaatataatctgacgctgcaatggatttataagattgtgaaacgcgtacatgcggaaaagcaacagcgccgcagtaattcgtaa

SEQ ID NO: 6551 - DNA, 1437 bp, Escherichia coli
atgaatcgtgattctttttatccagccatcgcctgttttccgctgttactgatgctagccgggtgtgcgcctatgcatgaaacccgccaggcgttaagccagcaaacacccgcggcacaagttgacaccgcattacccacggcgctgaaaaatggttggccagacagccaatggtggctggagtatcacgataatcaactcacctcattaattaataacgcactacagaacgcaccggatatgcaggtggctgaacagcgcattcagctggctgaagcccaggcgaaggcagttgccactcaggatggtccacagctcgacttttctgcggatatggagcggcaaaaaatgtcggcagaagggttaatggggccgtttgctttgaacgatcctgccgcaggtacgaccggtccgtggtacaccaacgatacttttggcttaacggcgggctggcatctcgatatctggggaaagattcgggcggaggttactgctcgcctcggtacggttaaagcacgggcggcggaacgcgagcaaacccgccaattgctggctggcagcgtagcccgcctgtactgggagtggcaaacccaggcggcgttaaacacggtcttacagcaaatcgaaaaagagcagaacaccattatcgccaccgatcgccagctatatcagaacgggattacttctgcagttgaaggtgtggaaaccgatattaatgccagcaaaacccggcagcagctcaacgatgtcgcggggaaaatgaaaattattgaggcacggttaagtgcgctcactaaccaccagacaaagtcattgaagcttaaaccggtcgcgttgccgaaagtggcaagtcagcttcctgatgaactcgggtactccttactggcccggcgggcagatttgcaggcggcgcactggtacgttgagtcatcgttaagcactattgatgcggcaaaagcggcattttatcctgacatcaacctgatggcctttctgcaacaggatgcgttgcacttaagcgatctgttccgtcattccgcgcagcaaatgggcgttacggcaggcctgacgctacccattttcgatagtggtcgtcttaacgccaatctcgatatcgcaaaagccgaaagcaacttgtctatcgccagctacaacaaagcggtggttgaagcggtaaatgacgtggcgcgggcggccagccaggttcagacactggcggagaaaaaccagcatcaggcgcaaattgagcacgatgccttgcgtgtggtaggtcttgcgcaggcgcgctttaacgcgggcatcattgctggttcccgcgtcagcgaagccagaatccccgcgctgcgtgagcgggccaatggcctgttattgcaagggcagtggctggatgcctccattcaactcaccggtgcgctgggcgggggttacaaacgctga

SEQ ID NO: 6552 - DNA, 2481 bp, Escherichia coli
atgttgagaatgcccccacttgcatcagcaatcgtagcgttattgctcggcattgaagcttatgcagctgaagaaacctttgatacccattttatgataggtggaatgaaagaccagcaggttgcaaatattcgtcttgatgataatcaacccttgccggggcagtatgacatcgatatttatgtcaataagcaatggcgcgggaaatatgagattattgttaaagacaacccgcaagaaacatgtttatcaagggaaattatcaagcggttaggcattaataccgataactttgccagtggtaagcaatgtttaacatttgagcaacttgttcagggtgggagctatacctgggatatcggagtttttcgtctcgatttcagtgtcccgcaggcgtgggtggaagaactggaaagtggctatgttccaccggaaaactgggagcggggtattaatgcgttttatacctcttattatgtgagtcagtattacagcgactataaagcgtcgggtaatagcaagagtacatatgtacgttttaacagcgggttaaacttactggggtggcaactgcattctgatgccagtttcagtaaaacaaatagcaatccaggggggtggaaaagcaataccctgtatctggaacgtggatttgcccaacttctcggcacgcttcgcgtgggtgatatgtacacatcaagcgatatttttgattctgttcgcttcagcggtgtgcggttgtttcgtgatatgcagatgttgcctaactcgaaacagaattttacgccacgggtgcaggggattgctcagagtaacgcgctggtaactattgaacagaacggttttgtggtttatcagaaagaggttcctcctggcccgtttgcgattacagatttgcagttggccggtggtggagcagatcttgatgtcagcgtgaaagaggcggacggttcggtaaccacctatctggtgccttatgcagcagtgccgaatatgctgcaacccggcgtgtcgaaatatgattttgcggcaggtcgtagccatattgaaggggcgagcaaacaaagtgattttgttcaggcgggttatcagtatggttttaataacttattgacgctgtatggcggatcgatggtcgcgaataattattacgcgttcactttggggactggctggaatacacgcattggtgccatttccgtcgatgccacgaagtcgcatagtaaacaagacaacggcgatgtgtttgacgggcaaagttatcaaattgcctacaacaaatttgtgagccaaacgtcgacgcgttttggtctggcggcctggcgttattcgtcgcgtgattatcggacatttaatgatcacgtatgggcaaacaataaagataattatcgccgtgatgaaaacgatatctatgacattgccgattattaccagaacgattttggccgtaaaaatagcttctctgccaatatgagtcagtcattgccagaaggctggggttctgtgtccttaagtacgttatggcgagattactgggggcgtagcggcagcagtaaggattatcagttgagttattccaacaacctgcgaaggataagctataccctcgcggcaagccatgcttatgacgagaatcatcatgaagagaaacgttttaatatttttatatcgattccctttgattggggtgatgacgttacgacgcctcgtcggcaaatatatatgtctaactcaacgacgtttgatgatcagggggttgcctcaaataatacgggattatcaggaaccgttggaagccgggatcagtttaactatggggtcaacctgagttatcagtatcagggaaatgaaacgacagctggggcgaatttaacctggaacgcgccggttgcgacagtgaatggcagttatagtcagtcgagtgcttatcgacaggctggagccagtgtttcagggggcattgtcgcctggtcgggtggcgttaatctggcaaaccgtctttctgaaacgtttgctgtgatgaatgcgccaggaattaaagatgcttatgtcaatgggcaaaaatatcgcacaacaaaccgtaatggagtggtggtatacgacggaatgacaccttatcgggaaaattacctgatgttggatgtgtcacaaagcgatagcgaagcagaattacgtggcaaccggaaaattgccgccccttatcgcggcgcggttgtactggttaattttgataccgatcagcgcaagccatggtttataaaagcattaagagcggatgggcaaccattaacgtttggttatgaagtcaatgatatccatggtcataatattggtgttgtcggccagggaagccagttatttattcgcaccaatgaagtaccgccatcggttaatgtggcaattgataagcaacaagggctttcatgcacaatcaccttcggtaaagagattgatgaaagtaaaaattatatttgccagtaa

SEQ ID NO: 6553 - DNA, 1035 bp, Escherichia coli
atggaaattcgcataatgctatttatattaatgatgatggttatgcctgtgagctatgcagcatgttatagtgagttatctgttcagcacaatttggttgttcagggggattttgcacttactcaaacacaaatggcgacatatgagcataattttaatgattcgtcatgcgtgagtacaaatactatcacccctatgagcccgtcggatattattgttggactttataacgataccattaaattaaatttacattttgaatggaccaataaaaacaacatcacgttgtcaaatactcagaccagtttcaccagtggttattcggtaacggtgacacctgcggccagtaatgcaaaagtgaatgtttctgcggggggcggcggttcagtgatgattaatggtgttgcgacattatccagtgcttcatcatcgacacgcgggagtgctgcagtacaatttttactgtgtttattcggtggcaagtcatgggatgcatgtgtaaatagctacagaaatgcattggcacaaaatgcaggtgtctattcctttaatctgacattgtcatacaacccgataaccacaacctgcaaaccggacgatttattaattacgttagagagtattcccgtttcacaattaccagctacaggtaacaaagcaacaataaatagtaacaaaggggatattgttctgcgttgtaaaaacttattaggtcaacaaaatcaaacatcacggaaaatgcaggtgtatttatcaagttctgacttgttaaccaacagcaacacgatcctgaaaggtgcggaagataatggcgtaggatttattcttgaaagtaatggtacgccagtcacacttttaaatatcactaacagcagtaaaggatatacaaatttaaaagaaattgcggcaaagtcaaaacttacagatacaacggtttcaattccgataacggccagttactacgtttacgatacaaacaaagttaaatctggcgcactggaggcaaccgcattaatcaatgtgaaatacgactaa

SEQ ID NO: 6554 - DNA, 1308 bp, Escherichia coli
atgaggtcaagaactctcccatacacatttcagcgaaacggtaattactatctacaaatccggctttcggatggtcggatatacaaaaaatcactttttactgacagttatcgcgaagcatcggcgttgatgattggccttactccgcacattcctttcgttaaatcactcgctactccgttgccgcaatttaataagtttgtttcaaacttgatcgcttcgtcacgtaacgtaatgattccgttgccactccctcagcaattgaacaatatttctaaagaagttttgcagcttcaaccaccagccaaaccggaaaaggtgctaacacttgctgatgcgtgggctatgtacaaggaggaaagaggtcgaaattggacaaaatcgatctcaatggcaaatgagcgttatatggaggtattgcttgttgtcttgggaaaagaaacagacgtaacggcaatcaccaaacaagatattaagcgagtaatggaaactgtcgaaaacttaccaaagcgtgtagtgcaaccgtataggtcaatgactattcagcaactaatcgaatgtgatgatgtgctgccagaggatttagttggtgctgaggctgtacataagcaccttaaaatctacaaatcgttattcaaaacatttctgactgaaaacaaagatattctatctaagtctccgactgatggaatagtagcggcaccatctaaagctaggtttggtgcatacagtgcagcagaaatgaaaaaatttgtaggatgggcactaaagcagcctgatggatggcagaagtggatcactttgttgttggcgtacacaggagccagaagaggtgagattgctaaactggagaagtcgcagatcaaatttgatgaagatagccagcggcactatcttctgatcgcggaaagaaggctgggtaaaactgagaatgctacaagacaggtagtgattcatcccaaactgattgagtgggggtttctggattttgttaaccgccaatggaaagagaaaatcttttcggaagtctcaggtcgaaatatgtcaaagataggtaaagttctttcagatgttcgtgatcagcttgatattccttatcttgatgattatgggcagcggcgcttggtgcatagtttccggcatactatgatttctacttgtttagctggttgggtgagtaatttggcgcatctgcaacaggtggtaggtcatgaaaagagtggagtagggattacccagcgttatctgcacacattcccactttccaccgtttgttatgtgatcgatggtctttgttgggagacttag

SEQ ID NO: 6555 - DNA, 726 bp, Escherichia coli
atggttaaaaatttaggcaaaaaatacaagtatggtgatcaaccgataagagctattaccatacagataattgctaatcagtttggtggggctgcaacggctaagcaggtagatgattatcttagaaagctatttccatcttataaagataatacttggctcaatttaattgctaatacagttaattgtaagcggagctactggagtttcaacaaaactgcccgacgaactgatgatgtaactcatcggcatcataagtatgaccgattgttcaagcgtggaaatatttttgaaatctatcaaccatctgtgcacggtatttgggaattataccaggatttagaagggatgtggcgttatcgtcaagtaaaatcggttttcgaagaagctgttgggacggctgcaaaattatcttcagtggaacgaaagcaaattttagcgacagaaagtaaaatcccggaactaatcgaagtaacaacacgagtttataaacgaagcccatatgtagttgctgaagttcttttgagagcaaatggaaaatgtcaatattgtaagcgagatgctccttttctaaaggaagatggtactccatttctagaagttcatcatattgagtggctttcaaaggggggggaggactctgtggaaaatgctattgcattatgtcctaattgccatagacaagcccattatggcgatctgacattactacctgttaataaatag

SEQ ID NO: 6556 - DNA, 312 bp, Escherichia coli
atgacagaaacccagatctacgagaacattaagcaagccattagcagcgcaccacgaaatagccaaacgatggaaatgcacctccagatgatcaaatatgctgaccatcttaaaaaggttacggcaaaagagttttgtgaaggacttgattttgtaggtcaaaaaagcatcgcaaagatgtatgctacacctgacggaggggttgcagccacatacattgacaatggcagtataccgatatttgtattacgcccttctaatcccgatggagagatggctgtttacacattgagtatgtgttctgaagtatga

SEQ ID NO: 6557 - DNA, 966 bp, Escherichia coli
atgagcggcgctcgattacacacgctgctgcctgaattagccacgcgtcagccggtgatggtcgtcggcgcggcggtcattgatgtgatcgccgacgcttatgccctcccctggcgtgggtgtgatatcgaactgaaacagcagagcgttaacgttggcggctgtgcactgaatattgccgtggcattaaagcgcctcggcatcgaagcgggtaatgccttgccgctcggtcagggggtgtgggcggagattattcgcaaccggatggcaaaagaggacttaatcagcctgatcgataacgccgaaggtgataacggctggtgtctggcgctggttgagccggatggcgaacgcacttttatgtcattcagcggtgtggaaaatcagtggaatcgccagtggctggcgcgattaaccgttgcgcctggcagcctgctctatttttccggttatcaactggcctcgccctgcggcgaattgttagtggaatggctggaaaagctgcaagacgtgacgccgtttatcgattttggcccacgtattggcgatatcccggatgtattactggcgcggatcatggcctgtcgacctttagtgtcactcaatcgtcaggaggctgagattgccgccgaacgttttgctctatccgcagagataacaacactaggcaagcaatggcaggagaaatttgccgcgccgttgatcattcgtctcgataaagagggcgcatggtatttcagcaacgacgcttctggctgcattccggcatttccaacgcaagttgtagacaccattggggcgggcgacagtcatgccggcggcgtacttgccgggctggcctctggtctgccactggcggatgccgtattactgggcaatgcagtggcgtcgtgggttgtcgggcatcggggcggtgattgtgcgccaacgcgcgaggaactactcctcgcacacaaaaacgtatag

SEQ ID NO: 6558 - DNA, 297 bp, Escherichia coli
gtgcgtactataaaactcatgccaaaagccaatgaggatttagaaggcatctggtattacagctatcaccatttcggcgaaccacaagccgacagatatgtggaacatctttcagacgttctccagattctgagtaacaataatataggtacgcccagacctgaattaggcgaaggtatttttgttcttccttttgaacgccacgtaatttatttcctgcaatcgccagaggaaattatcgtcattcgtatccttaaccaaaaccaggacgcctccagacatttacactggagctaa

SEQ ID NO: 6559 - DNA, 252 bp, Escherichia coli
atggccagaacgatgacggttgatctcggcgatgagttgcgtgaatttatcgagtccttaattgaatccggcgactatcgcacccaaagcgaagtgatccgtgagtcgctgcgcttacttcgagaaaagcaagcagagtctcgcctgcaagcgttacgtgacatgctcgctgaagggttgagtagtggtgaagctcagccgtgggaaaaggacgcgtttttacggaaggtgaaagcagggataaggaaataa

SEQ ID NO: 6560 - DNA, 291 bp, Escherichia coli
atgaaaattgaaacctttgatagtgtgtgggatgcggtgagtgacacccctgaacaagcggaaaatatgcggatccgtgccgaacttgtaacgatcattaataactggattgaacaacaagggtttagccaggctcaggcagcgtctgctttaggggtcactcaacctcgcatatctgaacttgccagaggtaagatccagatctttagtatcgataaattgatcaccatgatggctcatgcaggattgcatattcaacgtattgaaattcaatatccacatgctgcttag

SEQ ID NO: 6561 - DNA, 339 bp, Escherichia coli
atgagaaaaaagctggcttttcttgataccagtcttgacgatttacgcgcatttccagaatcgtctcgacaggaaattggctatcaactcgacaggatccaacaagggttaaacccatacgactggaaacctttttcaactatcggccctggtgtgcgagagattcgtactcgcgatgctgatgggatctatcgcgtcatgtatatcgcaaaatttgaagaagcggtttacgtattgcattgttttcaaaagaaaacacagactaccagtcaatcggatattgatttagacaaacgacgctataaagaacttgttcaggagcggaaaaatgaaaattga

SEQ ID NO: 6562 - DNA, 723 bp, Escherichia coli
atgacgccaaccattgaacttatttgtggccatcgctccattcgccatttcactgatgaacccatttccgaagcgcagcgtgaggcgattattaacagcgcccgtgcgacgtccagttccagttttttgcagtgcagtagcattattcgcattaccgacaaagcgttacgtgatgaactggtgacgctgaccggcgggcaaaaacacgtagcgcaagcggcggagttctgggtgttctgtgccgactttaaccgccatttacagatctgtccggatgctcagctcggcctggcggaacaactgttgctcggtgtcgttgatacggcaatgatggcgcagaatgcgttaaccgcagcggaatcgctgggattgggcggggtatatatcggcggcctgcgcaataatattgaagcggtgacgaaactgctgaaattaccgcagcatgttctgccgctgtttgggctgtgccttggctggcctgcggataatccggatctcaagccgcgtttaccggcctccattttggtgcatgaaaacagctatcaaccgctggataaagacgcactggcgcagtatgacgaacaattagcggaatattacctcacccgtggcagcaataatcgccgggatacctggagcgatcatatccgccgaacaatcattaaagaaagccgcccatttattctggattatttgcacaaacagggttgggcgacgcgctaa

SEQ ID NO: 6563 - DNA, 387 bp, Escherichia coli
atgggtgtgtataaggcaagacgattcagccaaagcacgaaaaaacttggtattcacgataaagttctcatggctgccgctgaagaagtgatgcagggcatatgggaggctgatttaggtagcggtgtcatcaaaaaacgtttacccctccaacaaggaaagagtggtggagccagaacaattatcttttttaaatcagcaaatcatgtgtttttttatgatggttggtccaagagtggtctaagcagtaaaggaaccaaagaaatcgaagatgatgaactggcggcctacaaaaaaatggcaaatgcatttctggcctttagcaataagcaaatagaggatttgatcgaaactggctttttgattgaggtgaaaaatgagcgataa

SEQ ID NO: 6564 - DNA, 330 bp, Escherichia coli
atgagcgataaattacaaatgatgctggaagatgcaaaggaactgaatgcactgggcctgatgtctgatagtgaagttgatgccattgccgtcatggtcaaagctcgtgaagtcagcgcccgtatagccaaagtcaaatcaatgacgggtgaagagatcaaagccatccgcacccgatacggcatgtcacaatccgtgctggcacatacaatgggaatgtcaaaagaaagtgtctcgaaatgggaacgtaatgaaataaaaccgagcggcccggcattacgtattttgaatacattggcaataaaagggccggaagtttttgcaaagtaa

SEQ ID NO: 6565 - DNA, 1329 bp, Escherichia coli
atgtccagaatcaataaattcgtacttacagtcagtctgctgatttttatcatgatttcagcagttgcctgcgggatctacactcaaatggtaaaggaacgggtgtatggcctgaaacagtccgttattgatactgcttttgcggtggcaaatattgctgaatatcggcgtagtgtggcaattgatctgatcaacacgctaaatcctacggaggaacagctgttggttggcttacgcacagcttacgccgactcgctttcaccctcttatttgtacgatgtcggtccttatctgatttccagtgacgaatgtattcaggtaaaggagttcgagaaaaattattgtgcagatattatgcaggttgttaagtatcgacatgtcaaaaatacagggtttatctcttttgatggtaaaaccttcgtctattacctctatccggtaactcacaatcgtagtctgatatttttgcttggtctggaacgtttttctttactgtcaaaatcgctggcgatggatagcgagaacctgatgttctccctgttcaagaacggtaaatcggtgaccggtgatgaatataacgctaaaaacgccatcttcaccgtttcggaagcaatggagcacttcgcctatttgccgaccggattgtacgtatttgcttataaaaaagacgtttattttcaggtatgtacattgattattttctttgccgcattggtggcagtgatatcgggtgccagttgcctctatctggtacgcagagtgattaatcgtggtattgtggagaaagaagccattattaataaccattttgaacgcgtactggatggcgggcttttcttttcggctgccgatgtcaaaaaactctacagtatgtataactcggcattcctggacgacctgaccaaagctatgggcagaaaatcctttgacgaagatttaaaagcgctgccggaaaaaggcggttatttgtgcctgtttgacgtcgataaattcaaaaacattaacgacaccttcggtcatttgctgggcgatgaagtgttgatgaaagtggtgaaaatccttaaatcacagatcccggtagataaaggtaaagtctaccgcttcggtggtgacgaatttgcggtgatttatactggcggcacgctggaagagttgctatcgattctaaaagaaatcgttcatttccaggtgggaagcattaatttaagtaccagtatcggtgtagcgcattcaaatgaatgtgctaccgtcgaacgcttgaaaatgctggcggatgagcggctgtataagagtaagaaaaacggcagggcgcagattagctggcagtag

SEQ ID NO: 6566 - DNA, 1539 bp, Escherichia coli
atggcaagagctgtacaccgtagtgggttagtggcgctgggcattgcgacagcgttgatggcatcttgtgcattcgctgccaaagatgtggtggtggcggtaggatcgaacttcaccacgctcgatccatatgacgcgaatgacacgttatctcaggccgtagcgaaatcgttttaccaggggctgttcggtctcgataaagagatgaaactgaaaaacgtgctggcggagagttacaccgtttccgatgacggccttacttacaccgtgaaattgcgggaaggcattaaattccaggatggcaccgatttcaacgcagcggcggtaaaagcgaatctggaccgggccagcgatccggcgaatcatcttaaacgctacaacctgtataagaatattgccaaaacggaagcgatcgatccgacaacggtaaagattaccctcaaacagccgttctcagcgtttattaatattcttgcccatccggcgaccgcgatgatttcaccggcagcgctggaaaaatatggcaaggagattggttttcatccggtgggaaccgggccgtatgaactggatacctggaatcagaccgattttgtgaaggtgaaaaaattcgcgggttactggcagccaggattgcccaaactggacagcataacctggcgtccggtggcggataacaacacccgcgcggcaatgctgcaaaccggtgaagcgcagtttgctttccccattccctacgagcaggccgcactgctggagaaaaacaaaaatatcgagttgatggccagtccgtcaattatgcagcgttatatcagtatgaacgtgacgcaaaagccgttcgataacccgaaggtccgtgaggcgctgaattacgccattaaccgcccggcgctggtgaaagtggccttcgcgggttatgcaacgccagctactggtgtggtaccgccgagtatcgcctacgcgcaaagttataaaccgtggccttacgatccggcgaaagcgcgcgaattactgaaagaggcgggatatcccaacggtttcagtaccacgctgtggtcgtcacataaccacagcactgcgcagaaagtgctgcaatttacccagcagcagttagcgcaggtcgggattaaagcccaggtgactgcgatggatgccggacagcgggcggcagaagtcgaaggtaaagggcaaaaagagagcggcgtgcggatgttctacactggctggtcggcttcaaccggcgaagcagactgggctctatcgccgctgtttgcctcgcagaactggccaccgacgctgtttaataccgcgttttacagcaataaacaggtggatgacttcctggctcaggcattgaaaactaatgatccggcggaaaagacccgtttatataaggcggcgcaggatatcatctggcaagagtcgccgtggatcccgctggtggtagaaaaactggtgtcggcacacagtaaaaacctgaccggtttttggatcatgccagacaccggcttcagctttgaagacgcggatttgcaataa

SEQ ID NO: 6567 - DNA, 1266 bp, Escherichia coli
atggcttctacttttaccagcgacacattgcctgccgatcacaaagcagctatccgtcagatgaagcacgcgctgcgggcgcagcttggcgacgtccagcagatctttaatcagctaagcgatgacattgccacgcgagtggctgaaatcaacgcactcaaagcacagggcgatgcagtctggccggtgctgtcttatgccgatatcaaagcaggtcatgttactgcagagcaacgcgaacagattaaacgtcgcggttgtgcggtgataaaaggccatttcccccgcgaacaagcgctaggctgggatcagtcgatgctggactatctggaccgcaaccgctttgatgaggtctacaaaggccccggcgataatttcttcgggacgctcagcgcttcacgtcccgagatttaccccatctactggtcgcaggcgcaaatgcaggcccgccagagtgaagaaatggcgaatgcgcagtcgtttctcaatcgtctgtggacatttgaaagtgatggaaagcaatggtttaacccggatgtgagcgtcatctaccctgaccgtatccgccgccgtccgcccggaacggcctccaaaggtctcggagcgcataccgactccggggcactggaacgctggctgcttccagcgtatcagcgcgttttcgccaacgtctttaatggcaatctggcgcaatatgatccctggcatgcggcacatcgtacagaagttgaagagtacacggtggacaacaccaccaaatgttccgtgtttcggacattccagggctggacagcgctctctgatatgctgcctggtcagggactgctgcacgtcgtgcccattcctgaagccatggcgtacgtgctgttacgtccgctgcttgatgatgtgccggaggatgaactgtgcggcgtagcgcccggaagagtgttgccggtatcagagcaatggcatccactgttgattgaggcattaaccagcattccacaactcgaagccggagactccgtctggtggcactgcgacgtcatccattccgttgcccccgttgaaaatcaacagggttggggcaacgtgatgtacattcctgcggcaccgatgtgcgagaaaaatcttgcctacgcgcacaaggtgaaggccgcactggaaaaaggcacatcgccgggcgacttcccgcgcgaggactatgaaacaaactgggaaggacgctttacgcttgccgacctcaacattcacggtaagcgagcgctgggaatcgacagctga

SEQ ID NO: 6568 - DNA, 1104 bp, Escherichia coli
atggacaagaagctgaaaatcgccgatatcgccgcacgtaccggattatcgccgagtacggtttcgcgggtgctggctggcaaagcgaataccagtgcacgcgctcgcgaacaggtgctggcctgcgcgcgtgagttgggcgtgatggatggcatggcagcaggtcgtatgttgctgaacaacctgattatttttgcgccgcaacgcgcgtttgaccaacgatctgatatcttttattaccgtgtgatccagagcatcagcaaagcgttatcgccgcatgaagtgcggctgcgttactgcgcgctggaggagtttgacagcgatcccgcgctatttctctcgcggatgaatgaagcagatacgcaggcggcgatcctgctggggattgacgatccgcacatccatgatctggccgccgatctcgctaagccttgcgtgctgatcaactgccgtgatgaacgaatgcgcctcccgacgattgcgccggaccatcggttaattggtgcgttcgccgcccgctatctgtttgaaatgggtcaccgggaggtgatgaacgttatgtgcctgcgccgctacactatggagcagcggtttgcagggattaaagaatcatggcgtcagcataatctggcctttcaccatgaccgtcatttgctgaatatcagcagttttagcgctaaagaagcggaagaaaaggtcggagcgtggctggatgccgccaatggcaagacgttgccgacggcgtttctggtcggcggggattttatggcggcgggaacggtaaatgcgctacatcgtcgtggtctgcgcgtaccacaggatgtctcggtgatgagtatcgacggctttaatcttgcggcaatcgaggatgttcccctgacggctgtgcatgtgccacgcgatgagctaggcaatgaagcggtgcaaatgttgcaacagcggctgattcgcccggatgctccggtgggctcgctgctgctgcacggacgattagcggtgcgggagtcggtgcggcgggttcgcccaggaaaagggaacaccgccgtggaacgggaagggctgtacgacaatcagctgtcgattcccagcgctcgcttaccgtga

SEQ ID NO: 6569 - DNA, 1041 bp, Escherichia coli
atgagtcagggtatcaataacgatatgactgccagtaaaccgcgccatattgtcaaaaatctgcgttggtggatgctggtcctttttttgctcggtgttactgtcaactacatcacacgtaattcgctgggtattctcgcccccgagttgaaaagcagcctggggattaccaccgaacaatattcctggattgtaggtgctttccaactcgcctataccctatttcaaccgttatgcgggtggctgattgacgtcattggcctcaaactgggctttatgatctgcgcggggctgtgggcgctggcctgtctgatgcatgcgggggcgggaaactgggtacatctggcgctgttgcgcttctttatgggcggtgcggaagccgcggccaccccggcaaacgccaaaactatcggtgaatggtttccaaaatcagaacgcccgatcgccgcaggctgggcaggcgtcggtttttccatcggtgccatgctggccccaccgattatctattttgcccacgcttcattcggctggcagggcgcatttatgttcactggcatcctggcgatgctgtgggtggtgctgtggtgggcgttctatcacaacccggataagcatcctaacctcagcaaagccgagctggactttatccgccaggataacgaagctcccccggtcaagttaccttttctgaccgcactgaaaaccgtgggcaaaaataaacgcttttacggtatcgctatcccagcctttatggcagaaccggcgtgggcggtgatgagtttctgggttccgctatacctgtccaaatcctatggcatggacctgaagcagatcgcactcttcgcctggttgccgttcctcgccgctgatcttggcagtattgccagcggctatctgaccaaactttacacccgcctgtttgggctgagtcgtgtgaactccgttgtcgcatcatcggtcagtggcgcattcctgatggtttcgctggcggtgatggcctttatcaataaccctatatcgccatcgtccttatctccatag

SEQ ID NO: 6570 - DNA, 231 bp, Escherichia coli
atgcttagcgcattagtagtggaatccttcgacaaaggtcagatggccactgttaacggcatgcgcggttctgccgcgtggatcgcaagtttcctgttctccctgattatcggggttaccgctgacaaaatcggctttaaccccctgtttatcgccatgggcttctttgacctgattggcgctttcttcctggtcacctttattgctgaacgtcgcgcaaaacgcgcctga

SEQ ID NO: 6571 - DNA, 2364 bp, Escherichia coli
atgaaaacgctgaaaaactggaccctgcacaaacagtctgcccaccacgttgaactgctggtcgatggccagcatatcctgtgcctgtacgtgctggaagaaaatctgttccgcgtgctgttaaaacgcaaaggcgagctggcgctggatcgcacctggagcattgctccggcgcaggatgtgccatgggaagggcgcagccgcgaagatctcagcggctttagcctgcccgcgtggaccttgaaccagcacgacaacaccgtggttatcgccaccgagtcactgcgtgccaccgttcaccagccgctgtggctggagtggcactatcgtaacaacgaaggcgaatggctgccgttagtgaatgaccgaccgaccagcgcttatctgctgaatgcccacggtgacggtgtggcgcactatcagagccgtcgtaaagacgaacgcttttatggcctcggagataaagccggcgacctgcaacgcaacggtaaacgttacgagatgcgtaacctcgacgcgatgggctacaacgccgtgagtactgacccgctgtacaaacacattccattcaccatcacccgccgcgatgacgttagcttcggcctgttttatgacaacctcagcagctgctggctggatctgggaaacgagatcgacaactaccacaccgcctatcgccgctggcgggcggaagcgggtgatatcgactactacctgtttaccggcgaacgcgtacttgatatcaccaaagcctttgtacgcctgaccggaaaaactctgttcgggccgaaatggagcctgggctacagcggttcaactatgcactacaccgatgccccggacgcacaaaatcagttgatgaactttatccgcctgtgtgaagaacatgcgattccctgcgattcgttccagctctcttccggttatacctcaattaacggcaagcgctatgtgttcaactggaattacgacaaagtgccgcagccgaaagtgatgagccaggcatttcacgatgccggtatgcacctggctgccaatatcaagccgtgcctgttgcaggatcacccacgctataacgaagtggcagaaagaggactgttcatccgtgattcagaaacagatgaaccagaacgttccagcttctgggatgacgaaggttctaaccttgactttactaatccgcagaccatccagtggtggcaggaaggcgtgaccacacagcttctggagatgggtatcgactccacctggaacgacaacaatgaattcgaagtgtgggacggtgaagcacgctgtcacggctttggtcagacgatcgcgatcaaacatattcgcccggtgatgccactgctgatgatgcgagcctcgatggaagcccagcaacgtttcgctccggaaaaacgtccgtacttgatctcccgctccggctgcgcgggaatgcagcgctatgtgcagacctggagcggcgataaccgcactagctgggacactctgcgctacaacacccgcatgggtctggggatgagcctctccgggctgtataacctcggtcacgacgtcggcggtttctccggtgataagccggacccggaactgtttgtgcgctgggtacaaaacggcgtgatgcatccgcgctttacgattcactcgtggaacgatgaccataccgtaaacgaaccgtggatgtatccgggcgtcactccggcgatccgcagcgctattgagttgcgctatcgcctgctgccctacttttataccctgatgtggcaggcatacgccgatgatgaaccaatgctacgtccgactttccttgaccacgagcacgacgttcagacttttgaagagtgtgatgacttcctgcttggtcgcgatattttggttgccagcgtcgtagagcaaggcgagcgccagcgccgtgtatggctgccggataacgaaactggctggtacgatttctacaacggcgaatggttcagtggcggtcagtggatcaccctcgacgcaccgctggagaaactgccgctgatggtgcgtgccggggctggtctaccgctcagcaaacgcatcacctatgtgagcgcagaacaagacgatacccgcgaactgaaactgttcccgctgaaaggtgtgggcacaacgtccggcctgctgtttgaagacgatggcgaaagctggggctaccaaactggtaatgcgctttgggtggaatgggaaatggtttgcgatggggcgaccatcaacctgaaagtcaacgcgcgcggggattatcgtcctgcatggagtgtactgaaagtgtcattaccagtggaagaaaaacgcacgctgctggtcaatggtgttgaagggagtgaatggatacgttaa

SEQ ID NO: 6572 - DNA, 732 bp, Escherichia coli
atgaatcaaccaatacacaatgcttactggttatcccgttttgaaagtattctcaacagtgccctggcgcaacaccgtgccgtctcgttaatccgggtggatttacgtttccctgagtatatgcctgccaccatcatggataccgatttagattcagcggtgatttctcgtttttttgcatccctgaaagcaaaaattcaggcttaccagcgacataaacgacgtgccaacaagcgtgtgcgtgcaaccactctgcgttatttctggtgtcgggagtttggcaaggaaaaaggcaggaaacattatcacgtgatattactgctcaacaaagatacctggtgctcgcaaggggatttcaccgttccttcttcgctggcgacgctgatccaactggcatggtgcagtgctctgcatctcgagccctggcagggtaatggactggttcatttttccaggcggacgcctttccgtaaaccgacatcatctgatgctcgcccttcttccgatgatacgcctttgtcgggtggatgttctgaaaccaggaaggcttcagacaaaaagtctggtggatccgctgtgctctgggtcaagcgtggtgatgtggaagcgatgcagaaagcccggaacagagccagttatctcgtgaaatatgagacgaagcagcatgacggttccgggcaacgtaattatggttgcagtcgtggggcagggcgtctactggatggcaggtga

SEQ ID NO: 6573 - DNA, 576 bp, Escherichia coli
atgaatgctatcccttatttcgactatagcctggcccccttctggccatcttatcagaacaaagtcgtcggcgtccttgagcgtgcgctgcgtgagcagtccggctcacggatacggcggatcctgcttcgtctgccgtgtgaatatgacaataccttcaacagcagaacgacctggtttggtatggattttatcgaaaccgtcagtgtgctgatgaatgcaacccccggacgtgatctctgctggctcctgacccgtcatcctgaaaaaccggaataccacgtggtgctgtgcgtcagacaggagtatttcgatggccctgaattggaccggttgatactggatgcctggagtaacgtactgggcttcgcgtcaccgggtgaagcaaagcagtatcagaagcagatcacccgggatgtggtgctggacagtcgttcaccggactgtgaaaacatcctcaaagagttgatatgggcgttcagtgatttcgcccgcgatcgtcgtggtgtgtgcgatccggaagcccgttgcctcgccggtaatcccggctatcccggatctgcaggaccgttctga

SEQ ID NO: 6574 - DNA, 234 bp, Escherichia coli
atgttgaccacaacaagccacgacagcgtgttactgcgtgccgacgatcccctgatcgacatgaactacatcaccagtttcaccggtatgaccgataaatggttttacaagctgatcagtgaaggtcatttccctaaacccatcaaactggggcgcagcagccgctggtacaaaagtgaagtggagcagtggatgcagcagcgaattgaggaatcacgaggagcagcagcatga

SEQ ID NO: 6575 - DNA, 291 bp, Escherichia coli
atgattgatgtcttaggaccggagaaacgcagacggcgtactacacaggaaaagatcgctattgttcagcagagctttgaaccgggaatgacggtctcccttgttgcccggcaacacggtgtggcagccagccagttatttctctggcgcaagcaataccaggagggaagtcttactgctgtggccgcaggagaacaggtcgttcctgcctctgaacttgctgctgccatgaagcagattaaagaactccagcgcctgctgaacaaaacgccggatgtctcccggctctga

SEQ ID NO: 6576 - DNA, 1065 bp, Escherichia coli
atgatccaggcccgaaatcagcttcttgctgaagcggcgaaaagtccagcgttaaacatggttcgtcctaacggcatgaacgatgagcctcagttccagattctgattgatgacgagaaagttcaggcgcttaaactgagcatgagcgacgtcgacaacataatgtcagcagcctggggttcgatgtatgtaaatgattttaacgatcgtggacgggtgaaaaaagtctatattcagggcgaacccggctcacgtatatcaccgcaggattttgataaatggtatgtccgtaacagtgatggcgacatggtttcctttgcctcttttgcaacaggcaaatggatttatgtctcaccaaaactggagcaatataatggtatttctgctgtcgaaatcctgggggaaccggcaccaggatacagttccggggatgcaatgaaagcaattgaggatattgcggcaagacttcccgaaggtttccatatttcctggacaggtttgtcttttgaggaacgactttcaggttctcaggctcctgcactatatgcactttcactgttgatcgtctttctgtgtctggctgcactgtatgaaagctggagcattcctttctcggtcatgctggttgttccgcttggtgtcctgggggctgtctgtgctactttgttgcgcggccttggtaacgatgtctttttccaggtcggtttattaacaacaatagggctgtctgcgaaaaatgccatacttatcgtggagtttgctcgtgaattgcatgagaaagaaggactaagcattaaagaggctgctgttgaagcggcgagagtgaggttaagaccgataattatgacttcgctggcatttgtaatgggggttatcccactggctgtctcgactggagcaagttccggaagtaaacatgccattggtactggtgtggttggagggatgatcactgctacgatactggcaatcttttatattcctctcttctatatgttaattgccgggttcttcagccgcagaaataagaaatcatcggataagactgaagctgagcaatcataa

SEQ ID NO: 6577 - DNA, 651 bp, Escherichia coli
gtggtgcggcacacaaaatttgcagcggaagaaacccgcaaacaaatcctggatgcggcagagttctgcttttgtgagacgggcttttcgaagacgacactggagatgattgcggcgcgcgcaggttgtactcggggggccatatactggtatttcaacgaaaaaaaagatcttctgcgacaagtcatcgagcgggtaccactatcattatttgatgagcttacagccatcaaaaatgggagagtttctgaaccggttaaagcgatgtatcgttgcttatcacgtagcctgattaaattacaatataatgtacacttacggaatgtaatttatattgtgtttttttgtgaagaatgtccggatgatataagaataaatttcttacaaaaaatggtggatgtcaataattttgtgaaattactatgttatattttcgaaaaaggtaagttatatagagaaatatgttcggaaattcgtagtgagactctggcgttcctgcttttttctttgtttacgggggtggtgcgaagttgcattctgcaacctgataataaatcccttttcagagagggttgcatagtactggagttgacccaatcaaccttcacaggcatcgataaaaatgaacgctactataaaaaacagcgctga

SEQ ID NO: 6578 - DNA, 345 bp, Escherichia coli
atgaacgctactataaaaaacagcgctgatatcaatgagcttgctaaatggattgatgaaaatcttgaggtagaactctcaataaatattgaggaaaaaaagctggatattcaaaatggtatttacagagattgtttaaacatatcattggtatttctattggtaggtatattaataaatgcagcagaagaactacgttctactactgaatcggtcacgactatcacttttaaataccagtttgattttcagcagacatttacaagggcatttactcgccgctttggtatagctcctattgcataccgaaaactcgctaaggaagaagtgagatggaatagttag

SEQ ID NO: 6579 - DNA, 546 bp, Escherichia coli
atgtctgggaaaagtttaggcttaatcgaaaccgtcgggatgtctgcggcggtagaagccgccgatgccgcaatgaaatccgctaacgttagtctggtaggctatgaattgacgaaaggcggcgggatggtgaccgtgaagctggaaggggaagtgggcgcaattaacgcggcggtagcggcagccatcagcgcggcaagccgggttggcgaggtgtatgcccataaggtgatcgcccgcaccgcgcagcatatcgagcagattattcactctaaagtgaccgccggcgtcgcagaacctcaacctgaagtgcctgctgcacaaccgacactgcaggctgaaaacgcgccttcacagacattcccggtggttaaccttgatacgtcaatcagcgcatcctgtatggatgtcactgatgaaacgctgaagtccgtggagcagcatcaaccggttaaaccctcaatagaaaacactaaacctacaaaatctgatgtaccgcaggaggcagcaaagaaaggtcctcgttccagcggcaagaaaaaataa

SEQ ID NO: 6580 - DNA, 1152 bp, Escherichia coli
ttgaacgattacctgtttacctccgaatccgttgccgaagggcatcccgataaaatggcggaccaaatttctgatgccattttggatgcgatactcctacaggacccgtggggtaaggttgcctgtgaatgcttggtgaaaactggtgccactattgttgccggagaaatatctacccatgccgccgtggatattgagaagattgtccgcaacaccataaaagagattggttacgaccattcgcgattggggtttgatggcaatacctgctgtgtattaaatatccttggcaaacagtccgccaatattgctgacggcattcgcggccactcgatggaagaactgggggcgggcgatcagggcatcaccttcggttacgcctgtgatgaaacgtcggaactgatgcccgccacgctggtatacgcccatcgtctgatggagcgccaggcgcagttgcgtaaatcccaacggttaccatttttactccctgatgccaaaagccaggttaccctgcgctatcaggataatcgtgttcattcagtagataccgttgtggtgtctacccaacacagccctgacgtttctctggacgcgctacgggaagcggtcatcgaagaaattgttaaacctgtgatgccttcgcactggctcacgccacaaacccgctttctggtgaaccctgcaggcagttttgtgattggcgggccggtgggtgactgcgggctaacggggcgtaaaattattgttgatacctatggcggcgcggcttgccatggcggcggcgcgttttcaggcaaagatccgtcgaaagtcgatcgttccgccgcctacgctgctcgctatgtggcgaaaaacatcgtcgccgctgggcttgcctcacgctgtgaagtccagttgggatgggccatcggcctgccccgccctgtttccgtcaggattaacaccttcggtacacaaacagtgtcatctgaagcgttgctgagaggcgttaacagccatttcgatcttagcgtgttcggcatcattactacgcttgatctgctggtcccccgctatcgtaaaacagcctgctatggtcactttggtcgcgacagctttccgtgggaagttacggacaaagcggcgctattatacgaagacgttggacgttaa

SEQ ID NO: 6581 - DNA, 1056 bp, Escherichia coli
atgtttaccattgttatcgttgaagatgagcccatcgaattagaatccctgcggcagattatctcccagtgtgtggaaaacgctgcgatccatgaagcctcaaccggtaaaaaagcgattcacttaattgaccaactgagtcaaatcgatatgatcttagtggacattaatattccgttgccgaacggtaaacaggtgattgaatatctgaagaaaaaaaacagcgatactaaaatcatcgtaatcacggccaatgatgactttgatatagtacgcagcatgtacaaccttaaagtggatgattatctgctcaaaccagtgaaaaaatgtatcttgaccgacaccatcaaaaaaaccctagcattcgacgaaggagaaaatgaaaaatcccgcgccctaaaacagaaagtgttcgccatgatagacgattgcgattacacccagtggcacaactttatttttgacacgatcaacggtgcctgtccggtggatatgatagaagaggataagcgcaaagacgtgatcgattttctggaaatagttagccagtatatgaccgccaaaggggaaaagttaatgccgactaaccgtaaagtcgccgcgctgatcaaagacatcaaccagtatggcatgatggaaagccgctatttccgcatcatgatcagcctgctgaccattagcgaagagctgtttgattacgcattaaaaggctatacaggcaatatcgattttatcgaacgagcgaaattccatattgagaaaaatattctcagaaacttgacgctcgatgacgtggcagcaaaatcgtttgtcagtgcctgctatttgagccgtacctttaagaaaattaccgggttcgggttttcgaactatattgccacgcgtaaaattactatcgccaaatcgttgttgcggttcagtgacttacaagtaaataccattgcgctggaactggcataccaggattcaaactatttttgccgcatcttcaaaaaagatactggcatgaccccctctgattatcgaaaagtcgtgtccccgggaattacacggtga

SEQ ID NO: 6582 - DNA, 1230 bp, Escherichia coli
atgaagaataaatacaaattaaatgagtttttggatgtaaaacgccttcagaccctgcaggacaacttttcaaaatcaatgatgatcgcgctcgtggttgtggatgagaatggtatcccggtcactaagcccagcggtttttcagacttctgcatgcgttcgcgtctcaacccgacactggcgcaccactgttatgaaagcgacaacgctggtggccgtgccgcgatgcacgctcgcaaaccggtggtttatcgctgccactgcggttttgtcgaattcgctgtcccaatcatgattaacgatcattatctcggtgcttttatttccggtcaggtaaaagtcgaagaagagaaagaacagagcatttcctatattctgaataataatgacgtctggaaagataatccttggttaattaatttgcaccagaatacacgtcgcatgccgtatgagcgttttgagtctactgcctcgacgttactacacgtatcgtcttatctggtcgaacaagcgcacaccaataatatccaacgcgaacttcgtaaaaaggatcttgcactggctaatgagttaagaaaacgtgtagagatagaacgctcactacatgaagctgaatttaaagcgctctcttatcagataaatccgcactttttatttaacgtattaaataccattggccggttagcttttcttgaagatgcgcagcgtaccgaaacaatggtgcacgatttctctgacatgatgcgctatttgttacgtaaaaatagtcacggcctgattactctgcgtaatgaaataaattacgtcaacaactatatgtcgatccaaaaagtgcgtatgagagaccgtttcgattacctgtgcgatatcccggaaaaatatctggatgtagtctgcccgtttttgatcctgcaaccgctggtggaaaacttctttaactacgtagtggagccaagggatagcaatagtcatctgctgatccgtgccacggacgatggcctgaacgtgattattgaagtcactgacaatggcgacggcatcgcaccagataccattaatcgcattttatcaggcgaccaaaaattgcaaaaaggcagtattggcattaacaacataaaaaatagattgaagttgttatttggcgagagctatggcttggaaataatgagccctaataaacccaggatgggtacaaccattaaacttcggttcccaatgcaggaagcctga

SEQ ID NO: 6583 - DNA, 189 bp, Escherichia coli
atgtggggctttctgacagactgcctcgtcattccattcgtatcgccagtaactggcgtttgtattgtggcagttctggtatacgtttccctgtgtatctgcactggttcagcaaggtttgaaaaggagtatcccttgcaaataaccgaagcattactttcagagccggagctgtttttgttgctgtga

SEQ ID NO: 6584 - DNA, 483 bp, Escherichia coli
atgctgcagggcggcccactgtcgccgttactgtcgaacatcctgctggatgaactggataaagaactggagcgtcgtggacacagcttctgccgctacgcagacgactgcaacatctacgtaagcagccggaaagcgggcgaccatctgctgaagaacatcagggcgttcgtggagaacaaactgaaggtgaatgagaagaagagcgcggtggcgcgcccgtgggatcggaagttcctcgggtacagtgtgacatggcacaaacaggcgaagctgaagatagccctgacgagcgtgaacaggctgaaggagaaagtccacagtctgacgacgggaaaccggagcaaatcagtgaaagcgacaatcaatgctctgacaccagtgctgtgtggatggataagctacttcaggctgacggaagtcagaggagtgctggaggagctggatggctggatcaaacggaaactgcgttgcttgttgtag

SEQ ID NO: 6585 - DNA, 540 bp, Escherichia coli
atgatgattaatgaagcacaagcgcaggcaactgcgaccagcggcagaggagacggacagtatccgtcagggctgcatgatggcgctgaaatcagcacggcggcgggtgggcaaacgaaagcggaagtgccgctgacgatggaagcggtgataacgagagaaaacctgatgctggcttatcagcgcgtggtggaaaacaaaggcacggcgggggtggataacctcagcgtggcggagttgaaaccgtggctgaagaagaactggcgcagcgtcaggcaggcattgattgacggaaactaccagccgcgggcaatacgccggatggatatcccgaagccggatggcggcgtgagaaccttaggcatcccgacggtggtggacaggcttatccagcaggcggtgcaacaggcacagcgttacatacggggtggcaaacggtgggtggtggatatggatctggagaagttcttcgaccgggtggatcacagactcctgatgacgcgtctggccagaacgataaaggacaggcgggtgctgtga

SEQ ID NO: 6586 - DNA, 906 bp, Escherichia coli
atgaatagcttagatattgtagttgccttcggcggcggcatatttggtgcggctgttggcgcgctggcggcgtttgaattcgttgggcttctggttatcgccatgacggtagtgcaaattattaccggagcatcatcggactttattacttttccgtttggactgtttggcccgcacaccggcggctttgccgctggggttgcggcgacggcgtatgcagcgaagaaaggcaagctgggttccgggcgtgatatcactgccgggttgagcggtctggcggcttacgatgtgctgctggtaggcggggtttttggggcggttggttacatcatcgcctgggggttgaaccagattccggccttcccgtccggcaatgcttggaccgataccgtggcactaaccgtggtgatttctggcgtggtctcgcgtctggttttcggtaaaactggcctgtttggaaaaccggagcagggaattcgtcactgctatccgccgcaggataagtgctggataccttaccatagccgcattccgcagctttccgtgctgggcttgggtattggcttgatggcaggctttttaggcctgaagtttggcggcaacggcgcgctgctggcgtttggtatttccgcgttctcactgattttcctgcatttcaatactcaggtaccggtgtcacatcatatttcgctgcctgccgcgttggtagcggtgccatcaggtagcctgatttgggctgctatcgttggcataatttgcgcgatattgggtgaactgatgtcgcgtatcttcctgatccacggcgatacacatattgacccgccggcgatggtcatcaccattatgaccacgatgattaatctgttggcgaccattggattatttaccttggttcccctgttttaa

SEQ ID NO: 6587 - DNA, 918 bp, Escherichia coli
atgaataaagttgagtacgaaaccgaaggcgtcatatttaatattcaacgctattctttgcatgatggtccaggcattcgaaccattcctttttttaaaggctgcccgctgtcctgcaaatggtgtagtaatcctgaatcacaacgtcacagcccagagttattatttaaaaagaatgattgcatccgctgtgggaaatgtattgatgcttgcccacaacaggctctttccactactaatgcctggtttatcaatcgcgaccgctgtattcagtgtgggaaatgtactgagatttgccctacccgtgcgctggaaatgaagggcaagcgtatgtcggtaacggcagtgatgcgcgaactggaaaaagaagagaatttataccggcgttcaggcggcgggattaccctgtccggtggtgaaccgctggcgcagccggaatttgcccgcgagctgcttaaagcctgtaaagccaaaggctggcacaccgctattgaaacaagcggcttcaccaccaaagcggtgattgatgaggtatttccctatgtcgatcttgctctgaccgatattaaagccatcgatccggaaatccatgagcgcaacaccggcgtgaataacagagtgattctggagaatctgctgcgcatctcctttttaaccaaagtggttgtgcgtattcctgtgatcccaggagtgaatgacaattcgcaggaaatccataatattgcggagttcgcccgcctgatgcagaacgtcgataccattcacttattgccttatcacagcttcggtgaaaataaatataatctgcttggtcgccagtatccgatgggcgatacaaaaagtatcgaagaagcccaaatggcagagttaaaagcaatggttgaatccttaggttttaactgccatatcggcggttaa

SEQ ID NO: 6588 - DNA, 2553 bp, Escherichia coli
atgttagagaaaggcttttctaatccgacagaccgtgttgtaagactgagaaatatgatcctgacggcgaagccgtatgtggaatcagaacgcgcggtgttagcaaccgaagcatataaagaaacagaacaactgcccgcgattatgcgtcgtgctaaagtggtggaaaaaatctttaaccaattaccggtaacaattcgcccagacgaattaatcgttggagcggtaactattaatcctcgctcaactgaaatctgccctgagttctcctacgactgggtggaaaaagagtttgagactatggaacaccgtattgccgacccgtttgttatcccgaaaaagactgctcaggagcttcatgaagcatttaaatactggccgggtaaaactaccagtgctctggcggcatcttacatgtcagaaggcactaaagagagtatggcgagcggtgtattcactgttggtaactacttcttcgggggcgtcggtcatgtcagtgttgactacggtaaagtgctgaaaattggtttccgtggtatcattaatgaagttagccgtgccttggaatcattagatcgcactgaaccaggatatataaagaaagaacagttctataatgcggtgctgatcagttataacgcagcgatccgtttcgcccatcgttacgctgaagaagcatcccgtctggcgcagcaggagagcaatccgacccgtaaacgcgaactggagcagattgctcaaaactgtactcgcgtgccggaatacggtgctaccacattctgggaagcatgccagacattctggtttattcagagcatgttacagattgaatccagcggtcattctatctccccggggcgtttcgaccagtatatgtacccgtatctggagtcggacaaatctatctcgcgtgaattcgcgcaggaactggtggattgctgctggatcaagcttaacgacattaacaaaacgcgtgacgaagtctctgcccaggcgtttgccggttacgcagtgttccagaacctgtgctgtggcggccagacagaagacggtcgcgacgcaactaacgatctgagctacatgtgtatggaagcgactgcccatgtgcgtctgccgcagccatccttctcaatccgcgtatggcagggtactccggatgagtttctgtatcgcgcttgcgagctggtgcgtatgggcctgggcgttccggcaatgtacaacgatgaagtaatcatcccggcgctgcagaaccgtggcatttcgctgcgtgatgcgcgtgattactgtatcatcggctgcgtagagccgcaggcaccgcatcgcaccgagggctggcatgacgccgcgttctttaacgttgcaaaagtgctggaaatcaccctgaacaacggtcgcgttggcaataaacagctaggcccagtgactggcgaactgactcagttcaccagcatggaggacttctacaccgcgttccagaaacagatggcgcacttcgttcatcaactggttgaagcctgtaacagcgtggatattgcccacggcgaacgctgcccgctgccgttcctatcagcactggtcgacgactgtatcggccgtggtaaatctctccaggaaggcggggcgatttacaactttactgggccgcaagcattcggcgtagccgataccggcgactccgtctatgccatccagaaacaggtattcgaagatcgtaaactgtctttgagcgaactgaaaagcgcactggacgccaacttcggttatccggtgggtgcgaacccgcacactccagcggcgaaatcctcgctcaacgagcaggatatctacgatgtggtgaaacgcatcattgaacagcatggcgcgctggatccggcagagattaaaaacgaagtttatcgccagctgacttccggcagtgcagcaccggtgcaatccggcactatgtcccgtcacgaggagatccgtcgtattctggaaaacacaccgtgcttcggtaacgacatcgatgacgtggatttagtagcgcgtaaatgtgcgctgatctactgccaggaagttgagaaatataccaacccgcgcggtggccagttccaggctggtatctatccggtgtctgcgaacgtgctgtttggtaaagacgttgccgcactgccggatggccgtctggcgaaagagccgttggcggatggcgtatctccacgtcagggtaaagacacccttggcccaaccgccgcagccaactcagttgccaaactggatcactttatcgcctccaacggtacgctctataatcagaaattcctgccgtcttctttggctggcgagaacggtctgcgcaacttcagcggcctgatacgtcactacttcgataagaaagggatgcacgttcaatttaacgttatcgaccgcaacactttgatcgaagcccagaaaaatcctgagcaacatcaggatctggtggtacgcgttgcgggctatagcgcccagtgggtagttttagcgaaagaagttcaggacgacataatcagccgtactgagcaacaactgtcgtaa

SEQ ID NO: 6589 - DNA, 576 bp, Escherichia coli
atgaagaagatattacttatcacaggcgatttctctgaagactatgaagtcatggtgccatggcaggcattaaacatgttaggtttcagagtggatgtagtgtgtccgggaaaacgtaccggcgagtttattaaaaccgcgattcatgattttgaaggtgatcagacctacaccgaaaaacccggacatctttttagattaactgcatcatttgatgacataaggttacaggaatatagtggtgtttatatttctggtgggcgttcatcggaatacttgcgattaaataagtcagtattggatatcgtgcattacgcgatgaatttaacattacctgttgctgcaatttgtcatggcccacaaattctggccgctgctggggtattaaaaggccggaaactgacgggatattttacggtaaaaccggaagtggaaatggcgggtggccagtgggtcactgccgcagatgatgaagccattgtggatggtaatttaataaccgcgactacctggatggggcatccagcaatattacgtcactttattactcaaatgggcactagcattattcattaa

SEQ ID NO: 6590 - DNA, 255 bp, Escherichia coli
atgttgaaacggcgtatgcccggggagtttcgttcgcgtttggatttgattcgcatcgacgccattggtttgttaatactgccggttccggatctctatttttatgccgacgtagccagtaaaagcgccaatgtggtggtatcagaaatctttggcagttgccctcagcatatcaccacattggccatttttggcgaagtcgcggcggtgcatgaagccatgcgaatcattgaggaagacgataaccagttttga

SEQ ID NO: 6591 - DNA, 1527 bp, Escherichia coli
atgaatgatattgaaatcgctcaggctgtctcgaccattctgagcaaattcaccaaagcaacaccggatgaagctcccgccacgtcagaagcagcgcgggtcgacgggttggatgaaattgtcgctaaggcgttggcgcagcactcttccgtgcgcgacgccagtgcgatctctcaggtagcgaaggtagcgaaggtagcgaatgctagcactggagcattcgataccatggatgaggcgatttccgccgccgtcttggcacaggtgcagtatcgccactgttctatgcaagaccgcgcctcgtttatcaatggcattcgcgatgtcttcctgcaggaagatgtgctgtgtgccctttcccgtatggcggtggaagagaccggcatggggaattacgaggacaaacagatcaaaaaccgcgtcgcagcgctgaaaacgccaggtatcgaagatctgaccaccagcgcggtttccggagacgggggtttaacgttgatcgaatactctgcgttcggagtgattggttcgattacaccaacgactaacccgaccgaaaccattatcaacaacagcataggcatgctggcggcaggcaacactgtggtgttcagtccacatccgcgctcgcgcaaagtgtcgctgtacgcggttgagctgatcaacaacaagcttgcccagttgggcgcaccggcgaacatggtggtaacggtgaccaaaccgtccatcgacaataccaacgtcctgatcaacgacccacgtatcaacatgctggtagcgactggcggtccagccatcgtgaaaaccgtgatgtcatcaggtaaaaaagcgattggtgcaggcgcaggtaacccgccagctgtggtagatgaaacggcggatatcgaaaaagcagcccgcgacatcattaagggctgtagcttcgacaacaacctgccgtgcgtggcggaaaaagaggtgattgttgtgaaccaggtagcggactatctgattcactgcatgaagaaaagcggtgcctatctgttgtgcgataagaagttaagtcaacaactgcaatcgttggtgcttaatgaaaaaggcactgggccgaataccgcctttgtcggcaaagatgcgcgctatatcctgcaacaactgggaatccaggttggcgacgatatcaaagtcatcttaattgaggctgagaaaacacatccgtttgtggtgcatgagctgatgatgccggtcctgccggtggtgcgcgtagacaatgttgatgaagccattgagctggcggtgaaagtggagcacggcaatcgtcataccgcggttatgcactccaccaacgtcgaaaagctgaccaaaatggcgcgcctgatccagaccaccatctttgttaaaaatggtccctcttatgcagggctgggggtgggcggtgaagggcatgccacctttacgattgccggaccgaccggcgagggacttacgtcagcgcgttcgtttgcacgccgtcgtcgctgtgtaatggttgaagcgctgaatattcgctaa

SEQ ID NO: 6592 - DNA, 786 bp, Escherichia coli
atgagagataatcttgttgagcagattatatctgacgtaatgaataaacaaaccgatatctcaccggaagctaaaacagcagcgaatttcgctggttgcggtattacggaatttgtcggcactgcgttgggccacactatcggcctagtgattgccaatgttgataatcaattgcatgaagtcatgaatatcgacaagaaatatcgctctatcggtattcttggcgcacgtactggcgcaggcccgcaaatttttgcggctgacgaagcgattaaagcaaccaacagcgaaattatttctattgagctggcccgcgataccgaaggaggtggcggacacggttgcttaattattttcggtgcgtctgatgtttccgacgtcaggcgtgcggttgaagtggcgctgtctgaaattgaacgcaccatgggtgacgtttatggctcgtcagccggacatcttgaattccagtacaccgctcgtgccagctacgcgctgaataaagcgctgggtgcgccgattggtaaatccttcgggatgacctgtgcctcgcctgcggcgattggcctagtgattgccgacgctgcggcgaaatccgccgtgattgacccggtgggttatgccagcccgtcgcaaggcaccagctttagtaacgaagtgatcttcaccttctccggtgattccggtgcagtacgtcaggcggtgattgccgcgcgtgaagtcggtctacaactgctctccacgttagatccggtggaaattaaatccaccacgacgccatatatctaa

SEQ ID NO: 6593 - DNA, 282 bp, Escherichia coli
atgcaacaagaagcattaggaatggttgaaacgaaaggtctggtttctgcaattgaagctgcagataccatggtgaaatctgccaacgtgaccctagtgggttatgaaaaaatcggctccggcttggtgactgtgatggttcgcggcgacgttggcgcagtgaaagccgcgacagatgcgggctccgctgctgcgagtaaagtgggagaactggtctccgtacatgttattccacgcccacacattgaggtggaaaaaattctaccgaaggctatcggttaa

SEQ ID NO: 6594 - DNA, 1197 bp, Escherichia coli
atgtctttagcttgtgtattagtgattaattgtggttcctcatcaatgaaattctccgtcattcctcaggatgcagatcagccgttgctgtcgggcctagcggaacgactgggtattgatcatgctgtcataacgtttaaagaccgagacggccataaatccactgtcgcgctggatgacgccagccatcagcatgcgctcaaagtgctcttcgcgaagctcgacgaacagcaactgttggaagccatcaacgccgttgggcaccgcgtggctcatggcggcagcgacttcaaaagatcagtactggttaccgatgatgtgatcgaaaaagtccgcgcgctgtcggtgctggcccctttgcataaccctgccaacctgattggtattgaagcggctcgggctctgttgcccgcgttgccgcatattgcggtgttcgatactgcgttccaccagaccttgtctccggctgcttacacttatgcgatcccgctggagttccagcaagattatatggtgcgacgttacggctttcacggaacatctcaccgctatattgccgccgaggcgcttgcatcactagatctcgacccggcggatcatggcatcgtgattgcccacttgggcaacggttcatcgctatgtgcggtgcaaaacggcacgagcattgacacctcaatgggtatgaccccgctggaagggctggtaatgggcacgcgctgcggggatcttgattttggtgtcgtcgcatatctggcgaaacgcacaggtcaaacgttcgacacgctgtacaaaatgctcaataaccagtccggcctaatggggatttccggcttatccagcgattgccgcacccttcagcaggcgcgtgatgagggccacgaacgggcagcgttagccatcgacgtgttagtacatcgtctcgcacgacatatcggcggccacgtgacctcgcttaaacgcttcgatgcgctgattttcaccggtggaattggcgaaaactcggcgttaattcgagaacttaccgtgcaacgccttcaggcgctgggattggaactggataaagaacgtaaccagcagctgttcggcggacgtagcggactgatttctaaaaccgacaccacgaagattgcggtcatcccaaccaatgaagaaaaaatgattgctatagatgcagcggagattgcccgcacggcataa

SEQ ID NO: 6595 - DNA, 498 bp, Escherichia coli
atgtctgcgaatgaggcttcactcgacaactggattaacgaggctattgccacgcagttaccggaactccggatgtcgctgagcctggaggacagtgaactgctggcaaagttggtccgggaaatggcacagtccagcaatgtatcgatcgtttttagcctagtggatgcctgcggtcagcagcgttttttcttcagcatggataacgccctgctggtcagccataccttggcaccacaaaaggcctggaccgcggtagctctcaaaatgccaactcacgaactggcaacgctggtacagccgggtggtgatttgtacggccttgagaaagaaaaagatatctgctgcttcggcggtggttttccctgctggtcgggcaggcgcttactaggcggcatcggcatcagcggcggcagtgttgaggaagatatgctcatcgcccgccaggcgatggcgcagtttagcgttctgcgttatcccctcacaacaacccgttaa

SEQ ID NO: 6596 - DNA, 270 bp, Escherichia coli
atgtacctcgctaaagttactggcgcattggtttccaccaccaaacacgcctcgctgaatggctcaaaactgctgatagtggcgcggctcgatgaaaactatcagccgactgtccatgcccaggtggcagttgatactgtcggcgcgggcaatggagagattgtgatcatcaccactggcagttcggcgcgtatgagcaacaacaaagatcactcggtgattgacgctgccgtggtgggtatcgtcgactcgctcgaacttaacggttaa

SEQ ID NO: 6597 - DNA, 705 bp, Escherichia coli
atggacaatcaaaccttatcgcaactgctggaccgggtcatcgctgaagtgttggcacaatccgtcgcgcagaaaaatgtctgcgtagtggtgactggtgaggatatctcctcgctgccggaaacgctgaactgccttgaggcgcttgagctggcgggttatcagttgtgggtaaatttttctcacagcgccagccagtcggcgctgaaatctgtctgcatggatgcgctaattcagcgtggttctcgtgctggatttgacagatcgccgcctcactatgaggtgctctatctgcctgcgctctctgtcaacagcatgagcaaaattgcgctgggcattcgcgataatctggcctgtgaaactgtatttcaggcgttacagcaccgtaaacagattatcgccacgctgcatcaacaatgcgtcgatagcgaattaccgatgccactgctgtcttgtctggaaggttacgctcaggtcctagagagctatggcattacgcttttcggtaaacgtgcagcccatgtcaagtcggtgcaaggaagccaatccaccctgacagtagccggtaaaaaacgtttaatcacccagagcgatatccgcctactgaccattggcacagtgctgcgcattgagagcgacacgctgattacccctgctgccagagatgaaatccagcggcgtaatctcactgttatccatggttaa

SEQ ID NO: 6598 - DNA, 759 bp, Escherichia coli
atgtcggccctactccggcgcgttgaaggtgggggggatctcggtaccgccaatatcgcaatcgtggtgctggatgaagataaccagtcggtggcaggggtaatgtatccctccaatgtggtgaaagacggcgtggtggtggattacctgaccgccagccgggtagtagcacgtctcaaacaaattcttgaacagaaacagggctgcacgctggagcgcgcggcgatcgcagtcccaccggggatctctgaaggcaacacaaaagtgatcgtcaacgtagtggagttagcgggttttatcgtgacccaagtactagatgaaccggtagccgctgccagcgcgctgaatattaaaaacggggcggtggtggatgtcggaggaggcaccaccggcatgagcattttgaaaagcggtaaagtgacgttcagtgccgatgagcccaccggtggaagacatatgaagttggtgatcgctggcgcgctgggcttgccttatgccgaggcggaagaaatgaaaaaaaacgggcaggaagcgcaggtctttaccctggtgctaccggtggcccagaaaatggccagcttggtgtcgggatggttcgctacccagcaggtaaaaaatatttatttggtaggtggcgcgagcagcttcagccagtttgccaacgtgttcagtaaacaaaccggtaaaaatgtgattccttcggcagagccactattggtcacaccattaggcatcgccatgaatgcggaccaggggtaa

SEQ ID NO: 6599 - DNA, 687 bp, Escherichia coli
atgaattacaccgaacaacaagccgagtggattacccaacaaattttgcaggaacttgccaccagtaaaaaaacggcagcgcctgctgccgcgcccgtcgcgctgaatattccggtgggcgtgtccaaccgccatgttcatctgtgccgtgaagatatggacattctgtttggctacggctctacgctaacccgttctaaagcgttgaaacagcccggtcagtatgccgccgaagagatggtgacgctgcgcgggccaaaaggcgagctcaacaaagtgcgcgtgttagggccactgcgtaatgccacgcaggtggaaatctctgtggccgacggctttgcgctgggcactaaagctccggtgcgcatgtcgggggatctgctggattcgccgggcattgaaatcatcggtccgaaagggcgggtggtgaaacacaacggcatgattgtcgcctggcgccatatccatatctcgcccgaagaagccgaactgcacggcctgcatgacggaatggaaatcgatgtgcaaacaaacggtccgcgcggtggtgtgctcagccatgtagtggtacgcgtcacggcggatgcagtgctggaactgcatattgatatggaagaagctaacggcgtcggtctgcgtaatggcgataccgttcgcggcataaaacaggctgcgcgccatggctaa

SEQ ID NO: 6600 - DNA, 1119 bp, Escherichia coli
atggcccgctattatttttcgtgccccaaaatttattttggtgaagaggcaataacctctctatgccaatttaataataaacgagtcggtattgtcaccgatgattttatgatgtcatcaggtaaaactcgttatttaataagccatatgcctgaggcatcggtatgcattttcggcgaggttactccggatccagatattgatattctgacttccggcgcggcgcgttttaaagcctttaagcccgacgttattatcgccctcggcggcggctcgtcgctggacgctgcgaaaggaattaaagtcacattggaagagtattttggagatcatcaaatcgatctcattgctattcccacaaccagcggatccggctctgaagtgacgtcctacgcgatcatctctgatccgcaaaatggccgcaaatatccgttgatctccgggcaactggtgccggaaatcgccattctcgatcctaacctagtgttaaccgcgccgcgtcatgtcgcggtagataccggcatggacgtgctgacccatgccattgaagcctttgtctctactggctcaaatgactttagcgatgcgctggcggaaaaagccatcgcgttgacctggcgctatctgccgcaggtgtttaacgacgaaaaagacattgcggcgcgcacccacatgcacaatgcctcctgtatggcaggcatggcatttaactccgccgggctggggttggtacacggcatggcacacgccatcggcgggatgctgcatattcctcatggcaaaattaacgccatgctgctgccgattgtcatcgacttcaacagcaaacgggccagcactgaaacccgcgatcgctatcaccgttgcgcgcaaatcataggcattgaccatgcggtaccggagcaggccatcgcgctgatgactcaggagatccgccagatcaatcgccatttctgcatccccgtcactctcagcgaactgggcatcgaccgtgcaaaaatcatcgagttgcgcagcgcactggtgaattcgacgctggccgacggttgtaccgcgtcgaacccgcggcaggtgacgacgcatgatgtcgaagggttgatcgacctgattaccggctag

SEQ ID NO: 6601 - DNA, 474 bp, Escherichia coli
gtgctgcgtgaagaatgggacatcagccagaaaaatgtggtgttcaacgataaacgctttggctgcgtgtacagcctgaaggccagcttttcaggtgtgccggatacctaccggtatcatctgtctccccgtattcgccggatggttgggactgaaaacacatcatcgccataccaactgattgcccgggaagtgaaagctccccgtcaacggctgaagtatgcgctggagacaggattgcaggtgagcgcactggacggtctgttctggttcggcagtcagcgcattgcggcagatatcctgaaactgagaaagtacggaatgcggattgcgacggcttctgttgacgtgtatgacaacataaccggaacagggttttgccctcgtcaccgccaaaaatacgtcctttatcacatttcttcgatttatcctgatattttaccggattactgttcaaaaactcttcttttctga

SEQ ID NO: 6602 - DNA, 819 bp, Escherichia coli; identical to SEQ ID NO: 6059

SEQ ID NO: 6603 - DNA, 1152 bp, Escherichia coli
atgagacgaacatttacagcagaggaaaaagcctctgtttttgaactatggaagaacggaacaggcttcagtgaaatagcgaatatcctgggttcaaaacccgcaacgatcttcactatgttaagggatactggcggcataaaaccccatgagcgtaagcgggctgtagctcacctgacactgtctgagcgcgaggagatacgagctggtttgtcagccaaaatgagcattcgtgcgatagctactgcgctgaatcgcagtccttcgacgatctcacgtgaagttcagcgtaatcggggcaggcgctattacaaagctgttgatgctaataaccgagccaacagaatggcgaaaaggccaaaaccgtgcttactggatcaaaatttaccattgcgaaagcttgttctggaaaagctggagatgaaatggtctccagagcaaatatcaggatggttaaggcgaacaaaaccacgtcaaaaaacgctgcgaatatcacctgagacaatttataaaacgctgtactttcgtagccgtgaagcgctacaccacctgaatatacagcatctgcgacggtcgcatagccttcgccatggcaggcgtcatacccgcaaaggcgaaagaggtacgattaacatagtgaacggaacaccaattcacgaacgttcccgaaatatcgataacagacgctctctggggcattgggagggcgatttagtctcaggtacaaaaaactctcatatagccacacttgtagaccgaaaatcacgttatacgatcatccttagactcaggggcaaagattctgtctcagtaaatcaggctcttaccgacaaattcctgagtttaccgtcagaactcagaaaatcactgacatgggacagaggaatggaactggccagacatctagaatttactgtcagcaccggcgttaaagtttacttctgcgatcctcagagtccttggcagcggggaacaaatgagaacacaaatgggctaattcggcagtactttcctaaaaagacatgtcttgcccaatatactcaacatgaactagatctggttgctgctcagctaaacaacagaccgagaaagacactgaagttcaaaacaccgaaagagataattgaaaggggtgttgcattgacagattga

SEQ ID NO: 6604 - DNA, 267 bp, Escherichia coli
gtgggcgatcacgatccacgtaagccgatgagtgagaatacggtgaacaaggctttgcgcgtaatggggtatgacacgaaggtcgaggtttgtgggcatggcttcaggacgatggcttgtagttcgttgattgagtcgggattatggtcgagggatgcggtagagcggcagatgagtcaccaggagcgtagctctgtgcgagccgcttacatccataaggcggaacatcttggggagcgtaggttgatgtttgaagtggcacactga

SEQ ID NO: 6605 - DNA, 915 bp, Escherichia coli
atggctctgagtgatgtgaaggttcgttcggctaagcctgaagcaaaagcctataagctgaccgacggtgaaggcatggttttgctggttcaccctaacggctccaaatactggcggctacgttatcgctttggcggtaaagagaagatgctggcattggggaaataccccgaagtgtcgttggcggatgccagggcacgccgggatgaggctcgtaagcttttagctaatggtgtcgatcccagtgaaaacaagaaagctgttaaggtagaacaggaacaagaggcgataacgtttgaagtagtcgccagagactggcacgccagcaatcagaagtggtcggcatcgcatagcgctcgtgttttgaaaagtctggaggataatctctttactgctatcggtaagcggaacattgcggaactgaagacgcgggatcttcttgtacccattaaagcagtcgagtcatccgggcggctcgaagttgccgcccgtttacagcagcgtactaccgcgattatgcgctttgccgttcagagcggcttaatcgactacaaccccgcgcaagagattgcaggtgcggttgctacggcgaaaagacagcaccgtgcagctcttgaactgaaccgtatacctgaattacttcatcgcatagatcactattctggcagaccgttaactcgactggcggttgaactcactttattggttttcatccgttcgagcgagctgcattttgcccgctggtcagaagtagattttgaaacggctatgtggacaatcccaggtgagcgtgagcaactggaaggagtcaagcattctcagcgtggctcgaagatgcggacaccacaccttgtacctttgtcgcggcaggccctaagtattttggaaaagatcaaaagcatgagcggaaattga

SEQ ID NO: 6606 - DNA, 1197 bp, Escherichia coli
atggctcaagttattaatgaaatggatgttccgtcccattcgtttgtttttcatggtacaggtgagagatattttcttatttgtgtggtgaatgtgttgttaacgattataacgctaggtatctatttaccatgggcattaatgaaatgtaagcgttatctctatgctaatatggaagttaacggacaacgattttcttatgggattaccggtgggaatgtttttgttagttgtcttgtttttgtttttttctatttcgcaatcttaatgacagtgtcagcagatatgccgcttgttggctgtgttttgactttgtcactgttggttttgcttatatttatggcagcaaaaggactgcgttatcaggccttgatgactagtctcaacggcgtaagatttagttttaattgctctttgaaagggttctggtgggtaacctttttcttgccgattttaatggccattgggatggggactgttttctttatctcgacaaagatgctacatgccaatagttcaagtagtgttattatatctgtggttctgatggcaatagttggtattgtttccattggtatttttaatggtactttatatagtctggtaatgagttttctctggagcaataccagtttcggtatacatcgtttcaaggtaaaattagatactacgtattgtataaaatatgccattctcgcatttttagctttattaccttttctcgctgttgctggttatattatcttcgatcaaatattaaatgcgtatgatagttctgtgtatgcaaatgatgatattgagaatttacagcaatttatggaaatgcaacgtaaaatgataatcgcgcagttaatctattattttgggattgctgttagcaccagttatttaacggtgttgttgcgaaatcattttatgagcaacctgtcactgaatgatgggcgtattcgttttcgctcaactttaacataccacggtatgctttatcgcatgtgtgcgttggtggtgatatccgggattacgggcggtctggcttatccactgctgaaaatatggatgattgactggcaggcaaaaaatacgtatttgctgggcgatttggatgaccttcctttaatcaataaagaagaacaaccagataaaggcttcttagccagtatttcacggggaattatgccttctttaccatttctgtaa

SEQ ID NO: 6607 - DNA, 231 bp, Escherichia coli
atgaagcaacctgattttgctaagtggtatttctatcaattacttaaagattatgagggcgaacagctgtatcttaatgagttaggatatgtttatggtaatgaagaaaaaacaaatgaaattgtaaaaaacaatccgggttatgtcgttaagatttttgaagaaaagatggttaatgaattaaaaattagaacaagaatgatgaaaatcctccggaagatttacgtatag

SEQ ID NO: 6608 - DNA, 1344 bp, Escherichia coli
atgagcaaaatatcaggttggaatttttctcaaaacattacatcagccgacaattgtaaacaaaaaaatgaagacttagatacctggtatgtgggaatgaatgattttgcccgaattgccggagggcagaatagcagaagcaatattctttctcccagagcatttttggagtttttggctaagatatttaccctgggttatgtggattttagcaaacgctccaacgaagcgggtagaaatatgatggctcatattaagtcctcatcttatatcaaaaataatgatggtagtgagataatgaagtttgttatgaataatcctgaaggggagcgagcggatttatctaaggtggaaatagaaattacacttgcctcagcttttaataatgggattcgtgaaggacatacagtcattatatttacacaacctgatggttcgactaatcgttatgaagggaagtcctttgaaagaaaagatgagagttcattacacctgattactaacaagattctggcgtgttaccaacgcgaagctaacaaggaaatagctcgtctattaaatattccgcaggagttaaataattctcaggacttgaataactcgcaggtgagttgtaaagattcagttgattctacgattacggatttattagaaaaaccattgaataatgcattattagcaataaggaaagaacatctgctattaatgccttatgtatgtaatgaatcgatttcatacttgcttggtgaaaaagggatactgaaagaaatagatgaccttaacgcagtaaataattatcttcttaataataagaaagctactgacaatgaaattaatgacatcaaagttaacctgtctcatattcttattgattccttagatgatgcaaaagttaaccttacaccggtcatcgattcgattctggagatttttttaaaattcccatatattaatgatgtaagaatactggattggtgttttaataaaagaatgcaatattttggtgattctgaaaagataaagtatgcatgctccgtgataaatcatattgattttagccgcgatcaatctaaagattttagctgcgatcaatctaaaattaaaatagctgagaccttatttttcaatctcgataaagaacactataaaaatagccgtaaattacaggaattgatttgggataagttggttgcatatgtcaatgattttaacttaagcaatcaagaaaaatcacgcttaatactaaggttatttgatgatgttaagttgctatttaatgaagtgcctgtcagcattttagtaaatgatattttttttgaaggattttttcatgaagcaacctga

SEQ ID NO: 6609 - DNA, 453 bp, Escherichia coli
atgatcatcggaaatattcataatcttcagccgtggctaccccaggagttacgccaggcgattgagcatatcaaagcacacgttacggcagaaacgccaaagggcaagcacgatatcgaaggcaatcgtctgttttatcttatctcggaagatatgaccgagccgtacgaagcccgccgtgcggagtaccatgcccgctatctcgacattcagattgtgttaaaaggtcaggaaggcatgaccttcagcacgcaacctgcaggcacgccggataccgactggttagctgataaagacatcgcatttttgccggaaggcgttgatgagaaaacagttatccttaatgaaggtgattttgttgtgttttatccgggggaagtgcataaaccgctgtgcgcagtgggtgcaccagcccaggttcgcaaagcagtagtgaagatgctgatggcgtga

SEQ ID NO: 6610 - DNA, 594 bp, Escherichia coli
atggtcactaaaaaacaatctcgcgttccaggtcgtcccagacgtttcgctcctgagcaggcaatctctgcggcaaaagtgctttttcaccaaaaaggtttcgatgctgtcagtgttgctgaagttactgattatcttggtattaaccccccgagcctctacgcggcttttggcagtaaagctgggttatttagccgtgtactcaatgaatacgtcggtacggaagctattccgcttgccgatattcttcgtgatgatcgtccagtaggcgagtgcctggttgaggtattaaaagaagcggcgcgcagatatagccaaaacggcggctgcgctggctgtatggttcttgaaggtattcatagtcatgatccactagcgcgtgatattgccgttcaatattatcacgccgcagaaacgaccatttatgactatatcgccaggcggcatccacaaagcgcacaatgtgtgactgattttatgagtaccgtgatgtcagggctttctgcgaaggcacgggaggggcactcaatcgaacaactctgtgcaacagctgcactggcgggggaagcgataaaaactcttctcaaggagtga

SEQ ID NO: 6611 - DNA, 714 bp, Escherichia coli
atgggcgcttttacaggtaagacagttctcatcctcggtggcagtcgtggtatcggtgccgctatcgtacgtcgtttcgtcaccgatggggccaatgtacgattcacctatgcggggtcgaaagatgccgctaaacgcctggcacaagagactggagcgacagcagtattcacagatagtgctgacagagacgctgtcattgatgtcgttcgtaagagcggcgcattggatatcctggtggtaaatgcaggtattggcgtctttggcgaggccctggaattaaatgccgacgatattgatcgccttttcaaaatcaatattcatgctccttatcatgcctctgttgaagccgcccggcagatgcccgaaggcgggcgcatcttaatcatcggctccgtgaatggcgatcgtatgcctgttgcaggcatggctgcttatgccgccagcaaatctgccctgcaaggcatggcgcgcgggctggcccgtgattttggaccgcgtgggatcaccattaacgtcgtccagccagggccaattgataccgacgctaatcccgccaacgggccaatgcgcgatatgttgcatagtttgatggctatcaaaagacatgggcaaccggaagaggtcgctggtatggtcgcatggttagcagggccagaagccagttttgttaccggcgcgatgcataccattgatggcgcgtttggcgcataa

SEQ ID NO: 6612 - DNA, 396 bp, Escherichia coli
atggtagaaagaaccgctgttttccctgctggccgacattcactatatgctgagcatcgttattctgcggctattcgttccggcgatttgctgtttgtttccgggcaagtaggaagtcgagaggacggaacaccagaacccgattttcagcaacaagtcagactggcatttgataatttgcatgcgaccctggcagctgcgggatgcacttttgacgatatcattgatgttacgagcttccataccgatccagaaaaccaatttgaagacatcatgacggtgaaaaatgaaatatttagcgccccaccttatccaaactggacggcggtgggtgttacatggctggcaggctttgattttgaaattaaagtgatagcgcgcatccctgagcagtaa

SEQ ID NO: 6613 - DNA, 2697 bp, Escherichia coli
atgtttaaagaaatttttacccggctcattcgccatttaccttcccgtctggttcatcgcgatccattgcctggcgcgcagcagacagtgaatacggcggtcccgccgtccttaagtgcgcattgcctgaaaatggcggtgatgcccgaagaagaattatggaaaacgttcgacacccatccggaagggttaaatcaggcggaagtggaatctgcccgcgaacaacatggtgaaaataaattacccgcacaacaaccgtcgccgtggtgggtacatttatgggtctgctatcgcaacccatttaatattttactcaccattctcggcgctatttcttacgccacggaagatttatttgccgcgggcgttatcgcgctaatggtcgctatttctacgttgctgaactttattcaggaagcacgttccactaaagcggcagatgccctgaaagcgatggtcagcaatactgcgacggtgctgcgcgtaattaacgacaaaggcgaaaatggctggctggagatcccgatcgaccagctggtgcccggcgatattataaaactggcggcgggggatatgatcccggcagatttacgtatcttgcaggcgcgggatctgttcgtcgctcaggcgtcgttaaccggtgagtctctgcccgtagaaaaagcagctaccactcgccagccggagcacagcaatccgctggagtgcgacaccctgtgttttatgggcaccaccgtggtgagcggcacggcacaagcaatggtgattgctacaggtgccaatacctggtttggtcaactggcggggcgtgttagtgagcaggaaagcgagccgaatgcctttcagcaagggatcagccgcgtcagtatgctgctgattcgctttatgctggtgatggctccggtggtgctgttaatcaatggttacaccaaaggcgactggtgggaagcggcactgtttgcgctttcggtcgcggtaggcttaacgccggaaatgttgccgatgattgttacctcgacgctggcgcgcggcgcagtaaagctgtcgaaacagaaagtgatcgtcaaacatctggatgctattcagaactttggcgcaatggatattctgtgcactgataaaactggcaccctgacacaggacaaaattgtgctggagaatcataccgatatctccggtaaaaccagcgaacgcgtgctgcatagcgcgtggttgaacagtcattatcagaccggacttaaaaacctgctcgatacagcggtgctcgaaggtacggatgaagagtcagcgcgctcgctggccagtcgttggcaaaaaatcgatgagattccgtttgatttcgagcgtcgccggatgtcggtggtagtggcagaaaataccgagcaccatcagctggtttgcaaaggtgcattgcaggaaatcctcaatgtgtgttcgcaggtgcgtcacaatggcgagattgtgccgctcgatgacatcatgctgcgtaagattaagcgggttactgatacgctgaatcgtcaggggctgcgcgtggttgcggtggcgacgaaatacctgccagcgcgtgaaggagattaccagcgggcggatgaatccgacctgatcctcgaaggatatattgctttccttgatccgccaaaagagacaactgctccggcactgaaggcattaaaagcgagtggaattaccgtaaaaatccttactggcgacagtgagttagttgcagcgaaagtgtgccatgaagtggggctggacgcgggagaggtggtcattggtagtgatattgaaacgctatctgacgacgaactggcaaatctcgcacagcgcaccacgctgtttgctcgtctgacgccgatgcataaagaacgcattgtgaccttactgaagcgcgaagggcatgtggttggctttatgggcgatggtattaatgatgcgcccgccttacgcgctgcggatatcggcatttctgtggatggcgcggtagatatagcccgtgaagcggctgatatcatcctgctggaaaaaagcctgatggtgctggaagagggggttattgagggacgtcgcactttcgccaacatgctgaaatacatcaaaatgacggcgagctctaacttcggtaatgtgttcagcgtgctggtcgcgagtgctttcttgcccttcctgccgatgttgccgttacacttgcttattcagaacctgctgtacgatgtgtcacaggtggcgatcccgtttgataacgtcgacgacgagcaaattcaaaagccgcaacgttggaatccggcggatctggggcgctttatgatcttcttcggaccgatcagctcgatcttcgatattctgacgttttgcctgatgtggtgggtattccatgccaacacgccggaaacgcaaacgctgttccagtcgggatggtttgtggtgggcttactgtcgcaaacgctgattgtgcatatgatccgtacccgccgtgtgccgtttattcagagctgtgcatcgtggccgttaatgatcatgaccgtgatcgtgatgattgtcgggatcgcattgccgttttcaccgctggccagttatctgcagctgcaggcgctgccgttaagctatttcccgtggctggttgcgattctggcagggtatatgacgttaacccagttggtgaaaggattttatagccgtcgttacggctggcaataa

SEQ ID NO: 6614 - DNA, 795 bp, Escherichia coli
atgacattaccaacgactatttattcatttcctgcatattcaccccgtttttcgtccaccgacaaaccagtaaaattaaaatttcatcaatacgcacgcgctacattactttcaaatcgtggaagagaccataattgcgatggcagacatactgttgagatccacaaactagatctctcaggctggcaagcattcaataagttagcgacgaggtgtaatgcttacgatggaataacaatgaatggtgataattcttttggatggaaccatgaagctacattagataatattcacgcccagaaatacaataaagcttacgcgggtgcgaggttaaccgcagaactgaaatatttattgcaagatgttgaatccttcgaacccaacagtaaatacataatacacgaggttgttttgggacctggttatagtactccagactataccggccaaacgataggatacgttgtaacccttcctgcccaaatgcctaattgctggtcatctgaactaccaacaatcgatctttatatcgaccaacttcgcactgttacaggcgtttctaatgccctcggattcatcattgctgcattgctaaacgcgtattctgatttaccccatgatttgaaaattggtctgcgttccttatcaagttcagccgcaatctactcgggtttgggtttcgagcgagtgccgcaggagcgagacatcagttgcgctcgtatgtatctaacgccagcaaaccatcctgacttatggacacaagagaatggtgaatggatctacttgcgaaactaa

SEQ ID NO: 6615 - DNA, 1128 bp, Escherichia coli
atgctggtgatgatccagcttttgctgttactggcgtatgaaagtttgtggcccgatgcctggcatttcctttctattttcagcggcagcgcatggttaatgaccctgctgtggctaaactttggtttgatggttaaccgcatcgtgcagcgggtgatttttgtcactggctactacggtctgacgcaggggctgctatctgtcctgcgtcttttctggggtaacctgattaacttcatggccaactggcgcgcgttaaaacaggtacttcaacacggcgatccgcgtcgagtggcgtgggataaaacaacgcatgacttccccagcgtgactggcgatacccgctcgttgcgcccgttaggtcaaatcctgctggaaaatcaggtcatcactgaagaacaactcgatacagcactgcgtaatcgcgtcgaaggtctacgcctgggcggttcaatgctgatgcaggggctgattagcgccgagcaactggcacaagcgctggcagagcaaaacggcgtggcgtgggaatccatcgatgcctggcagatcccttcctcgctgattgccgaaatgccggcctccgtggcgctgcattatgcggtactgccgctgcgtctggacaatgatgagttaattgtcggcagtgaagatggtattgacccggtttcgctggcggccctgacgcgtaaagtcggacgcaaagtgcgttacgtcattgttctgcggggacaaattgtcaccggattacgccactggtatgcacgccgacgcggtcacgatccgcgggcaatgttgtacaatgcagttcagcatcagtggctcacggaacagcaggccggtgaaatctggcggcaatatgtgccgcatcagttcctgttcgccgaaatactgaccacgctcggtcatattaatcgttcagcaattaacgtgttgttattgcgccatgaacgcagttctctgccgctcggcaagtttttggtcaccgaaggcgttatcagccaggaaacgttggatcgcgtcctgacaattcaacgcgaattacaagtttcgatgcaatcactattactcaaagcaggtttaaacacagaacaggttgcgcaactggagtccgaaaatgaaggagaataa

SEQ ID NO: 6616 - DNA, 2970 bp, Escherichia coli
atgaaggagaataaccttaatcgcgtcatcggatggtctggtttactgctgacgtctttattgagtaccagcgcactcgcagacaatatcggcaccagcgcagaagagctggggctgagcgattatcgccatttcgttatttatccccgtctcgacaaggcgctgaaggcacagaaaaataacgacgaagcaaccgccatccgcgaatttgaatatatacaccaacaggtgccggataatattccactaactttataccttgcggaagcctatcgccattttggtcatgatgaccgggcgcggctgttgcttgaggatcaactgaaacgtcaccctggagatgaccggcttgagcgcagtctggcggctattccagttgaagtgaaaagcgttacgactgttgaagaactgcttgcccagcaaaaagcgtgcgatgctgcgccgaccctgcgttgtcgcagtgaagtcgggcagaatgccctgcggctggcacaattacctgtcgccagagcgcaactaaacgatgcgacgtttgctgcatcgccggaaggaaaaacgctgcgaaccgatctgctgcaacgcgcaatctacctgaaacaatggtcccaggcagatacgctatacaatgaagcacgccagcagaacacattaagcgcggcagaacgccgccagtggtttgatgtgcttcttgccgggcagctggacgatcggatcctggcgctgcaatcacaggggatcttcaccgatccgcagtcatatattacttacgcgaccgcgctggcttatcgtggcgaaaaagcacgcctccagcgttatctcattgaaaataagccgctgtttaccacggacgcacaagagaaaagttggctctatctgttatctaaatacagcgtcaaccccgttcaggcgttggcgaattatacggtacagtttgccgataaccgccagtatgttgttggcgcgacgctaccggtgctgttaaaagaaggtcagtacgacgcagcgcaaaaactgctcgccaccctccccgccaatgaaatgcttgaggagcgttataccgttagcgtagcgacccataacaaggctgaagctctgcgtctggcacgattgctgtatcagcaagaaccggcaaatcttacccgcctggatcaactgacctggcaactgatgcagaacgagcagtcacgcgaagctgccgatttattgctgcaacgctatcctttccagggcgatgcgcgtgtcagccagacgttaatggcgcgactggcgtctctgctggaaagtcatccttacctggcaacgccggcgaaggtggcgattttatcgaaacccttaccgctggcggagcaacgtcagtggcaaagtcagttgccgggtattgcagataattgcccggcaatagttcgcttgctgggcgatatgtcgccttcctacgatgccgcctggaaccgtctggcaaagtgttatcgggacacgctacccggtgtggcgttgtatgcatggcttcaggccgaacaacgacaaccgaacgcctggcaacatcgtgcggtagcctatcaggcgtatcaggttgaggactacgccaccgcactggcggcctggcagaaaatcagtcttcacgacatgagcaatgaggatctgcttgctgctgccaataccgcccaggcggcaggaaatggtgcggctcgcgatcgctggcttcagcaggcagaacaacgtgggctgggaaacaatgccctctacaggtggctgcatgcgcaacgttacattcctggtcagccggaactcgcactgaacgatctcacgcgctcaatcaatattgcgccttctgccaacgcttacgttgcgcgggcgacaatttatcgccaacgtcataatgtcccggcggcggtgagtgatttgcgcgccgcgctggaactggaaccgaataatagcaacacccaggcagcgctcggttacgccttgtgggatagcggtgatatcgcacagtcgcggaaaatgctcgaacaggcgcataaagggctaccggacgatccggcacttatccgacaactggcctacgtgaaccagcgtctggatgacatgcctgcgacgcagcactacgcccggctggtgattgatgacattgataatcaggcgctgataaccccactgaccccagagcaaaatcagcaacgcttcaatttccgccgtctgcatgaggaggtcggtcgccgctggacgttcagtttcgattcttctatcggcttgcgttccggcgcaatgagtaccgctaacaataatgtcggcggcgcagcgccagggaaaagctatcgtagctacgggcaactggaagccgagtaccgcatcggacgcaatatgctgctggaaggcgacctgctctcggtttacagccgtgtatttgccgataccggtgaaaacggggtgatgatgccggtgaaaaatccgatgtccggcaccggtctgcgctggaagccgctgcgcgatcagatctttttcctcgccgtcgaacagcagttgccgctgaacggccaaaatggcgcatccgataccatgctgcgcgccagcgcctcattctttaatggcggcaaatacagcgacgaatggcacccgaacggttcaggctggtttgcccaaaacctgtacctcgatgcggcgcaatatgtccgccaggatattcaggcgtggacggcagattatcgcgtcagctggcatcagaaggtggctaacggacagactattgagccttacgctcacgttcaggacaacggctatcgtgataaaggcactcagggcgcgcagcttggcggagtcggggtccgctggaatatctggaccggcgagacgcactacgacgcctggccgcacaaagtcagtctcggcgtcgagtatcaacatacctttaaggcgattaatcaacgtaacggagagcgcaacaacgcgtttctcaccattggagtgcactggtaa

SEQ ID NO: 6617 - DNA, 891 bp, Escherichia coli
atgcgtaagttcattttcgtattgctgacactgcttttggtcagccctttttcctttgcgatgaaaggtattatctggcaaccacaaaaccgtgatagtcaggttaccgatacccagtggcaggggctgatgagtcagttacgtttgcaaggcttcgataccctggttttgcaatggactcgttacggcgatgcattcacccagccagaacagcgcgcgttattgtttaagcgtgccgcagctgcgcaacaggctggcctgaagctgattgtcgggctgaatgccgatccggaattttttatgcaccagaaacagtcgtctgcagcgctggaaagctatcttaaccgcctgctggctgccgatctccagcaagccagattatggagcgccgtacctggcgtaacgccggatggctggtacatcagcgcggaaattgacgacctgaactggcgcagcgaagccgcccgtcagcctttgctaacatggttaaacaacgcgcagcggttgattagcgatgtttcagcaaaaccggtttatatcagtagttttttcgccggaaacatgtcgcccgatggctatcgccaactgctggaacacgttaaagcaaccggcgttaatgtctgggtacaggatggcagcggcgtggataaactgaccgctgaacagcgtgaacgttatctacaggccagcgccgattgccaaagctccgccccagcaagcggcattgtttatgaactgtttgtcgccggcaaaggcaaaacctttacagcgaaaccgaaaccggacgcagaaattgcctcgctgttagcgaaacgttcctcttgcggtaaagacacgctctatttctctctgcgctatttgcccgtcgcgcacggcattctcgagtattaa

SEQ ID NO: 6618 - DNA, 762 bp, Escherichia coli
atgcaattgagcagcagtgaaccttgcgtggtgatcctgaccgaaaaagaggtagaggtaagcgtcaataaccatgctacgtttacccttccgaaaaactacctggccgccttcgcgtgcaacaataacgtcattgaactctcaacgttaaatcacgtattaatcacccacatcaaccgtaacatcatcaacgattatctgttgtttttaaataagaacttaacctgtataaagccctggtcgcggctggcaaccccggttatcgcttgtcatagccgtacaccggaagtgttccggctagccgccaaccacagcaagcagcaacccagcaaaccctgcgaagcggagttgacgcgcgcattgctttttaccgtattgtctaactttcttgagcaatcgcggtttattgccctactgatgtatatcttacgcagcagcgtccgcgacagcgtctgccgcattattcaaagcgatattcagcattactggaatctgcgaattgtcgccagttcgctatgtttaagccccagcctgctcaaaaagaaattaaaaaacgaaaataccagctatagccagattgtcacagagtgtcgtatgcgttacgccgtacagatgttattgatggataacaaaaatatcactcaggtagcgcaattatgtggctatagcagcacgtcgtactttatctctgtttttaaggcgttttacggcctgacaccgttgaattatctcgccaaacagcgacaaaaagtgatgtggtga

SEQ ID NO: 6619 - DNA, 633 bp, Escherichia coli
atgaaaccaacgtcggtgatcattatggatactcatcctatcatcagaatgtctattgaagttctgttgcaaaaaaacaatgaattgcaaattgtcctgaaaacggatgattatcgcataaccatcgattatctccgaacccgtcctgttgatttaatcattatggatatagacttgcccggaacagacggttttaccttcctgaaaaggatcaaacaaatccagagtacagtgaaagtattatttttatcatcgaaatcagaatgcttttatgctggcagagcgatacaagctggtgctaacggttttgtcagtaaatgcaatgatcagaatgatatttttcatgccgttcagatgatcctctccggatacactttttttcccagcgaaacgctcaactatataaaaagcaataaatgcagtacgaatagttcaacggtcacggtgctatctaatcgtgaagtaaccatattacgttatctggttagcggattatctaataaagaaattgccgataagttattacttagcaataaaacagttagtgcacataaatctaatatttatggcaagctaggtttgcattcaattgtagagcttatcgactacgccaaattatatgaattaatataa

SEQ ID NO: 6620 - DNA, 516 bp, Escherichia coli
atgagaagagtactctttagctgtttctgcgggctactgtggagttccagtggatgggcagttgaccctttaggaacgattaatatcaatttgcacggtaacgttgttgatttctcctgtaccgtaaacacagcggataaggataagacggtagatttaggcagatggcctacgacacaattactgagcgctggcgataccacggcactcgtcccttttagcctgcggctggagggatgtcctccgggttcagttgcgattttatttacgggaacgccggcatctgatgccaacctgctggctctggatgatcccgcaatggcacaaaccgtcgccatcgaattacgtaatagcgatcgctcccggctcgcactgggggaggcgagctcgactgaggaagttgatgcaaatggcaatgtcacactaaacttttttgccaattatcgagcgttagccagcggtgttcagcctggtgtggcgaaagcggatgcgatatttatgatcaattataattaa

SEQ ID NO: 6621 - DNA, 1008 bp, Escherichia coli
atgaagataatctgcagattattattggcgatggcatgtttgtggttaacaaacatatcctgggctactgtttgtgcaaatagtactggcgtagcagaagatgaacactatgatctctcaaatgtctttaatagcaccaataaccagccagggcagattgttgttttaccggaaaaatccggctgggtaggtgtatcagcaatttgtccacccggcacgctggtgaattatacataccgtagttatgtcaccaactttattgttcaggaaactatcgataattataaatatatgcaattaaatgattatctattaggtgcgatgagtctggttgatagcgtgatggatattcaattccctccgcaaaattatattcgtatgggaacagatcctaacgtttcgcaaaaccttccgttcggggtgatggattctcgtttgatatttcgtttaaaggttattcgtccctttattaacatggtggagatccccagacaggtgatgtttaccgtgtatgtgacatcaacgcctaacgatccgttggttacacctgtttataccattagttttggtggccgggttgaagtaccgcaaaactgcgaattaaatgccgggcaaattgttgaatttgattttggtgatatcggcgcatcgttatttagtgcggcagggccggggaatcgaccagctggtgtcatgccgcaaaccaagagcattgcgatcaaatgtacgaatgttgctgcgcaggcttatttaacaatgcgtctggaagccagtgccgtttctggtcaggcgatggtgtcggacaatcaggatttaggttttattgtggccgatcagaacgatacgccgatcacgcctaacgatctcaatagcgttattcctttccgtctggatgcagctgcggcagccaatgtcacacttcgcgcctggcctatcagtattaccggtcaaaaaccgaccgaagggccgtttagcgcgctggggtatttacgcgtcgattatcaatga

SEQ ID NO: 6622 - DNA, 549 bp, Escherichia coli
gtggtcgggcatgaaaatggtataacgctgagccagcctttaggggataccaatgttttgattaaagcgccaggcgcaggcggtgtacgcattgaaaatcaaactggaattttaaccgattggcgcggctatgcggtgatgccgtatgccacggtttatcggtataaccgtatcgcgcttgataccaatacgatggggaattccatcgatgttgaaaaaaatattagcagcgttgtgccgacgcaaggcgcgttggttcgtgccaattttgatacccgcataggcgtgcgggcgctcattaccgttacccagggcggaaaaccggtgccgtttggatcactggtacgggaaaacagtaccggaataaccagtatggtgggtgatgacgggcaagtttatttaagcggtgcgccattgtctggtgaattactggttcagtggggagacggcgcgaactcacgctgcattgcgcactatgtattgccgaagcaaagcttacagcaagccgtcactgttatttcggcagtttgcacacatcctggctcataa

SEQ ID NO: 6623 - DNA, 1914 bp, Escherichia coli
atgaaaatacccactactacggatattccgcagaggtatacctggtgtctggccggaatttgttattcatctcttgccattttaccctcctttttaagctatgcggaaagttatttcaacccggcatttttattagagaatggcacatccgttgctgatttatcgcgctttgagagaggtaatcatcaacctgcgggtgtgtatcgggtggatctctggcgtaatgatgagttcattggttcacaggatatcgtatttgaatcgacgacagtaaatacaggtgataaatcaggtgggttaatgccttgttttaaccaggcactccttgaacgaattggccttaatagcagtgcattccccgagttagcccagcagcaaaataataaatgcatcaatttactgaaagctgtacctgatgccacaattaactttgattttgcagcgatgcgcctgaacatcactattcctcagatagcgttgttgagtagcgctcacggttatattccgcctgaagagtgggatgaaggtattcctgctttactcctgaattataatttcaccggtaacagaggtaatggtaacgatagctatttttttagtgaactcagcgggattaatattggcccgtggcgtttacgcaacaatggttcctggaactattttcgcggaaatggatatcattcagaacagtggaataatattggcacctgggtacagcgcgccattattccgctgaaaagtgaactggtaatgggagacggtaatacagggagtgatattttcgatggcgttggatttcgaggtgtacggctttattcttccgataatatgtatcctgatagccagcaggggtttgctccaacggtacgtgggattgcccgtacggcggcccagctaacgattcggcaaaatggttttattatctatcaaagctatgtttcccccggcgcttttgaaattacagatttgcacccgacatcttcaaatggcgatctggacgtcaccatcgacgagcgcgatggtaatcagcagaattacacgattccgtattcaacagtgccaattttacaacgcgaagggcgtttcaaatttgacctgacggcgggcgattttcgtagcggtaatagtcagcaatcgtcgcctttcttttttcagggcacggcactcggcggtttaccacaggaatttactgcctacggcgggacgcaattatctgccaattacaccgcctttttgttagggctggggcgcaacctcgggaactggggcgcagtgtcgctggatgtaacgcatgcgcgcagtcagttagccgacgacagtcgtcatgagggggattccattcgcttcctctatgcgaaatcaatgaacactttcggcaccaattttcagttaatgggttaccgctattcgacacaaggtttttatacccttgatgatgttgcgtatcgtcgaatggaggggtacgaatatgattacgattatgacggtgagcatcgcgatgaaccgataatcgtgaattaccacaatttacgctttagtcgtaaagaccgtttgcagttaaatatttcacaatcacttaatgactttggctcgctttatatttctggtacccatcaaaaatactggaatacttcggattcagatacctggtatcaggtggggtataccagcagctgggttggcatcagttattcactctcattttcgtggaatgaatctgtagggatccccgataacgaacgtattgtcggacttaatgtttcagtgcctttcaatgttctgaccaaacgtcgctacacccgggaaaatgcgctcgaccgcgcttatgcctcctttaacgccaaccgtaacagcaacgggaaaatagctggctggcaggcgttggtgggaccttactggaaggccacaacctga

SEQ ID NO: 6624 - DNA, 771 bp, Escherichia coli
atgtgtgtaagaaaccaaagcaatcatttctttatactccttatttttgccgtcaggaatacacaaggcgtattaactatgatgactaaaataaagttattgatgctcattatattttatttaatcatttcgaccagcgcccatgctgccggagggatcgcattaggtgccacgcgtattatttatcccgctgatgctaaacagactgcggtatggattagaaatagtcataccaatgagcgctttctggtcaattcgtggattgaaaacagcagcggtgtaaaagaaaagtcattcatcattacaccgccactgtttgttagtgaacccaaaagcgaaaatactttgcgtattatttacaccggtccaccgctggcggcagatcgtgagtctctgttctggatgaatgttaagacgatcccttcggtagataaaaatgcattgaacggcaggaatgttttgcaactggcgattttatcgcgcatgaaattatttctccgtccaattcaattacaagaattacccgcagaagcgccggacacactcaagttttcgcgatccggtaactatatcaatgttcataatccatcacctttttatgtcaccctggttaacttgcaagtgggcagccaaaaactggggaatgctatggctgcacccagagttaattcacaaattcccttaccctcaggagtgcagggaaagctgaaatttcagaccgttaatgattatggttcagtaaccccggtcagagaagtgaacttaaactaa

SEQ ID NO: 6625 - DNA, 543 bp, Escherichia coli
atgaaattaagatttatttcgtctgcgctggccgccgcactattcgccgctacgggtagttatgctgccgttgtagatggcggtacaattcactttgaaggcgaactggtgaatgctgcctgttcagtgaatactgactcggcagaccaggttgtcacactcggtcaatatcgtaccgatattttcaatgctgttggtaatacctctgcattaattccattcactatacagttgaacgactgcgatcctgtcgttgccgctaatgctgccgttgcattttctggtcaggcggatgcaatcaatgataatttattggccattgcatccagtactaatacaacaacagcaacgggtgtcggtattgaaatacttgataatacatccgcaattctcaaacctgatgggaatagcttctcaaccaaccagaacttgatccccgggaccaacgttcttcatttttctgcacgttataaaggcaccggtacaagtgcatcagcagggcaagcaaatgctgacgcgacttttattatgagatacgaataa

SEQ ID NO: 6626 - DNA, 894 bp, Escherichia coli
atgaaaacactggttgtggctcttgggggcaacgccttactccagcgcggcgaagcgctgacggcagaaaatcaatatcgcaatattgccagtgctgtacccgcgttgacgcgcctggcccgttcttatcggctggcgattgttcacggcaacgggccacaggtggggctgttggcgttacagaatctggcgtggaaagaggtcgaaccgtatccgctggatgtactggtggcggaaagtcaggggatgattggctatatgctggcgcagagcttgagcgcacagccgcagatgccgcctgtgacgacggtgctgacgcgcattgaagtttcgcctgatgatccggcgtttttgcagccagagaaatttatcggtccggtttatcagccagaagaacaagaggcactggaagcggcttacggctggcagatgaaacgtgatggtaaatacttgcgccgggtggtggcatctccgcaaccgcgtaaaattctcgacagcgaagccattgagttgttgctcaaagaggggcatgtggtgatttgcagtggcggcggcggtgtgcctgtgacgaaagacggggcagggagtgaagcagtgattgataaagatctcgccgctgcgttgctcgccgagcagattaatgccgatggactggtgatcctcaccgatgctgatgcggtatatgaaaactggggaacgccgcagcaacgtgccattcgccgtgccacaccggatgagttagcgccatttgccaaagccgatggttcgatggggccgaaggtaacggcggtgagtggctatgtcagaagccgtggtaaacccgcgtggattggggcgttatcgcggattgaagagacgctggcgggcgaagcggggacttgtatttcgctgtag

SEQ ID NO: 6627 - DNA, 816 bp, Escherichia coli
atgacaatcatccatcctctgcttgccagccgtagcgcaccgaattatcgccagtcctggcggttagcgggcgtgtggcggcgggcgattaacctgatgacggaaagcggcgaactgttaacgctgcatcgtcaggggagtggtttcggccccggaggatgggtgcttcgccgcgcgcaattcgatgcgttatgcggtggattatgcggcaatgaacgaccacaggttgtggctcaaggcattcgcctcggacgtttcacggttaaacagccacagcgttattgtttgctgcgtattacgccgcctgcgcatcctcaaccgcttgcagctgcatggatgcaacgcgcggaggaaaccgggcttttcgggccactggcgatggcggcaagcgatccgctgcctgctgagttacgccagtttcgtcactgttttcaggccgcgctcaatggcgttaagaccgactggcggcactggctgggtaaaggcccaggattaacgccaagtcatgatgacacgctgagcggaatgctgctggcggcctggtattatggcgctttagatgcgcgctccggtcgcccgttttttgcctgttccgacaatcttcaactcgttaccacagcggtgagcgtcagttatttacgttatgccgcgcaaggatatttcgcctcgccactcctgcactttgttcatgctctgagttgcccgaaacgtaccgctgttgcgattgattcgctgctggtgctggggcatacgtcaggggcagatacgctgctggggttctggcttggccaacaattattacaaggaaaaccatga

SEQ ID NO: 6628 - DNA, 1260 bp, Escherichia coli
atgtttacatcagtggcgcaagccaatgctgcggttatcgaacaaattcgtcgcgctcgtccacactggctggatgtgcaaccggcttcttcacttatcagcgaactaaacaagggcaaaacactgcttcacgccgggccgccaatgcgctggcaggagatgaccggacccatgaaaggggcgtgcgtgggcgcatgtctgttcgaaggctgggcgaaagatgaagcgcaggcgctggcaatactggagcagggggaagtgaacttcattccttgtcaccatgtgaatgccgtcgggccaatgggcggcattacttctgccagtatgccgatgctggtggttgagaacgtgaccgacggcaaccgggcgtactgcaacctcaacgaaggtatcggcaaagtgatgcgttttggcgcttacggcgaagatgtcctgactcgccatcgctggatgcgcgatgtgttaatgccagtattaagcgcggcgctggggcgcatggagcgcggtatcgatctcaccgcgatgatggcacagggcattaccatgggcgatgagttccatcagcgcaacattgcatcctcagcactgttgatgcgcgcgctggccccacaaattgctcgcctcaatcacgataaacagcacatcgcggaagtgatggatttcctcagcgtgaccgatcagttcttcctcaacctcgcgatggcttactgcaaggcggcgatggatgcaggcgcgatgatccgcgcaggcagcatcgtcacggctatgacccgcaacggcaatatgttcgggattcgggtaagcgggctgggtgaacgctggtttactgcgcctgtaaacactccgcaaggtctgtttttcaccggcttctcgcaggagcaggcgaacccggatatgggcgatagcgcgattaccgaaacctttggtatcggtggtgcggcaatgatcgcagcccctggcgtaacacgctttgtcggtgcgggtggcatggaagcggccagagcggtatctgaagagatggcggaaatcttccttgaacgcaatatgcagttgcagatccccggctgggatttccagggcgcgtgcctggggctggacattcgtcgcgtggtagaaaccggcattacgccactcatcaataccggtatcgcccataaagaggcggggatcgggcagattggcgcaggcaccgtgcgggcaccgctggcgtgctttgaacaggcgctggaagcactggctgcaagcatgggtattgcttga

SEQ ID NO: 6629 - DNA, 1176 bp, Escherichia coli
atgaacggacaactgcaatacaaccgtggcctgactgaaccccgcttgctgcgttcggcgctggcggtacgcgttaccgctgtgatgctgctctgttttctcggctgggcgtggtacttccagcttgatgaagtcaccaccggcagcggcacggtagaaccttccgggcgcgaacaggtggtgcagtcgctggaaggcggaattctgtatcatctcgacgtcaaggttggcgatattgttgaacagggccagccgctggcgcagcttaaccgcaccaaaacggaatccgacgtccaggaagcaatgtcgcggctgtatgcggcactggcaacctcggcgcggctgcgggccgaagtgagcaataaaccgctggtcttccctgacgaactgaataaattccccgaacttatcgagtcagaaacggcgttgtacaacactcgccgcgacgggttgaacaaagccaccaccgggctgacgcaggggattagcctggtcaaccgtgaactggcgatgacccagccactggtgaaacagggggcggcgagcagcgtcgaagtgctgcgcctgcaacgtcaggccaatgaactggaaaacaaactcagcgacgtgcgcacgcaatattacgttcaggcgcgcgaagagttagcgaaagccaatgcggaagtagaaacccagcgttcggtgatccgcgggcgggaagattctctcacccggctcaactttaccgcgccggtacgtggcattgttcaggatattgatgtcaccacggttggcggcgtcattgcccccggtggtaaactgatgaccatcgtgccgctggatgagcaactgctgatcgaggcaaaaatctccccgcgcgatgtggcgtttatccatccggggcaaaaatcgctggtgaaaataaccgcttacgactactccatctacggcggcctgccgggagaagtgacggtgatatcaccagacaccgtgcaggatgaagtgcggcgcgatgtttattactatcgggtgtacattcgcactttcagcaaccatctggaaaacaaaagcaaacagcaatttccgatattccccggcatggtggcgacggtcgatatccgcaccggcaaaaaaagcgtgctggattatctgttgaaaccctttaataaagcacaggaggcgttgcgcgaacgatga

SEQ ID NO: 6630 - DNA, 2163 bp, Escherichia coli
atgaaaaaaaatgcccagtccgtggaagcctggctggaggcgatgatcgccgtggcgcgctattaccgcctcgatttttcccaggagaatgtgcgcgcgaccgtcaactgggagcgcgacagcaaacgggaagagttactcactgatatggcgcggcagttagggatggggctgcggctggtggaattttccgccgactcgcttaacccgtggcggctgccgctgatcgcggtgtttgataatcaacagattggcgtgatcacccgccgcgacaatcacgacaatatcagcgttcagttcagcggtgacgaagggctggaaaccacattaaacgtcacggatatagaagacaaaatcgttgaactggcgctactgcgcccgctcagcgcaattcccgatgcgcgggtagacgactatattcgcccgtatcaggcgaactggttctggaatctctcgctaaaagactggcggcgctatggcgatattatgctggcgtcactggtggcgaacgtgctggcgctggcggcgatgattttctcgatgcaggtttacgatcgggtggttccggcgcaatcgtacccgacgctgtgggtgctgttcgctggggtgatgatggcgatcctgtttgaattctgtatgcgcatggtgcgcacgcatctttccgatgtgattggtaagcgggcggatctgcgtatttcggatcgcgttttgggtcacgcattacggctgaaaaacaacgtgcgatcgaaatccaccggatcgtttatctcgcagatccgcgagctggaatcggtgcgggagctgattacttccaccaccatcggcgcggtggcggatctgccgttcttcctgctgtttgtctttattctgtggatgattggcggctggctggtgctggtggttttgctggcgctgccgttgctggtgatccccggcctgctggtgcaacgcccgctggcgcggctggcgaacgaagggatgcgcgagtcggcggtgcgcaacgctacgctggtggaagccgtgcagtcgattgaagacattaaactgctgcgcgccgaacagcgttttcagaatcagtggaaccacaccaacgacgtggcgtcatctatcagcatgaagcaacgttttctcaccgggctactgctcacctggacccaggaagtgcaatccatcgtctacgtcgtggtgctgttggtgggctgctttatggtgatgaatggcgacatgaccaccggcgcactggtgggaacgacgatcctggcttcgcgcactattgcgccgctgtcgcagatttccggcgtactctcgcgctggcagcaggcgaaagtggcacgcaacggcctcgatgaactgatgaagcgcccggtggatcagccggaacacggcaaactggtgcataaagcggtgctgcacggtaattatcagttcagcaacgcggtgttttattacgacgaagaagagaagattgccgatgtggcgatcggcaaactcaacattcaggctggtgagaaaatcgccattctcgggcgcaacggcgcgggtaaatcaacgctactgcaaatgctcgccggaatgcgtatcgcccagcaggggcaggtgctgctggataacatcagcatcgggcaacttgatccggcagatctgcgccgcgacatggggctgctgagccagaccgggcgactgttttttggttcgctgcgggaaaacctcaccatggggatgccggaggccagcgatgaagatatcgaacgcgcattaaccctcagtggggcgctgccgtttgtgcagaagcagaaaaacggcctcaactacatgattcaggaagggggatttggtctttctggcggtcagcggcaaacgctgctgctggcgcggcttctcatctctcaacccaatatcgtgctgctcgatgaacccagcgcctcgctggacgaaatggcggaagcgtatttaatcgaacaactgaaacagtggattgggcatcgcacgctggtcatcgctactcaccgcacggcgatgctgcaactagtggacaggatcatcgtgatggatcaggggcggattgtgatggatggcgcgaaagaggccattttgcgtgaacagagcgaacccacggcgcgacgggtggtgttgcaggagaagaataaggggtctgccgcatga

SEQ ID NO: 6631 - DNA, 10893 bp, Escherichia coli
gtgacgggtgccgcggcgggcgacacagttaccgttacactgggtggcaacacctacaccgctacggtgcaggctaatttaagctggagtgtcagcgttccggcggcggatattcaggcgctgggtaacggcaacctgacagttaacgcctcggtcaccaatggcgttggcaacacgggcagcggctcgcgcgatatcacgatcgacgccaatctgcctggcttacgggtcgataccgtggcgggcgatgatgttattaacagcattgagcacaatcaggcgctggtgataacaggtagcagcaccgggctgacggcaggaacggcattaacggtcgtgattaacaacgtcacttacgctgccacggtgttagctgacggtacatggagcctcggtgttccggcggcagacgtcagcaactggcctgcgggtacggtggatatcacggtaagcggcaccaacagtgccggaacaacctccaccattactcatccggttaccgtcgatctgacggcggtcgccatcaccattaacactctctctggtgatgatgtgatcaacgccgtcgaaaaaggcgaaacgctggtcgtaagcggcagcaccagcggtgtggaagccgggcaaacggtgactgtcacctttggtggcaaaaattacaccaccaccgtggaagctaacggcagctggacggtgaatgtgccgcctgccgatctcgctgcgctgccggacggcgcgggcaacgtgcaggcgagcgtcagcaatattaacggtaacagcgcccaggccgatcgcgcgtacagcgtcgatgccaccgcgccgcttgtgaccatcaacaccattgccagcgacgatatccttaacgtgagcgaagcgggcgcggggatcaccatcagcggtaccaccacggcgcaggccgggcagacgctgaccgtcacgctcaataacaacacgtaccagaccaccgttcaggcggatggcacctggagcgtgaatgttccggcagcggatttaagcggattaaccgccagcagttacaccgtgaccgccacggtgagcgacaaagcgggtaacccggcaagcgccgaccacgcgctggcggtggatgtcaccgcgccggatctcaccattaataccgtcgcaggtgatgacattatcaacgccatcgaacatggtcaggcgctggtggtccgcggcaccagtacgggcgcggcggcgggcgatgtggtcacggttaacctgaacggtaaaaactacaccaccacgctggacgcctccggtaactggactgtgggcattccggcggcggatgtcacggcgctggcgaccggtagccagaccatcaccgccagcctgagcgatcgcgcgggcaacagcgacagcacgactcacgatgtgaccgttgatctcagcggcccgacgctgaccatcaataccgtctccgacgatgacattattaacagtacggagaaaacccaggatctgatcatcagtggcggctccagcggtctggcgaccggcaccacggtcaccgtgatgttgaacggcctggcgtacagcgccaccaccgatagttccggcaactggagcgttaccgtgcctgcttcggcggtcggtgccctgggcgaggcggtgtaccagattagcgccagcgccaccgacagcgcgggcaacagcggcagcaccacccatacggtgaatgtcgaatcgctcctgcctggggtgatcattaataccgttgcgggcgatgacattatcaacgccgctgaaattggtgttaaccagaccattagcggacaggttacagggacggcggcagccggagatacggtcacggtcacgctcggcggcaatcaatacaccgccaccgtgcagccagatttaagctggagcgtcagcgtgcctgcgaacgttttgcaggcgctgggcaacggagaactgaccatcagcgcctcggtaaccaattccgcaaataataccggcaccgcaacgcacgatatcgtgatagatgccaacctgccaggcctgcgggtcgataccgtggcaggcgatgatgtgattaacagcatcgagcacactcaggcgttggtggtcaccggtagcagtagcggactggcggcgggggcggcgttgacggtggttattaatagcgtcacctacggcgcaacggtactcgccgatggcacctggagcgtcggtgttccggcggcagatgtcacaaactggcctgcggggacggtcaatattgccgtctctggcactaacactgccggaaccacaaccagcattactcatccggtcacggtcgatctcgcggccgtggcgatcaccatcaaccccctttccactgacgatgtcattaacgccgccgaaaaaggcagcgatttgcagctctccggtaccacctccgatgtggaagcggggcaaaccatcaccgttatcttcggcggcaaaagctacaccaccacggttgccgcggataatagctgggggctgacgatcccagcagccgatctcgcaaccttgccagacggcgcagcaaacgtacaagccagcgtcagcaatgtcgctggcaacagcgcccaggcaacgcatgcatacagcgttgatgccactgcaccctccgtcaccatcaacaccatcgccacggacgatattcttaacgccgccgaagcgggatcggcgctgaccatcagcggcaccagcacggcggaagccgggcagacggtgaccgtgacgcttaacggcgtcaattacagcggtaacgtgcaggcagacggaagctggagcgtcagcgtcccgaccggcgatttagctaacctcactgccagcccctatacggtgagcgcctcggtcagcgacaaagccggaaatccggcctcggcgatgcataacctgacggtggatctcgttgcgccggtcgttaccatcaacacggtagcgggcgatgacatcattaacgccacagaacacggacaggcgcagattatcagcggctcggcaacgggcgcgacgacgggtaacacggtttccgtgacgattggcacgaccacttacaccaccgtgctggacgccaacggcaactggagcatcggcgtgcctgccagcgtgatttccgcgctggcgcagggcgatgtgaccattaccgccacggtcaccgactccgcaggcaacagcggcacggcctcgcacactgtcaccgtggcgctcggcgcgccggtgctcgccattaacaccatcgccgtcgacgacatcatcaacgccacggagaaaggcgcggatctggcgatttccggcaccagcgaccagcctgcgggcacgcagataaccgttacgctcaacgggcaaaattacaccaccactgccgatgcatccggtaactggagcgtgaccgttccggcgtcacgggtgagcgccctcggtgaagccacttacacggtgaccgcctccgccactgacgccgatggcaacagcggttccgccagccataacgtgcaggttaataccgcgctgccgggcgtcaccattaacgttgtcgcgagcgacgatattattaacgctgccgaagcgggcgcgggccagagcatcagcgggcaagtgacgggcgcggcagcgggcgacacggtaaccgtcacgctcggcggggcgacttacactgccacggtgcaggcgaatttaagctggagtattaatgttccggcagccgctttacaggcgctgggcaacggcgagctgaccatttcggcttcggtaacgaacagcgtaggtaataccggtaacggcacgcgtgaaatcaccatcgacgcgaatctgcccggtctgcgggtcgatactgtcgctggcgatgatgtggtcaatattatcgagcacggacaggcgctggtgattaccggcagcagttccggtctggcgacgggcagtaacgtcacgctgaccattaacgggcaaacctatgttgcggcggtactggcggatggctcatggagcgtcggcgttccggcggtggatgtcagcgcctggcctgcggggacggtcacgattacggcgagcggtagcaccacagccggaaatccggtcagcgttacgcatccggtgactgtcgatctctcggcgattgccgtcagcatcaacgccattaccgccgatgatgtgattaacgccgctgaaaaaggcgcggcgttaacgctcaccggcagcacttctggtgtcgaagccggacaaacggtcaccgtcacctttggcggcaaaacttacactgcaagcgtcgcggctaacggttcctggagtaccacggttccggcggcagatatggcagccctgcgtgatggcgatgccagcgcacaggccagcgtcagcaatgttaacggcaacaacgccactactacccacgcttacagcgtcgatgccagcgcgccaacggtggccattaacactattgcaggcgacgatattcttaacgccgccgaagcgggtgctgcgctgactatcactggcagcagcacggcggaagccgggcagacggtgaccgtcaccctcaatggcgaaaactatactggcacggttcaaacggacggtagctggagcgtcagcgtaccgccagccgacgtaagcgccctgaccgccagcaactacaccgttagtgcggcggtgagcgacaaagccggaaacccggcctcggttaatcacaacctgacggtggatacttccgttccggtcgtcaccatcaacacggtggcaggcgatgatgtgatcaacgcgacggaacacgcccaggcgcagatcatcagcggctccgccaccggtgcggcaaccggtagcaccgtgacggtgactatcggcacaaataccttcaccacggtgcaggcagacggcagttggagcttaacgctgcctgccagtgacctaaccgcacttgccaataacggctacaccctgaccgccacggtcagcgatcaggcgggtaaccctggcagcgccagcaaaggtgtgaccgtcgataccaccgcgcccgtcatcagctttaacaccgtggcgggcgacgatgtgattaacaacgttgaacacactcaggcgcagattatcagcggcaccgccacgggtgcggtggcgggcgaccgcctggtggtgaccatcgccgggcagcagtatgtcaccagcaccgatgccagcggcaactggagcgttggcgtgcctgccagcgtgatttccggccttgcggacggcacagtgactatcagcgccaccatcaccgatagtgcaggcaacagcagcacgcagacgcacaatgtgcaggtcaatacggcggcagtgtcgctctcggtcagcaccatcagcggcgataaccttattaatgccgccgaagcaggcagtgcgctgaccctgagcggcaccggaacgaactttgccgcaggtatagtagtgaccgtgttgcttaacggcaaaggctacagcgctaccattcagaacaacgggagctggagcgtgaatgtgccggcggcagacgttgcggcgcttgccgatggcaccagctatacggttagcgcctccgcgcaggacagtgctggaaacagcgccacggcctcacgcagcgtggcggtggatctcaccgcgccggttatcagcatcaacaccgtttcgacggacgatcgactcaacgccgccgaacaacagcagccgttaacccttaacggctcgaccagcgcggaagtagggcagacggtcactgtcacctttggcggcaaaacttacactgccacggtggccgccaatggcacctgggcgcttaacgtgcctgcggcggatctggccgcgctcgggcagggggcgcagaccattaccgccagcgtgaacgatcgcgcgggtaatcttggacaggtcacgcacaccctgactgtcgatactgttgcacccacggtgaccatcgccaccgtggcgggtgacgatattatcaacagcgtcgagcaggcggcagggcaaaccatcagtggcacgacgaccgcagaagccgggcaaattgttacggtgacgtttaacggacaaacctggacggcgacggtgggcagcggtggcgcctggtcagtgtttatccccggacaacaattttccggcctgagcaacggcagctacaccatcggcgctacggttaccgatctggcggggaatccgggcagcgccactcataacgtcaccctcaatggcgacgtgccgacggtgaccattaataccttcgctggcgatgatattgttaacgctgcggaacattccataccgctgacaatcagcggcacgaccacggcgcccgcaggccagaccgtgactctgacgctgaacggcaagacttacaccaccaccgtacagacgggcggaagctggagctacactgttggcagtgccgatatcggcgcactggctgatggcggcgcatacgtgattaacgctcaggtcagcaatgccattggcaataccggcagcagcaatcacaccattactgtcgatctcagcgccccggcgatgggcattaatatcgattccctgcaagccgacactgggcttagcgccagcgactttatcaccagcgtcagtccggtggtggtcaacggctcgctcaccgccgcgcttgccagtaacgagacggcacaaatcagtatcgacggcggcgtaacctggaccacgctcaccgttaccggcacgacctggcgctataacgacagccgcacgctgaccgatggcagttatctctatcaggtgcgggtgattgacactgcgggcaacgtcggtgccaccgacagccagaatgtggtgatcgacactaccgcgccagacccagcggtgaaaaccatcgccattagcgcgatcaccaccgatactggattgattactaacgattttgtcaccagcgacacgacgcttgcggtgagcggcacgctgggcgcggcgctttctgctggtgagttcgcgcaaatcagtatcgacggcggcaccacctggcagaacctgtcagtaagcggcttaacctggacctggcttgacgggcggacgctgaccgatggcaactacaattatcaggtgcgggtgatcgacaccgccggaaatatcggcgcgaccgccagccagatagtcactgtggacaccaccgcgccgctggcgagcaaaaccatcaccattgcgggcatcagcgatgacaccgggttaagcagcagcgatttcgttactcgcgacaccacgcttaccgtgcgcggtacgctcggagcggcgcttgccgccgatgaacgggcgcaaatcagcctcgacggcggcgttacctggaccaccttaaccgttatcggcaccaactggagctatgccgatggtcgcacactgaccgacggcacctggaactacacggtgcgggtggtggatctggcggggaacgtcgggcagacggcgacgcaaaacgtggtggtcgataccaccagcccggaagcggcgaaaagcatcaccattaccggtatcagcgatgacaccggagccagcagcagcgattttattaccagcgacacctcgcttaccgtgcgcggcgtattgggcgcagcactcggggctaatgagttcgcacaaatcagtaccgacaacggcgcaacctgggtaaacgtgacgctggcagcagacggcctcaactggagttatgttgacggacgcacgctcaccaacggcaccaccacctggcaggtgcgggtggtcgatctggcgggcaacgttggcgcaaccggcagccagtcggcgctgatcgacaccgtgaacccggcgcaggtgttgaccatcgccagcatcagcaccgacacggggagttcggcaactgactttatcaccagcgatacctcgctcacgctgaccggttcgctgggggcggggcttaccagcggcgaagtggcgcagattagcctcgacggcggcgcgacctggaccaccctcaccaccaacggtacgcagtggacttacaccgacagccgcacgctgaccgacggcagctacgtttaccaggtgcgggtgctggatctggcggggaatactggcccggtggtgtcgaaaacggtggtggtcgatacgattaaccccaccgccacgccgaccattgtgtcgtacactgatgacgtcgggcagcggcaggggacattaagcagttcgcaggccaccgacgacactacgccgttgctgaacggcgtgctctccggcccgcttgccagcggtgaagtggtttacctctaccgtaacggcctgctgttaggcgcggtgacgatggtcggcgcactgaactggacctacagcgacagcgggctggtcagcggtgcctatacctacagtgcgcgagtggtggatctggcggggaacatcacctcctccagtgattttgtcctgacggttgatacctctattccaaccacgctggcgcaaattaccagccagaccacgcgcgataccacgccgattatcagcggggtgatcacggcggcactcgccagcgggcagtatgttgaagtggtgatcaacggcaaaacttacacttcgcagccaggcggcgcggtggtggtcgatccggcgcacaacacctggtatgtgcaactgccggataccgacacgctggcggcgtctgcgaccgcctataacgtcaccgcgcaggtaaaaagctcggcgggcaacggcaacactgccaacgtcagcactggcacggtaacggtcaacgcggcgattgattacactccgacctggaccaccgccagcaaatctaccgcctggggattgacctacggcctcgactcgcacggaatgtggacggtgctggcaaaccagcaggtaatgcaatcgactgacccactcacctggtcggagaccgcgctgacgctgtatcagagcggcaacaactacgccaccagctccatcgccgattacgaccgtaacggcacgggcgatctgtttatcacccgtgatgactacggtacaggctatatcaacggctttaccaataacggcgacggcaccttttccagcgctattcaggtcaccgtcggcaccctgacgtggtatggctcagtagtggcatttgataaagagggcgacggctatctcgacttctggattggcgacgcgggcgggccggactccaacaccttcctgtggaacaacgcaggtacgctggtaggtaactccaccacgtcgaacagcggcggtagcgccacggtgggcggggcggtgacggggtatctttcgctcaacgaaggttctggcgtcgatctgaacaatgacggcaggatcgacctggttcagcacacctacaacctgaacaactattacacgctatcttcgctcatcaaccaggggaatgggacgtttgtctgggggcagaacaccattaacaccttcctcagcacggcgggcagcggtggtaactcgacgtctgtctccatgacctgggcggatttcgatggtgatggcgatatggatctcttcctgccagccagccagggaagagctaactacggctccctgttattcaacaccaacggcgtgctgggcagtccggtggcggtgggggctacggcaaccacctacgccagccagtttagcgtggcggtggactggaaccacgacggcctgatggatatcgcccgtatcgcccagaccggacaatcgtatctttacaccaacgttggtggtgccagcaactggacacaatcggccctcggcggcagtcagagcggcactaccagcggcgtggcggcaatggactacgactgggacggcgcggtggatgtgctggtgaccaaacagtcgggcagcgtgttcctgatccgcaacaccaacacggtgagctacggcacctcgctgcacctgcgcatcaccgatcctaacggcattaacgtctattacggcaataccgtaaaactgtacaactcggcgggggtgctggtcgctacgcaaatcatcaacccgcagtcggggatgggggttaacgacacctcggcgctggtcaacttctacgggctgaatgccggagaaacctacaacgcggtgctgttcaaatccaccggcaccaccgccagcaatatcgaccagacggtcaacaccagctggggcggcttacaggccaccgatgccactcacgcttacgacctcagcgccgaagcaggcaccgcgagcaacaacggcaagttcgtcggcacgggctataacgacaccttctttgccaccgcaggcaccgacacttacgacggttccggcggctgggtgtacagctccggcaccggaacgtggctggcaaacggcggcatggacgtggttgatttccgcctctcgacggtgggcgtgaccgcgaacttaagcagtaccgccgcacaggccaccggctttaacacctcgacatttaccaatatcgaaggcatttccggctcgaattttaacgacactctgaccggcagcagcggcgataaccaactggaaggacgcggcggcaacgacacccttaacatcggaaacggcggtcacgataccttgctctataaactgctcaacgccagtgacgctaccggcggcaacggctcagacgtggtgaatggctttacggtagggacatgggaaggcaccgccgacaccgatcgcattgatatccgcgagttgttacagggcagcggctacaccggcaacggcaaagccagctatgtcaacggtgtggcaacgctggatgcccaggccggaaacatcggtgattttgtcaaagtcacccagagcggcagcgacactatcgtgcagatcgaccgcgatggcacgggcggcaattttgcgacagctaacgtggtcacgctgacgggcgtgcacaccgacctcgccactttactggcgaatcatcagttgatggtggtgtag

SEQ ID NO: 6632 - DNA, 6591 bp, Escherichia coli
atgagcctgattattgatgttatttcgcgtaaaacatccgtcaaacaaacgctgattaatcctggcgacgtcacggttgttatttatgagccttccgtggtgcaggttcatgctcaggcctctgccgttgcgcgttacgtccgtgaaggaaatgacctgctgatctatatgcaggacggcacggtgatccgctgcaacggttatttcctgcaagcggcgaataccgctgaacaatcggaactggtgtttgccgatggacaacagctcacccacgtcacctttgccgatactgctgcgggtggattagcccccgtagaactgactgcccagaccaccgcgattgaaagcattgcgccatttcttgataccattgctcagaccagcaccttcccatggggatggctggcgggggcggcggtaggtggtggcgcgcttggtgcactgctggcaagcggtggcgatggcgactcgaaaacagaagtgattaataaccctccgccacccgctgagcctggcaacgccacaccatcatttttagttaccgataatcagggcgatcagcgcggcattctcgccaccaatgacatcaccgatgacaccacgccaacctttagcggcagcgggcaggcgggggcgactattcagattaaagacagtaacggcaatactattgccagtactcaggtagacaacaacggtcagtggagtgtctcgttacccacgcaaagtgcaggtgaacatacctggtcagtggtgcaaattgtcggcagtaccatcactgacgccggttcgataacgttaaccatcgacaatagtcaggccagcgtgcaggttgccaccaccgcaggcgataacattattaacgccagcgaacaggccgccgggtttacgctttctggcaccagtagccatctggcgcagggaacagaactcaccgttacgctaaacggcaaaacctacaccaccagcgtaggcgctaacggtgcctggagcgtgcaggtgccgaccgccgatgcacaggcgttaggcgaagggaatcaggcggtgctggtcagtgggaaagacgccacaggcaatacggtcactggcgcgcagctgctaacggtcgatatccaaccgccaacgcttgccatcaacaccatcgctcaggacaacatcatcagttctgcggaacataacgtcgcgctggtactaagcggcacgtcgaatgcagaagcggggcaaaccgtaacactgaccgtcaacgggaaaagccatacagcaaccgtcggtagcgacggaacctggcaagtgacgctgcctgccacggaagtccaggcactggcggagggtaattacgctgtcaatgccagtgtcagcgatcgggcagggaacagcaccagccacagcgcgaatttcacggtagacacctcagcacccgtggtcagtgttaataccgtggcgggcgacgatattcttaataatgccgagcaggccgtcgcgcagatcatctccggacaagttagcggtgcttctcctggcgatacggtaacggtgaaattgggcactcatgtcctgacgggcatcgtgctggcagatggcagctggaatgtggcactggacccggcggtaacccgcacgctggatcgcggagccaatacgattttcgtcaccgtgacagatgctgcaggaaatactggcgcggcgtctcgagcaatcacgctggtcggcgtttctccgttgatcaccattaacaccgtctccggcgatgacattatcagtggcgcagaaaaaggtgcgccactgacccttaccggtagcactcaacaggccgagacaggacaaaccgtcacagtaaccctggctggacagagttttaccactaccgtgcaggccgatggctcctggagtctgacggtacctgccgccgcgatgggaaatctgcctgacggcgcggtggcgattaccgcttctgtgacggatctcagcggcaataccggcaacacctcccgcaccattaccgtcgacagccaggccccggccttaagtatcgatccactgaccgctgataacatcattaacgctgccgaaagcgggcaggatctgcccatcaccggcaccaccgacgcccagccggggcagacggtgaccgttacgcttaacgggcagacgtatcagggcgtcgtgcagtcagacggcacctggagcgtgaccgttcccgccgccaacgttgacgcactggctgacggcaacgctacggtcaccgccagcgtgaacgatgttgccggtaacccgaccagcgtttcacgcgtggcgctggtcgatgccacgccgccggtggtaaccattaatccggtggcgaccgataacgtcatcaacacgccggaacacacccaggcgcaaatcatcagcggcacggtcaccggtgctcagacgggcgatatcgtcaccgtgacgctgaataatgtggattacaccacggtggtggatggttccggcaactggagtctgggcgttccggcttccgttgtcagcggactggtggacgacagttatcctgtcagcgtctcggtaaccgacaaagccggaaacacgggcagccagtcattgaccgtcacggtcaataccgccgcgccccttatcggcattaacagcattgcgggcgatgatgtgattaacgccagcgaaaaaggagccgatgtccagattaccggcaccagcgatcagcctgttaataccgccatcaccgtaacgctgaacgggcaaaattacaccaccacgaccgacgcctccggcaactggagcgtcacggttccggcatcggcggtaaccgcactgggccaggccaactacacggtaacggcggcggtgaccagcggtatcggcaacagcgccaccgccagccataacgtactggtcgacagcgcgttgcccggtatgaccattaacccggtggcaaccgacgatgttattaacgccgccgaagcgggcgtagcgcaaaccatcagcgggcaggttactggagccgccgttggcgacacggtaacgattacgctgggcggtaatacttacaccaccaccgtgcaggccaatttaagctggagcgtgagcgttccagcggcagatattcaggcgctgggtaatggcgatttgacggtgagtgcctcggtcaccaatcaaaacggcaacaccggcagcggcacgcgggatatcaccatcgacgccaatctgcccggtctgcgggtcgatacggtagcgggcgatgatgtggtcaatatcatcgaacacgggcaggcgctggtggtcaccggcagcagctcggggctggcagaaggcacgccgcttaccgttacgattaataatgtggaatacaccactgcggtgcaggccgatggtagctggagcgtgggcgttacagcggcgcaggttagcgcctggcctgcggggacggttaatattgctgtatccggggaaagtagcaccggaaacccggtgagcattacacatccggtaacggtggatctcactccggcagctatcaccatcaacactatcgccacggacgatgtgattaacgccgcagaaaaaggcgcagatttaactctttccggcaccaccacgaatgtagaagccggacaaacggtcaccgtgacctttggcggtaaaaattacaccgccagcgtggcgagcgatggtagctggactgccaccgttcctgccgccgatctggcagcattagctgagggcagcgcctccgcgcaggccagcgtcagcaatattaacggcaatagcgcctcggcggtgcataactacagcgtcgacagcagcgcgccaaccatcattatcaataccgttgccagcgacaatatcgttaacgccagcgaagctgatacgggtgtgacggtgagcggcagcaccaccgctgaagcggggcagattgttacggtaacgcttaacagcccaactgtgcagacctatcaggcaacggtgcaggcggacggcagctggagcatcaatattccggcggcagatcttgaggcattgaccgatggcagccacaccctgaccgccacggtcaatgacaaagcgggcaacccggcgagcaccacgcataatctggcggtggatctcaccgttccggttctcaccatcaacatcattgcgggcgatgacattattaacgcgaccgaacacgggcaggcgctggtgatttccggctccagcactggcggagaggcgggagatgtcgtcagcgtcacgctaaacaataaaacctacaccacgacgctggatgcctccggcaactggagcgtcggcgttccggcggcggatgtcacggcgctgggtagcggcccgcaaaccatcactgccagcattaccgacgcggcaggcaatagcgatgatgccagccgcacggttacagtgaatctgaccgcgccgaccattggcattaacaccatcgccaccgatgacgtgattaacgccaccgaaaaaggcgcggatctgcaaatttccggcaccagtaatcagccagcaggcaccacaattacgctgacgctgaacgggcaaaattacactgcgacgacggacgccgcaggcaactggagcaccatagtgcctgcttccgcagtaggtgcgctgggcgaagccagctacacggtgacggcgaacgtcaccgacagcgcaggcaacagcaattccgccagccataacgtgcaggtcaataccgcgctgcctggtgtcaccattaatccggtggcgagcgacgatattattaacgccgccgaatcgggcgtggcgcagaccatcagcggccaggtgacgggcgcggcggcgggcgatacggttaccgtaacgcttggcgggaaaacctacaccgctaccgtgcagggcaatttaagctggagcgtggacgttccggtggcggatattcaggccatcggtaatggcgagctgacggttaatgcctcggtaaccaacggtgttggcaatactggcagcggttcgcgcgatattgtgatagacgccaacctgccgggtctgcgcgtcgataccgtggcgggcgatgatgtggttaacagcatcgaacacggtcaggcgctggtgataaccggtagcagcagcgggctggcagcgggcgcggcgctgacggtggtgatcaataacgtcacctatggcgcgacggtattagccgatggcacatggagccttggcgttccggcagcagatgtgggcaactggcctgcggggacggtgaatatcacggtttcaggtgctactagcgcaggaaacccggtcaccatcacccatccggtcaccgtcgatctggcggcggtggcgatttccattaacaccgtctctggcgatgatgtgattaacgccgccgaaaaaggggcagatttgaccctttccggcagcacctccggcgtggagccggggcaaacggtcaccgttatctttggcggcaaaacctacaccgccaccgtagcaggcgatggcagttggacaaccagcatacctgccgccgatctcgccgcattacgcgacggcgacgccacggtgcaggcgagcgtcagcactattaacggcaacacggcttcggcaacccacgcctacagcgtcgacgccacggccccgacacttaccattaacaccatcgccaccgacgatattctgaacgccgccgaggtgggcaatccgctaaccatcagcggcagcagcaccgccgaagcggggcagacggtaaccgtcacgcttaatggcgtgacttacagcggcaccgtccaggcggacggcagctggagcgtcagcgtgccgacggcagatctcagcaatctgaccgccagccagtacacggtcagcgcctcggtaagcgataaagcgggtaacccggcgtccgccactcacgggctggcggtggatctcaccgttcccgtattaaccatcaacaccgtctccggcgatgacattattaacgccgccgaacacgaacaggcgctggtgatttccggttccagcactggtggcgaagcgggtgatgtcatcaccgtcacgctaaacagtaaaacctacaccaccacgctggacgcttccggcaactggagcgtcggcgttccgctgtcagatgtcaccgcgcttggcagcggcccgcaaaccatcactgccaccattaccgacgcggcaggcaacagcgatgacgccagccgcacggtcaccgtgaatctcaccgcgccaaccattggcatcaacactatcgccagcgatgacgtgattaacgccacagaaaaaggcgcggatctgcaaatcaccggcaccagtaatcagcccgcaggcaccacaataacggtgacgctgaacgggcaaaattacaccgctaccaccgatagcagtggcaactggagcgccacggtgccagcctcggcggtcagtgcattaggtgaagccaactacacggtaacggcgagcgttaccgacacggcaggcaacagtaattccgccagccataatgtgctggtcaacagcgccttgcctgccgtcaccattaacgcggtggcgaccgatgacattattaacgctgccgaagcgggcaatgcgcaaaccatcagtgggtag

SEQ ID NO: 6633 - DNA, 1356 bp, Escherichia coli
atggcgcgattccagtttaaaaacagtaaaaataatggacttatttttttaataagttttatggtgatgggagaagctacaattgctgcaccgctgccacaatgggcgaacgccccagcggtaacgccagttgcccaattatctttacaggaaagtatattacgcgcctttgcgcgaaatcccgacgtcactcaacaggcggcgcagataggtattggcgaagcgcaaattgatgaagccaaaagtgcctggtatccgcacgttggattaaccggcaatgcgggaccgtcccgacaaacggactccagtggcaggcttgataacaacgtttcgtatggcataaccctgacacagctggtgtatgactttggtaaaactaacaacgatatcaaactgcaaactgccgcccgtgacagctaccgctttaaattgatggcaacattaaccgatgttgcagagaaaacggcaactgcctatatggaagtcagtcgttatcaggctttgtgcgatgcggctcaacgcaatattcactcgctggaaaacgtctacaacatggcggcattgcgcgctaacgctggcctgaactcgtcgtcggatgaattacaggcccagacgcgcattgccggaatgcgctcaacgctggagcaatatcaggcgcagatggcgagcgccaaagcgcaactggcggtgctcactggcgtacagccggaggcgatagccgcgccacctgctgaattagccgagcagccggtctcgctgaaaaatattgattaccagtccatcccactggtgctggcggcagaaaacttacgccagtcagcacagtacggtgtggaaaaaacgaaagcgcaatactggccaacgctcagtattcaggggggcaaaacgcgctaccagaccagtgaccgctcgtattgggacgatcagttacaactgaacgttaacgcgccgctgtatcagggcggcgcagtttcagcccaggtgcaacaggctgaagggcaacaaaaaatctctgcctcgcaggtcgaacaggcaaaactggacgtgctgcaacgagcgtctgtggcatatgccaactggacaggcgcacggggtcgcgaagaagccggtttagcacaatccgaaagtgcgcacaaaacgcgagatgtgtaccaaaatgaatataaattgggcaaacgcagtctgaatgatctattaaccgtcgagcaagatgtctttcaggcgcaatcggctgaaataaatgccaattatgatggctgggtcgccgccgtaaattatgccgctgcggtgaataaccttattccattagcgggaattaaacagggcttatacaacgacttacccgacttgaaataa

SEQ ID NO: 6634 - DNA, 495 bp, Escherichia coli
atgatgactaaaacccaaataaataaattaaaaaaaatgatgactgatttagactatccatttgaagcaccgctcaaggaatcatttattgaaagtataatccaaataaaatttaattctaattcaactaattgcctggagaagttatgtaatgaagttagtattctctttaataatcaacctgattatcttacttttttaagagcaatggatggattcgaagttaatggattacgattattcagcctctcgattccagaaccttcagttaaaaacctttttgccgtaaatgaattttatagaaataatgatgatttcataaaccctgatctacaagaacggttagtgatcggggatgatagcatttcaatatttacttatgacattaaaaataacttttttgaaattagagataatattggcacagaaaatatattcagttcgtttagtgatttctcttcattcttaaacgaaatcatggacagttgttcataa

SEQ ID NO: 6635 - DNA, 1179 bp, Escherichia coli
atgagtaatattgtttacctgacagtaacaggagaacaacaaggaagcatctccgcaggttgtgggacttctgagtctacaggtaatcgctggcagagcgggcatgaggatgaaatatttacattctcactcttaaatagtattactaatacggggcttggttcacagttccatggtataacattttgtaaattaattgataaaagcactccattatttattaattccattaacaataatgaacaattatttatgggatttgacttctatcgaataaatagatttggtagatgggaaaagtattattatatacaactaagaggcgcttttttatcggctattcatcatcagatcattgaaaatcaactggatacagaaacaataactgttagttatgaatttatcctctgtcaacatattatcgcaaataccgagttcagctatttggcactccctgaaaattataactgtttgtttttaccaaattcaaaaaaccaaacaaataatcgtttcaaaacgttaaacagcaaagctattggcaggctacttgctgctggtggcgtatacaatgggaacattgaaggattcagagatactgcggaaaaactgggtggagatgcaataaaaggctatgatcaaatactaaatgaaaaaacagcgggcatagcgatagcaacagcatctattcttttaacaaagcgttctaatgttgatacatatacagaaataaatagttacttaggcaaacttagaggtcaacaaaaacttcttgatggtatagacataatagaaataatatacattaagagaccttcaaaagacttagctaacttacgaaaggagtttaataaaactgtaagaaaaaattttcttatcaaacttacaaaaacctccgaagcatctggaagattcaacgccgaagaccttttaagaatgagaaagggcaatgttcctctaaattataatgttcaccataaactatctctagatgatggtggtactaatgatttcgaaaatttagtattaatcgaaaacgaaccatatcataaagtttttactaacatgcaatcacgaatagctaagggaatattagtaggtgaaagcaaaatcactccctgggccattccatctggctcaatttatcctcccatgaaaaatattatggaacccacaaaatga

SEQ ID NO: 6636 - DNA, 993 bp, Escherichia coli
atgaataaattcacctgtgttttactattaggtacggcgctactggcgggatgtgtcgaccgggaagggtactataacagcgtcagggaagaagacagccatggactgacgtctctgcgggggcaacctgaattacgttacaacgatgattggtcaagatggccgagagtgtacggcgctacagccttatacccgctgtatgcctccgcgtattatgaattagtacccgagccaaaagataaggatcgaacctcgctggcctggcaggcgtatggtttgcaacaaacccgaacagctgaagcctacgatagtctgattaagggtaccgcgacggttatttttgttgcacaaccgtcggaaggacagaaaaaacgtgcagaagaagcaggtgttaaactcaaatataccgctttcgcccgcgaagcctttgtctttatcgttgatatcaaaaacccggttaattcacttagcgaacagcaggtcaaagacatttttagcggtaaagtgagtcgctggaataaagtgggcggcggtgacgaaggtataaaaatctggcagcggccagaagattctggaagccaaacggttatgaagggactggttatgcaagatactccaatgctgccagccaaaaaatccactgttatcgatcttatgggcggtttaattaccgaagtcgccgactaccaaaatacaccatcttccattggatacaccttccactattacgtcacacgtatgaatgacaatatgctcaaaatgcgcaaacagatcaaactgctggctataaatggcgttgcacctacagaggaaaatatccgtaacggcacttatccgtacataattcatgcttatatggtgacgcacgaaaaccctacgctggaaacgcagaaattcgtcgactggtttttaagcccgcagggacagcaattggtagaggatgtgggctatgtgccgatttatgacgcatcatccgaatcatcaggacaataa

SEQ ID NO: 6637 - DNA, 267 bp, Escherichia coli
atgaataaaatcagactttatattcctccgttaattcttggttttgttattgtgccgttgttggtgtggccgacggtggttgcgctggctgcttgtgttatcacgctgagttttatgggagaaatactgttctctatcccgctcatgttcaggcgtatttcacttctggaattccaacttgggttattggctgaatatgcactttttttttctgtgccatgtgttgcgttggttggcaattttcttgcagagctcaatctgaactga

SEQ ID NO: 6638 - DNA, 1599 bp, Escherichia coli
atgcgtaaaacagtggcttttggttttgtcggaacggtgctggattatgccgggcgcggcagtcagcgctggtcaaaatggcgtccgtcactctgtctatgccagcaagaatcgttagtcatcaatcgactggaattgttgcacgacgcccgctcacgctcgctgtttgaaacgcttaaacgcgatatcgccaatgtttcgccagaaacaaaagtggtgggcgttgagattgaactgcataacccatgggatttcgaggaggtttacgcctgcctgcatgatttcgcccgtggttacgcgttcgaacctgataaagaagactatttaattcacatcaccaccggtacccacgtcgcgcagatttgctggtttctgctggcggaagcacgttacctgcccgccaggttaatacaatcttcgccaccgcgtaaaaaagaacagccgcgcggtgcaggtgaagtgacgattatcgatctcgatttaagccgttataacgccatcgccagccgctttgccgaggaacgccagcaaacgctcgattttcttaagtccggcattgccacgcgtaacgcccacttcaaccgcatgattgagcagatcgaaaaagtggcgatcaaatcccgcgcaccgatcctgctcaacggcccaaccggtgcgggaaagtcgtttctggcacgacgcatcttcgagttaaaacaggcgcggcatcagtttagcggcgcgtttgtggaggtgaactgtgccactctgcgcggcgataccgccatgtcagcgctgtttggtcatgtgaaaggcgcgtttaccggggcgcgggagtcgcgggaaggattattacgcagcgccaacggtggcatgttgtttcttgatgagattggcgaactgggcgcagacgaacaggcgatgttgctaaaagccattgaagagaaaaccttttacccgtttggcagcgatcgccaggtgagtagcgactttcagcttatcgccggaacggtgcgcgatttgcgtcagctggttgccgaaggcaaattccgcgaagatctgtacgcgcggatcaatctctggaccttcaccctgccgggtctacgccagcgccaggaagatattgaaccgaacctggattatgaagtggagcgccacgcctcactcactggcgacagcgtgcgttttaacaccgaagcgcggcgcgcctggctggcctttgcgacctctccccaggcaacatggtgcggtaactttcgcgaactttctgccagcatcacgcggatggctacctttgccactagcggacgcatcactctggaagtggtggaagatgagataaaccgtctgcgctataactggcaggagagtcgtccttccgcgcttacggcgttgctgggcgctgaggcagaaaacatcgacctctttgaccgtatgcaactggaacatgttatcgctatctgccggcaggcaaagtcgctttccgctgccgggcgtgaactctttgatgtttcgcgccaggggaaagccagcgtcaacgacgcggatcggctacgcaaatacctggcgcgttttaatctgacgtgggaagccgtgcaggatcagcacagctccagttga

SEQ ID NO: 6639 - DNA, 2322 bp, Escherichia coli
atgatgaatgattcgttctgccgcattattgcgggtgaaattcaggcgcgcccggaacaggttgacgctgccgttcgcctgcttgacgaagggaataccgtgccgtttatcgcacgttatcgtaaggaaatcaccggcggtctggatgacacgcagctgcgtaatctggaaacgcgtctgagctatctgcgcgagctggaagagagacgtcaggcgatcctcaagtccatttccgagcaaggcaaactcactgacgagctggcgaatgccatcaacgccacactaagcaaaaccgaactcgaagacctctacctgccctacaaacctaaacgccgcacccgcgggcaaatcgccattgaagcagggcttgagccgttggccgatctgctgtggagcgatccgtcacacacgccagaagtcgccgctgcacaatatgttgatgccgataaaggcgtggcagataccaaagccgcgctggacggcgcacgctatatcctgatggaacggtttgccgaagatgccgcgctgctggcaaaagtgcgtgattatctgtggaagaacgcgcatttggtttcgacggtggtgagcggtaaagaagaggaaggggcgaaattccgcgactatttcgatcatcacgaaccgctatcaacggtgccttctcaccgcgcgctggcgatgttccgtggtcgtaacgaaggcatacttcagctttcgctgaatgccgatccgcagttcgaagagccgccgaaagagagctattgcgagcaaatcatcatggatcaccttggcctgcgcctgaacaatgccccggcggatagctggcgcaaaggcgtggtgagctggacgtggcgcatcaaggtgttgatgcatctggaaactgaactgatgggcaccgtgcgcgaacgcgcggaagatgaagcaatcaacgtctttgcccgtaacctgcacgatctgctgatggcggccccagccggactgcgtgcaacgatgggcctcgatccgggtctgcgtaccggggtaaaagtagcggtggtcgatgcaactggcaaactggtggcgaccgataccatttatccacataccggacaagccgcaaaagcagcgatgaccgttgctgccctgtgtgaaaagcataatgttgaactggtggcgatcggcaacggtacagcttcccgcgaaaccgagcgtttctatctcgacgtgcagaagcagttcccgaaagtgaccgcgcagaaagtgatcgtcagcgaagctggcgcgtcggtttactcggcttccgagctggcagcacaggagttcccggatctcgacgtttcgctgcgtggcgcggtgtctatcgcccgccgtttgcaggatccgctggcggagctggtgaaaatcgatccgaaatctatcggcgtaggtcagtatcagcatgacgtcagccagacgcaactggcccgcaaactggacgcagtagtagaagactgcgtaaacgccgttggcgtcgatctcaacaccgcttctgttccgctgttaactcgcgtggcgggcctgacgcgcatgatggcgcaaaacatcgttgcctggcgcgatgagaacggtcagttccagaaccgtcagcaactgctgaaagtgagccgcctggggccgaaagccttcgagcagtgcgcgggcttcttgcgcattaaccatggtgataacccgctggacgcgtctaccgttcacccggaagcctatccggtggtggaacgcattctggcggcgacgcagcaggcactgaaagatctgatgggtaacagcagcgagctgcgtaacctgaaagcgtctgactttactgatgaaaaattcggtgtaccgacggtaactgacatcatcaaagagctggaaaaaccgggtcgcgatccgcgtccggaatttaaaaccgctcagtttgccgatggcgtcgagacaatgaacgacctgcaaccgggtatgatcctcgaaggtgcggtgaccaacgtcaccaactttggcgcgtttgtcgatattggcgttcatcaggacggcctggttcacatctcttcattgtcgaacaagtttgtggaagatccgcataccgtggtgaaagcgggcgatattgtgaaggtgaaagtgctggaagtggatcttcagcgcaaacgtatcgccctgactatgcgtctggacgagcagcctggcgaaaccaacgctcgtcgcggcggcggtaatgaacgtccgcagaacaaccgcccggcagccaaaccgcgtgggcgtgaagcgcagcctgccggtaacagcgcgatgatggatgcgctggcgacggcaatgggcaaaaaacgttaa

SEQ ID NO: 6640 - DNA, 297 bp, Escherichia coli
atgaaagatgaattatttgctgatcttcttgccagcgcagaagaaatggtacgcatcgaaaagggtgaagaaacgcctgaaccagagcacgtccatacttttagcgaaatcgatgtaaaagcgatccgtgaagcaacgggtttacgtcagcaagattttgctgtcgccgtaggggtaagttatgacctggtcaaaagctgggaaaccaaacgccgtcagcctaccggagcaccccgaaaattgctcctgcttttgcaagcgaatcctttcattatcaatcaattgaaaacaatctaa

SEQ ID NO: 6641 - DNA, 318 bp, Escherichia coli
atgttcacctttattgaactacaaggatttagcaaacgccgccagttattgctacctgatgatgagttccgggcttttcaggaactactcatccaagatcccactgccggtgacattatcgcaggcacaggcagttttagaaaaattcgctggaaccgttctggaatggggaaacggggtggcattcggataatttattacaacgtaacacgcaatggccgaatttatctggcgttgatttatcctaaaaatgaacaggatgatttaacagaagaacaaagaaaggcattgaaactattgtccgagaagctgctttaa

SEQ ID NO: 6642 - DNA, 1725 bp, Escherichia coli
atggataacgttgaactttcacccgcaacacgttgggggatgattgctaccggattacttcagggtctggtttgctacctgctgatcgcctggcttgccggaaaaaatctcagttggattgtttatggcgtgcctgcgaccgtcgcgttttcatccgttttactcttctccgtgatctcctttaaacagaagcgcctttggggatggctggcgctggtgtttattgccacgctagggatgagcggttggctaaagtggcaaattgatggcatgaacccctggagagctgaaaaggcgatttgggattttggctgctatctgctgctgatggcaatgttgttgctaccgtggatacaacaaagccttcgcatccgcaatgacagtagccgctatcgctatttttaccagtcagtatggcataacgtacttatattactggtgatttttctcgccaatggcctgacgtggctggtgcttttactgtggagtgagttgtttaaacttgttggcatcacgtttttcaaaacgctcttttttgcaaccgactggtttatttatctaacgttaggtctggttaccgcgctggcggtgatcctcgcgcgaacacagtcacgtttaatcgactctattcaaaagttgttcacgttaatcgccacggggttgctgccgttagtatcattgctaaccctgatgtttattatcaccctgccgtttacgggcctgagcgcgatttctcgccacatctccgccgctgggttgctgttaacgctggcctttttgcaattgatcttaatggctattgtccgcgatccgcaaaaagcgtctcttccctggacggggccgttgcgttgcctgattaaaaccgctttgctggttgctccgctgtatgtgttcgtcgccgcctgggcgttatggctgcgggtcgctcagtacggctggactgtcgaccgcttgcagggcgcgctggcggtgctggtgttactggtatggtcactggggtattttgtcagtatcgtctggcgtaaagggcaaaatccccttgatcttcagggcaaagtgaaccttgcggtttcgttattggtgttggtaatgctggtgcttcttaattcgccggtgctggacagtatgcgcattagtgtgaacagtcatatggcacgttatcagagcggcaagaacacgccagatcaggtaagtctctacatgctcgaacagaacggtcgctatggacgtgcggcgcttgagtcgctgaaaagcgatgccgggtttatgaaagacccgaaacgtgcgcgggatctgctgatggcgctagatggagagcaacatcttcagcaacagatatcggaaaaagtattagccgaaaatgtgttaattgccccaagccctggcaaaccggatacggcattctggtcggccttaatccaggatcgctataacgtgatgacctgtattgaaaaagacgcctgcgtactggtcgagcaagatctgaatagtgatggtcaggcggagcggatcctctttgcctttgatgatgaaagatacattgtctatggctttgatcctgacaagaaagaatggcaagagcttacgatgagtttacttccgcgtgatataacgaaagaaaaattactcacagctgcgaaggatggaaaactgggaacgaagcctaaagcgtggcgcgatcttgtagtggatggtgaaaggctggatgtgaatctgaatgagtga

SEQ ID NO: 6643 - DNA, 1182 bp, Escherichia coli
atgactaacagcaatcgcatcaagctcacatggattagctttctctcctacgcactgaccggtgcgttggttattgtcaccgggatggtgatgggaaatatcgccgattatttcaatctgcctgtttccagtatgagtaataccttcaccttcctcaacgccggcattttaatctctatcttcctcaacgcctggctgatggaaatcgtcccgttgaaaacgcagttacgttttggctttctcctgatggtgctggcggttgccggtttgatgttcagccacagcctggcactgttctcggcggcgatgttcattctcggggtggtcagcggcatcaccatgtcgattggtacattcctggtaacacaaatgtatgaaggacgtcagcgcggttcacgcctgttatttaccgactccttcttcagtatggccgggatgattttcccaatgatcgccgcgtttctgctggcgcgcagcattgagtggtactgggtttatgcctgcatcgggctggtgtacgtcgctatctttattctgaccttcggctgtgagttcccggcgctgggtaaacatgcgccaaaaacggacgctccggtagcgaaagaaaaatgggggatcggcgtgctgtttctctccattgcggcactgtgctacatcctcggtcagttaggttttatctcctgggtgcctgagtatgccaaaggcctgggcatgagcctgaacgacgcgggcacgctggtgagtaacttctggatgtcatacatggtcggcatgtgggcgttcagctttattcttcgcttctttgatttgcaacgcattctgaccgtactggctggtctggctgcgattctgatgtacgtctttaacaccggaacaccggcacatatggcgtggtcaattctcgccctgggcttcttctccagcgcgatctataccaccatcatcactttgggttcacagcagaccaaagtaccgtcgccaaaactggttaactttgtcctgacctgcgggaccatcggtactatgttgacctttgtggttaccggcccgattgttgaacatagcggtccgcaggcggcgctgctgacggcaaacggtctgtacgctgtcgtctttgtgatgtgcttcctgttaggtttcgtcagccgtcaccgtcagcataacaccctgacctctcattaa

SEQ ID NO: 6644 - DNA, 417 bp, Escherichia coli
gtgtttataaacattattttaagatatggttttcagacaagcattttatctgtagatgaattgtcacgttatttatttgtctggttaacatttattggcgcgattgtggcttttatggataatgcccacgttcaggtcacctttctggtggagaaactctcccccgcatggcagcgacgagtcgctctggttacccattccttaatcttatttatttgtggcgcactggcctggggcgcaacgctaaaaacaattcaggactggagcgattattcaccgatcctcggtttgcccatcggcctgatgtatgccgcttgtctgcccaccagcctcgttatcgcattctttgaactgcgtcatttatatcaactcatcacgcgtagcaattctctaacgtcgccaccgcaaggagcttaa

SEQ ID NO: 6645 - DNA, 1278 bp, Escherichia coli
atggctgtgctgatttttctgggctgtctgttgggtggtattgctatcggtttgcctattgcctgggcactgttgttgtgcggggcggcgttaatgttctggctgggcatgtttgatgtccagatcatggcacaaacgctggtgaacggagccgacagcttctccctgctggcgattccgttctttgtgctggcgggtgaaatcatgaatgcgggcggcttgtcaaaacgcattgttgacctgccgatgaaactggtggggcataaaccaggcgggctgggctacgtcggcgtgctggcggctatgattatggcaagcctttctggttctgccgttgcggataccgccgccgttgccgcgctattagtgccgatgatgcgcagcgctaactacccggtcaaccgtgctgcggggctgattgcctctggcgggattatcgcgccaattattcccccttccattccgtttattatcttcggcgtttccagcggattatccatcagcaagctgtttatggcgggtattgccccaggcattatgatgggcgcaacgctgatgcttacctggtggtggcaggccagtcgccttaatttaccccgccagcaaaaagcaacgatgcaggaaatctggcactcttttatctccggtatctgggcgctgtttcttccagtcatcattattggcgggtttcgctccggtctgtttacccctaccgaagccggggccgttgctgctttctatgcgctgtttgtcgccacagttatttaccgtgaaatgaccttcgccacactttggcatgtgctcattggcgcagcgaaaacgacctcagtggtgatgtttctggtggcctcggcacaagtttccgcctggctgatcaccattgctgaactgccgatgatggtttctgatttactgcaaccgctggtcgattcaccgcgtctgctgtttatcgtcattatggtggctatcctgattgtcggcatggtcatggatttaacgccgacggtattaattcttaccccggtattaatgcctttagttaaagaggcaggaatcgatccgatttatttcggtgtcatgtttatcattaactgctcaatcggcttaattacaccgcctatcggtaatgtgcttaacgttatttcaggggtggcaaaactcaaattcgatgatgcagtcagaggcgttttcccttacgtcctggttttatattcattattagtcgtatttgtttttattcccgatctcatcatcctccctttgaaatggattaattaa

SEQ ID NO: 6646 - DNA, 1980 bp, Escherichia coli
atgaacatttcggaagtcgatctgcataaactgacggtcagcgatccgttcctcggtcagtaccaacaactggtccgcgatgtggtgattccttatcagtgggacgccttgaacgatcgtatcccagaagcggaacccagccatgcgattgaaaactttcgcattgccgcaggactgcaagacggtgaattttacgggatggtgtttcaggacagcgacgtcgccaaatggctggaagcggtagcctggtcgctgtgccagaagccggacgccgaactggaaaaaaccgccgacgaggtgattgaactgatcgcttccgcccagtgcgaagatggctatctcaatacttactttacggtaaaagcgcccgaagaacgctggagcaatctggcggagtgtcatgaactttactgcgccggtcatctgattgaagccggagtcgccttcttccaggctacgggcaagcggcgcttgctggaagtagtttgccgtctgaccgatcatatcgacagcgtatttggtccagatgaaagtaagttacacggttatcctggtcacccggaaattgaactggcactaatgcgcctgtatgaagtgaccgaagagccgcgctacctggcgttgacgaactattttgtcgaacagcgtggtgcgcaaccgcactattacgaccaggaatatgaaaagcgcgggcagacctcgcactggcacacctacggcccggcgtggatggtgaaagataaagcctacagccaggcgcatttgcccatcgcacagcaacaaaccgccatcggacatgcagtacgctttgtatatctgatgactggcgtcgcacatctggcgcgtttaagtcacgatgaaagcaagcgtcaggattgcctgcggctgtggaacaatatggcccagcgtcagttatatattaccggcggcattggctcacaaagcagcggcgaagcgttcagcagcgattacgatctgccgaatgacacggtttacgccgaaagctgtgcttccatcggcctgatgatgttcgcccggcgaatgctggaaatggaaggcgacagtcaatatgccgatgtgatggagcgcgcactgtacaacaccgtgctcggcggcatggcgctggatggcaaacatttcttctatgtgaatccgctggaagtacatccaaaatcgctgaaattcaaccatatctacgatcacgttaagccgatccgccagcgttggtttggttgcgcttgttgtccgccaaatatcgcccgcgtgctaacctcgattggtcattatctctacacgccgcgtgaagatgcgttgtatatcaacatctacgcaggaaacagcatggaagtgccggtagaaaatggcacgttgcgtctgcgggttagcggaaactatccgtggcaggaacaggtgacaattgcggttgaatcgccccagccggtgcgtcatacgctggctttacgtctgccggactggtgcacacagccgcagatcatattgaatggggaagaggtcgagcaggatattcgtaaagggtatttgcacattacccgcgaatggcaggagggcgacacgctgaatctaactttgccaatgccagtacgtcgcgtttacggtaacccgctggtgcgtcacgtcgccggaaaagtggcgattcagcgcggcccgctggtttattgcctggaacaggccgacaacggcgagtcactgcataacctgtggctgcccgccgatgcgccatttacgacatttgaaggtaatggattgttccgccataagatcttaatccaggcaccgggttaccggtatgaacagagcaatccagagcagcaaccgctgtggcattacgacagtgcgccagccaaacgccagccgcaaactctgacgtttatcccgtggtttagctgggctaaccggggtgaaggcgaaatgcggatctgggtgaatgaggaaaagcattgccatccggaggttggataa

SEQ ID NO: 6647 - DNA, 741 bp, Escherichia coli
atgttaattaaccgcaatattgtggcgttatttgcgttgccttttatggcaagtgcaactgcttctgaattatccattggtgctggtgcggcttataatgaatcgccttatcgcggttataatgaaaatacaaaggcaattccgctgattagttatgaaggtgatactttttatgttcgtcagaccacgttaggttttattctgtcgcaaagtgaaaaaaatgaacttagcctgaccgcatcctggatgccgctggaatttgaccctgccgataatgacgattatgccatgcaacagcttgataagcgtgatagtacggctatggcgggggttgcctggtatcaccacgagcgttggggaaccgtgaaagcctctgcggctgcggacgttctggataacagcaacggctgggtgggggagctatcggtattccacaaaatgcagataggtcgcctgtcgctgacacctgcgctgggcgttctctattatgacgagaatttcagtgactattactatggcatttcagagagtgagtcccgtcgtagcggtctggcaagttattccgcgcaggatgcctgggtgccctatgtcagcctgacggcaaaatacccgataggagagcacgtcgtattgatggcgagcgccggatacagcgagctgccggaagagattaccgacagcccgatggttgatcgtaatgagagttttacctttgtcaccggcgtgagctggcgtttttaa

SEQ ID NO: 6648 - DNA, 975 bp, Escherichia coli
atgacaaaattacaacttaagtaccgggagttaaaaattatctcggtaatcgctgccagtgaaaatatcagccatgccgcgactgtacttggcatcgcacaggccaacgtcagcaaatatcttgctgattttgaatcaaaagtgggtttaaaagtctttgaccgaaccacccgacagctgatgctcacaccttttggcaccgtgctgttaccgtacatcaacgacatgctggacagaaacgagcagcttaataattttattgcagattataagcatgagaaacgtggtcgggtcactatctatgcaccaaccggcataattacctatttatccaaacatgtaatcgataaaattaaagatatcggtgatatcaccttatcgctaaaaacctgcaatcttgagcgtaatgccttttatgaaggcgtcgaatttcccgatgattgtgatgttttaatcagctacgcccaaccaaaagatgaatcgctggttgccagttttattacccaatatgccgtaaccgcttatgccagccagcgctatcttgggaaacatcccattagccgtcctgacgaactcgaacatcactcctgtattttgatcgactcgatgatgatcgacgacgcgaatatctggcgcttcaacgtcgccgggagtaaagaggtgcgggattatcgcgtgaagggaaattacgtttgcgacaacacgcaatctgcgctggagctggcacgaaatcacctggggattgtgtttgcgccagacaaaagtgtgcagagcgacctgcaagacggcacgctggtgccctgctttcagcacccgtatgaatggtggctggatctggtggctatcttccgtaaacgggaataccagccctggcgggtccagtatgtgctggatgaaatgctgcgtgaaattcgccaccagcttgctcagtcgcagcaactgcggcctgaacaagcggcggaaagcgaagattaa

SEQ ID NO: 6649 - DNA, 1137 bp, Escherichia coli
atggatttactgattattttgacctatgtggctttcgcatgggcaatgtttaagatcttcaaaattcctgtaaataaatggaccattcccaccgcggccctgggtggcatatttattgtcagcggtttaattctgttaatgaactataaccatccgtatacctttaaagcgcaaaaagcggttatttctattcctgttgtcccacaggtgacaggcgtggtgatcgaagtgacggacaagaaaaatacgctgattaaaaaaggtgaggtgctatttcgactggacccgacgcgttatcaggcgcgggtggatcggctgatggcggatatcgttaccgcagaacataaacagcgggcgttgggcgcagagttagatgagatggcggcgaatactcagcaggcaaaggccacgcgggataaattcgctaaagagtatcagcgttacgcacgcggcagtcaggcgaaagtaaacccgttttcagaacgcgatatcgatgtggcgcggcaaaattatctggcgcaggaagcctccgtaaaatcagcggcggcggaacaaaaacagatccagagccagctggatagcctggtgttgggtgaacattctcaaatcgccagcctgaaagcgcagctcgcggaagcaaaatataaccttgagcagacgatagtgcgtgcgccgagcgatggttatgtgacccaggtactgattcgtccgggtacctatgccgcgtcgctgccgctacgtccggtgatggtgtttatacccgatcagaaacgacaaatcgtggcgcagttccgtcagaactccttgctgcgactggctcctggcgacgatgcggaagtggtgtttaatgctctgccaggtaaggtattcagcggtaagctggcagccattagtccagccgttcccggcggagcttatcagtcgaccggcaccttacagacgttaaacacagagccgggttcagatggcgttatcgcgaccattgaactggatgagcatactgatttgagcgcattaccagacggtatttacgcccaggtggcggtctactctgatcatttcagccatgtctcggtgatgcgcaaagtactgttacgcatgaccagctgggtgcattacctttatctcgatcattaa

SEQ ID NO: 6650 - DNA, 324 bp, Escherichia coli
atgttcctggattattttgcactgggagtgcttatttttgtatttctggtgatcttctatgggattattattttacatgatattccctacctgattgctaaaaaacgtaatcatcctcatgccgacgccattcatgttgctggttgggtgagtctttttacgctgcatgttatctggccatttttgtggatttgggccacgctttaccgcccggagcggggatggggaatgcaaaaccatgactcctccgttgtgcaactacaacagcgtattgccgggctggagaaacagctcgccgacatcaaatcctcttctgccgagtaa

SEQ ID NO: 6651 - DNA, 1152 bp, Escherichia coli
atggcagcttcaaccttttttattccttccgtgaatgttattggtgctgattcattgaatgatgcaatgaatatgatggcagattatggatttacccgtaccttaattgtcaccgacaatatgttaacgaaattgggtatggcgggggatgtgcaaaaagcactggaagaacgcaatatttttagcgttatttatgatggcacccaacctaaccccaccacggaaaacgtcgccgcaggtttgaaattacttaaagaaaataattgcgatagcgtgatctccttaggcggtggttctccgcacgactgcgcaaaaggtattgcgctggtggcagccaatggcggcgatattcgcgattacgaaggcgttgaccgctctgcaaaaccgcagctgccgatgatcgccatcaataccacggcgggtacggcctctgaaatgacccgtttctgcatcatcactgacgaagcgcgtcatatcaaaatggcgattgttgataaacatgtaactccgttgctttctgtcaatgactcatctctgatggtcggtatgccgaagtcactgaccgccgcaacgggtatggatgccttaacgcacgctatcgaagcgtatgtttctattgccgccacgccgatcactgacgcttgcgcactgaaagccgtgaccatgattgccgaaaacctgccgttagccgttgaagatggcagtaatgcgaaagcgcgtgaagcaatggcttatgcccagttcctcgccggtatggcgttcaataatgcttctctgggttatgttcatgcgatggcgcaccagctgggcggtttctacaacctgccacacggtgtatgtaatgctgttctgctgccacacgttcaggtattcaatagcaaagtcgctgcagcacgtctgcgtgactgtgccgctgcaatgggcgtgaacgtgactggtaaaaacgacgcggaaggtgctgaagcctgcattaacgccatccgtgaactggcgaagaaagtggatatcccggcaggcctgcgtgacctgaacgtgaaagaagaagatttcgcggtactggcgactaatgccctgaaagatgcctgtggctttactaacccgatccaggcaactcacgaagaaattgtggcgatttatcgcgccgcaatgtaa

SEQ ID NO: 6652 - DNA, 927 bp, Escherichia coli
atgaaaataatacttctgtttttagcagccctggcaagttttaccgtacacgcgcagcctccttcacagaccgtagaacaaacagtccggcagatttatcagaactataaatcagatgccagtacgccttatttcggtgaaaccggagagcgggcgataacttcagcgcgtattcaacaggcgcttaccctgaacgacaatcttacactaccgggcaatattggctggctggattatgatccggtttgtgattgtcaggattttggcgatctggtgttagaaagcgtagcgataacccaacctgacgccgatcatgccgatgccgttgtgcgctttcgtatctttaaagacgataaagaaaagaccatgcagacactgaaaatggtggcggaaaatggtcgttgggtcattgacgatattgtcagcaatcatggcagcgtcttacaagcagttaatagcgagaatgaaaaaacgctggccgctatagcttcgttgcaaaaagaacagccggaagcctttgttgccgaactctttgaacatattgctgattatagctggccgtggacgtgggttgtttccgactcttaccgccaggcggtcaatgccttctataaaaccaccttcaagactgccaacaatcccgatgaagatatgcaaatagaacggcaatttatttacgacaatccgatctgttttggcgaagagtcgttattttcccgcgttgatgaaattcgagtcctggagaaaaccaccgattccgcccgcattcatgttcgttttacgctgaccaatggcaacaacgaagagcaagaactgattttacagcggcgcgaaggtaagtgggaaatcgctgattttatctgcccgaacagcggcagcctacttaagcagattgaggcaaaaaccgccgccagattaaaacaatga

SEQ ID NO: 6653 - DNA, 564 bp, Escherichia coli
atgcagcaaggatactactctctccccgcccttatttccgctctcgatgccgggaaaaaggtgaaatacctgtggttctggggccatcaacctgccgcgaatcacgaaattaccgcctcttgctttagccagtggtggcagggttcgccttttacctatgatggtataacctatgccaccgcagaacactggatgatggcgggaaaagcgcggctgtttaatgacagtaaaacacttgccagaattctggcggcggcgaccccggcagaagccaaaaagctggggcgacaggtgacaaactttgacgagcaatgctggcaagcttgctgctttgatctggtctgcgaagggaactaccataaatttagccaacattcggcattaaaaacattcctgctgaatacgcagcctcgcattctggttgaagccagcccggtggataaaatctgggggattggccttgcaaaagatcatccccatgccggtgtgccatctcactggaaggggaaaaatctgctgggatttgcgcttatggtagtcagagaccgtttggcggaagaataa

SEQ ID NO: 6654 - DNA, 1227 bp, Escherichia coli
atgtcaccctgtgaaaatgacacccctataaactggaaacgaaacctgatcgtcgcctggctaggctgttttcttaccggtgccgccttcagtctggtaatgcccttcttacccctctacgttgagcagcttggcgttaccggtcactccgccctgaatatgtggtccggtattgtcttcagcattacatttttattttcggccatcgcctcaccgttttggggtggactcgccgaccgtaaaggccgaaaactcatgctattacgctctgctctcggcatgggcatcgtgatggtgttgatgggactggcacaaaatatctggcagtttttgatcctgcgggcgcttcttggtttacttggcggatttgtccccaacgctaatgctcttatcgccacacaagtaccgcgtaataaaagcggctgggcgctgggtacgctctccacaggcggcgttagcggcgcgttgctcggcccaatggctggcggtttgctcgctgatagctacggcttacgtccggtattctttattaccgccagtgtgctcatactctgctttttcgtcaccctgttttgcatcagagaaaaattccagccggtcagcaaaaaagagatgctgcatatgcgggaagtggtgacatcacttaaaaacccgaaactggtactcagcctgtttgtcactacgttaatcatccaggtggcgacgggctcaattgcacccattctgacgctgtatgtccgcgaactggcgggtaacgtcagtaacgtcgcttttatcagtggcatgatcgcctcggtgccgggcgtggcggctctgctgagtgcaccacgactcggcaaacttggcgatcgaatcggacccgataagatcctgattacggcgctgatcttttctgtactgctattgatcccaatgtcttacgttcagacgccattacaacttgggattttacgttttttgctcggtgccgccgatggtgcactactccccgccgtacagacactattagtttataactcgagcaaccagatcgccgggcgtatcttcagctataaccaatcgtttcgtgatattggcaacgttaccggaccattgatgggagcagcgatttcagcgaactacggtttcagagcggtatttctcgtcaccgctggcgtagtgttattcaacgcagtctattcatggaacagtctacgtcgtcgtcgaataccccaggtatcgaactga

SEQ ID NO: 6655 - DNA, 1053 bp, Escherichia coli
atgccagtgttacacaaccgcatttccaacgacgcgttaaaagccaaaatgttggctgagagcgaaccgcgaaccaccatttcgttttataagtatttccacatcgccgatcctaaggcgacccgtgacgctttatatcagctgtttaccgcgctgaatgtttttgggcgagtgtatctggcgcatgagggcattaacgcgcaaatcagcgtacctgcgagcaatgttgaaacatttcgcgcgcagctttatgccttcgacccggctttagagggcttacgcctgaatatcgcgttggatgatgacgggaaatccttctgggtactgcgcatgaaggtccgcgatcgtatcgttgccgacggtattgacgatcctcactttgatgccagcaatgtgggtgagtatctgcaagcggcggaagtgaacgccatgcttgacgatcccgatgcattgtttatcgacatgcgtaaccactatgagtatgaagtggggcactttgaaaacgcgctggaaattccggcagataccttccgtgagcagctgccaaaagcagtcgagatgatgcaggcacataaagataaaaaaatcgttatgtactgcaccggcggcattcgttgtgaaaaggccagtgcctggatgaaacataacggattcaataaagtctggcatatcgagggcggaattattgaatacgcccgcaaggcgcgcgagcagggtttaccggtacgttttattggcaaaaattttgtttttgacgagcggatgggcgaacgtatatctgatgagattatcgcgtattgccaccagtgcggtgcgccgtgcgacagccataccaactgtaaaaatgatggctgccacctgctttttattcagtgtccagtatgtgcggaaaaatacaaaggttgttgtagtgagatttgctgcgaagaaagcgcgttaccgcctgaagaacagcgacgccgtcgggcaggacgtgaaaatggcaataagatctttaataagtctcgtggacgtctgaatacaacactgggcattcctgatccaacagaataa

SEQ ID NO: 6656 - DNA, 1098 bp, Escherichia coli
gtgattaaatttctctctgcattaattcttctactggttacgacggcggttcaggctgagcgtattcgcgatctcaccagtgttcagggggtaaggcaaaactcactgattggctatggtctggtggtggggcttgatggtacaggtgaccagacaactcagacgccgtttaccacacaaacgcttaataacatgctctcacagctgggaattaccgttccgacgggcactaatatgcagctaaaaaacgtcgctgcggttatggtgacagcgtcacttccaccgtttggacgtcaggggcaaaccattgacgtggtggtttcttccatgggaaatgccaaaagtctgcgtggcggtacgttattgatgacaccgcttaagggcgttgacagtcaggtgtatgcgctggcgcagggcaatattctggttggcggcgcaggggcctccgctggcggtagcagtgttcaggtgaaccaactgaacggtggacggatcaccaatggagcggttattgaacgtgaattgcccagccagtttggcgtcgggaatacccttaatttgcaacttaacgacgaagatttcagtatggcgcagcaaatcgctgacaccatcaaccgtgtgcgtggatatggcagcgccaccgcgttagatgcgcggactattcaggtgcgcgtaccgagtggcaacagttcccaggtccgtttccttgccgatatccagaatatgcaggttaatgtcaccccgcaggacgctaaagtagtgattaactcgcgcactggttcggtggtgatgaatcgcgaagtgaccctcgacagctgcgcggtagcgcaggggaatctctcagtaacagttaatcgtcaggccaatgtcagccagccagatacaccgtttggtggcgggcagaccgtggtaacgccacaaacgcagatcgatttacgccagagcggcggttcgctgcaaagcgtacgttccagcgccagcctcaataacgtggtgcgtgcgctcaatgcgctgggcgctacgccgatggatctgatgtccatactgcaatcaatgcaaagtgcgggatgtctgcgggcaaaactggaaatcatctga

SEQ ID NO: 6657 - DNA, 954 bp, Escherichia coli
atgcgtttcagtacccagatgatgtaccagcaaaacatgcgcggcatcaccaattctcaggcagaatggatgaagtacggtgaacagatgtcgacgggtaagcgagtcgttaactcttcagatgatcccattgctgcatcacaagctgttgttctctcccaggcacaggcgcaaaacagccagtacacgctggcgcgtactttcgccactcaaaaagtgtcactggaagagagtgtacttagccaggtcaccaccgctatccagaatgctcaggaaaaaattgtctacgccagcaatggcaccttgagtgacgatgaccgggcctcgctggctacggatattcaggggcttcgtgaccagttgctgaatctggcgaacaccactgacggtaacgggcgctacatttttgccggttataaaacagaatccgcaccgtttagcgaggcggatggcaaatacgaaggcggagcagaaagtattaaacaacaggtcgatgcttcgcgttcgatggtgatagggcacacgggtgacaaaattttcgacagtattaccagcaacgcggtagcggaaccagacggtagcgcttctgaaaccaatctttttgccatgctggatagcgccatcgcagccctgaaaacgccggtcgcggatagcgaagcggataaagaaaccgccgctgcggcactggataaaaccaaccgcggactgaaaaactcgctgaacaatgtgctgactgttcgcgcggaattaggcacgcagctgaacgaactggagtcgctggattcattaggtagcgatcgcgctttagggcaaacgcagcagatgagcgatctggttgatgtggactggaatgcaactatttcatcttacatcatgcagcaaacggcattgcaggcgtcgtataaagcatttaccgatatgcagggattgtcgctcttccagctcaacaaataa

SEQ ID NO: 6658 - DNA, 426 bp, Escherichia coli
atggataactggctaaagcagagagccctaaaaaatcagcttgccggcgcatcacgtacatttgttagctgtgatacgtatagcaacgttttggcatattattcgcttgcttccagcgccgttgaaacgtatgtcgcgacaggacgatttcgccgaaatatgccagaaccgatccctgttgtagtacttggtcgtctggcaatagataaatcattacagggtcagggcatcggtcgtgcgatggtcagagatgccggtctacgagtactacaggcggctgaagtcattggtattcgcggaatgttggtccatgcgttatcagaccaggcccgtgagttttatctgcgagtggggtttgaaccatcgcctgtcgattctatgatactgatggtaacattggctgatttgcaggaatgtcttaaatag

SEQ ID NO: 6659 - DNA, 294 bp, Escherichia coli
atgccagcagccaataacattccagccaggcgcgaatctttaaacttgcgcataaaacccgcagaacgcgatcttattgaccgggccgctaaagcccgaggaaaaaatcgcaccgaatttgtccttgaggccgccagagccgcagctgaagaggcgctcattgagcagagaattttcaggatcgattctgatgattaccagctatttttgaatcgtctggatcagccccccgcgcccaatgctgcattacgcaaaaccatgcaaacacccgcgccgtgggagcaaaaaaaatga

SEQ ID NO: 6660 - DNA, 1059 bp, Escherichia coli
atgaaaagaaaagttctggcaatgctggtcccggcgttattagttgctggcgcagcaaatgcggctgaaatttataataaaaatggcaataaagttgagctatacggcaagatggttggtgagcgcattctgaccgaccgtgaaaatggtgaaaaaggcgataattctcaagatacctcttatgcccgtgtaggcgtgaaaggtgaaactcagatcaaccctgaactgactggttacggtcagtttgaactagacctggaagcatcaaacagacacaaccctgaccaaactcgtttggcatatgctggtttgagttacaaagattttggttcattcgactacggtcgtaatgtcggtgtcgcgtatgatgcagaagcatttactgatatgtttgttgagtggggcggtgactcatgggctggtactgacctgttcatgaccaaccgtaccaacggtgttgcaacctatcgtaacacagatttctttggcatggttgaaggtctaaattttgctctgcaatatcagggtaaaaatgaaggtacaggcaactacaaagcaaatggcgatggccatggtttatctgcaacttacactattgacggtttctcatttgctggtgcttatgcaaactctgaccgtactgattggcagtctggtgatggtaaaggcgaaagagccgaagtttgggcgttgtcaacaaaatatgacgctaacaatgtctatgctgctgtgatgtacggtgaatctcacaacatgaattccgacgacggtgatgttgtgaacaaaacacaaaacttcgaagctgttctgcaatatcagttcgactttggtctgcgtccatccatcggttactcctattctaaagcactggacgtagcaggttacaaagattctgatcgtctgaactatattgaaatcggtacctggtattacttcaataagaatatgaacgtatataccgcttatcagatcaacctgcttgataagagtgattatgttctcgctcatggactgaacaccgacgaccaactggcagttggtatcgtctaccagttctaa

SEQ ID NO: 6661 - DNA, 852 bp, Escherichia coli
atgactgttcaaacaagtaaaaacccgcaggtcgatattgctgaagataatgcgttcttcccttcagaatattcgcttagccaatatacgagtcccgtctctgatcttgatggcgtggactatccaaaaccgtatcgcggtaaacataaaattctggtgatcgccgcggacgaacgttatttgccgaccgataacggaaaactgttctcgaccggtaaccatccgattgaaacgttgctgccgttgtatcatctccatgctgcaggtttcgaattcgaagtggcgaccatttccggtctgatgaccaagtttgaatactgggctatgccgcacaaagatgaaaaagtaatgccattctttgaacagcataaatcgttattccgtaatccgaagaaactcgcggatgttgtcgccagcctcaacgctgatagcgaatatgcagcaatctttgttcctggtgggcatggcgcacttattggtttaccagaaagccaggacgtggctgccgctttacagtgggcaatcaaaaatgaccgttttgttatctccctttgccacggtccggcggcttttctggcacttcgccacagcgataacccactgaatggttattctatttgcgcattcccagacgccgcagacaaacaaacgccagatattggctatatgccgggtcatctcacctggtacttcggcgaagagttgaagaaaatgggcatgaacatcattaatgacgacatcaccgggcgagtacataaggaccgtaaacttctcaccggcgacagtccttttgcagcgaatgcgttgggtaaactggcggcgcaggaaatgctggcagcttacgcgagttaa

SEQ ID NO: 6662 - DNA, 1359 bp, Escherichia coli
atgaaaagattatctataaccgtccgtttaaccttgctttttatattgctgctgtctgttgctggcgctggaattgtatggactctctataatggcctggcaagtgagttgaaatggcgcgatgatacaacactcattaaccggacagcgcagatcaagcagttgttaattgatggggtaaatccagatacgttacctgtgtactttaaccggatgatggatgttagtcaggatattttgatcattcatggtgatggcatcaataaaattgttaaccggacaaatgtcagtgatgacatgttaaataacatacctgctagtgagacaatcagcgcagcaggcatttacagaagcattattaatgatacagagatagatgctttacgaattaacattgatgaagtttcgccatcattaacggttactgtggctaaattggcttcagccagacataatatgcttgaacagtataaaattaatagcattataatttgcattgtcgccattatattgtgctcagtattaagtccgttgttaatcaggacggggttgcgagagatcaaaaagttgagtggcgtaacggaagcgctgaattataacgatagccgagtgccggttgaggttagcgcattaccgagagaactaaaacctcttgggcaggcgttgaataaaatgcatcatgctttagtcaaagattttgagcgccttagtcaatttgctgacgatctcgctcatgaacttagaacgccaattaatgcattactgggtcagaatcaggttacgctcagtcaaatcagaagtatcgctgaatatcaaaaaacaattgccggaaacattgaagagctggaaaatatttcgcggttaacagagaatatactgtttcttgccagggcagacaaaaacaatgttttggtgaaactggatgcgctttctctcaataaggaagttgaaaatcttttggactatcttgaatatctttcagacgagaaagagattcgttttaaggtcgagtgcaatcaacaaatctttgcggataaaattttactgcaacgaatgttatcgaatcttattgttaacgccattcgatattcaccagaaaaatcgcgtattcatataaccagttttcttgatgccaacggttctcttaatattgatatcgccagtcctggaacgaaaattaatgagactgaaaaactcttccgtagattttggcggggagataattcgcgtcattccgtaggtcagggacttggcctttctttagtcaaagcgattgccgaattacatggaggaagtgctacgtatcactatctcagtaagcataacgtgttccgaattacgttaccgcaaagaaattaa

SEQ ID NO: 6663 - DNA, 471 bp, Escherichia coli
gtgcaatcaggtacaaacgtgccctatatgaaaattagcgcaattgattacagtcaaaatatcaacggtgattacaaagctactgttacaggaggcggagagggtatcgcaacgctgatccccgtattgaatggtgttcatcaggcgggtctgagtaccacgatagaattcattagcgcggaaaccagaccaatgacgggtacagtgtcagtgaatagtgcaaacctaccgacagcttcattcccttcgcagggatttaccggggcgtattatcagttgaataatgacaactttgcaccaggaaaaacggcggctgattattcgttttcaagctcggcctcctgggtaggcgttgatgctactggtaaagtgacattcaaaaatgacggtgatagcaatactgtaataatcacagcgcccccaagatccggtggtgctatttaccaaacagttcctcctgaatcgcgttag

SEQ ID NO: 6664 - DNA, 1455 bp, Escherichia coli
ttgaatatctcctctgctttacgccaggttgttcacggcactcgctggcactctaaacgcaagagctacaaagtgttgttctggcgcgagataaccccgcttgctgttcctatcttcatggagaacgcctgtgtcctgttgatggggggcctgagcacttttctggtcagctggctgggaaaagatgcgatggccggcgtggggttggcggacagcttcaatatggtcattatggctttttttgcagctatcgatcttggtactactgtcgttgtagcatttagtctcggtaagcgagatcgacgacgagcgagggtggggacgcggcagtcattggtgatcatgacgttgtttgccgtactgttggcaacgctaattcatcattttggcgaacaaattattgatttcgtcgcgggtgatgccacgacagacgttaaagcactggcgttgacttatctggagctgaccgtactcagttatccagcagctgccatcactcttattggtagcggggcacttcgtggtgcagggaatacgaaaataccgctactgattaacggtagcctgaatattcttaatattattattagcggcatattgatttacggccttttctcctggccgggactgggatttgtcggggctgggttgggtttaaccatttctcgttatattggcgcagttgcaattttgtgggtgctggcgattggttttaatcctgcgctaaggatttcattaaagagctattttaaaccgctgaattttagcattatctgggaagtcatggggattggtattccagcgagtgtcgaatcagtgctatttaccagtggtcggttattaacccaaatgttcgttgccgggatggggaccagcgttattgccggaaattttatcgcgttttcaattgcggctcttatcaacttacccggaagtgcgctcggttctgcttctacgatcattacaggccgaaggttgggggtagggcagatagcgcaagcagagattcagttgcggcatgtgttctggctgtccactcttggattaacggccatcgcctggctaacggctccctttgccggggttatggcatcgttttacacccaggatccacaggttaaacacgtcgttgtgattctgatttggctaaatgctttatttatgcctatttggtccgcctcatgggtgctacccgctggatttaagggtgctcgtgatgcccgttacgccatgtgggtttctatgttgagcatgtggggttgccgggttgtagtcggttatgtgctgggaatcatgcttggctggggtgtggttggtgtctggatgggaatgtttgccgactgggctgtgcgggccgtgctgttttactggcgaatggttactggacgttggctgtggaaataccctcgacccgagccgcaaaagtgtgaaaaaaagccagttgtgtcggaataa

SEQ ID NO: 6665 - DNA, 1080 bp, Escherichia coli
atgcaaatacttgccgatttactgaatacgatcccagccatcaattctgccgctatgtcgcgtgcacaacggcatgttgacgggttactcaaacctgttggtagcctgggaaagctggaggcgcttgccatacaactggcaggaatgccggggttgaatggcataccgcatgtgggcaaaaaagcagtactggttatgtgtgccgatcacggcgtctgggaggaaggggtcgctatttctccaaaagaagtgacagccatacaggctgaaaatatgacccgtggaacaaccggcgtgtgtgtgctggcagcacaagcgggcgctaacgtccacgtaattgatgttggtattgatactgctgagcctatccccgggcttatcaacatgcgtgtcgcacgaggtagcggcaatattgcttcagctccggcaatgagtcgccgtcaggctgaaaagttgcttttggacgtcatatgttatacgcgggagctggcaaaaaacggtgtcacgctgtttggtgtaggtgaactggggatggcaaacacgacaccggcagcggcaatagtcagcacaatcactggccgggatcctgaagaagtggttgggattggcgcaaacctgccgacagataaactggctaataaaattgatgttgtgcgtcgggcgattacgttgaatcaaccaaatcctcaggatggtgttgatgtcctggcaaaagtgggtggatttgatttggtcggaatagctggagtgatgttaggtgctgcttcctgcggtttacccgtgttgctggatggatttctttcttatgctgctgcgctcgcagcctgccagatgtctcctgcaatcaaaccgtatctcattccttctcacttgtcggcagaaaaaggcgcgcgtatagcgctctcgcatttggggctggagccttatctcaatatggatatgcgtttaggtgaggggagtggtgcagctctggcgatgtccatcatcgaagctgcttgtgcgatatacaacaacatgggcgaacttgctgccagtaatattgttctacaggggaatacgacttctgatttgaacagctaa

SEQ ID NO: 6666 - DNA, 744 bp, Escherichia coli
atgagtaaattattttgggcgatgctctcatttattacgcgtctgcctgtaccgcgtcgctggtcccagggactggatttcgagcattattctcgcggtattattacttttcctttgattggattattgcttggcgcgattagcgggctggtcttcatggtgctgcaggcatggtgtggcgtaccactggcggcactgtttagcgtacttgtgctggcgctgatgaccgggggattccatctggacggcctcgctgatacctgtgatggcgtattttctgcacgtagccgcgatcgcatgttggaaatcatgcgtgatagccgtttaggcacccacggcggtctggcattgatttttgtggtactggcaaagattctggtgttaagcgagttggctctgcgtggcgaaccgatccttgcatcgctggcggcagcatgtgcggtcagccgcgggactgccgcattattgatgtatcgtcatcgttatgcgcgggaagaagggcttggcaatgtgttcattggcaaaattgatgggcgacaaacctgcgtcacactcggcttagccgctatttttgctgccgtattattgccgggtatgcatggtgtggctgctatggtggtgacgatggtggcgattttcatcctcggtcagcttctcaaacgtacgctgggcgggcaaacgggcgatacgctgggagcagccatagagtttggtgaactggttttcctgctggcactgctataa

SEQ ID NO: 6667 - DNA, 645 bp, Escherichia coli; identical to SEQ ID NO: 5185

SEQ ID NO: 6668 - DNA, 591 bp, Escherichia coli
atgtctcgaatttttgcttactgtcggatatcaacgctggatcagaccaccgaaaatcaacgccgggaaatcgaaagtgcaggttttaaaatcaaacctcagcaaataatcgaagaacacattagcggctcagcagcaaccagtgagcgtcctggttttaaccggttgcttgctcgcctgaaatgtggtgatcaattgattgtgacaaaactggatcgccttggttgtaatgcaatggatatcaggaaaacagtggaacaactgaccgaaacaggtatcagagtgcattgcttagcattggggggcattgacctgaccagtccaacaggaaaaatgatgatgcaagtaatttcagcagtcgctgaatttgaacgagaccttttacttgaacgcactcattccgggatagtaagagcccggggcgcagggaaacgttttggtcgaccacctgtgttaaatgaagaacagaaacaggtggtattcgaacggattaagtcaggtgtaagtataagtgccattgcccgggaattcaaaacctcgcggcaaaccattttaagagccaaagcaaaacttcagacacctgacatataa

SEQ ID NO: 6669 - DNA, 234 bp, Escherichia coli
atgaaatcaaaagacaccctaaagtggttccctgcgcagcttcctgaagtcagaattatcctaggggatgctgtagtggaagtagcaaaacagggaagacctatcaataccagaacattgcttgattacattgaaggaaacataaagaaaaaatcatggctggataacaaagaattattacaaacagcgatatcagttcttaaagataaccaaaatttaaatggtaaaatgtaa

SEQ ID NO: 6670 - DNA, 393 bp, Escherichia coli
atgaaatttcaggccattgtattagcaagttttcttgtcatgccttatgcgttggcagatgacccgggcggtttaaaacaggatgcagcgccaccgccgcctcatgcaatagaagatggctatcgcggaaccgacgatgcaaaaaaaatgaccgttgatttcgcaaaaaccatgcacgatggcgcttcggtttcactacgcggtaatttgatttctcacaaaggagaggaccgttacgtttttcgcgataagagcggtgaaattaatgttgttattcctgcggccgtctttgatggacgagaagttcagccggaccagatgatcaacattagcggcagtctggataagaaaagcgcgccggccgtcgttcgggtcactcatttgcagaaataa

SEQ ID NO: 6671 - DNA, 1188 bp, Escherichia coli
atgaacttatccctacgacgctctaccagcgcccttcttgcctcgtcgttgttattaaccatcggacgcggcgctacgctgccgtttatgaccatttacttgagtcgccagtacagcctgagtgtcgatctaatcggttatgcgatgacaattgcgctcactattggcgtcgtttttagcctcggttttggtatcctggcggataagttcgacaagaaacgctatatgttactggcaattaccgccttcgccagcggttttattgccattcctttagtgaataacgtgacgctggtggtgctcttttttgcccttattaactgcgcctattccgtctttgctaccgtgttgaaagcctggtttgccgacaatctttcgtccaccagcaaaacgaaaatcttctcaatcaactacaccatgctcaacattggctggaccatcggtccgccgctaggcacgctgttggtgatgcagagcatcaatctgcccttctggctggcagctatctgttccgcgtttcccatgcttttcattcaaatttgggtaaagcgcagcgagaaaatcatcgctacggaaacaggcagtgtctggtcgccgaaagttttattacaagataaagcactgttgtggtttacctgctctggctttctggcttcttttgttagcggcgcatttgcttcatgcatttcacaatatgtgatggtgattgctgatggtgattttgccgaaaaggtggtcgcggttgttcttccggtgaatgctgccatggtggttacgttgcaatattccgtgggccgccgccttaacccggctaacatccgcgcgctgatgacagcaggcaccctctgtttcgtcatcgggctggtcggttttattttttccggcaacagcctgctaatgtggggtatgtcagctgcggtatttactgtcggtgaaatcatttatgcgccgggcgagtatatgttgattgaccatattgcaccgccaggaatgaaagccagctatttttccgctcagtctttaggctggcttggtgcggcgattaacccattagtgagtggcatagtgcttaccagtctgccgcctttctcgctgtttatcatcttagcgttggtgatcgttgctgcgtgggtgctgatgttaaaaggaattcgtgcaagaccgtgggggcagcccgcgctttgttga

SEQ ID NO: 6672 - DNA, 435 bp, Escherichia coli
gtgaaaagtaccagcgatctgttcaatgaaattattccattgggtcgcttaatccatatggttaatcagaagaaagatcgcctgcttaacgagtatctgtctccgctggatattaccgcggcacagtttaaggtgctctgctctatccgctgcgcggcgtgtattactccggttgaactgaaaaaggtattgtcggtcgacctgggggcgctgacccgtatgctggatcgcctggtctgtaaaggctgggtggaaaggttgccgaacccgaatgacaagcgcggcgtactggtaaaacttaccaccagcggcgcggcaatatgtgaacaatgccatcaattagttggccaggacctgcatcaagaattaacaaaaaacctgacggcggacgaagtggcaacacttgagcatttgcttaagaaagtcctgccgtaa

SEQ ID NO: 6673 - DNA, 1116 bp, Escherichia coli
atggttacgccagtaagcatcagcaattacatatctcttcctgatgattttcccgtacgtaatattgcaccgcaggtaaaagaagttttaaaggatttcattgatgcacttagtacaataatatgtgatgaagagtggcgcacgtctttaaacatcaactcagccacaaaaaagatatttaataaccttgacaacttatcatatattcagaggacttcttttcggggtaacgacacgctatacaatgaaaaggttcagtttaaactcacttatcccgtcaagaatggaagacacaaagaaaatattgaatttcaggtagtaataaatttaagccctatttatttagataatttccgccatgatggggaaattaatattttttgcgctcccaacccaaagcctgtcactatggggcgcgtatttcagaccggcgtcgagcgtgtgctctttctgtttctgaatgactttatagaacaatttccaatgatcaaccctggcgttcctatcaaaagagcgcatacgccacatattgaacccctgcatccggatcaccataccgctgcagattacatacgccagtttgatttgcttgtcctgaattttatctctcgcggtaattttgtcatactcccccgattatggaataactctgaggttcacagatggttcgggaataaagaacctaacttgctcaccgctattctcgacataacggacagcgaattaaaagaggatttattgcaaagtctgatggattcactaggttctaacaaacatgtactacccgaagtctgcatctgctttttatcccttttagcagaacaagattttccacattttcaggagttgtttttatttttcgccaatatgttattgcactatcaccaatttatgaatcccaatgaaagtgatttgattgacgtgttgatgccagcatcattaagtgatgataaaattatcaaacatatggcgcgcaagaccctcaaactttttgtaaaaaatgaaacgccgccaaaagttactcatgaagacctggtgaaaaacaggcctcgctcccctgtcagaccacctatacccgcaacctccaaaacgccagacctccctgaacgtcattaa

SEQ ID NO: 6674 - DNA, 1389 bp, Escherichia coli
atgaccattactccggcaactcatgcaatttcgataaatcctgccaccggtgaacaactttctgtgctgccgtgggctggcgctgatgatatcgaaaacgcacttcagctggcggcagcaggctttcgcgactggcgcgagacaaatatagattatcgtgctgaaaaactgcgtgatatcggtaaggctctgcgtgtccgtagcgaagaaatggcgcaaatgatcacccgtgaaatgggcaaaccaatcaaccaggcgcgcgctgaagtggcgaaatcggcgaatttgtgtgactggtatgcagaacatggtccggcaatgctgaaggcggaacctacgctggtggaaaatcagcaggcagttattgagtatcgaccgttggggacaattctggcgattatgccgtggaattttccgttatggcaggtgatgcgtggcgcggttcccatcattcttgcaggtaacggctacttacttaaacatgcgccgaatgtgatgggctgtgcacagctcattgcccaggtgtttaaagatgcgggtatcccacaaggcgtatatggctggctgaatgccgacaacgacggcgtcagtcagatgattaaagactcgcgcattgctgctgtcacggtgaccggaagtgttcgtgcgggagcggctattggcgcacaggctggagcggcactgaaaaaatgcgtactggaacttggcggttcggatccatttattgtgcttaacgatgccgatctggaactggcggttaaagcggcggtagccggacgttatcagaataccggacaggtttgtgcagcggcaaaacgctttatcatcgaagagggaattgcttcggcatttaccgaacgttttgtggcagctgcggcagccttgaaaatgggcgatccccgtgacgaagagaacactctcggaccaatggctcgttttgatttacgtgatgagctgcatcatcaggtggagaaaaccctggcgcagggtgcgcgtttgttactgggcggggaaaagatggctggggcaggtaactactatccgccaacggttctggcgaatgttaccccagaaatgaccgcgtttcgggaagaaatgtttggccccgttgcggcaatcaccattgcgaaagatgcagaacatgcactggaactggctaatgatagcgagttcggcctttcagcgaccatttttaccactgacgaaacacaggccagacagatggcggcacgtctggaatgcggtggggtgtttatcaatggttattgtgccagcgatgcgcgagtggcctttggtggcgtgaagaagagtggctttgggcgtgagctttcccattttggcttacacgaattctgtaatatccagacggtgtggaaagaccgggtctga

SEQ ID NO: 6675 - DNA, 1452 bp, Escherichia coli
gtgaaaacactaaatcgtcgcgattttcccggtgcacagtatccagaacgtatcattcagtttggtgaaggtaacttcctgcgcgcctttgttgactggcaaatcgatctcctgaatgagcacaccgatctgaattctggcgtggtcgttgttcgtccgattgaaacttcattcccgccgtcactgagcacgcaggatggtctgtacaccaccattatccgtggtctgaacgagaagggggaagcggtcagcgacgcgcgtctgattcgctctgttaatcgtgaaatcagcgtctacagtgaatacgatgaattcctgaaactggcgcacaacccggaaatgcgctttgttttctctaacaccaccgaagcgggtatcagctaccatgcgggcgataaattcgatgacgcgccagcggtaagttatccggcaaaactgacccgtctgctgttcgaacgttttagccatttcaacggagcgcaggataaaggttggatcatcataccatgtgaactgatcgactataacggcgatgcactgcgtgaactggtgctgcgctacgcgcaagagtgggcactgccagaagcatttattcaatggctggatcaggctaacagcttctgttctacgctggtggaccgtatcgttaccggttatccgcgtgatgaagtggctaaactggaagaagaactgggttatcacgatggtttcctcgacaccgctgaacacttttacctgtttgtgattcaggggccgaaatccttagcgactgaactgcgtctggacaaatatccgctcaacgtgctgattgttgacgatattaaaccgtataaagaacgcaaagtggcaatactcaacggtgcacacaccgcgctggtgccggtggcgttccaggcagggctggataccgtaggtgaagcgatgaacgatgctgaaatttgcgcattcgttgagaaagccatctacgaagaaattattccggttctggatttgcctcgcgatgaactggagtctttcgccagtgcagtcaccgggcgtttccgtaacccgtacatcaagcatcagctgctgtctatcgcgctcaacggtatgaccaagttccgtacccgcatcctgccgcagctactggcagggcagaaggcaaacggcacacttccggcgcgccttactttcgcattagcggcattgattgcgttctatcgcggtgagcgtaatggagaaacatatccggtacaggacgatgctcactggctggaacgttatcagcaactctggagtcagcatcgtgaccgtgttataggtacccaggaactggtagcgattgtgttggcagaaaaagaccactggaagcaggacctgacgcaagtgcctggtctggtcgagcaggtggctaatgacctggatgcgattctcgaaaaagggatgcgcgaagcagtacgcccgttgtgctaa

SEQ ID NO: 6676 - DNA, 291 bp, Escherichia coli
atgcacgtcacactggttgaaattaacgttcatgaagacaaggttgacgagtttatcgaagtttttcgccagaaccacctgggctcggtacaggaagaaggcaatttgcgcttcgatgtcttacaggacccggaagtgaattcgcgcttttatatctacgaagcttataaagatgaagacgcagtggcgttccataaaaccacgccccactacaaaacctgtgtcgcaaaactggaagctttaatgaccgggccgcgtaaaaaacgtctgttcaatggattgatgccgtga

SEQ ID NO: 6677 - DNA, 876 bp, Escherichia coli
atggcagatttagacgatattaaagatggtaaagattttcgtaccgatcaaccgcaaaaaaatatcccttttaccctgaaaggttgcggtgcactggattggggaatgcagtcacgcttatcgcggatatttaatccgaaaacgggtaaaaccgtgatgctggcctttgatcatggttattttcaggggccgactactggacttgaacgcattgatataaatatcgccccgctgtttgaacatgccgatgtattaatgtgtacgcgcggcattttgcgcagcgtagtcccccctgcgaccaataagccggtggtactgcgggcgtcaggtgcgaactctattctggcggaattaagtaatgaagccgtggcgttatcgatggatgacgccgtgcgcctgaacagttgcgcggtggcggcgcaggtttatatcggcagcgaatatgaacatcagtcgatcaaaaatattattcagctggtcgatgccggaatgaaagtgggaatgccgaccatggccgtgactggcgtgggcaaagatatggtgcgcgatcagcgttatttctcgctcgcgactcgaatcgccgctgaaatgggggcgcaaattatcaaaacctattatgtcgaaaaaggttttgaacggattgttgccggatgtccggtacccattgttattgctggcggtaaaaaattaccggagcgcgaggcgctggaaatgtgctggcaggctatcgatcagggcgcttctggtgtggatatggggcgtaatattttccagtctgaccatccggtggcgatgatgaaagccgtacaggcggtggtacaccataacgaaacggctgatcgggcatatgaactctatctgagtgaaaaacagtaa

SEQ ID NO: 6678 - DNA, 1023 bp, Escherichia coli
atgacacttcatcgctttaagaaaatcgccttacttagcgctcttggcattgccgcaatctctatgaatgtgcaggccgcagagcgtattgcatttattcccaaactggttggcgtgggattttttaccagcggtggcaacggcgcacaacaagcgggtaaagagctgggcgttgatgtgacctacgacgggccgacagaacccagtgtttctggtcaggtacagttgattaataacttcgtcaatcagggctataacgccattatcgtttctgcggtttcgcctgatggcttgtgtccggcactgaaacgcgccatgcaacgtggtgtgagagtgctgacctgggactctgatactaaaccggagtgccgctcttactacattaatcagggaacgcccgcccagttgggaggtatgttggtggatatggcggcgcgtcaggtgaataaagacaaagccaaagtcgcgtttttctactcaagccccaccgttacggaccaaaaccagtgggtgaaagaagcgaaagcgaaaatcgccaaagagcatccaggctgggaaattgtcactacgcagtttggctataacgatgccactaaatcgttacaaaccgcagaaggaatattaaaagcctataacgatctcgacgccattatcgcccccgatgccaatgccctgcccgctgccgcacaagccgcagaaaacctgaaaaatgacaaagttgcgattgtcggattcagtacgccaaacgtgatgcgtccatatgtggaacgcggcacggtgaaagaatttggcctgtgggatgtggttcagcaaggcaaaatatcagtttatgtcgcggatgcattattgaaaaaaggatcaatgaaaacgggcgacaagctggatattcagggcgtaggtcaggtggaagtctcgccaaacagcgttcagggctatgactacgaagcggatggtaatggcatcgtactgttaccggagcgcgtgatattcaacaaagagaatatcggcaaatacgatttctga

SEQ ID NO: 6679 - DNA, 993 bp, Escherichia coli
atgcgtattcgctacggttgggaactggctcttgccgcactgctcgttattgagattgttgcatttggtgcaattaacccgcggatgttagatctcaatatgttgctgttcagcaccagtgactttatctgcattggcattgtcgccctaccgctgacgatggtgattgtcagtggtgggatcgatatttcgtttggttcgactatcggcctgtgcgccatcgcattgggtgtgttgtttcaaggcggcgtgccgatgccgctggcgattatcctgacgttactgctcggcgcattgtgcgggttgatcaacgccggattaattatctataccaaagttaacccgctggtgattacgcttggcacgctgtatctgtttgccggaagcgccctgctgctttccgggatggccggagcgacggggtacgaaggtattggtggattcccgatggcgtttacagatttcgctaacctggatgtactgggactccccgttccgctgattatcttcctgatatgtctcctcgttttctggctctggctgcataaaacccatgccggacgttacgtgtttttaattgggcaaagcccgcgtgtggcggtttatagcgcgattccagttaaccgcaccttgtgtgcgctctatgccatgacggggctggcgtctgcggtcgccgctgtgctgctggtatcgtattttggttcagcacgttccgatctcggtgcgtcgtttctgatgcccgccatcaccgccgtagtgctcggcggtgccaatatttatggaggttctggttccattatcggcaccgccattgcggttttattagtgggatatttgcaacaaggtttgcaaatggcaggagtgccaaatcaggtgtccagcgccctttccggtgcgctacttatcgtcgttgtcgtaggtcgttccgttagcctgcatcgccagcaaattaaagagtggctggcgcgtcgggccaataacccattgccataa

SEQ ID NO: 6680 - DNA, 1029 bp, Escherichia coli
atgctgaaatttattcagaacaaccgtgaaatcacggcactgctggcggtggtgctgctgtttgtattacccggttttctcgaccgtcagtatttaagtgtgcaaacgctgaccatggtttatagcagcgcgcaaatcctgatcctgctggcaatgggcgcgacgctggtaatgcttacgcgcaatattgatgtttcagtgggttcgattaccggaatgtgcgcggtgctgttggggatgttactgaacgcggggtattcactacctgttgcttgtgtcgcgactttactgcttggtttgctcgcgggatttttcaacggtgtcctgctcgcgtggctaaagatccctgccattgttgccacgctcggtacattagggttgtacagaggcatcatgttgctgtggactggcggtaaatggattgagggattacccgccgaactgaaacaactctccgccccgctgctgtttggcgtttccgcgattggttggttgacgataattctggtggcatttatggcctggctgctggcaaagacggcgtttggacgcagtttttatgtcacgggcgataatttacagggcgctcgtcaactgggcgttcgtacggaagccattcgcattgtggcattttcgttgaacggctgcatggcggcactggcgggaattgtgtttgcttcgcagattggttttatccccaaccagaccggtaccgggctggagatgaaagcaattgcagcctgcgtgctgggcggcattagtttgctcggcggttccggtgcgatcatcggtgcggtactaggcgcatggttcctgacgcagatcgatagcgtactggtgctgttacgcattccggcatggtggaatgattttatcgcgggcatggttctgctggcggtgctggtgtttgatggacgcctgcgttgtgcgctggaacgtaatctgcggcggcaaaaatatgcccgctttatgatgccaccgccatccgttaaacccgcttcgtcaggtaaaaaacgggaggccgcataa

SEQ ID NO: 6681 - DNA, 1536 bp, Escherichia coli
atgcaaacgagtgatacccgcgcgttaccgctactttgcgcccgctcggtttataaacagtattcaggagttaatgtcctgaaaggcatcgattttacgttgcatcagggggaggtccacgccctgctcggcggcaatggtgccggtaaatcgacgttaatgaagattattgccggtattacccctgctgatagcggtacgctggagattgggggcaacaactacgtcagattaacgccagttcatgctcatcagctgggcatttatctcgttccccaggaaccgctgctttttccaagcctgtcgataaaagaaaacatcctgtttggtctggcaaaaaaacaactctccatacagaaaatgaataacttgctggcggcgctgggctgccagtttgatctgcatagtctggcaggatcgctggatgtcgccgatcgccaaatggtggaaatcctccgcgggctgatgcgcgattcgcgaattctgatcctcgatgaacctaccgcctcgcttactcccgccgaaaccgaacgtttgtttattcgcttgcgggagttgcttgctactggcgtgggtattgtttttatctcgcataagctgccggaaattcgccagattgccgaccgaattagcgtgatgcgcgacggaaccatcgccttaagcggcaaaaccagcgaactgtctaccgacgacattattcaggccattacgccagcgctacgggaaaaatcgctctctgccagccaaaaattatggctggaattacctggcaaccgcccacaacatgccgcgggaacgccggtgctgacactggaaaatctgaccggcgaaggtttcaggaatgtcagcctgacgctcaatgccggagaaattctgggcctggctgggctggtgggagccggacgcacagaactggccgagacgctctatggtctgcgtactttgcgtggcggacgcattatgctgaatggtaaagagatcaatagattatccaccggagaacgtttactgcgcggtctggtttatctgccggaagatcgccagtcatccggacttaatctcgatgcttcactggcgtggaacgtctgcgcccttactcataaccttcgtggattctgggcgaaaaccgcgaaagataatgccaccctggaacgatatcgtcgggcgctgaatattaaatttaaccaaccggaacaagctgcgcggaccttatccggcggcaaccagcaaaaaatcctgattgccaaatgcctggaagcctcgccgcaagtattgattgtcgatgagccgacgcgcggcgtggatgtctcggcgcgtaatgatatctaccaactgttgcgcagcatcgccgcacagaatgtggctgtgctgcttatctcctctgatctcgaagagatcgaactgatggcagatcgcgtgtatgtgatgcatcagggcgaaattgcccactctgcactgaccgggcgcgatattaatgtcgagaccattatgcgcgttgccttcggcgatagtcagcgtcaggaggcgtcatgctga

SEQ ID NO: 6682 - DNA, 954 bp, Escherichia coli
atgacaatcaacgattcggcaatttcagaacagggaatgtgtgaagaagaacaggtcgcgcggatcgcgtggttttactatcacgacgggctgacccagagcgagatcagcgatcgtctcggcctgacccgtttgaaagtgtcgcgcttgctggagaaagggcatcagtccggcattattcgcgtacagattaattctcgctttgaaggctgtctggaatatgaaactcaattacgtcgtcagttttcgctgcaacatgtccgggtgatccctgggcttgcggatgctgatgtcggcgggcgactggggataggcgcggcgcatatgttgatgagtttacttcaaccacaacagatgctggcgattggttttggcgaggcaatcatgaatacgctgcaacgcttaagtggttttatttcgtcacagcaaattcgcctggtcacgctctccggtggcgtcggttcttatatgacgggtatcgggcagcttaacgcggcgtgcagtgtgaatattattccggctccgttgcgggcatcctccgctgacattgcccgtacgctaaaaaatgaaaattgcgtcaaagatgttctgttagccgcgcaagcagcggatgtggcgattgtcggcattggggccgtgagtcaacaagacgacgcgacgatcattcgctccggttatatcagccagggcgaacagttaatgattggccgaaaaggggcggttggcgacattttaggctacttttttgatgcaaaaggtgacgttgtcacggatatcaaaatacataacgaactgattggcttacctttaagcgcgctgaagaccatacccgtccgggttggcgtggcagggggagaaaataaagccgaagcaattgccgctgcaatgaaaggcggttatatcaacgcactggttactgatcaggacacagcagcggcgattttacgtagttaa

SEQ ID NO: 6683 - DNA, 1593 bp, Escherichia coli
atggctcgactctttaccccttcagaatcaaagtactacctgatggcgctggatgcaggcaccggaagtattcgggctgtgatattcgacctggaaggcaatcaaatagccgtgggacaggcggagtggcggcacctggcagtaccggacgttcctggttctatggaatttgatctcaacaaaaactggcaactggcgtgtgagtgtatgcaccaggcgctgcacaacgccggcatagccccggagtatatcgctgccgtttcggcatgttcgatgcgtgaaggcattgttttatataataatgaaggaacaccgatctgggcctgcgccaatgtggatgccagagcggcgcgcgaagttagcgaacttaaagaactgcacaacaatacctttgaaaacgaagtttatcgcgcgaccggacaaacgctggctttaagtgccatccccagattactttggctggcgcaccatcgttccgatatctaccgacaggcgtcgaccatcaccatgatcagcgactggctggcctatatgctcagcggcgaactggcggtggatccctctaacgctggcaccacgggacttcttgatctaaccacccgtgactggaaacctgcattgctggatatggctggcctgcgtgccgatattctttctcctgtcaaagaaaccggcacattgctgggcgtggtaagttcacaagcggcggaactctgcggtctgaaggcgggcactccggtggtcgttggaggaggtgacgtgcaacttggttgcctggggttaggcgttgtccgtccggcacaaaccgcggttcttggcggtacattctggcagcaagttgtaaacttagccgcgccggtgacagacccagaaatgaacgtgcgcgttaatccccatgttattcctggcatggtacaagctgaatctataagcttttttaccggactcaccatgcgctggttccgcgatgctttctgtgccgaagaaaaactgattgccgaacgtttaggcatcgacacctatacgctgctggaagagatggccagtcgggtgccgcctgggtcgtggggcgtaatgccgatcttctccgacagaatgcgctttaaaacctggtatcacgccgcaccttcctttattaacttgtccattgacccggataaatgtaacaaagcgacattgtttcgtgcgctggaagaaaatgcggcgattgtatcagcgtgtaacttgcagcaaattgctgatttctcgaatattcatcccacctcgctggtttttgctggcggaggttcaaaagggaaattatggagtcaaattctcgctgatgtctcgggattacccgtcaatattccggtagtcaaagaagccaccgcattaggatgtgccattgcagctggcgtcggtgccggaattttttcatcaatagcagaaaccggagaacgcctggttcgctgggaacggacgcacacaccagacccggaaaagcatgaactttatcaggattcacgcgataagtggcaggcagtttatcaggatcagctggggctggttgatcatggactgacgacgtcgttatggaaagcgcctgggttatag

SEQ ID NO: 6684 - DNA, 1062 bp, Escherichia coli
atgaatagaatctatcgcgtgatatggaattgcaccctacaggtatttcaggcctgctcggaattaactcgcagggtaggtaaaacatcgacggttaatttgcgtaaatcctctggattgacaacgaaattcagtagattgacgctgggtgttttgctggcactaagcggttcagcgtctggtgcgagtctggaagttgataatggtcagattaccaatattaatactgatgttgcttacgatgcctacctggttgggtggtatggcactggagtgcttaatattttggctggcggtaatgcctccttaaccactattactaccagcgtcattggtggtaatgaggactcggagggcaccgttaatgttttgggtggcacctggcgattgtatgatagcggaaataatgcaaggcctttaaatgtgggtcaatccggaacggggacgctgaatattaaacagaagggtcacgttgacggaggatatttaaggataggttcttcgacaggaggcgtcgggacggttaatgttgagggagaggactcggttctgacgaccgaattattcgaaatagggagttacggtacgggctcattaaatattacggataagggttacgtcacgagttcaatagtcgccactgtaggatatcaagcgaacagtaatggtaaggttgtcgttgaaaagggcggtgagtggctaataaaaaataacgattcctcaattgaatttcaaattggtaatcaaggaactggggaagcgactattcgcgagggtgggctaattacggctgaaaatacgattatcggaggcaatgccaccggtatcggaaccctgaatgtgcaggatcaagactctgtcatcacggtacgcagactctataatggatatttcggtaatggcaaagtcaatatttccaataatggactgattaataacaaagaatattcattggtgggcgttcaggacggttcccacggtgtcgtcaacgtgaccgataaagggcattggaatttcctcggaacgggcgaagcctggagaatggtggcacggttcaaatga

SEQ ID NO: 6685 - DNA, 168 bp, Escherichia coli
atgttctggaaccctgaagtaataacgacgaccggaaaatcgcttcgcatcactcaaatcacatttaacataatatacattatgcgcaccaacataaaccaaggaagaatccagtcgttggcggtcatgattgtcgtgctcattaataacgaccaaaccccatattaa

SEQ ID NO: 6686 - DNA, 711 bp, Escherichia coli
atgcaaactacgcgtaccccctactctatttcctttatggcgacagtgttacttttattgctctttgcttgccatagcaccattgccaacgcagctgtcgcacttggtgcgacgcgggtaatttatccggcaaaccagaaacaggttttattgcctgtcacgaataatgatcctgccagtgtctatctcattcagtcatggatagaaaatgcaggtgaccaaaaagacacccagtttgtcattaccccaccgcttttttccatgcaaggtaaaaaagagaatacgcttcggataatcaacgccactaatcatcagttaccaggcgaccgtgaaagcctgttctgggttaatgttaaagctattcctgctatggaaaaagaccagaagaatgagaatacattacagctggcaattattagccgcataaaaatgttttatcgccccacgaacctggcaatggcacctgaagaagcgcctgcaatgcttcggtttcgtcgcagcggcagcaaactcactcttattaatccaacgccctacttcattaccgtaacaaatatgaaagcaggaaatagcaatctcccaaacaccatggtgccgccaaaaggtgaagtatcggtggatatcccgcatgctgcacccggggatatcagttttcagacgatcaatgattacggtgcattaactccgcgtattaaggcaaccatgcagtaa

SEQ ID NO: 6687 - DNA, 531 bp, Escherichia coli
atgaaatacaataacgttattttcctcggtttatgtctggggttaaccacctattctgctttatccgcagatagcgttattaaaattagcgggcgcgttctcgattatggctgcacagtctcatcggattcgcttaattttaccgtagatctccaaaaaaacagtgccagacaatttccaacgaccggtagcacaagtccagccgtcccttttcagattacattaagtgaatgcagcaaagggacaacgggagttcgggttgcatttaacggtattgaggatgcagaaaataatactctgttgaaactggatgaaggaagcaatacggcctccggtttgggtatagaaatactggacggaaatatgcgtccggtgaaattgaatgaccttcatgccgagatgcagtggatcccattggtaccagaacagaacaatattttgccttactccgctcgtttgaagtcaactcagaagtccgtcaatcctggactggtgagcgcttcggcaacctttacccttgaatttcaataa

SEQ ID NO: 6688 - DNA, 915 bp, Escherichia coli
atgggtaaaacaataagtatgaagcttctgttcggtatttatcttctattaatggcaggcaaagtttttgccttcagttgtaatgtcgatggcgggtcaagtattggagcaggtacaacctctgtttatgttaatctcgaccctgtaatacaaccgggccagaatctggttgtagacttgtctcagcatataagttgctggaatgattacggcggctggtacgacactgatcatataaacctggtacaaggatcagctttcgcagactccctacagtcatataaaggatcactgtactggaataatgtgacctaccccttcccgttgacgacaaatactaatgtattagatattggtgataagacaccgatgccattaccgttaaaactctatattaccccagtcggagcggccggtggagttgtcataaaagcaggggaagttattgcccgtattcatatgtataaaattgccacgttaggaagcggaaatccgcgtaattttacgtggaatattatttcaaataacagtgttgttatgccaacaggcggttgcaccgttgatagtcgtaatgtcaccgtgaatctcccggactttcctggaagcgcagaaataccccttggcgtatattgctcaagtgaacaaaaactctcattttatctttcgggtgctaccactgacagtgccagacatgtgtttgctaacacagcaccagatgcaacaaaagcatcgggcgtgggtgtctctctgatgcgtaatggaaaaatactggctacgggagaaaacgtctccctggggacagtaaataaaagcaaagtacctctgggtttaagcgcaacctatggacaaacaggaaacaaggttgcagccggaaccgtccagtcagtcattggtgtcacttttatctatgaataa

SEQ ID NO: 6689 - DNA, 762 bp, Escherichia coli
atgtcgctcgtttgttctgttatatttattcatcatgccttcaacgctaacattttagataaagattacgccttctctgacggcgagatcctgatggtagataacgctgttcgtacgcattttgaaccttatgagcggcatttcaaagaaatcggatttaatgaaaacaccattaaaaaatatctacaatgcactaacatccagacagtgacggtgcctgttcctgcgaagtttttacgtgcttcaaatgtaccgacgggattgcttaatgaaatgattgcttatctcaactcggaagaacgcaatcatcataacttttcagaacttttgcttttttcttgcctgtctatttttgccacatgcaaaggtttcattacactattaactaacggtgtgctatccgtttccgggaaagtgagaaatattgtcaacatgaagctggcgcacccatggaagctgaaagatatttgtgactgcctgtacatcagtgaaagcctgttgaagaaaaaacttaagcaagagcaaacgacattctcacagattcttttagatgccagaatgcagcacgcaaaaaatttgatacccgtagaaggttcagtcaataaaattgccgaacaatgtggttatgccagcacatcttattttatttatgcgttccgcaaacatttcggcaacagtccgaagagagtttctaaggagtaccgttgtcaaaggcacaccggtatgaacacggacaacacgatgagtgctttagctatttga

SEQ ID NO: 6690 - DNA, 249 bp, Escherichia coli
atgccggatggcaatccggcattgatatttagcgatgatgtttgtcaggccccggacgatgatcgccacgatgatcattgtgcttgttatggcgcggcgatggcggcggtccatgtgggtgccagcgattgcctcgccattcataatgttgtttccaccagccgtggtcgcgccagtgaccgccatcccagtaatagccacgattatcacgatcgcctatctgtaattttactgacgggactagcgtaa

SEQ ID NO: 6691 - DNA, 1494 bp, Escherichia coli
atgcagaaaacattaatggccagtttgatcggccttgcagtttgcacagggaatgcttttaatccagccgtagccgccgaaactaaacaacccaatttagtcatcattatggcggatgatttaggctatggtgatttggcaacatatggacatcagatcgttaaaacgcccaatatagacaggcttgcccaggaaggcgtcaaatttaccgactattatgcacctgcccccttaagttctccttcacgggcgggactattaacagggcggatgccatttcgtaccggcatacgctcatggatcccaacgggaaaagatgtggcattagggcgtaatgaactcacgattgctaatctactcaaagcgcaagggtacgacacggccatgatgggtaagctgcatctgaatgcaggcggcgatcgcaccgatcagccgcaggcaaaagatatgggctttgattactcactggttaatacggcgggttttgttaccgacgctactctggataatgcgaaggagcgtccccgttttggcatggtctatccaacgggctggttgcgtaacgggcaacccacaccacgttccgataaaatgagtggtgagtatgtcagttcggaagtcgttaactggttggataacaaaaaggatagtaagcctttcttcctttatgtcgcttttaccgaagtgcacagtcccctggcttcgcccaaaaaatacctcgacatgtactcacaatatatgagcgactatcagaagcagcatcctgatttattttatggcgactgggcggataaaccctggcgtggtacaggagaatattatgccaacatcagttatctggatgctcaggttggaaaagtactggataaaatcaaagcgatgggtgaagaagataacaccatcgttatttttaccagtgataacggcccagtaacccgtgaagcacgtaaagtttatgaactgaatttggcaggggaaactgatggattacgtggtcgcaaggataatctctgggaaggcggcatccgtgttccggcaattattaaatacggtaaacatcttccaaagggaatggtttcagatacgcctgtttatggtctggactggatgcctacgctggcgaaaatgatgaacttcaaattaccgacggaccggacttttgatggcgaatcgttggttcctgtccttgagaacaaggcgctaaaacgtgaaaagccattaatcttcggaattgacatgccattccaggatgatccaaccgacgaatgggcgatacgtgatggtgactggaaaatgatcatcgatcgtaacaataagccaaagtacctatacaacctcaaaaccgatcgttttgagaccattaatcagataggtaaaaatccagacattgaaaaacaaatgtatggtaagttcttaaagtataaagccgatattgataatgattcattaatgaaagccagaggtgataaaccggaagcggtaacctggggctaa

SEQ ID NO: 6692 - DNA, 426 bp, Escherichia coli
atgacctgtggttttgaagatcaatctatcgacactggacgatttgtactgtctcgtatcaataatgaaaattatcagtttcatcatataagatttgactgtatccagggtgagcaaggtgaattagtttttgaacccagtgatgttgaatattactttgagccagtgacgatacaggattcaggaaccagcatattaaaaaatgagttagaaaacagtgaggacggtgcgggtcaaataggctttcaactctccaatgatggtacgaatgaaatgcagtatggtaaaagcaattactactcttttcagcatccccatgaaggaagtaatcagattcctctatttattcgcccgcgtacatatggaaataatgtctcaagcgggcaaataatgagccgagtcaaaatcgtggtaatgtacaactaa

SEQ ID NO: 6693 - DNA, 375 bp, Escherichia coli
atgatacctcatcgtgaaaaccatctggtacttgatatagcaaacagtgaaagtgaaacagaattgcagggcaatcgtcaaattattgcgccttaccgtggagcagtttcttatgtgcagtttacaactgaccaacgtaagcccaggtatatacaggcactgcgtcccgatggttcgccattaacctttggctatgacgtactggatctccaggaaaataatattggagtcgttggccagggtagtcgcctttttattcgcgtagatgaaattcccactggcataaaagttgctctcaatgatgaacagaacttattctgtactattacttttcaacacgttatcgatgaaaacaaaacatatatatgccagtaa

SEQ ID NO: 6694 - DNA, 924 bp, Escherichia coli
atgagaaagacgggcaaccgccgcgagcgtggggcaaaaaccaccatcgtccggcggcagatcaaaaagaatcatgccgggcatcatggcggggcgtggaaggtggcgttcgccgactttaccctggcgatgatggcgctatttatgacgctgtggattgtcaacagcgtcagtaaatccgagcgtgaaagcattatcgccgcgctgcacgggcagtcgatttttaatggtggagggctgtcgccgttaaataaaatcagcccgtctcatccgccaaaacctgccaccgtggcggtgccggaagagacggagaaaaaagcgcgtgacgtcaatgagaaaacggcgctgctgaagaagaaatccgctactgagcttggcgagctggcgaccagtatcaacaccattgcccgtgatgcacatatggaagcgaatctggagatggagattgttccccagggactgcgcgtgctgattaaagatgaccagaaccgcaatatgtttgaacgcggcagcgcacagattatgccgttctttaaaactttgctggtggagttagcgccggtttttgattcgctcgacaataagatcatcatcaccgggcataccgatgcgatggcctacaaaaacaatatctacaacaactggaacctttcgggtgaccgcgcgctttcggctcgtcgggtgctggaagaggcaggaatgccggaagataaagtgatgcaggtgagcgcaatggcggaccagatgctgctggatgccaaaaatccgcaaagcgcgggcaaccggcgcattgagattatggtgctgactaaaagcgcgttcgatacgctgtatcaatactttggtcagcatggggataaagtggtgcagccgctggtgcaaaagctggataagcagcaggtactttcacagcgaacgcgctag

SEQ ID NO: 6695 - DNA, 864 bp, Escherichia coli
atgcaaaaaatattaggtttactggtggtgctcggctgcgtatttggcggttattttgaagcgggcggccaattagtggctatctggcagcctgcagagatagttattattttaggtgctggtttcggggcgatgattattgggaacccgaaacatgtgctgaaagagattgcccatcaaattaaaggcgtgatcagtaaaaaacagctcgggccggagtttcagcgccagctattaatgtgcctgtatgagttgcttgaaatggtacaaaacggcggtctgcggatgttggatcagcatattgagcagccggaagagagtaccgttttccagaaatacccgctggtgttaacccagaagcggctggtgacttttattgccgataactttcgcctgatggcgatgggtaaaatcgacgcccatgaactggaaggcattctcgatcaggagctggataccgccgaagagtcgctgctaacgccgtcacgctcgctgcaacggaccgccgaagcgatgccgggatttggtatttgtgcagcagtgttgggcatcatcattaccatgcagtcgattgacggctctatcgccctgatcggcctgaaagtggcggcagcgctggtggggacgtttttaggcgtgtttatctgctactgcctgatggatccgcttgccaacgccatggaacaacaggcgcgggcggaacattcgctgctggagtgtgtgcgtaccgtgctggtggcccaggcgggcggcaaaccgacgctgttggcggtggacgccgggcgtaagttgctgcatctggcgtccaaaccgaccttcgccaacctcgacgcgtgggtgaatgcgatgctggagcaagaataa

SEQ ID NO: 6696 - DNA, 720 bp, Escherichia coli
atgctacaggacgtattattcgagtcagaagaatttgctgccgcgccggtattaaccccgcagcaggagagccactacttgcaggcctatttacctctggtgcgtaaagtggtgcggcaacttgccccgcagtgtaattgcattattgatcgtcaggatatggaacaaacggcgttaatggggctgttgaacgccattcgtcgctatgggctgccggacgaaggttttgcgggctatgccgtgcaccggattcgcggcgcgatccttgatgagctgcgcgctctcgactggcgaccgcgccagctgcgacagaaatatcatcagatgaaagacctgattcgcgaaacgcgtaaaaaactggggcacgaaccggagtggcaggagctggctgaggaagggatctcgcatgaagattatctcgaatatcagcaactggaaggggcggaaacgctcgccagcctggacgaactgctgaacggcgaagggccaggcattccgcttgctggcagagacctggaagatcagtttgtcacccagcaaatgctgcaacacgcgctttcacaattaagcgaaaaagagcaactgatcctctccatgtattaccagcatgagatgaatctcaaagagattgcgctggtattagggctaaccgaggcccgaatttgtcaactgaataaacagatcgcgcagaaaattcgtgattttgtctatccgaattaa

SEQ ID NO: 6697 - DNA, 468 bp, Escherichia coli
atgaagaaaatcgtggtggcgggcgtggtcagcgccgttctggcgttggtggtgggggccggagctggatggggtgtctggcatcattatgccggaaaaggaaaaccgactgccgccgcgcagacggaaacggtggaaaccctggatgaaagcaaaagcgtatttgtgacgttgccggaaaccattgtcacgctgcatgacaacaacggcgcggaccattatttgtcggcggaattagtgatggtggtcgccagtgacaaagaagcggaaaaaataaaacatcaggagccgctgtatcaaagtattgcagttgaatgcctgacggaaatgaaatttgaagatttgcgtggcatgaaaatatccgccatccgcaaactgatttcggatgcgttaaagaaagatcttcaacgtcgcaaaatgagcgcaccgtataaggatttgctggtgaaaaaagtggtcttccagtaa

SEQ ID NO: 6698 - DNA, 1089 bp, Escherichia coli
atgaatccggcattgcttgccacgctcggaacacttgcggaaacggcgtcgctgaaagcggatattttaccgccggtgagtagtgaaaacgcgcccgcgtttaccctgccgaaaatggcggtcgcggcggtggcggagcgcgttcatagcgctaaaaccagtcagcatcaggcgacgcgcccgcaggagaacgatccggtggcgatgcaggcgctaatggcgctgttacttccgcaacctgccgcgccgcatcaggacacgccgcagccgcgaaacgtcgcaacatcgccggttatccagcaattgacgaaagcggtggtgcaaaacgcgccgcaacgcccgacgcagcagcaggaactcacgtcgttgccgccgcagttgcaggaactcacgtcgttgccgccgcagttgcaggaactgatcggtcagttgccgcaggcgaaacccgaacagcaggccagactggcgacttacgccagtgacgatttacatgccattgcgccgacgcagccgcgcgtctcaacaccgccagctcgcccgaaacctgaactaccccgtgtgaacgcgcgcccgcaggtcgagcgtaaaacggaaaaagtgccggacagcgaaccggttattgcgcgtgcggtgttgcaggttaagacgccggatctggtcagcgaacatcatgagattgtcgccaaaccagccacgctttcgatggacgaactgggcgaaaaactgacgacgctgttgaaagatcagatccactttcagctcaacaaacaacagcagatctccaccatccgtctcgatccaccgtcgcttggcaagcttgagatcgccgtacaactcgataacggcaaactgatggtgcacatcggcgcgaaccaaagtgaagtttgccgcgcgttacaacagtttagcgacgatctctgccagcatttgacggcgcaaaattttatggaggtgaacgtacaggtttcctccgaagggcagtcgcagcaacaacagtcgggccatcagcaggaagaggtgagtgccgccttacagcttgatgatgcgcctcaatttcaacagaacgaatccgttttgatcaaagtgtaa

SEQ ID NO: 6699 - DNA, 312 bp, Escherichia coli
atggaaaaacaacgcaggcaacttttcgcgctggttgaagcgatgaacgaagccctcgacaagcaacgctggcgacgccttccggcactgcatcagcagttgatgcgccagtttcacgattacgtggcggcggaaaccgacgcggcgcagttgtgtgcggtgaaggcgcagctgtacggcgcgtttaatgccctgattaaacggcgcgagcagcgtgcagaagtgttgaaggcgcgtatggaacagcatcagcggcatcaggaaggcgtactggcctactcaattgttaatttactttcggagaagtcatga

SEQ ID NO: 6700 - DNA, 393 bp, Escherichia coli
atgtaccaagtacaggatggctattcgcaatacaaagaggtcgatctcgcggcgcgtaccgctgcggcatcgcctcttgaactggtgctggtgctgttttctggcctgatggacgagctggaacgcgccagaagccacattgaagggcggcgtttcgagaagaaagcccagagcatcaataaatgcatcgacattctcaatgcgctcaccagttcgctggagtttgaaaccggtggcgagctggtggtgaatctttctcgcctctatgaccactgcgtgtatcgcttgtatgaagccagtggcgaactgtcggcagagaaaatcgatgaagtgatgctgatcttaagcaacctgcgtgaaggctgggaagggctttcgggcaagctgggttaa

SEQ ID NO: 6701 - DNA, 1317 bp, Escherichia coli
atgatcaacccaagaaccattgcgcaagaaatcgcctatgcggatgttgccactcaggcggcaaacttgcaggagaagcagagcgagctggatgcggaaagcagcggcctggactcgctcagctcagcgttgagcgattttcagagcgccgttgacgcgctgaacagcgatactgacggcccggtgacgtttgccgccaccagcaataatgactcggcgaccgtttccgccaattcccaggcgcaggcgggaagctactcatttttcgttgagcaactggcacaggggcagcaaaccacgttcagtatgggcgacgacgccttttccgctaccggcaccttcgaactgacgatgggcggcagcaccatggatatcgatctgtcggcggcggatcaaaacggtgacggcgacggttttatcgacgccagtgaactggtgaatgcgattaacgactctgatgacaatccgggcgtgtcggcggcactggtaaaaaccgacggcaccaccacgattatgctcacctccgatagcaccggggcgcagagcgcattttcggtgagcgtaacggggcatgacgccagcaacgacagcgccagcgcgcctgttgctacggatgtttcctccgcccaggacgcgattattcatctcggcagcgccacggggccagagatcactaatagcagcaatacctttgatgatgtgatccccggcgtcaccatgactttcaccgaagtcagcgattctgacagcgatctcactacctttaacatcagcgaagattccagcgccagccaggagaaagtacagacctttgtcgatgcatataacaccttgattgatacggttgattcgctgaccacccacggtgatgacagtaccagccccggggtatttgcaggcgacgccggactcagctcactggcaaaccagctcgatgacatcgcccatgccagctacaacggcgtgtcgattgtcgactatggcattacgctcgattctcacggccatttacagattgattcagaccagttcaacgacgcgatgaagagcgatcccgacggcctgacctctattttcgtcggcgataacagcatggtggcgcagatggacagccttattgacacctataccgactccagcaacggcatcatcaccctgcgccagcagaacattgacgatcagatgagcaaaattcaggacgaaggcgatcagcttaccgatacctataacgccaactacgaccgttatctggaggagtacaccaacacgctggttgaggtgtacaccatgaaagccagcatggcggcattcgcgtaa

SEQ ID NO: 6702 - DNA, 915 bp, Escherichia coli
atgttatctattaacaccaataacgcctcaatggccgccgttaatgcaatcagcaaaagcagctcttctctgtctacatctatggaacgcctggcaacgggtaaccggattaactcttctgccgatgacgcagcgggcaaacaaattgctaaccgtctgacagcacagtccagcggtatgggtgtggcgctgagcaacatcaatgatgccaccgcgatgctgcaaaccgccgacagcatgttcgacgaaatgtctgatgtgctgggtcgtatgaaagacctgtcaactcaggcagcgaacggcacctacagcgacgacgacctgcaggcgatgcaggacgaatacgacgaactgggtcagcagatgtctgacatgctgcaaaacaccacttacggcggtaccaacctgttcggtgtttccggcaccagcaacaccggtactgacggcctgttccagagcgcggtaactttccaggtgggcgcggaatcttccgacaccatgaccgtgaacatttcaagccaactgaacaccctggtgaccgatctttcttctatcagcaactcctttagtgcggatcaggctgacaccacgggcaccgcaggtgtttctggcggtactgagctgaccgcgtctggctcggctaaccagatgatcaccagcatctctaccgcgatggatgatgtttcgcagatccaatccaagctgggtgcgtctattaaccgtctgaacgacactgccaacaacctgaccagcatgcaggacaacacggaagtcgctatcggtaacatcatggataccgactacgcgacggaagcgtccaacatgaccaaacaacaggtgctgatgcagaccggcatcaccatgctgaaacagtccaacagcatgtccagcatggtttccagcctgctgcagtaa

SEQ ID NO: 6703 - DNA, 843 bp, Escherichia coli
atgagtattattatcaacaactggcggatggacccgtcgcttaatgccttaatacattgcgaaacgggtgaaacacgtcgtctcggcgaataccattttattttgctggaaacattagcaaaaaatgccgatgtggttttatcgcgatcttatttatgtgccgaagtatggaagaaccgcatagtcggcggtaacagcctgccgacggagatccatgcgttgcgcgttgctatcgacgatgatggcaaacaacagaacattattaaaacaattccgaagaaaggttacttgtgcaataaagagtatgtgtctttgccggagttatcgcctgcggaagcgctgattattaccgaccaggtacaggaaactgtgtcagaagagatatcttcgacaacaccgcctgtaccagttagaaaaaaacataaaggactgatggggttagcgttgaccgcggctgttatatttattggctcgaccgtggggtattcacacttgaaaagtacacctgacgccccgcaactggtaaaagagtcaattaacagtccaagaataaaaatatttcatttaacttctgctggagaaaataattccgtaccgttactatcacaaaccctcgcaccaggaaaagacaaactcgataatttattgtcagcgcataatatgacaatgacaacctattataaatatgttcgtaaccgactggaaagcgatattgttctgcgtaaccagtgcaacggcagctggcaattaacctttaatgtggaaggttggcagaacagcgatattaatagcgcgatgtatcagaatttggagaagttgttaaatactgtgcagaaatgctga

SEQ ID NO: 6704 - DNA, 978 bp, Escherichia coli
atgcaggtcggacttacatcttcatcactcgccaccggcggcgcgcatagcgctgcggtatcgtcgtcaaccgttgcgcccactcaggcggtgcggcaaacgctcccggcgacggcgagtgaatatccggcctcgccgctgattaccactcgcccgcagcgttacagcgtacagcttaacgaccagctcaccacgttgcagcaggcggatcactatctcgggcaactggagcagcagttgctcgattatcgtcatagccagcgtaaaggcgggcaggcgcagagttcggcgctgatgcagatgctggacaaacgcgccgcactttccggcggcgcggtggaccgccagttacaaccagtgttgcagggggaagcgcgggtgacttttcactcgccggatctgacgaatctggtacacaatcccacgccgggaacgcgcatgttcagtgtcactggcgggcggcagacccagctttcggcggtgatgctgtctgaggatgacagcgccgcgcagtatcagacgcggctgaccaacgctctgcgccgcgtgggtgtgcaactgcatcagcaagcggacggcatcagcttctccaccactgaaaaacagtggccccatatcgagcgcaccttaagcgtgcgcaccgatggcgataagtcggcgtttatgccgctgaaaacctttgccgaaccgtcacaggcggaccgcttagcgcaaagcctgcaacaaggcggggcgggaatttctcaaatgctggaaaacattaatcagcagcgcgcgcaaatggcggtgcagcaggaaaaagcgcggcagttgatcgacggcatgtcccgcttcccgcaaacggaaagcgccgtgcaggcgtcggaaaatctcggcggcgtgctggatagcgccaatcataactatcaagttttattgcaggcggtgaacggtcaggcacggatttccagccagacggtgaggagtttattggggtag

SEQ ID NO: 6705 - DNA, 930 bp, Escherichia coli
atgcgagtaaccacccaacaaacctacgtctcgatgacgcaaagttttaataatctctccggctctctggcgcatgtggtcgagcagatggcaaccggcaaggaaattttgcagccgtcggatgacccgatcgccgccacgcgtatcacccagttgaaccgccagcagtcggcgattgagcagtatcaaagcaatattgactctgcgtcggcggggttaagccagcaggagtcgattctcgatggcgtcaacaacagcctgctggcggtgcgcgacgacctgctggaagcggcgaacggcaccaataccgctgattcgctcgcaagcctcgggcaggatattcagtcgctcaccgaatcgatggtggcggcgctcaattatcaggacgaagacggtcattacgtgtttggcggtaccatcaacgatcagccgccgattgtggcggtggacgatgacggcgacggcgtgaccgacagctacagctaccagggcaacagcgatcaccgccagaccaccgtgtcgaacggcgtggaagtggacaccaacgtggcggcgagcgatttcttcggcagtaatttagacgtgctcaacacccttaattccctgtcgcaggagctgcaaaacccggacgtcgatccggcagatccgcaggtgcagagcgatattcagaacgccgttgatgtggtggacaccgcctcggacgatctcaacgcctcgattgcgtcgctcggcgagacgcaaaacaccatgtcgatgctgagcgatgcgcagacggatatctctacctctaatgatgagctgattggttcattacaggatctcgattacggcccggcgtcgatcacctttaccggactggaagtggcaatggaagctaccctcaagacttactcgaaagtgagtgagttgaatttgttcagcgttctctaa

SEQ ID NO: 6706 - DNA, 1377 bp, Escherichia coli
atggacatgattaacatcggctacagcggcgcatcaaccgcgcaggtagagctgaacgtcacggcgcaaaacaccgccaacgccatgaccacgggctacacccgtcaggtggcggagatcagcaccatcggcgccagcggtggttcgccgaacagcgccggtaacggcgtgcaggtcgacagtattcgccgcgtctccaaccagtatcaggtgaatcaggtgtggtatgccgccagcgattacggctattacagcacccagcaggggtatctcacgcaactggaagcggtactgagcgacgataacagcagcctgagcggcggcttcgataacttcttcgccgccctcaacgaagcgaccaccagccctgatgattccgccctgcgcgagcaggtgatcagcgaagccggggcgctgtcgttgcgtatcgacaacacgctggattacatcgactcgcaaagcacggaaatcatcagccagcagcaggcgatggtctcgcaaatcaacacgctcaccagcggtatcgccagctataaccagcaaatcgctcaggccgaagccaacggcgataacgcctccgcgctgtacgacgcccgcgatcagatggtggaagaactgagcggaatgatggatgtgcaggtcaatattgacgaccagggcaactacaacgtcaccctgcaaaacggtcagccgctggtgagcgggcagcaaagctcaaccatcgcgctggaaaccaacgccgatggtacagcaagcatgacgctgaccttcgctggcaccacctcgaccatgaccaccgacactggcggttcgttaggcgctctgttcgactatcaaaacgacgtgctgacgccgctgaccgacaccatcaacagcatggcgtcgcagttcgccgatgcggtcaacaaccagctggcgcagggctacgatctcaacggtaaccccggcgagccgctgtttatttacgatgccagcaatgccgatggcccgctgaccgttaacccggatatcaccgccgatgagctggcgttctccagttcgccggatgaaagcggcaacagcgacaacctccaggcgctgatcaatatttccaccgaaccgctggagatagccaacctcggcagcgtgacggtcgggcaggcgtgctcgtcaatcatcagcaatatcggcatttacagtcagcaaaatcagacggaagtcgatgccgcgtccaatgtctattccgaagctcaaaaccagcagagtagcgtcagcggcgtcagcatggacgaagaagcggtgaacctgatcacctatcaacaaatttatgaagctaatctgaaagtcatttccgccggggccgagattttcgattcggtgctggaaatgtgcagctaa

SEQ ID NO: 6707 - DNA, 300 bp, Escherichia coli
atgaaagtgaacgccagcggcgggattgatggcagcgatgcgttaatggggccgaaggttcaggccaatgatattaagcaggccgcggagcagtttgaggcgatttttttacgcaacatgctgaaagagatgcgtaaaaccaacgagttgttcgattcgaaagataacccgtttaacagcgattcggtgcgcatgatgcaggggttttatgacgatgagttgtgtaacaccctggcgcagcagcacgggattgggattgcggcgatgattgtgaagcagttgtcgccgaagcataaatga

SEQ ID NO: 6708 - DNA, 1101 bp, Escherichia coli
atgcaaaactggataaaggccgcagttatcgccctaagcctggcgctgcccggcgtggcgctggcgcaatcgctggagtcgctggtcaacgtacaaggcgtgcgtgaaaaccaactggtcggctacagcctggtggtcggcctcgacggtactggcgataaaaaccaggtcaaattcaccaaccagaccatcaccaatatgctgcgccagtttggcgtgcaattgccgaataaaatcgacccgaaggtgaaaaatgtcgcggcggtggcagtgagcgccacgctgccaccgatgtactcacgcgggcagactattgatgtcaccgtctcgtcgattggtgatgccaaaagtattcgtggcggcaccttgctgctgacccaactgcacggcgcagatggcgaggtttatgccctggcacagggcagcgtggtggtgggcgggatgaacgccaccggggccagcggttccagtgtgacggttaatacgccaactgccgggttaattcccaacggcgcgacggtggagcgcgagatccccagcgattttcagatgggcgacaccatcacgctcaacctgaaacgcccgtcgtttaaagacgccaacaacattgcggcggcgatcaacgcctcgtttggcggcattgccacggcgcagagttccaccaacgtcaccgtgcgtgcgcccaccagccccggcgcgcgggtggcatttatgtcgcaactggatgatgtacaggtgcaggcagagaaaatccgcgcccgcgtggtgtttaactcgcgtaccggcacggtggtgatgggcgatggcgttgcgctgcatgcggcggcggtgtcgcacggcagtttgaccgtctcgattaacgaaaccagcaacgtcagccagccgaatgcctttgcaggcgggcgcacggcggtaacgccgcagagcaatatcgcggtgaatcatgcgcgcccgggcgtggtgagtttgccggagtcgagcagcctgaaaacgctggtcaatgcgttgaacagtttgggcgcgacgccggacgacattatgtcgattttacaggcgctgcatgaggcgggcgcgctggatgccgacctggaggtgatctga

SEQ ID NO: 6709 - DNA, 741 bp, Escherichia coli
atgtcggatgcgacgctgacacgtcttatccgacctacaagagcacataactcactgtatttaaacaggcagaacgtgaaaaattatctctggctggtggcgctgcttcccctgcttagcgggtgtgaatcgcaggccattctggtcaaaaaagacgacgcatactttgcgccaccgaaaaccgaagcaccgcctccggcagacgggcgtgccgggggcgtgtttgaaaccggctacaactggtcgctaactgccgaccggcgggcttaccgcgtgggcgatatcctgacggtgatcctcgaagaatccacccagtcgagcaaacaggcgaaaaccaacttcggcaaaagcaacaccgtcgatatcggcgcaccgaccatttttggtcacaccaaagataagctttccggctccatcgatgccaaccgcgactttgacggcagcgctacttcccagcagcagaacagcctgcgcggggagatcacggtttccgtccatgcggtgcagcccaacggcatcctggaaattcgcggcgagaaatggctcaccctcaaccagggcgatgagtacatccgtttaagcggtctggtgcgcgccgacgatatccagaacgacaactcggtttcctcccagcggatcgccgatgcccgcatctcctatgccggacgcggcgcgttaagcgacgccaacgccgcaggctggctgacgcggctgtttaaccatcctctgttcccgatttaa

SEQ ID NO: 6710 - DNA, 786 bp, Escherichia coli
atgaacgcagcactatggatcagcaaaaccggcctctcggcgcaggatgctgaaatgagcgcgattgccaacaacatcgccaacgttaacaccaccggcttcaagcgtgaccgggtgatgtttcaggatctgttctaccagacccaggaagcgccgggcgcgatgctcgaccagaacaacatcatgccgaccgggctgcaattcggtagcggcgtgcgcattgtcggcacccaaaaaaccttcaccgaaggcaacgtcgaaaccaccgacaacgccatgaatgtcgccatcatgggacagggatttttgcaggtgcaaaaggctaacggcgatatcgcctatacccgcgatggcaacttgcaggtgaacgccgacggcgtgttgactaactcgcagggtttgccgttacaaccggaaatcgacgttccggcgggggcgactaacgttgcgtttggtgaggacggcacggtgacggcgatcttacccggcgacagcgatgtgaccgagttagggcaactgacactggtgaacttcgctaacccggcggggctttccgccgagggcgacaacctgtatctggaaaccgctgccagcggtcagccgaccgaaggcgtaccgggcgaagatgggcttggcaccttgcaggacaacgcgctcgaaggctcgaacgtggatatcgtcaacgagatggtggcgatgattacggtgcaacgggcgtacgagatgaacgccaaaatggtgtcggctgcggacgatatgttgcagtacatcagtcagacgctgtaa

SEQ ID NO: 6711 - DNA, 738 bp, Escherichia coli
atggatcgcctgatttataccgccctgagcggggcttctcagacgttgtacgagcagcaaattagcgccaacaacctggcgaacgtcaacaccaacggttttcgcgccgatatggcgatggcgaccaacgacaaggtgaaaggcggcggcttcgacacgcgctatatggcgcaggaaggggccagcggcgtgaacgacagcacaggtgtggcggagaaaacagaacgcccgctggacgtggcgattcagggcgcgggttacattgcggtgcaggataaaaacggcaacgaagtctatacccgcaacggcaacattcagcaggacgaccaggggcaactgaccatcgacggcaatctggtgctgggggataacgggccgattattctgccgccgaacgccatcgcctcgtttggcagcgacggcacgctgtcggtgacgcccgatgacggcgacgtgaccgcgacgatggatatcgaccgcctgaagctggtggatattccggtcgctaacctggcgaaaaatcctgaagggatgctgataactgccgacggcgttccggcccagcgcgatgaaaacatcaaagtcagcggcggttttctcgaaggcagcaacgtctcggcggtgagcgaaatgatgtcgtccatcgccatgaatcgccagtttgaagcgcagatcaagatgatgaaaaccgccgaagatatcagcgacgcgggcaaccgcttattgcgcggctcgtaa

SEQ ID NO: 6712 - DNA, 1203 bp, Escherichia coli
atgagttatgaaattgccgcaacggggttgaatgccgttaacgaacaactggacgggatcagtaacaacatcgccaacgccggaacggtaggctataagtcgatgaccacccagttttcagccatgtatgccggaagtcaggcgatgggcgtcagcatggcaggcaccgcgcaaagtatttcgcgcggcggttcgctggtatccaccggtaacgcgctggatctggcgattaacgacgacggcttttttgttacctgcgacagcgcgggcaacatttcttatacccgcgccggatcgtttgaaaccgacaaaaacggctatatcgtcaacgcctcaggcgcttatttgcagggctatccggtcgatgacacgggcactctgcaaaccggtacagtcaccgatatccagatcaaaactggcaatattccggcgcaggccagcagcagcctgacctttaccgccaacttcgatgccagcgacgacgctatcgaccgcactaccgtaccgttcgacgcgaccaacagcagctcgtataccgacagctacaccaccacggtgtacgactcattaggtaacgaacactcggtatgccagtacttcaccaaaaccagcgacaacacctgggaagtgcagtacaccttcgacggtcagcagcagaccggcgttccggcgacgacgttaaccttcgacccgaacaccggaaaactgacctcgccaactacgccgcagaccattgagtttcagaccgacgccgccgcgcccatcgatttaaccgtcgattactccacctgtacgcaatacggttctgaattttctgtcaccaccaacgccgccgacggctacgcctccgcgactcagaacggtgtgcaggtcgatgacgatggcaaagtttacgccacctacagcaacggcgagcgcatgttgcagggccaggtggtgctggcgactttcccgaatgaaaacggcctggaggcagtgagcggcaccgcgtgggtacaaaccggggaatccggcaccccgctgattggcgttcccggctccggcacctgcggtacgctgtcgtccggcgtgctcgaaagctctaacgtcgatatcaccagcgagttagtcaacctgatgaccgcccagcgtaactatcaggccaacaccaaagttatcgctaccagcacgcagctcgatgacgcgctgttccaggcaatgtaa

SEQ ID NO: 6713 - DNA, 714 bp, Escherichia coli
atgaataccctggcgctgaatgcgcaatcgccgcagccgaccgccacggcggaaagcaacaacgtggcggccagcgacacgacaagcagcagcgatagctcgcccgttgatactttcctgacgctgtttgtcgctgagatccaaaaccaggacccgaccgacccgaccgacgccaccgaatatatcgaccagctttcgtcaatggcgcaggtggcgatgatggaagagatgagcgtgcaggcgaataccaacgcggtgttgatgagcaacattcaggtgatggcgctcggcaacctggtgggcgacgacattatggtgcagaccaccgccttgcaggtgagtgaccagaccattaacggtcgcgccacgctggatgacgcctgtaccaccgccgatctccactttaccgatgctgcgggcgatgactacaccgtctcgctgatcccggaagggagttcgtcggttgggccaggccaggtcgatttctcgattaatccggcggattacggcatcccgccgggcgattacgacgtctcggtggtgaccaacaccggggaagaagaggtgccgattgaagtctccggcgaagtggaagatgtacgcatcccgctcgacggcagctctccggtgctcaacgttgcaggtgtgggcgaagtgccgttcaccatgattagccagtttggcgtacccgatgccgacagtgatgtggcgtga

SEQ ID NO: 6714 - DNA, 432 bp, Escherichia coli
atgtcatttactgatatctatcagatttccggctcggcgatgacggcgcaaacgctacgtctgaataccgtcgccagtaacctggcgaatgctaatgcacctgccagcagcgaggcgcaggcgtataaagcgcgcagcccggtgtttgcggcggtgtatcaccacagcttgctggtgggtacacatcgtcatgccattgatggtgccagcgtgcaggtgcaggacgtgctgcaaaccggcggggcggtgaaacgctatgaaccgcattcgccgctggcggatgctaacggggatgtctggtatcccgacgtcaacgtggtggaacagatggcggacatgatgtcggcctcgcgcgattttgaaaccaatgtcgatgtgctcaacaacgtgaaaagtatgcagcaaagcctgctgaaactgggagaagcctga

SEQ ID NO: 6715 - DNA, 336 bp, Escherichia coli
atggggatcagttttcaacaagcattgggagtgcatccgcaggcagtgaagttacgtcttgagaggaccgagctactgactgcgaatctggcgaacgtcgatacgccaaatttcaaggctaaagatattgattttgccagggagatgcaacgggcaaataacgcggcggtggatgtccagtaccgcgtgccgatgcagccgtcagaagatggcaacaccgtggaactgaacagcgaacaggcacggttttcacaaaatagtatggattatcaaagctgtctgacctttctgaatctgcaaatcagcggcatcagagaggccattgaagggaaataa

SEQ ID NO: 6716 - DNA, 738 bp, Escherichia coli
atgagttttcaattttgcaggcggaagttttatttcctcctggcgctgaccttaccgggctacgccgccgtccaccccgtgcaacacagcgcgcgggaacaagtcaacgcccaggtgctgaatgccgcgagccagcagattgaatcgctggcgcaacaacggcagtggcatgactatcgctacacctttaaggtctacattccctcgcagattgcgaccgccacgccctgcgctacggcccccggcgtcacgctgacttcgcctgcggaaatcgccctcaaccggatgaacttcaccgtcagttgcccgcaaagctggcagatgaacgtcgcggtacgcccggatgttctggtgccggtggtgatggcaaagtcactggttgcccgcgatacgccgctcacggcgaatgatgtggagttgaagccttacaacgtcagtgcccagcaccgggaggtgttgatggaacccaatgacgcgattggtttcagcagtaaacacgcgctgcaaccgggcaggccaatcaccaaagaagaactgatatctccggtgctggtcgagcgcgatcaaccggtgatgattgtttaccagagcgcggggatcagcgcctcgatgcccggcgtggcgctgaaaaatggtcgtaagggcgagatggtgaaagtgcgtaacgccagcagccagcgggtcattagcgcgagggtggcagaaagcggcgtggtgacgacggtaagcgcggagtaa

SEQ ID NO: 6717 - DNA, 279 bp, Escherichia coli
atgaaaatcaccccgactatgccaggcaatcgcccgacagccacaacggctggctccagccagccacgcaaaagcacggcgaccaccaccactacgcagagcgcagacgacattacccaggcgggattgcagtctgcccagcaaacgctgaacgaccagcaagagagcgatatcgacagcgataaagtggcgcaaatgcaggcgatgctggcgtccggcagcctgcaagtggacaccgaacagttagccagcgacatgctgagttttttccagaactaa

SEQ ID NO: 6718 - DNA, 429 bp, Escherichia coli
gtgagtatccggttacaacaggtgaaggcgttgttgcagggcattcgtgacgacgacgcactgtacgattccctgcgcgaacttctccagcgtcagcggatctgcatgattcgccgcgccagcgaagatctgctggcggtaaacgacgagataacgcagcactatgaacagttgcatgggcatagccatcagcggcacagcctgctgaaaatgcttaatgtcagtgtaaatcgtgacggtctggcgcaggtttttgcctggcttccggctgtgcaaaaagcagcagcacaacagttgtggcaacgccttgagcaaaaagcggaacgctgcaaagcctacaacgacaaaaacggcgagctgttgattcgccagtatgaatttattcagttttttttaggcggcgaaacagattttctgtaccaggaataa

SEQ ID NO: 6719 - DNA, 930 bp, Escherichia coli
atgagttttattgaatgttacgaaccggaatacgtgcgcaattttatgacgcaatatcccgattcgcctttgtacgtccgcaaggtctggaagaatgagattcgccagagcctggcattgaccgatattgaaagttgcaaagcggtgctcaacgatgccagggcctttgatttacagctcacctaccgccctgtggaagacaatgccgccgagctatccgcgcgcgatgcgatagtaaaccaggccattttgagcacccttacgctccccgatttaaccccggagctttccctgtatgccgtcgggattttgctctcccgcgccagtaaaatgccgggcagagacggagatattcttgcccgcttgacgacgctgccacaggcgctgggggatcatgcacaaaaaggcacgctacaggcacagttcgcccaactcccacccgtgccacaactggcgcgccaactggtgacgctgctcgggagttttgcgtttgactggtcgattttgccggaaagcccgcgcaaagcctcgctaccgttgcaggtgactttgctgacgttgcatgacgccaacagcgaagctttgttgcaacagcagcttaaggtgcagtggcaaaccacctggcaacagcattttgccgccgcgccgtggatgatgcgcaactggctgatttaccgcgtttatcacgacgtgattgggcaggcagacggagcagattattgcccgctggtgtgtgatttttatctcatccgcacgttaatcagtttatggacgctggatggttcaccgctgcggaaggaggatattttcgccctttttgcggtgtttgaacgctggcgagagagtgaaaatgctgcggcgattcgccagcagctccagtcgttatgtgcggcagagccgctgctgtcagcattttcgctgctgacgtga

SEQ ID NO: 6720 - DNA, 2472 bp, Escherichia coli
atgccaacaccaaccattatcaaaacactcgccacccagcgcgaaaaaccgtccgtcagcgtcgtcacgccaacctggaaccgcagcgcattcctgccgtacctgctttatatgtaccgctatcaggactacccggcagaccgccgcgaactcatcatcctcgacgattccccgcaaagccatcaacacatcatcgaccgcctgaccaatggcacaccggaagccttcaacatccgctacatccatcacccggaaaaactgccgctgggcaaaaaacgcaatatgctcaacgaactggcgcgcggcgaatacatcctctgcatggacgatgacgactactacccggcagataaaatctcttacaccatcgctatgatgcaaaaaaaccgggcgctcatctccggttccgaccagatccccatctggtacagccacatcaatcgcatctttcaaagccgcagcttcggcccgcataacatcctcaacggcaccttttgctatcaccgtaactacctgaaaaagcaccgctacgatgacgattgcaatttaggcgaagagaaaagtttcaccgacaatttcagcgttaacccgctacaactgcccggcgagcgcacgattttgtgtatctcgcacagccacaacacctttgataaagactttattctcggggccagcacgccagtaaacgcgacgcttacggatatcgtccgcgatccgctgctccgcaatgcttatctgagtctgcataacgccactcatcatcaggcgatccagtatcaggcgatcgatcagatcgttctgctgaatctggataaacgcccggatcgcttacagcagatccgtgaagaactcacattgctgcatattcctcctgagaagatcacccgccttgccgccagtgaaaatgaaaacggtcaacggggccgccagcaatcacacttgcaggcactgcgtctggcgcaacaacgcggctggcaaaactacctgctgctggaagatgacgcggttattctcaaacaggagaaacatattcaggtgctgaacgcgctgctggcgagcctggcgaaaattccctggcaggtgatgatcctcggcggcgaaatttcgcagggaacgatgctaaaaagtttgcctgggctggtgcacgcgcgggactgccgcaaagtgtgcgcttatctggtgaaccgccgctactacccgcagctggcgcagcagatgaacaacgatgagcattcgctggaagacggctggcagccgctgctgcgcaccgacaaatggctggcctgttacccgagcctttgttatcagcgaccgggctttagtgatatcgagaaaaaagcgactgataacattaaccactacttcaataagttacccgtagccaccaagccatctacattacctatcgccgataccatcggcttttttatggaaacctcattccactacgcgctctaccgcccaatcatcaccgccctgcaggcgcaggggcagagctgcacactggtgatcaatgaccgcgtgtttaaaccgtttctggatgagatgctggaaacactgaaaaacatcgacgatccgcagcttaaaggtatgcgtctgtcagaaatgcaggcacacggtcagcgagtaaaatgcctggtcagcccctatcacacgcctgcgctcagtggcctttcccccctgaacattcgcgccatgtacggcttagccaaagaaacgtggaaccacgccgactggaaccgtttttatcagcgcattttgtgttacagccactacagccagcaggcgctggcgcacctcagcaacgcaatagtggtcggcaacccgcgcttcgacgcctggcataacgccacgttcgaccgcgcgttgccggaaaatatcaaactggacgagcgtaaacccaccgtactctacgccccaacgtttggcgcattaagctccctgccccactgggcagaaaaattggggcgcttaagcgatgatgtgaacctgatttgcaaactgcaccacggcacctgctcgcgcccggaagaagctgcatcgctggccctggctcgcaggcatttaaaacagcgcaccgactccgcccgtcacacgctggcgctgctggcaaaggccgattacgtgctgaccgataacagcggctttattttcgatgctatccacgttgataagcgggtgatcctgctcgactttccgggcatgagtgaattgctcgacggcgagaaaagctactccacgccggagagcgccgatcagcaaatccgcgaaatattgccggtggctcatgatatggcagagttgcgttacttgttgtcagaggcgtttgactggggggcggtgcaggcgcggcttacgaagattcgtcatcactattgcgatgcgtttatggatggcaaggcgggagaacgggcgacggtggtgattgtggcggcgttggcgggcaaggaatcgtcagggatatgtcgataa

SEQ ID NO: 6721 - DNA, 405 bp, Escherichia coli
atgaaaacggtcatcaccttcggcaccttcgatgtgtttcatgtcggtcatctgcgccttttacaacgcgcccgcacgctgggcgaacggctgctggtcggcgtatcgtccgacgccttaaatatcgccaaaaagggcagagcaccggtttaccctcaggatgaccgcatgtcgatcatcgccgggctggcgtgcgtggatggcgtatttctggaggaatcgctggagcagaaagcggagtatctgcgggggtaccgtgcggatattttagtgatgggcgatgactgggcaggaaagtttgacagcttcgcgtatatttgtgaggtagtgtatttcccccgcacgccgtcggtgtcgacgacggggattattgaggtgattaggggtaaatcagccacctactga

SEQ ID NO: 6722 - DNA, 435 bp, Escherichia coli
atgcgacaaatcatcgacaccctggcgcagttgcagcgcctgcgggataaatcggtcaaagacaaaaccgtcgagctggcaaagcaaaaacagatttgtgcgggttatgacaacaatatcaaagcattaggctacctggtggagaaaacatctgcgggcgcggcagcgtcggtggaatcgctgaaaaacgtcagcgactacaaaggcaccttgcgcaaggtgatcgcctggcaggagcaggaaaaaacgctggctaacatcaaagccacgcgaatgcagaaaaacctgacggcggcggcgtgcgaagagaaagtggtggccctgacgctggacgacaaacgccgcgagcagcaagaaagtgccacggcgaaagcgcaaaaagcggtggatgacatcgccgtccagtgctggctgcggcataagttagcggagtag

SEQ ID NO: 6723 - DNA, 1338 bp, Escherichia coli
gtgagtgatttttccgctttcgataacgccctgcgctcgctggagtcgatcccgctggcccgcgtcgccgggcggctggtgcgccttaatggcatcctgctggagagcgtcggctgcccgctaatgaccgggcagctgtgtcgcatcgaaagcgccaaccacacgcttatcgacgcgcaggccgtaggctttaatcgcgatatcacttacttaatgccgtttaaacagccggtcggcctgatggcgggggcgcgcgtcttcccggaagaaaaagcccacgacatcctgattggcgaaagctggttaggccgcgtggttaacggcctcggcgaaccgctggatggcaaaggccgcctgaacggcaacgaccttctgccgccgctgccgccgtcggttaatcccttaacccgccgttcggtggacgaaccgctggacgtgggcgtgaaagcgatcaacggcctgctgaccatcggcaaaggccagcgtgtcgggctgatggcgggcagcggcgtcgggaaaagcgtgctgctggggatgatcacccgccagaccaaagccgacattgtggtggtcgggttgattggcgaacgcgggcgcgaagtaaaagagtttatcgaccactcgctgggcgcggacgggctggcaaagtctatcgtcgtcgtcgcgcccgccgatgaatcgccgctgatgcgcctgaaagccaccgaactgtgccactccatcgccgcctggtttcgcgaccgcgggcatcacgttttactgctggtggattccctgacccgttacgcgatggcccagcgggaaatagctctctcgctcggcgaaccgcccgccaccaaaggctatccgccgtcggcattcggcatgatccccaaactggtcgagagcgcaggcaacagcgaaagcgcgggatcgatgaccgccatctacaccgtgttggcggaaggcgacgatcagcaagatccgattgtcgactgcgcccgtgcggtgctggacgggcatatcgtattaacccgcaaactggcggaagcggggcactatccggctattgatatcggccagtcgatcagccgttgcatgaatcaggtgaccagcctggaacatcagcaatccgcccgtgcgttaaagcaaaactacgccgcgtatatggagatcaaaccgctgatcccgctcggcggctacgtggcaggtgccgacgccagcgtcgacaaagcggtaaaaatgttcccggctatcgagcgttttttgcgccaggagatgcgcgaacccgcctccctggaactggtgcaaagccgcctgcaaattctctttcctggtgtcaaaaaggcagaacagtaa

SEQ ID NO: 6724 - DNA, 711 bp, Escherichia coli
atgaccattgaaacactgcgcgggcgctatcgcctgcaccgttttccgccgcgccagcgtgcggtgaccggagaaccgctcaccgccagcattagcgccgccgattaccagcgccagttgatggacggttttcaggaagggctgcaaaaagggtttgctcagggaatgaccgaaggccaggagcagggctttagcgaaggtcatcaacaaggttttgccgaggggcgacgccagggctacaccgaaggcagcctcgccgggcagcaggaagggcgcaaacagtttgttgacgcggcacagccgctggaagccatcagcggaaaagtgaacgactttctcgcccatatcgaacgcaaacagcgggaagatttgctgcaactggtggaaaaagtcacccgccaggtgatccgctgcgaactggcgctgcaaccgacgcagttgctggcgctggtggaagaggcactggcggccttcccggcaatgccggagaccctccaagtgatgctaagtacggaagaatttaaccgcttgcgcgacgcggtgccggaaaaggtcagcgaatgggggctgacgccttcgccggatctgccgccgggtgaatgccgggtgatcaccgataaatccgaactggatatcggctgcgagcaccgcctggaacaatgcatgaccgcgctacaagagacgctaacgccggagtcacagggtgagtga

SEQ ID NO: 6725 - DNA, 1011 bp, Escherichia coli
atgagcgaattgacaacaaataagagcaacagctacctggaacaggcggcgatcctgctgctgtgtctgggcgaagaggcggcggcaacggtgatgcaaaaactcagccgtgaagaagtggtgcgcctgagcgaaaacatggcgcggctttccggtgtcaaaaccagcatggcgcgcaaagtgatcaacaacttctttgatgagttccgcgaacagagcgggatcaatggcgcgtcgcgatctatgttgcagggcattctcaacaaagcgctaggcaccgagatcgccagcagcgtgatcaacggcatctacggcgatgagatccgctcgcggatggcgcgactgcaatgggtggaaccgcgccagctggcgatgctgatctccgaagagcatctgcaattgcaggcagtattcctcgcgtttctgacgccggaaatctcggcggcggtgctctcgtatctcaatgaatcggtgcaaaacgaaattctctatcgggtggcgaaactcaacgacgtcaaccgcgacgtggtggatgaactggacaggctgattgaacgcggcctgtcggtgctttcggagcacggctcgaaggtgaaaggcatcaaacaggcggcggatatcgtcaaccgcttccagggcaaccagcaggtgatcctcgaccagatgcgcgagcgcgacgaagacgtgctggagcagcttcaggatgagatgtacgacttctttatcctcagccgccagaacgaagaggtgcgtcgacgtctgctcgacgaagtaccgatggaagactgggcggtagcgctgaaaggcaccgaagccctgttgcgccgttccatttacgcggtgatgccaaaacgtcaggcgcagcaactggaagcgatcaccgcgcgtctggggccggtgccggtcagccgtatcgaacagatccgccgcgaaatcatgggcattgcccgtgaactggaagaggcgggcgaaattcagctacagctctttgcggaacagacggcggagtaa

SEQ ID NO: 6726 - DNA, 1656 bp, Escherichia coli
atgaatgcacaaataaagaagttaacccaggcgtttccggcgtttcgactgcgtcttgcagataacaaacgctgggcattgatggcgggagtggggcttgccgttgcggcgacggcgattatcgtcagcgtactgtggaccggtaatcgcggctacgtctcgctctacggacgccaggaaaatctgcccgtgtcgcagattgtcaccgtgctggatggcgaaaagctcagctaccgcatcgacccgcaaagcgggcagattctggtgccggaagatgaactgtcgaaaacgcgcatgacccttgctgccaaaggcgtgcaggcgatcttgcccagcggctacgagctgatggacaaagacgaagtgctcggcagcagccagttcgtgcagaacgtgcgctacaaacgcagcctcgaaggggagctggcgcagagcattatgtcgctggacgcggtggagagggcgcgggtgcatctggcgctcaacgaagagagctcgtttgtggtcagcgatgagccgcaaaacagcgcctcggtggtggtgcgtctgcattacggcgcgaagctgaatatggaccaggtgaacgccattgtgcatctggtttccggcagcattccggggctgcacgccagcaaagttagcgtcgtcgatcaggcgggaaatctgctgaccgacggcattggcgcgggcgaagcggtttcagccgctacccgtaaacgcgatcagatcctcaaagatattcaggacaaaacccgcgccagcgtggcgaacgtgctggattcgctggtcggcagcgggaattaccgcgtcagcgtcatgccggatctcgacctcagtaatatcgatgaaactcaggaacactacggcgacgcgccgaaaatcaaccgcgaagaaaacgtgctggacagcgataccaatcaggtggcgatgggtgtgcccggttcgcttagcaaccgcccgccggttgcacctaatcaggttactaacggcgcgatgcccgccgacgaaaatcgctcgccggaagccctttcgaaacacagcgaaagcaagcgcgattactcttacgaccgcagcgtccagcatattcagcatcccggctttacggtgaaacgcctcaacgtggcggtggtgctcaatcaaaacgctccggcgctgaaaaactggaagccggagcagaccacgcagcttaccgcgctgctgaacaatgccgccgggatcgacgcgcaacgtggagacaatctcaccttatcgctgcttaactttgtcccgcaggcggtgccggtcgaaccaattattccgttgtggaaagatgacagcgtgctggcctgggtgcggctgattggctgcggcctgctggcgctgttgttgctgttctttgtggtgcgcccggtaatgaaacgactgacggcggtacgtgcgccggttatcacaccagaaccggaagctgtcagcgaaccgtggattgccatgccggaagaggaacgcaaaaacgtcgatctgccgtcgctgcccggcgatgacagcctgccgtcccagagttccggcctcgaagtaaaactcgagttcctgcaaaaactggccatgagcgacaccgatcgcgtagccgaagttctcagacaatggatcaccagcaatgagcgaattgacaacaaataa

SEQ ID NO: 6727 - DNA, 342 bp, Escherichia coli
atgagcattaccacaatcaacagcaccatgcaggcgcaaatcatgcaggacgtgcagcggatgcaggccaacgcccaggcaccggtgctgcccgccatgaccttcagttccaccgacccggacgtttcgtttaaccgcattatgagcggtgcgctcggtcatgttgaccagttccagcaggtggcggagcagcagcaaacggctgtcgacacgggcaaaagtgatgaccttgccggggcgatgatcgccagccagcaggcgtcgctctctttctccgcgctggtgcaggtgcgcaacaaaatcgccaccggatttaacgatctgatgagtatgtcgatctaa

SEQ ID NO: 6728 - DNA, 987 bp, Escherichia coli
atgtctgaacttattgcaactgccgcttccagcattaacgcttttactctggcaaagcgtgtcgccgcctttaacgtgccggtgctcattcagggcgaaaccggcgcgggcaaagaatgcgtggcgaaatatattcacaccgtagcctttggtgaaaatgaaagcgcaccctatgtcggcgtgaactgcgcggcgatcccggaaaatatgctggaatccacgctatttggctatgacaaaggcgcatttaccggcgcaattgccagcgtgccaggaaaaatgaaactggcaaataacggctccttattgctcgatgaaattggtgaaatgccgctggcgctacaggccaaaatattacgcgtgttgcaggaacaacaggttgagcgattaggcagcaaccgacaaatcaaactcaattttcgcctgattgcctgcaccaataaaaacctggagcaggaagttgccgccggacgttttcgtgaagatctctattatcgtctggcggttatccctattaccatgccgccactgcgtgaacgcctgaacgatattattccgctggcggagtcatttattaaaaaatactccacggtgctggtgaaaaatatcaccctgtccgaatccacccgccgtgcgctgcttaattaccgctggcccggtaacgtgcgccaactggaaaacgccattcagcggggaatgattttaaatcgcgacggcgtaatttacccggatgcattaggcctgctggaaacggacgttgctgaccacagcgaactgcaatggcctgttcagcccgccgtccacattgccgaaaccagcgatttgggccagcacggacgaagcgcgcaatatcaatatatcgccgacctgatgcgtaaatatcagggcaaccgcagcaaaatcgccgacctgttaggcattaccccgcgcgcactgcgctatcgactggcctccatgcgcaagcaaggtatcgaagttttctcctga

SEQ ID NO: 6729 - DNA, 852 bp, Escherichia coli
atgctgaagtacagtaaaacgccaggcatctttaaattagaaggtaatcggctcggacgcccctaccatcgcctgccgaccctgtttacggggaattttgacgtgattgattcgcatcttggcagctactttctcaaaaagcatcgcagcaatatcaccctaaaaaagattggctgcgaaatggatattattaataaaaacgccgaactgatggtttcccaggtcgggcatctggcgtttgatattgatcgctccttgctgttaatgctgctgggcaatttttatggtctggagtcctctcttgaagaggcgaaagcgcataacgggctgccgaccaaaaccgaaacgcggttaaagaaccgactcgcgctggatatctgcacgctgatctttaatctgcaaacctccggtattgcgctgaaattaaaactggacagcagcacggtgattacccactgggcgtatcaattaacctttacccttgcgggcgatgaagagagcagttttcgtattttgctcgacgacgcccacaccgattttattttgaatctgatccgccacagcgagcacagtaaaccgcagcaggtggcgaaatccgttaataaaccggccctgattaaagaaatcatccgctccctgccgctgaccctgaacgtcaaaatcgccgagctatcgatgaatgtcgccgatctggcgcagataaaagccggggatattttccccatctcgctgggagaaacgttcccggtggcgattgggcaatctgaattatttagcgccctgattgtggaagacaaagacaaactgtttttgtcggagctggcgggcaagaatgagaatagccatgagtaa

SEQ ID NO: 6730 - DNA, 372 bp, Escherichia coli
atgagtaaacaagacgatattttagccggggattttggcctcgccgatgaagttgcgcctgtcacgaaatccgccgacgccgaaacgctggtcacccgcctggaagaccgcttttccgactcgatgacgctgctgaaacgcattccggtgaccttaacgctggaagtgtcgtcggtggaaattatgttagccgacctgcttaacatcgacgacgacacggtgattgagctggataaactcgccggggagccgctggatattaaagtgaacaatatcctgctgggcaaagcggaagtggtggtggtcaacgagaagtacggcctgcgcgtgctggagtttaacacccgcgatatcaacgacctggcaccatga

SEQ ID NO: 6731 - DNA, 753 bp, Escherichia coli
atgaaacgccgcactcaactggcgctgggccttgggctgctggcgcttgcgccgctggcgttggcccagggtggcgatattgcgctacttaacgtggtgacccacggcaacactcaggagtacagcgtcaaaattcaggtactgattctgatgaccctcgtcggtttgctgccgacgatggtgctgatgatgacctgctttacgcgctttattatcgtgctgtcgctgctgcgccaggcgctggggctgcaacaaacgccgccgaaccgcattctgataggtattgcgctctcactcaccctgctggtaatgcgccccatctggctcaatatttacgaccacgcggtagtgccgtttgaaaacgatcagattaccctgaccgatgcgttaagcaccgccgcgacgccgctaaaacgctttatgctggcgcagaccgacaaaaaagcgatggcgcaaatcatgaccatcggcggcgcgaagggcaatgccgccgaccaggatctctccatcgtggtgcccgcctatgtactgagcgagctgaaaaccgctttccagattggctttatgatttacatcccgtttctggttatcgacctgattgtcgccagcgtactgatggcgatggggatgatgatgctgtcgccgctgattgtttcgctgccctttaaactgatgctgtttgtgctgattgacggctggtcgctgaccatcggcacgctcaccaccagcattcgcgggctggggctgggctga

SEQ ID NO: 6732 - DNA, 273 bp, Escherichia coli
atgttgaccgtagacgtagccgccgacattgtcgccagcggcattaaagtagtgattttgctggtttcggtactggtggtgccaagcctgctggtcggcctgctggtgagcgtgttccaggcggtgacgcagattaacgaacagaccctgagctttttgccaaggctgattgtcacgctggtggtgctgggggtgtgcggcaaatggatgattatccagttgcatgatctctgcattcatctgtttagtcaggccgccctgctggtgcattaa

SEQ ID NO: 6733 - DNA, 783 bp, Escherichia coli
atgcgcacaagcgacgttacgcaactgatggatctggtgctggggctgtggttccccttcgtgcgcattatggcgtttctgcgctatgtgccggtgctggataacagcgccctgaccgtgcgcgtgcggattatattgtcgctggcgctggcgatcatcatcacgccgttgatcccccatcccattccccacgacctgctatcgctcaatagcctgatcctgacggtggagcaaatattatggggcatgttgttcgggctgatgtttcagtttctgtttctggcgctgcaactggccgggcaaattctctcgttcaatatggggatgagcatggcggtgatgaacgacccgagcagcggcgcatcaacaaccgtgctggcagagttaattaacgtctacgcgatcctgctgttttttgccatggacgggcatctgctgctggtaagcgtgctgtataagggcttcacctactggccgattggcaacgcgctgcatccgcaaaccctgcgcaccatcgcgctggcctttagctgggtgctggcgtccgcatcactgctggcgctgccgaccacttttatcatgctgattgtgcagggctgctttggcctgcttaaccgcattgcgccgccgctgaaccttttttcgctcggctttcccatcaacatgctggcggggctggtttgcttcgccaccctgctctacaacctgccggatcactatctgcatctggcgaattttgtgttgcagcaactcgacgcgctgaaaggtcactatggcggatag

SEQ ID NO: 6734 - DNA, 1140 bp, Escherichia coli
atggcggatagcagcagcgaagaaaaaacagagaaaccctcggcgcaaaagctgcgtaaagcgcgtgaagaggggcaactgccgcgctcgaaggatatggggctggcggcgagcctgtttgcggcgtttgtggtgatctccagcagcttcccgtggtatgccgattttgtgcgtgagagttttatcagcgtgcatcagtacgcgcaggagattaataacccggatgtgatcggccagtttctgcgccatcacctgttaattctcggcaagtttattcttaccttgctgccgatgcccgccgctgcgctgctctcctcgctggtgcctggcggctggctgtttctgccgaaaaaaatcctcccggatttcagcaaaattagcccgttaaaagggattgggcggctgttttccagtgaacatctggcggaaacgggaaagatgacggcgaagtcggtggtggtgctggtgatgctgtggattagcctgcgcaataactttgccgccttcctcggcctgcaagcgctgccgttcaaactggcgatgaatgagggtttgtcgctctacgccagcgtgatgcgcaactttgtcatcctgtttatcttctttgcgcttatcgacgtgccgctggcgaaagccctgtttaccaaagggctgaagatgaccaagcaggagctgaaagaagagtacaaaaatcaggaaggcaagccggaagtgaaggcgcgcgtgcgacggctgcaacggcagctggcgatggggcaaatccgcaaagtggtgccgaaagccaacgtggtgatcaccaacccgacccactacgccgtggcgttgcagtatgaccagtctcgcgccgccgcgccgtttgtggtggcaaaaggcaccgatgaaatcgccctctatattcgccaggtcgccgctgagaatcaggtggaagtggtcgagttcccgcggctggcgcgctcggtttactacaccacgcaggtgaaccaacaaattccgtttcagctttaccgggctatcgcccacgttctgacctacgtcctgcaaatgaaacactggcgcgagggcgcacagccgcgcccggccctgaacagacatatttccattcccaaagaggtgcttaaactggatggcgaaaacaactaa

SEQ ID NO: 6735 - DNA, 2094 bp, Escherichia coli
atggcgaaaacaactaaatcgttcctcgcgctgctgcgcggcggtaatctcggcgtaccgctggttatactttgtattctggcgatggttattctgccgctgccgcctgcgctgctggatattctgttcaccttcaacattgtgctggcggtgatggtgctgctggtggcggtgtcggcgaaacgaccgctggaattcagcctgttcccgaccattttgctgatcaccactttaatgcgcctgacgcttaacgttgcttctacgcgcgtggtgctgctgcacgggcatctcggcgcaggcgcggcgggtaaggtgattgagtcatttggtcaggtggtgattggcggcaactttgtcgtcggctttgtggtgtttatcatcctgatgatcatcaactttatcgtcgtcaccaaaggggccgagcgtatttccgaggtttctgcccgctttaccctggacgcgatgcccggcaagcagatggcgattgacgccgatcttaacgccggattgatcaaccaggcgcaggcgcaaacacggcgtaaagatgttgccagcgaggccgatttctacggcgcgatggacggggcatcgaagtttgtgcgcggcgatgccatcgccgggatgatgattctggcgatcaacctgatcggcggcgtctgtatcggcatcttcaaatacaacctgagcgccgacgccgccttccagcaatatgtgctgatgaccatcggcgacggcctggtggcgcagatcccgtccctgctgctctccaccgcggcggcaattatcgtcacccgcgtcagcgacaacggcgatatcgcccatgacgtgcgccaccagctgctggcaagcccgtcggtgctctacaccgccaccgggatcatgtttgtgctggcggtggtgccggggatgccgcatctgccatttttgctgttcagcgccctgcttggctttaccggctggcggatgagcaaacgcccgcaggcggcggaggcggaagagaaaagcctcgaaacactgacccgcaccatcaccgaaaccagcgagcaacaggtcagttgggaaaccattccgctgatcgagcctatcagcttaagtctcggctacaagctggtggcgctggtcgataaagcccaaggtaacccgctcacccagcggattcgcggcgtgcggcaggtgatttccgacggcaacggcgtgctgctgccggagatccgtattcgggaaaacttccgcctcaagcccagccagtacgccatattcatcaacggcattaaggccgatgaagcggatattccggcagataaactgatggcgttgccctccagcgaaacctacggcgagattgacggcgtactggggaatgacccggcatatgggatgccggtcacctggatccagcctgcgcagaaagcgaaggcgctgaatatggggtatcaggtgatcgacagcgccagcgtgattgccacccatgtgaataagattgtgcgcagctatattcctgaattatttaactatgatgacatcacgcagttgcataaccgcctgtcgtcgatggcaccgcgcctggcggaagatttgagcgcggcgctcaactacagccagttgctgaaagtgtaccggacgctgctgaccgaaggcgtttccctgcgcgatatcgtcaccatcgccaccgtgctggtcgccagtagtgcggtgactaaagatcatattctgctggcggccgatgtgcgcctggcgctgcggcgcagcattacccatccgttcgttcgcaaacaggagctgacggtgtatacgctgaataatgagctggaaaatctgctgaccaacgtagtgaatcaggcgcaacagggcggcaaagtgatgctcgacagcgtgccggtggacccgaatatgcttaaccagttccagaacacgatgccgcaggtgaaggagcagatgaaagcggcggggaaagaccctgtgctgctggtgccaccgcagttgcgccctttgctggcgcgctatgcgagattgtttgcgccggggctgcatgtgctgtcgtataacgaagtgccggacgagctggagttgaagattatgggggcgttgatgtag

SEQ ID NO: 6736 - DNA, 774 bp, Escherichia coli
atgcatgaccagccattattgagtatgtccttgccgtcgattccctcttttgtgttgtcgggattattgttgctttgcttgccgttttcttcatttgccagcgccaccacatcacatatctctttcagctacgccgcccgccagcggatgcaaaaccgtgcgcgtttattaaaacagtaccaaactcatctgaaaaagcaggccagctatattgtggaaggcaatgccgaaagcagaaaggcgctgcgccagcacaaccgcgaacagataaaacagcatccagaatggtttcctgcgccgctcaaggcgagtgacagacgctggcaggcgctggcggaaaacaaccactttttaagcagcgatcacctgcataacatcaccgaagtggcgattcaccgcctggagcagcagcttggcaagccttatgtctggggcggcacgcggcccgataaaggcttcgattgtagtgggttggttttttatgcctacaacaagatccttgaggcgaaactcccgcgcacggccaatgagatgtatcactaccgtcgggcgaccattgtggcgaataacgacctgcgccggggagacttgttgtttttccatattcacagccgcgaaattgctgaccatatgggcgtgtatctgggcgatggtcagtttattgagtcgccgcgcacgggggaaaccattcgggtaagccggttagccgaacctttctggcaggaccattttttgggcgcgcggcggatattgacggaagagacgattttgtag

SEQ ID NO: 6737 - DNA, 261 bp, Escherichia coli
atggctgctaacgcgtttgttcgcgcccgaatcgatgaagatctgaagaatcaggcggcggacgtactggccgggatggggctgaccatctctgacctggttcgcataaccctcacaaaggtcgcgcgtgaaaaggcattgccgtttgatttacgcgagcctaatcaattaactattcaatcaatcaaaaacagcgaagctggcgttggtgttcataaggccaaagacgccgatgatttatttgataaattaggaatttaa

SEQ ID NO: 6738 - DNA, 279 bp, Escherichia coli
atgattcaaagggatattgaatactcgggacaattttcaaaggatgtaaaacttgcacaaaagcgtcataaggatatgaataaattgaaatatcttatgacgcttcttatcaataatactttactgcttccagctgtttataaagaccacccgctgcaaggttcatggaaaggttatcgcgatgctcatgtcgaaccggactggatcctgatttacaaacttaccgataaacttttacgatttgagagaactggaactcacgcggcgctctttgggtaa

SEQ ID NO: 6739 - DNA, 450 bp, Escherichia coli
gtggcgattaatttcagccccaaggttggtgaaatactggaatgcaactttggtaactatcctgttagccagaatggacagttcagcacgacgtattacgatggccgcattccacctgagatgataaaaaataggttggttgtcgtgctcaacggaaaaattaatggcaacgcatgtatcgtcgttccattatcaaccactcgcgaccatgacaagttaaatcgtggaatgcatgttgaaatagccagtaatgttatcaatgacctgcaattctttgatcagcagatacgttgggctaaagccgacctggtacaacaagtcagtcgaaatcgattaaacagagcaaggacttatcgggggtatcttaatcaatgtttgccacatgagttggttgcagacatacagagggcagtcatcaagtcaatcaatgccatatcgctcataaattga

SEQ ID NO: 6740 - DNA, 591 bp, Escherichia coli
ttgcgcacgccgtcccgctatcttttccgcttgccatcgcatgaaattactccttttcgggcaacgctctttttaatcttgttgatatgtgccgctctggctggcgtaagttggttgattatttcctttgtacgtacgggcaatacattcatcttctggttaacactttttattggatatctgatagctgcggcgaagcaggaaaaaatcaagatcctcaagaagtaccgaatcatggcagataaacgtcggggacgctccatttgccagttcgcccgcgaatttgacacctacaccgtagatacatgggtgattcgtgcggtgtgggataccttgcaaggaaacggctatatcgattacccactgccactgaaagccgatgatatactggacgatgatctggatttggtgagcgacgcagtcgagttagaagagctggttgaagataccgctgctcgttgcgggcgcgatctatgcggaatagaagagaatccgtttcttcccatcgtcacggtaggctctcttgtaagagtgttaaacgcgcaaccgatgacccaggagcgacgtaaccagttctttatccggtcataa

SEQ ID NO: 6741 - DNA, 432 bp, Escherichia coli
gtggcgttaaatttcgcttcaggtgaagggaatttctttattcgtcctggcggcgtgttttatgtcgcgggagataaagtcggcatcgttcgtctggatgcctttaaaaccagtaaagagattcagtttgcggtgcagtcagggccattgttgatggaaaacggtgtaattaatccgcgtattcatcccaacgtcgcctcgcgtaaaattcgtaacggtgtagggattaataaacaagggaacgccgtgtttttgttgagccagcaggcgacaaatttttatgattttgcctgctatgccaaagcgaaactgaacgttgagcagctgctttatcttgatggcacaatttcacatatgtatatgaaaggcggggcaatcccgtggcaacgctatccttttgtcaccatgatttccgtcgagcggaaaggttaa

SEQ ID NO: 6742 - DNA, 630 bp, Escherichia coli
atgaaaattctccatatcgacagcagtccaatgcttaagcattcaagttcgcggaaattaagccaggcgctggtagaagcgctttgccaacgtttcgcgcaagccacaattattcatcgcgacgttggcctgacgcccccaccccatttgcgtgaagaaacctttctggcgctttgcggtaaagcggaatgcgagaacgcacaaattcagcaggaggtgaatgatatccacgctgctattgatgaactggcatcgtgcgatgtgctcattattggcgcgccgatgattaatcacagcgtttcatctggcctcaaaacctggatagatcaggtctgtcaggctggtttaacgtttcgttttacttccgctggtgccgttgggttactgacggataaaccgacgtttattgtctcgacgcgcggcggtatctattgcgatgaagcacatctggcgctggatcatcaggaaagttatctgcaagccacactgaaattaatgggcattaccaatacacatattttgcgcgcggaaggcgtcgacaaaacccaaccgggacgcgaactcgccgagcaaaatgcattagcgcaaacccctgatcttattacacaagtatttaatcattatctttaa

SEQ ID NO: 6743 - DNA, 261 bp, Escherichia coli
atgtctattaagcaaaatttatttgccgcattatttctttgcactctcacaggacacgcatttgccgcaaccgagatacacaaaccggacaataatcttgaacagttatcaaaagtgagcatgtccacacacaatagcaatccagcgggcgttgaaagccaaatcaaagagaaagcggaagagttacaagccagcaattactacatcagttctttctccggtaaaaattatatccacgccactgtaattttctataaatag

SEQ ID NO: 6744 - DNA, 1326 bp, Escherichia coli
atgaaaaaagctaatcttacaggtacgttggtttgctttgtcgcatgccttatttttttgtcgtccggtgatatttttcgtgaaaagccaatcgcgctaatatggttccttcgacaaaacatactcttttttacgggaactcttgcgtggtgtctgatgacgctgacgatgtgtttatcgttgcgttcatcatggcttaacaaagtgctgggcggtctggataaagcatggcgattacataagtgggcaggaatatgcgccatagcgtttgctttcgcccactggctggatgaaaaattaccccagttattcgtcgcctttggctggcttactcaccctggtaaaatcgttgatattaacctgacgccagtacaagaaaattggcttcatgcgggactgttagcgggtgaatgcgcaatgtttattattatagcgatggtttgcgtatctcttagcaaaagagttccctatcatttatttcatcttgttcaccgtttgttccccgtcttttatctggcaattgcctttcatgtgtttactgctttgtttaaatcatactggtgggaaactcctgctgcgtatttattaattttaattactattccgggcgtctttgcggctttcatttcgctgctgaaattaaacggtagtaaaaacaagcatcaggctaccattaaaaacattgttaaccatccaggacaaattaccgaagtcaccctggagctggaacatgccatcgactattctccggggcagtttgcattcttaacgttcgcacacagtaaagaatctcacccttttactatcgcttcatacaccaaagagaagaacacgttgcgctttgccatcaaaaatttaggggattatacctctacccttgcatcctcgataaaaatcggccagtccgccttcgttgaagggccatggggaaagtttgattttactctcccttgctcccaccaggtctggatagcaggaggcatcggcattaccccctttatcgcccagcttgagtatcgtaaacatcatggcgcgtcctctgttcctgtggatatctggtattgcgtcagccgaagcgaggatgcctggtatgttgataaactgacctcactttgtgcccaggccagggtcacactgcatctgcttgatgcgcataaaggtgagcgcctacaggcgcactatcttactgataaaatagcaaataaaggtgacacccatttctggttttgcggcccacagagttttgccaaagcgctcagcaaagggttatatgaaaatgggattgccagccaaaacttccattacgaccgtttttgtatgcgttaa

SEQ ID NO: 6745 - DNA, 2145 bp, Escherichia coli
atgtctaacgtgcaggagtggcaacagcttgccaacaaggaattgagccgtcgggagaaaactgtcgactcgctggttcagcaaaccgcggaagggatcgccatcaagccgctgtataccgaagccgatctcgataatctggaggtgacaggtacccttcctggtttgcccccctacgttcgtggcccgcgtgccactatgtataccgcccaaccgtggaccatccgtcagtatgctggtttttcaacagcaaaagagtccaacgctttttatcgccgtaacctggccgccgggcaaaaaggtctttccgttgcgtttgaccttgccccccaccgaggctacgactccgataacccgcgcgtggcgggcgacgtcggcaaagcgggcgttgctatcgacaccgtggaagatatgaaagtcctgttcgaccagatcccgctggataaaatgtcggtttcgatgaccatgaatggcgcagtactaccagtactggcgttttatattgtcgccgcagaagagcaaggtgttacacccgataaactgaccggcaccattcaaaacgatatcctcaaagagtatctttgccgcaacacctatatttacccgccaaaaccgtcaatgcgtattatcgcagacatcatcgcctggtgttccggcaacatgccgcgatttaataccatcagtatcagcggttaccatatgggtgaagcgggtgccaactgcgtgcagcaggtagcatttacgctcgctgatgggattgagtacatcaaagcagcaatctccgccgggctgaaaattgatgacttcgctcctcgcctgtcgttcttcttcggcattggcatggatctgtttatgaacgtcgccatgttgcgtgcggcacgttatttatggagcgaagcggtcagtggatttggcgcacaggatccgaaatcactggcgctgcgtacccactgccagacctcaggctggagcctgactgaacaggatccgtataacaacgttatccgcaccaccattgaagcactggctgcaacgctgggcggtactcagtcactgcataccaacgcctttgatgaagcgcttggtttgcctaccgatttctcagcccgcattgcccgcaatacccagatcatcattcaggaagaatcagaactctgccgcaccgtcgatccactggccggatcctattacgttgaatcgctgaccgatcaaatcgtcaaacaagccagagccattatccaacagatcgacgaagccggtggcatggcgaaagcgatcgaagcaggtctgccaaaacgaatgatcgaagaggcctctgcgcgcgaacagtcgctgatcgaccagggcaagcgtgtcatcgttggtgtcaacaagtacaaactggatcacgaagacgaaaccgatgtacttgagatcgacaacgtgatggtgcgtaacgagcagattgcttcactggaacgcattcgcgccacccgtgatgatactgccgtaaccgccacgttgaacgccctgactcacgccgcacagcataacgaaaacctgctggctgccgctgttaatgccgctcgcgttcgcgcaacgcttggtgaaatttccgatgcgctggaagcggcatttgaccgttatctggtgccaagccagtgtgttaccggcgtgattgcgcaaagctatcatcagtctgagaaatcggcctccgagttcgatgccattgttgcgcaaacggagctgttccttgccgacaatggtcgtcgcccgcgcattctgatcgctaaaatgggccaggatgggcacgatcgcggcgcgaaagtgatcgccagcgcttattccgatctcggtttcgacgtagatttaagcccgatgttctctacacctgaagagatcgcccgcctggcagtagaaaacgacgttcacgtagtgggcgcatcttcactggctgccggtcataaaacgctgatcccggaactggtcgaagcgctgaaaaaatggggacgcgaagatatctgcgtggtcgcgggtggcgtcattccgccgcaggattacgccttcctgcaggagcgcggcgtggcggcgatttatggtccaggtacgcctatgctcgacagcgtgcgcgacgtactgaatctgataagccagcatcatgattaa

SEQ ID NO: 6746 - DNA, 996 bp, Escherichia coli
atgattaatgaagccacgctggcagaaagtattcgccgcttacgtcagggtgagcgtgccacgctcgcccaagccatgacgctggtggaaagccgtcacccgcgtcatcaggcgctaagtacgcaactgcttgatgccattatgccgttctgtggtaacgccctgcgactgggtgttaccggcacacccggcgcggggaaaagtacctttcttgaagcctttggcatgttgttgattcgtgagggactaaaggttgcggttattgcggtcgatcccagcagcccggtcactggcggtagcattctcggagataaaacccgcatgaatgatctggcgcgtgccgaggcggcgtttattcgcccggtaccctcctccggccatctgggcggtgccagtcagcgagcgcgggaattaatgctgttatgcgaagcggcgggttatgacgtagtgattgtcgaaacggttggcgtcgggcagtcagaaacggaagtcgcccgcatggtggactgttttatctcgttgcaaattgccggtggcggcgatgatctgcagggcattaaaaaggggctaatggaagtggcagatctgatcgttatcaacaaagacgatggcgataaccataccaatgtcgccattgcccggcatatgtacgagagtgccctgcatattctgcgacgtaaatacgacgaatggcagccacgggttctgacttgtagcgcactggaaaaacgtggaatcgatgagatctggcacgccatcatcgacttcaaaaccgcgctaactgccagtggtcgattacaacaagtgcggcaacaacaatcggtggaatggctgcgtaaacaaaccgaagaagaagtactgaatcacctgttcgcgaatgaagatttcgatcgctattaccgccagacgcttttagcggtcaaaaacaatacgctctcaccgcgcaccggcctgcgacagctcagtgaatttatccagacgcaatattttgattaa

SEQ ID NO: 6747 - DNA, 786 bp, Escherichia coli
atgtcttatcagtatgtgaacgttgtcactatcaacaaagtggcggtcattgagtttaactatggccgaaaacttaatgccttaagtaaagtctttattgatgatcttatgcaggcattaagcgatctcaaccggccggaaattcgctgtatcattttgcgcgcgccgagtggatccaaagtcttctccgcaggtcacgatattcacgaactgccgtctggcggtcgcgatccgctctcctatgatgatccgttgcgtcaaatcacccgcatgatccaaaaattcccgaaaccgatcatttcgatggtggaaggtagtgtttggggtggcgcatttgaaatgatcatgagttccgatctgattatcgccgccagtacctcaaccttctcaatgacacctgtaaacctcggtgtcccgtataacctggtcggcattcacaatctgacccgcgacgcgggcttccacattgtcaaagagctgatttttaccgcttcgccaatcaccgcccagcgcgcgctggctgtcggcatcctcaaccatgttgtggaagtggaagaactggaagatttcaccttacaaatggcgcaccacatctctgagaaagcgccgttagccattgccgttatcaaagaagagctgcgtgtactgggcgaagcgcacaccatgaactccgatgaatttgaacgtattcaggggatgcgccgcgcggtttatgacagcgaagactaccaggaagggatgaacgctttcctcgaaaaacgtaaacctaatttcgttggtcattaa

SEQ ID NO: 6748 - DNA, 1479 bp, Escherichia coli
atggaaactcagtggacaaggatgaccgccgatgaagcggcagaaattatccagcataacgacatggtggcatttagcggctttaccccagcgggttcgccgaaagccttacccaccgcgattgcccgcagagctaacgaacagcatgaggccaaaaagccgtatcaaattcgcctgctgacgggggcgtcaatcagcgccgccgctgacgatgtactttctgacgccgatgctgtttcctggcgtgcgccatatcaaacatcgtccggtttacgtaaaaagatcaatcagggcgcggtgagtttcgttgacctgcatttgagcgaagtggcgcaaatggtcaattacggtttcttcggcgacattgatgttgccgtcattgaagcatcggcactggcaccggatggtcgagtctggttaaccagcgggatcggtaatgcgccgacctggctgctgcgagcgaagaaagtgatcattgaacttaatcactatcacgatccgcgcgttgcagaactggcagatattgtgattcctggcgcgccaccgcggcgcaatagcgtgtcgatcttccatgcaatggatcgcgtcggtacccgctatgtgcaaatcgatccgaaaaagattgtcgccgtcgtggaaaccaacttgcctgacgccggtaatatgctggataagcaaaatcccatgtgccagcagattgccgataacgtggtcacgttcttgttgcaggaaatggcgcatgggcgtattccgccggaatttctgccgctgcaaagtggcgtgggcaatatcaataatgcagtcatggcgcgactaggggaaaacccggaaattcctccgttcatgatgtattcggaagtgctacaggaatcggtggtgcatttactggaaacgggcaaaatcagcggggccagcgcctccagcctgactatctcggccgattccctgcgcaagatttacgacaatatggattactttgccagccgcattgtgttgcgtccgcaggaaatttccaataacccggaaatcatccgtcgtctgggcgtcatcgctctgaacgtcggcctggagtttgatatttacgggcatgccaactcaacgcacgtagccggggtcgatctgatgaacggcatcggtggcagcggtgattttgaacgcaacgcgtatttgtcgatctttatggccccgtcgattgctaaagaaggcaagatctcaaccgtcgtgccaatgtgcagccatgttgatcacagcgaacacagcgtcaaagtgatcatcaccgaacaagggatcgccgatctgcgtggtctttccccgcttcaacgcgcccgcaccatcattgataattgtgcacatcctatgtatcgggattatctgcatcgctatctggaaaatgcgcccggcggacatattcaccacgatcttagccacgtctttgatttacaccgtaatttaattgcaaccggctcgatgctgggttaa

SEQ ID NO: 6749 - DNA, 966 bp, Escherichia coli
atgatgtccctggcgtggccattatttcgcgttacggaacaggcagcgttggctgcctggccgcaaatcggatgtggcgacaaaaataaaattgatggcctggcggtcaccgcgatgcgccaggcattaaacgacgtcgcttttcgtgggcgagtggttatcggcgagggagagattgaccatgcgccgatgctgtggattggcgaagaggtgggcaaaggcgatgggccagaagtcgatatcgcggttgatcccattgaaggtacgcggatggtggcgatgggacagagcaatgcgctggcagtcatggccttcgccccacgaggcagcctgctacacgctcccgatatgtatatgaaaaaactggttgttaatcggctggcggcgggcgcgattgatctgtctttgcccctggtggacaacctgcgcaacgtggcgaaagcgttaggcaaaccgctggacaagctgcgcatggttacgctggataaaccgcgcctgagtgccgcgattgaagaagcaacacagctgggcgtgaaggttttcgctctgccggatggcgatgtcgccgccagcgtgctgacctgctggcaggataatccttacgatgtgatgtacaccatcggcggtgcgccagaaggcgtgatttctgcctgtgccgttaaagcattaggcggggatatgcaggcccagctgattgacttttgtcaggctaaaggggattacacggaaaatcggcagattgcagagcaggagcgcaagcgttgtaaggcaatgggcgttgacgttaaccgtgtgtactcgctcgatgaactggtgagggggaacgatatcctctttagcgctacgggcgtgacgggcggcgagttggtgaacggtatccaacagacggcgaatggggtgcggacgcagacattactgatcggcggcgcggaccaaacgtgtaatataatagactccctgcattga

SEQ ID NO: 6750 - DNA, 1278 bp, Escherichia coli
atgaaaaccaaagttgctgctatttatggcaagcgggatgtccgtctgcgcgaatttgaactgccagaaattaccgataatgaactgctggtgagtgtaatttctgacagtgtgtgtttatcgacctggaaagcggcgttactcggtagcgaacataaacgggtgcccgacgatttagaaaatcatccggtcattaccgggcatgaatgtgccgggattattgttgaagtggggaaaaatctcaccgacaaatataaaaaaggccaacgttttgtattgcaaccggcgatggggctaccaagcgggtattctgcgggatacagctacgaatattttggcggtaacgccacctatatgattattcccgagatcgccattaacctgagctgcgtattaccctatcacggctcttattttgctgcggcgtcgctggcagagcctatgtgctgcattattggcgcttatcatgccaattatcacaccacgcaatatgtttatgagcatcgcatgggcgtcaaacctggcggcaatattgcactgctggcgtgtgctggcccaatgggcattggcgctatcgattacgccattaacggcggcatacaaccgtcgcgggtggtggtggtcgatatcgacgacaaacgcctggcgcaggtagagaagctgctgccggtggaactggcggccagtaaaggcattgagctggtgtatgtgaataccaaagggatgagcgatccggtacagatgctgcgggcgctgacaggagatgccgggttcgatgacatttttgtttatgcggcggtgcctgctgtcgttgagatggctgacgaattactggcggaagatggctgcctgaacttctttgccgggccgacggataaaaacttcaaagtgccgtttaatttctacaacgtccattacaacagcacgcacgtcgtcggtacatccggcggttcaacggacgacatgaaagaggcgattacccttagcgccacgggacagttacagccgtcgtttatggtgacccatattggtggccttgatgcggtgccagaaaccgtgctcaatctgccggatatcccaggcggtaaaaaactcatttataacggcgtgaccatgccgctcactgccattgccgattttgccgaaaaaggcaaaaccgatccgctgtttaaagagttggcgcggctggttgaggaaacgcacggcatctggaatgagcaggccgagaaatatctgctggcgcaatttggcgttgatatcggggaggccgcgcaatga

SEQ ID NO: 6751 - DNA, 360 bp, Escherichia coli
atggtatcattgctggataaaaactatatcagcgagaattacattcaggcaattaaagattccaccattaacaatggcccttattatattctcgcaccaggcgtggcaatgcctcatgcgcgaccggaatgtggggcgcttaaaaccgggatgtctttgacattacttgaacaaggtgtttattttcaggggaatgacgaaccaattaaattactcatcggactctctgctgccgatgccgattcgcacattggcgctattcaggcgttaagtgaattactgtgcgaagaagaaatactcgaacaactcttaacagcatcatcagaaaaacaattagcggacattatcagccgcggataa

SEQ ID NO: 6752 - DNA, 282 bp, Escherichia coli
gtgtataagcttagcggaaaagctgttgaagatttcagagggatctatgactacacgctgggaaagtttggtgaggagcaggcggatcgctataccgactctctcggcatttttttggatacactctctcaaatgcccgagattggtcaagactatgatgcgattccagaggtaaagaagatcgcatttaggtttcacactgtttattacgttataagagtcgatgacattctcattgcgcgcattcttcatcagctgatggaacctcgccgtcactggtaa

SEQ ID NO: 6753 - DNA, 243 bp, Escherichia coli
atgcgcaaaattacctcagtaagcgttggcgaacaattagatagttttattacccggatggtccagtctggtcgttatggctcggccagtgaagtgatgcgttcagcgcttcgtctattggaacaacaagaatcccgggatgaagctgtcagaaatgcagttattgaaggtcttgagagcggtgaaagttcgatgacgcttcgtgatatcgcagcagaaaggaagcaaaaacatcgtgtataa

SEQ ID NO: 6754 - DNA, 450 bp, Escherichia coli
atgctcctggattacagcgatgaagaacaaaaaaaattaagaccttttttcactagtgatcacatctattgtttgtttgatgcttttagtcagggtttgcataatgttgctcgtaatggcagtccacggtatgcaggtttactacatcaaatagcatccaactctgagatattacaagattttgatcaacaattgttctggcgcacgttttcaggaggagtcttccatcgacgtatctctgtgaacagcgagccagaaaagacagatgtatggcgattcagtacacaatttgattttccacatataaatgacaacggggagttgtccagaacggtactcatgttcgagggggttgctgaaagcaactttaaagatatcgccaatcattccagcgaatgtttttcttacagttgttatgccgctccgctggatgcgaatgctaaaaaatag

SEQ ID NO: 6755 - DNA, 969 bp, Escherichia coli
atgacaatttcaaattcgaatttattgaaaccgtttattcctggtactgagttgccaccttttaaagaggatgttttttctaaaacagaagaacaatttaaaaaaagcccccatggcaaattgcttttcatttccggaaatgaaaacttagtaaacatttcagcggaaaaaatcgatgaaataaaaaatagcaaagatttcttttcaaatattgtaaatataataattttaatcattaagcatcctgataaaattctgcccattcttcatggttgtcctgcagagtccatcgaactcattaagaatgcgaaacgaacggggcaatggtcatatgagatgactgataagaacgggcagaatattgaagtgtcctatattttcactgataccatagatgataaatctgatggaaaattatgcttaaaaatctgtaactcttgcaaccaaaatgattctagtacacatgaatataaaatagatcatcaacagttgaaaaatcacataaggcaacttgaggagtgggcccttcttgaaaagttttatgataacaacgcttattattctaaacgtacaaaacaattagagaagaaaattgccgatgcggggtttataacagggaaggttaatgccgataactttaatgtaaaagagtttaaagacgatatagcctcgatgctttgtgaacagccccccatgcgtacacaccagatttcttcatccggatacttatctgccgataaagtgcctgatctctataagacaaatttgaaagacgcgcagagagatctgaaaacaacaccggttgacatcgatggtgttagtctaaaatcaaaaactcgggaaaaaattgcggaaaaaattgcgaaaaaaactgaggaaaaaattgcgaaacaaaatgcgaagaccattgaggagaagaatagtgaaaaaacaagaaagaaacaaatcctgaggataattttgtcttaa

SEQ ID NO: 6756 - DNA, 1818 bp, Escherichia coli
atgatgttaaatgcatggcacctgccggtgcccccatttgttaaacaaagcaaagatcaactgctcattacgctgtggctgacgggcgaagacccaccgcagcgcattatgctgcgtacagaacacgacaacgaagaaacgtcagtagcgatgcataagcagcgcagtcagccgcagcctggcgttaccgcatggcgggcggcgatcgatctctccagcgggcaacctcggcggcgttatagtttcaaattactgtggcacgatcgccagcgttggtttacaccgcagggcttcagccgaatgccgccagcacgactggagcagtttgctgtcgatgtcccggatatcggcccacaatgggctgcggatcagattttttatcagatcttccctgatcgtttcgcccgtagtcttcctcgtgaagctgaacaggatcatgtttattaccatcacgcagccggacaagagatcatattgcgtgactgggatgaaccggtcacggcgcaggcgggcggatcaacgttctatggcggcgatctggacggtatcagcgaaaaactgccgtatctgaaaaagctcggcgtgacggcgctgtatcttaacccggtgtttaaagcccccagcgtacataaatacgatacagaggattatcgccacgtcgatccgcagtttggcggcgacggagcgttgctgcgtttgcgacaccatacgcagcagctgggaatgcggctggtgctggatggcgtgtttaaccacagtggcgattcccatgcctggtttgacaggcacaatcgtggcacgggtggtgcttgtcacaaccccgaatcgccctggcgcgactggtactcgtttagtgacgatggcacggcgctcgactggctgggctatgccagcttgccgaaactggattatcagtcggaaagtctggtgaatgaaatttatcgcggggaagacagtattgtccgccactggctgaaagcgccgtggaatatggacggctggcggctggatgtggtgcatatgctgggggaagcgggtggggcgcgcaataatttgcagcacgttgccgggatcaccgaagcggcgaaagaaacccagccggaagcgtatatcgttggagagcattttggcgatgcacggcaatggttacaggccgatgtggaagatgccgccatgaactatcgcggcttcacattcccgttgtggggatttcttgccaataccgacatctcttatgatccgcagcaaattgacgcccaaacctgtatggcctggatggataattaccgcgccggactttctcatcaacagcaactgcgtatgtttaatcagctcgatagccacgatactgcgcgatttaaaacgctgctcggtcgggatattgcgcgcctgccgctggcggtggtctggttgttcacctggcctggtgtaccgtgcatttattacggtgatgaagtggggctggatggtaaaaacgatccgttttgccgtaaaccgttcccctggcaggtggaaaagcaggatacggcgttattcgcgctgtaccagcgaatgattgcgctgcgtaagaaaagtcaggcgctgcgtcgtggcggctgtcaggtgctgtatgcggaagataacgtggtggtatttggccgcgtgctgaatcagcagcgtgtactggtggcaatcaaccgtggagaagcctgtgaagtggtgctacccgcgtcaccgttgcttaatgttgcgcaatggcaacgcaaagaaggccatgggcaactgacagacgggattctggctttgcctgccatttcggctacggtgtggatcaactaa

SEQ ID NO: 6757 - DNA, 828 bp, Escherichia coli
atgagtgtactcattaatgaaaaactgcattcgcatcggctgaaatggcgctggccgctctcgcgtcaggtgaccttaagcattggtacgttagcggttttgctcactgtatggtgggcagtcgcggcgctgcaactgattagcccgctgtttttgccgccaccgcaacaggtactggcaaaactgctcaccattgccggaccgcagggatttatggacgccacgctgtggcagcatctggcagccagcctgacgcgcattttgctggcgctactcgcggcggtgttgatcggtattccggtcgggatcgccatggggctaagcccgacggtgcgcggtattctggatccgataatcgagctttatcgtccggtgccgccgctggcttatttgccgctgatggtgatctggtttggtattggtgaaacctcgaagatcttactgatctatttagcgatttttgcacctgtggcgatgtcggcgctggcgggggtgaaaagcgcgcagcaggttcgcattcgtgccgcccagtcgctgggtgccagccgtgcgcaggtgctgtggtttgttattttgcccggtgcgctgccggaaattctcaccggattacgcattggtctgggtgtgggctggtctaccctggtggcggcggagctgattgccgcgacgcgcggtttgggttttatggtccagtcagcgggtgaatttctcgcgactgacgtggtgctggcggggatcgcggtgattgcgattatcgcttttcttttagaactgggtttgcgcgcgttacagcgccgcctgacgccctggcatggagaagtacaatga

SEQ ID NO: 6758 - DNA, 1968 bp, Escherichia coli
atgggtattttgtccattgctaatcaacatattcgctttgcggtaaaactggcgaccgccattgtactggcgctgtttgttggctttcacttccagctggaaacgccacgctgggcggtactgacagcggcgattgttgccgccggtccggcctttgctgcgggaggtgaaccgtattctggcgccattcgctatcgtggctttttgcgcatcatcggcacatttattggctgtattgccggactggtaatcatcattgcgatgatccgcgcaccattattgatgattctggtgtgctgtatctgggccggtttttgtacctggatatcctcgctggtacgaatagaaaactcgtatgcgtgggggctggccggttataccgcgctgatcattgtgatcaccattcagccggaaccattgcttacgccgcagtttgccgtcgaacgttgtagcgagatcgttatcggtattgtgtgtgcaattatggcggatttgctcttttctccgcgatcgatcaaacaagaagtggatcgagagctggaaagtttgctggtcgcgcaatatcaattaatgcaactctgtatcaagcatggcgatggtgaagttgtcgataaagcctggggcgatctggtgcgacgtactacggcgttacaaggtatgcgcagcaacctgaatatggaatcttcccgctgggcgcgggccaatcgacgtttaaaagcgatcaatacgctatcgctgacgctgattacacaatcctgcgaaacttatcttattcagaatacgcgcccggaattgatcactgatactttccgcgaattttttgacacgccggtagaaaccgcgcaggacgtccacaagcagctcaaacgcctgcggagagtgatcgcctggaccggggaacgggaaacgcctgttaccatttatagctgggtcgcggcggcaacgcgttatcagcttctcaagcgcggcgttatcagtaacacaaaaatcaacgccaccgaagaagagatcctgcaaggcgaaccggaagtaaaagtagagtcagccgaacgtcatcatgcaatggttaacttctggcgaaccacactttcttgcattctgggcacgcttttctggctgtggacgggctggacttccggcagtggtgcaatggtgatgattgcggtcgtgacgtcactggcaatgcgtttgccgaatccacgcatggtggcgatcgactttatctatgggacgctggcggcgctgccgttagggctgctctactttttggtgattatccctaatacccaacaaagcatgttattgctgtgtattagcctggcagtgctgggatttttcctcggtatagaagtacagaaacggcgactgggctcgatgggggcgctggccagcaccataaatattatcgtgctggataacccgatgactttccatttcagtcagtttctcgacagcgcattagggcaaatcgtcggctgtgtgctcgcgttcaccgttattttgctggtgcgggataaatcgcgcgacaggactggacgtgtactgcttaatcagtttgtttctgccgctgtttccgcgatgactaccaatgtggcacgtcgtaaagagaatcacctcccggcactttatcagcagctgtttttgctgatgaataagttcccaggggatttgccgaaatttcgcctggcactgacgatgattatcgcgcaccagcgcctgcgtgatgcgccgatcccggttaacgaggatttatcggcatttcaccggcaaatgcgccgcacagcagaccatgtgatatctgcccgtagcgatgataaacgtcgtcggtactttggccagttgctggaagaactggaaatctaccaggaaaagctacgcatctggcaagcgccaccgcaggtgacggaaccagtacatcggcttacgggtatgctccataagtatcaacatgcgttgaccgatagttaa

SEQ ID NO: 6759 - DNA, 831 bp, Escherichia coli
ttgaaatcattattcaatcggttaacgggaaaagcggttagccggacagctttcgtcgaacatcttggtcatgaagttgtacaacatcatccaaactggaaagtcatgatttcgactgaccataaattgatgcgcattgatacgggtcaccaaacggtggaaatcactcttgatgatgcctacaaacgttatcaagccgcaccagacccgctggaagaagtggctgcagatatgctgaaacagcttgcagaaatgctgccgaccgggcgctgtattgttccggtgattaaagaaaaagcctggctggataccgttcgccaacagcttagccagtatgaatctgatccagagatcctcaacgcctcgctggattttgcctgggaagactttaacgatgagttaattatcttgtttgctgaagatggtagcgaaaccatgcgctatctgatgcgctacgaagtgaccattgaccgcgaacaagccatcaataatttgaagcaaatattgccggaagtttcggctgaaatcgttgatacaggcgcaaacgctggaaaagttgccgttatctccgcagggggtacttatgagcccagtctgatgctcattgacgatctttgggtgcaatcacccgatcctgaatgcggcgacctgttagtgactgttccctccagaggaaaactgtttttcacctacaatgatcagccagcaaatctcagcgcattacgacagttaacagaacaatgcttccgtgaggatgaccatcctctgacaacacagatattcatccgccgtaacggtcacttttatccctgggtagaaaccttgcattaa

SEQ ID NO: 6760 - DNA, 963 bp, Escherichia coli
atgagtaaggtcttcacaattggagaaattctggttgaaattatggcgagtaaaatcggccagccatttgatcaaccaggtatctggaacggcccttatcccagtggcgcacccgctatttttatcgaccaggtgacacgtcttggcgttccgtgcggcatcattagctgtgtggggaatgatggctttggtgatattaatatacatcgtctggctgctgacggtgtggatatcagggggatttcagtcttacctctggaagctaccgggagtgcctttgttacttatcataactctggcgatcgcgattttatttttaatatcaagaatgccgcttgcggtaaattatcggcgcagcatgttgatgaaaatattctgaaggactgtacccattttcatattatgggttcatccctgttttcattccatatggtagacgcagtaaagaaagcggtaaccattgtaaaagagaatggtggcgttatttcttttgaccctaatattcggaaagagatgctcgatattccagaaatgcgtgacgccctccactttgttcttgagttaacagatatctatatgcccagcgagggagaagtgttgctcttgtcgccacactcgacaccggagcgtgcaatcgctggttttcttgaagaaggtgttaaagaggtgattgtgaagcgcggcaatcaaggtgccagttactactccgcgaatgagcagtttcatgttgagagctatccggtggaagaagttgacccgaccggtgcgggagactgttttggtggcgcgtggattgcctgccgccagctagggtttgacgcccatcgggcattacaatatgccaacgcctgcggtgcactggcggtaacccgacgtggcccaatggagggaacgtctcgccttgcggaaatcgaagcgttcatccagcgccatgacatgtccattcgggaagcagcacaatga

SEQ ID NO: 6761 - DNA, 990 bp, Escherichia coli
atgacagagaaaactcttgccagtccgaaaccttcggaaattcccattgcaaataattttaaaaaagtcttcaggcaatatggcggtatcctcagtggaatggtggtgttaatcattctgttcagttttattaatgacagtttttttaccgccaataacattactaatattattcttcaggtttcgataattgcaattaccgcctatggaatgacttacgtacttttgcttggcgatattgatttatcggttggttcaaccattgcattgattggcacatttgctgcgcttggggcttcatggggaattccatttattttattggtcccattatccattattgcagccctggctctggggatgataaatggtggcttgacggctatagcggggatcccgtcgtttattgtcaccgttgctactatggggatcttccgtggtatcgcttatatagtgaccgatggtatgcccatcatgattaaagatgatgcctttctggcgctggggaatggagaatttctctatatacctattccaatctggatattaattatcttattgctgattaaccatttcattcttactaaaacaacctttggacgaaagatttatatcactggtggtaataaagaagcggcagtttattcagggataaatgtcacccgcttgaaaataaaagtctttatgattacagctgtgctggcaggtatcagcgggatgatcctcgcctcacgcctctattccgggcaaccgaattccgcgttgagctacgaactggatgctattgctgcggctgtactgggaggcaccagcctgaacggcggctatggaaccgtggtggggacggtaatcggggcattaaccatcggcgttattaataatggcatgaacttaatgaacgttccctatttctatcagatggtggttaaaggattagtcattcttgtagccgtttattttgacgtaagaaataaaagaaaacgcagctaa

SEQ ID NO: 6762 - DNA, 747 bp, Escherichia coli
atgcattatgccgttgtcgtcatgcttgaactgctttgctgtattcacgcttatcgctccggacaagagcgatactggatttttattatcttctgttttccggtgattggctgcgtggcgtatttcgtcatggtcatgctgcctgaaacgggcgctgaccgtcacgggcgtactttgctgatgcgcctgcaggacaaaatcagcccggaacgccacctgcacaaattaaccgaagagctggcgattgccgagaccaatcaaaaccattatgcgttagctaacgaactggcgcgccttgggcgttatcacgaagccgttccccattatcagcaggcgttaagcggaattttcgcccatgaagcggtaatgatgttaagcctggcgcaggcgcaatttgctattcaggagttcgccgcctgtcagcagacgctggaagatgtgatgcgttataaccccgattttcagtcggcagacgggcatttgttatttgccagagcgttagccgcacaagaaaaatacgctgatgcggaaagtgagtttgaggtgcttgtttcttattaccccggcccgcaggcacgtatttactatgcggaaatgttggcgaaaatgagtcggttacgtgaagccaacgagcagtatattgctgtggttgatacggctaaacgttcaaaaccacattatagaaaacaccaccgggaatggattaagaccgccaatgaacggctgaagcagagtgtggtgcaatga

SEQ ID NO: 6763 - DNA, 1509 bp, Escherichia coli
atgcctgataacagcgcagctatcgttatcgatattggcaccaccaattgcaaagtcacctgcttttcctgcctggatgcaacgacgttgggcgcgcataaattcgtgacggcaaaacagatctccccacagggcgatgtcgatttcgatatcgacgtcctctggcaggaggtccgccaggcaatagcgcaactgagcgccgcttcgccgctgccggtcaggcggataagcattgccagttttggcgagtcaggggtgtttcttgacgagcatggcgagatcctgacgccaatgctggcatggtatgaccgccgcggtgaagagtacctggcaacgcttagtgaggcagacagtgcggcgctttatgacatctgcgggctaccgctgcacagcaattactctgccttcaaaatgcgttggttgctggagcattatccactgcgtaatcgccgcggcctgcgttggctacatgcgccggaagtactgctctggcggctgactggcgaacagcgtacggatatcaccttagccagccgtacgctgtgtctggacgtgcgtaaaggcgaatggtcagcgaaagcggcggcgttgttacacgttccctgttcagcatttgcgccattggtgcagccaggcgagcacgccggatgggtcagcgagtcgctctgcaaaacgcttgggttcttgcaaccggtcagcgtgacgctggccgggcatgaccatatggtgggtgcgcgggcgttgcagatgacgccgggcgatatccttaactcgacgggcaccacagaaggcattctgcaactggatacacaaccgacgctggatgaacaggccaaacgtgacaagctggcaaacggctgttattcgcttgcaaaccagttcaccctgtttgcgtcgctgccggtgggcggtttcgctctggagtggctgcgcaacacgttccggctaaccgatgaggagatcgccgcatcacttactcgcggacatgcggattacctggcggggaactggtcgctcgatgacattcccgtttttattccgcatcttcgcggttcgggttcgccctataaaaatcgccatacccgaggattattttatgggcttggcgatacgttaaatatcgatatgttaattgccagcgtctcactgggattaaccatggaatttgccaactgcttcgcctgttttaatgtgcccggcaccagcgcgttaaaagtgataggtccggcaacccataatcccctttggctgcaattaaaggcggatattttacagcgtccggttgaagcaattgcatttaacgaggcggtttctgtcggagcattattaaccgccgcaccggatattccaccgccgcaagtcaccatagcccaacgtttgttaccgaatcgggcgagataccatcaattacagcgttatcagcacaaatggaaaagctggtatcagttgaaattacagcaagaaggcgtgatgccattacatcatcgggaggagcactatgttgagtaa

SEQ ID NO: 6764 - DNA, 360 bp, Escherichia coli
atgatcaaactgaagacgccaaactctatggagattgccgggcaacctgctgttatcacttacgtgccagaactgaatgcatttcgtggcaaattcctgggcttgtcaggttattgtgattttgtctctgacagcattcaggggctgcaaaaagaaggggagctttccctgcgagagtatcttgaggattgtaaagctgcgggtattgagccgtatgcgcgtacagaaaagattaagacctttacattacgctatccagaatcgctgagtgaacgccttaataatgcggctgcgcagcaacaagtctctgtaaatacttatattattgaaacgctaaatgagcgtttgaatcatttataa

SEQ ID NO: 6765 - DNA, 276 bp, Escherichia coli
atgagaaccctggtacaggctttacggaagaaacaaaaaaatacattggatcaaatatttaaatctcctgttcctcaagggattaagtggtctgatatagagtcactggttaaagcattaggcggagaaattaaggaaggaagaggttcgcgttgtaagttcatactaaatatgagcgttgcgtgtttccatcggcctcatccgtcgccagataccgataaaggcgctgtagaaagcgtgcgtgactggttactaagtataggggtaaaaccatga

SEQ ID NO: 6766 - DNA, 1623 bp, Escherichia coli
atgaaacttggaactgtggcaggtactaacgacagtataacgactatcgcaacaaatgatatggtgcaagagcatgttactaacttcactaaagaactgtttgggtatattgcaaatggtataggtgatgatatatcaagtattgccaggacaatgctcggtgaagttgtggaaaaaattgatgattggcaaatagaacgtttccaacaatcttttcaagatgacaaaatttcatttaccatagaaacgaatcattcagaaaaatatagtatgctatcgggcatgcgtgcccatattctacgtaggaataatagttatcagtttattgtgacaattaatagtaaaaattacggttgccctcttgatgataccgatattaattggtgcagcattgtttatttacttaataatatgacagtaaatgataatgctaatgatgttgcagttactgagtcgtacaaacccatctgggactggaaaatatcgcaatataatgtatctgatattaaattcgaaacaattataaaaccccagttcgctgacagaatctatttctccaattgttcacccgttgatcccacaagtaccagaccaacctattttggtgataccgatggctcagtcggtgcagttttgtacgcgcttttcgcaacgggacatttgggaattatggctgaaggagtaaattttcttagccagttgcttaatatagaagatgaagttctcaatgttttattaagggaaaacattaatgaggaactagacattaatgttaatacaataatcagtattctgaacagaagagatgttgttttagaaagtattcagccatatttagctattaataaaggcgcagtgacgccatgtacgtttctgggggaccaaaccggcgatcgatttagtaatatctgtggcgatcaatttatcatcgatttgttaaaacgcataatgagtatcaatgaaaattttcatgtattagctggtaatcatgaaacgaattgcaatggtaactatatgcagaacttcacgcgtatgaaaccacttgatgaggatacctacgacgggataaaagattatcctgtatgtttctatgaccccaaatacaaaataatggcaaatcatcatgggataacttttgatgatcagcgaaaacgttacattataggaccgataacagtctctattgatgaaatgaccaatgctctcgatccggtcgaattagcggcaattattaataaaaagcatcatactataattaatggtaaaaagtttaaaactagccgggctatctcttgtcgatcctttaatcgttatttttctgtttcgacagattacagacctaaacttgaagcactattagcatgctcacaaatgttaggtataaatcaagttgttgcacataacggaaatggtgggagagaacgcataggtgaaacggggacagttttaggtcttaacgcccgtgacagtaaacatgctggaagaatgttcagcatgcataattgccaaattaaccctggtgcggggcctgagataaccactccctggaagtcttaccagcatgaaaaaaacaaaaatggacttatgcctttgattagaaggcgcacaatgttacagctctga

SEQ ID NO: 6767 - DNA, 1476 bp, Escherichia coli
atgggccagcaccgttgcacagactcagttgcagaaaaaggggctaaacgcatgaataccttatttaatcagcctttgaaggtcgtgaacgcgggactacacagttttgctgacaatattcaacatgccgggggaagcgcaattgcactcaactggcagccaccagcacaaggcgatattgacgctggattggatctggcatcgttgctacgtcatcccctggtagaaaatgccaaccaaatcgccatgacacgttatctcgaagcacagcccgtgctggtggatgtcatgctcgctaaagaggccattccagcaatggctgaacaaaaacgtattttgcactctggcccgccgattgcctgggaagagatgtgtggtccggtaaaaggggcgattattggtgccatgctgtacgaaggttgggccaccagccagcaagacgctgaaaaccaaataaacgcaggcgaaatcgaccttgccccttgtcatcattatcacgcggttggcccaatggcaggcatcatcagcccgtcgatgccgttatgggtggtagaaaacaaaaccaacggccatcgtacttttagcaatttcaatgaaggtctgggtaaggttctccgttttggcgccaataacgatgaagttctcaatcgtctggcctggatgcgcgatgaactggcgccggcaatgaaagcagcaatcgcacaacacggcgagctggaactcaagccattaatggcgcaggcgctgcatatgggggatgaagttcataaccgcaatgctgccgctaccggtttgctgattaagcgcctgctcccggcattgctggcctgctctcttccacaggaacatatccagcgcgtcgtggcatttatcaccggtaacgatcacttcttcctcaatctgtcgatggccgcctgtaaagcaatgatggatgccgccgccaatgtaccgttcagttcaatggttacggtgatggcgcgtaacggggtgaattttggtattcggatttccggtactggcgatcgctggttccaggctcctgccaatgccgttgaaggtctgttcttccccggatttggcgttgacgacgctgctgctgacctgggtgatagcgcaattactgaaaccgcaggtgtgggtggcttcgcgatggcgtcgtctccggcgatcgtcaaatttgtgggaggcacccctgccgatgccaccaataacagccgtcggatgcaagccatcaccctcggcggtaaccccgcatttacacttccagccctcaattttgcccccaccgcagcagggattgatgcgcgtaaagtgaccgatcgcggcattttaccggtcatcaatacgggtatcgcccacaaacaagcgggggtcgggcaaattggtgccgggatcaccactgcgccgatggcctgttttgtcgccgctgtacgtgcactggcggagatcgtcgcaaaggagaaccatcatggttaa

SEQ ID NO: 6768 - DNA, 957 bp, Escherichia coli
atggttaagccactggctgtcgtcgcggttggcggcaatgcgctcattcaggacgagcaacgcaatagtattcccgatcaatatgttgcagtgatggaaagcgtgcagcatatcgttgatatggttgaagccggatgggacctggtactaacccacggtaatggcccgcaggtgggctttattctgcgccgctctgaactcgccagtaacgaagtttctccggttccacttgattacgccgtgggtgatacacaaggtgcaattggctacatgttccagaaagcactgcataacgaattggctcgccgtggcataaacaaaccggtaattgccctggtgacacaaacgcgagtcagcccacatgacgatgctttcgccagccccagtaaaccaattggcgcgtttctcgatgaagcaacggcccaacaacgccaacaacaactcggctggacgctgatggaggacgccgggcgtggttggcggcgtacagttccctctcctgcaccactggaaattattgagcacgacaccatcgctcacctagtgcgccagggatatctggttattgcctgcggcggcggcggtattccggtggtgcgagacgggcaacaactgaaaggtgtggaagccgtgatcgataaagatctggcctccgcgctgctcgccagtcagttaggcgcagatctgctggtgatccccaccggtgtagaaaaagtggcgattaactttggtacaccacaacaacagtggctcgacgctatcagcgttgccgaagcgcaaacgctgttgcgggaaggtcagtttggtgtcggcagtatgcaacccaaagtggaagccattgttgatttcatcaatgccagccagcaacaaggcaaacaggccagcggcctgattacttcaccgcaaaccataaaagcagccctggcgcatcagagcggtacatggataaccctttaa

SEQ ID NO: 6769 - DNA, 897 bp, Escherichia coli
atgttcatctcagacgaaacgcttcgtgttattcatctggtcgccagacaccagagcattaccaccgcagccgagcagttaaataaagtcccttccgctatcagttacaccatcaagaaagcggaagagagcctgggcgttgaactgttcattcgtaagggacgctatattgaattatcgccagcgggaagttacttcatcgaacatagcaaaactattcttggcgacctggaagcattaaagcgcaacacagtgctgattcacgatggtattgagcgtgaactgacaattgcggtgaacaatattattcctggtgatttgctggtggcatttattcgagattttgaacggcaattcacatcaacaacactgacggtagatcttgaggtatacaacggctgctgggatgcgctgtacagtaagcgtgccgatctggtctacggtgctcctcatgcagtgccaagcagtgaaggcatcattagcgaaccggtcggacaaatggaatgggattttgtcgtcagcccactccacccactggcagcgaagcggcatccattagaaaacagtgaattgcgtcattatccagcggtttgtatccgcgatacctccgttaacttccccccgatgcaagcctggttgttggaaggacaaaaacccatttttgttcctgacttcgctacggcaatcgccttaatagaacaaaacgtcggtattggttatattccacatcatctggcattgccgttattgaacagcggtaaattgcttaaaaagccaatgcgcgaacataaacacgccaccaagttatttcttgccgctcgttccgatggtatgggcaaagcctgtcagtggtgcatagaatatttaagaaatccgcaattaattttctgttcctga

SEQ ID NO: 6770 - DNA, 795 bp, Escherichia coli
gtggggccttcaagtactgatgctccacaacaggttaaaattattgaggatttaatcgcccgtaaggttaatgcaattactattgtgccaaacgatgccaacgtgctggaaccggtattcaaaaaagcgcgagatgccggaattgtggttctgaccaacgaatctcccggtcagccaagtgctaactgggatatcgaaatcattgataacgaaaaatttgccgctgaatatgttgaacatatggcgaaacgcatgggtggcaagggcggctatgtgatttacgtggggagtttgaccgtgccgcagcataacttatgggctgacttgctggtgaaataccagaaagagcattacccggatatgcatgaagttacccgccgcatgccggttgccgagagtgtggatgactcacgtcgtaccacacttgacctgatgaaaacctatcctgacttgaaagcggttgtctcctttggttcaaacggtccgattggcgcgggacgtgcggtgaaagagaaacgggcgaaaaataaagtcgcagtctatggcatgatgatcccttcacaggcggcatcactgattaaaagtggtgatatcaccgaagggattacttacgatccggcctctgcaggttacgcactcgcagccgtcgccagcacgttgctgaagggtgaagagatcaaacctggattagaaatgcagaatctgggtaaggccgacgtagatatggataagcgaattatccgtttccataaggtattactggtcaacaaagacaatatcgactcactttattaa

SEQ ID NO: 6771 - DNA, 816 bp, Escherichia coli
atgatatcattaaaagctccgcacaataatttgatgccatatacgcaacaaagcatacttaatactgttaaaaacaatcagttatcagaggatatcaaaagctccctggtctcctgtgtcgatatattcaaggttttgattaaacaatattatgattatccttatgattgtcgtgatgatttagtcgatgacgacaaactcattcatctcatggctgccgtacgagactgtgagtggtcagacgataacgcactcaccataaatgtgcagtttaatgatttccctgggttttatgactggatggattaccctgatcacccggttaagtttgtttttcgcatacttgaaaatcaaaaagggacagtttgggtatatgaccaggatgatgcgtttcttgatattaaagcaaatgtgcaggctggacgctttaccgggcttaagaaattagagcagtttatcgattcagtgcgaacagattgcaaatgtattcttcttgaacaccatatgcctttgctgagacttttccctaaagggaaagagtgtatgcatgtggaaaaatggcttcgcgaaatgtcgtctatcccggagaccgacgcgcccattaagcaggcgcttgcgcatggattattattacacttaaaaaatatctaccctgtttttcctgaatcactggtgaggttattgctctctgttctggacgtaaaaacatacagagatgatgcgcgattaaacgaatggatatcgaatagagtgcaggaattaggtgacagatattatcctgtaaataagcacgttaaaatccgctacactctttag

SEQ ID NO: 6772 - DNA, 900 bp, Escherichia coli
atgctctctcgacatatcaattattttcttgccgtggctgaacatggcagcttcacccgtgccgccagtgcgttgcacgtctcccagcctgcgctttcccagcagattcgccagttagaggagagtttaggcgtgccgctgtttgaccgtagcgggcgaacgattcgtctcactgatgcgggagaagtctggcgacagtacgccagccgggcgttacaggaactgggggcgggtaaacgggcgattcatgatgttgccgatctgacgcgaggatcgctgcgtatcgccgtcactcccacctttacaagctactttatcggccctttaatggcggatttctatgcgcgctaccccggcatcacgctccagctacaggaaatgtcgcaggagaaaatcgaagatctgctttgtcgcgacgagttggacgttgggattgccttcgcgcctgcgcattcgccggagctggaggcaattcctttactgacagaaagtttagcgttagtcgtggcgcaacatcatccgctggctgcctgtgaacaggtggcgttgagtcgcttgcatgatgaaaaactggtcctgctcagcgcggaatttgccaccagagagcaaattgaccactactgcgagaaagcggggctacatccacaggtggtcattgaggcgaactcaattagcgcggttctggagctgattcgccgcacttccctttccacattgttaccagcagcgattgccacacaacatgacgggcttaaagctatttctcttgccccgccactactggagagaacggcggttttgttgcggcggaaaaatagctggcagacagccgccgcgaaggcatttttacacatggcgttggaagaatgtgcggatgttggcgggcatgaatcacggtag

SEQ ID NO: 6773 - DNA, 660 bp, Escherichia coli
gtgaaagagattattgatggattccttaaattccagcgcgaggcatttccgaagcgggaagccttgtttaaacagctggcgacacagcaaagcccgcgcacactttttatctcctgctccgacagccgtctggtccctgagctggtgacgcaacgtgagcctggcgatctgttcgttattcgcaacgcgggcaatatcgtcccttcctacgggccggaacccggtggcgtttctgcttcggtggagtacgccgtcgctgcgcttcgggtatctgacattgtgatttgcggtcattccaactgtggcgcgatgaccgccattgccagctgtcagtgcatggaccatatgcctgccgtctcccactggctgcgttatgccgattcagcccgcgtcgttaatgaggcgcgcccgcatcccgatttaccgtcaaaagctgcggcgatggtacgtgaaaacgtcattgctcagttggctaatttgcaaactcatccatcggtgcgcctggcgctagaagaggggcggatcgccctgcacggctgggtctacgacattgcaagcggcagcatcgcagcttttgacggcgcaacccgccagtttgtgccactggccgctaatcctcgcgtttgtgccataccgctacgccaaccgaccgcagcgtaa

SEQ ID NO: 6774 - DNA, 471 bp, Escherichia coli
atgattcagtcgcaaattaaccgcaatattcgtcttgatcttgccgatgccattttgctcagcaaagctaaaaaagatctctcatttgccgagattgccgacggcaccggtctggcagaagcctttgtaaccgcggctttgctggggcagcaggcgcttcctgccgacgccgcccgcctggtcggggcgaagctggatctcgacgaagacgccattctactgttgcagatgattccactgcgtggctgcattgatgaccgtattccaaccgacccaacgatgtatcgtttctatgaaatgttgcaggtgtacggcacaaccctgaaagcgttggttcatgagaagtttggcgatggcattatcagcgcgattaacttcaaactcgacgttaagaaagtggcggacccggaaggtggcgaacgtgcggtcatcaccttagatggtaaatatctgccgaccaaaccattctga

SEQ ID NO: 6775 - DNA, 1182 bp, Escherichia coli
atgcgtaaccatcaaaagacgttcacgatgctgctggttctggtgctgattggtcttaatatgcgaccactgctcacctccgtcgggccactgctaccgcaattgcgccaggcaagcggaatgagctttagcgtggctgccctgttgaccgctctgccggtggttaccatgggcgggctggcgctggccggaagctggcttcatcagcatgtcagcgaacgtcgcagcgtcgccatcagtttgttactgattgccgtcggtgcattgatgcgtgagctttacccccaaagtgcgctgctgcttagcagcgcactgcttggtggagtggggatcggcatcattcaggcagtgatgccttcggtaattaagcggcggtttcagcaccgtacgccactggtgatggggctgtggtccgcggctctgatgggcggcggtggacttggtgccgccattacgccctggttagttcaacatagcgaaacctggtatcaaacactcgcctggtgggcgctgcctgccgttgttgcgctctttgcctggtggtggcaaagcgcccgcgaggtcgcctcttctcacaagacaacaaccactccggttcgcgtggtatttactccccgcgcgtggacgctgggtgtttacttcggtctgattaacggtggttacgccagcctgattgcctggttacccgctttctatattgagattggtgccagcgcgcagtacagcggttccttgctggcgttgatgacgcttgggcaagctgcgggggcattgctgatgcctgctatggctcgccatcaggatcggcgcaaacttttgatgctggcgctggcgttacaactggtgggtttctgcggctttatctggctgccgctgcaattgccggtcttctgggcgatggtgtgtggtttaggtctgggcggcgcatttccgctctgtttgctgctggcgctcgatcactctgcgcaacccgctattgctggcaaactggtggcgtttatgcaggggatcggttttatcatcgccgggcttgccccgtggttttctggtgtgcagcgtagtatcagcggcaattacctgatggactgggcgtttcatgtgctgtgcgtcgttgggctgatgatcataaccctgcgttttgcaccagcacgttttccgcagctgtgggtcaaagaggcatga

SEQ ID NO: 6776 - DNA, 621 bp, Escherichia coli
atgatcgcaatgaacatgccaatgaccgaaagaataaaagcaggcaagctatttaccgatatgtgcgaaggcttaccggaaaaaagacttcgtgggaaaacgttaatgtatgagtttaatcactcgcatccatcagaagttgaaaaaagagaaagcctgattaaagaaatgtttgccacggtaggggaaaacgcctgggtagaaccacccgtctatttctcttacggttccaacatccatataggccgcaatttttatgcaaatttcaatttaaccattgtagacgactacacggtaacgatcggtgataacgtattgattgcacccaatgttactctttccgttacgggacaccctgtacaccatgaattgagaaaaaacggtgagatgtactctattccgataacgattggcaataacgtctggatcggaagtcatgtggtcattaatccaggcgtcaccatcggggataatgctgttattggcgcgggtagtgtcgtcacaaaagacattccaccaaacgtcgtggctgctggcgttccttgccgggttattcgcgaaataaacgaccgggataagcactattattacaaagattataaagttgaaccttcagtttaa

SEQ ID NO: 6777 - DNA, 3075 bp, Escherichia coli
atgactatgattacggattcactggccgtcgtattacaacgtcgtgactgggaaaaccctggcgttacccaacttaatcgccttgcggcacatccccctttcgccagctggcgtaatagcgaagaggcccgcaccgatcgcccttcccggcagttgcgcagcctgaatggtgagtggcgctttgcctggtttccggcaccagaagcggtgccggaaagctggctggagtgcgatcttcctgacgccgatactgtcgtcgtcccctcaaactggcagatgcacggttacgatgcgcccatctacaccaacgtgacctatcccattacggtcaatccgccgtttgttcccgcggagaatccgacgggttgttactcgctcacatttaatattgatgaatgctggctacaggaaggccagacgcgaattatttttgatggcgttaattcggcgtttcatttgtggtgcaacgggcgctgggtcggttacggacaggacagccgtttgccgtctgaatttgacctgagcgcatttttacgcgccggagaaaaccgcctcgcggtgatggtgctgcgctggagtgacggtagctatctggaagatcaggatatgtggcggatgagcggcattttccgtgacgtctcgttgctgcataaaccgaccacacaaatcagcgatttccatgttgccactcactttaatgatgatttcagccgcgcggtactggaggcagaagttcagatgtatggcgagctgcgcgatgagctgcgggtgacggtttctttgtggcagggtgaaacgcaggtcgccagcggcaccgcgcctttcggcggtgaaattatcgatgagcgtggcggttatgccgatcgcgtcacgctacgcctgaacgttgaaaatccggaactgtggagcgccgaaatcccgaatctctatcgtgcggtggttgaactgcacaccgccgacggcacgctgattgaagcagaagcctgcgatgtcggtttccgcgaggtgcggattgaaaatggtctgctgctgctgaacggcaagccgttgctgattcgcggcgttaaccgtcacgagcatcatcctctgcatggtcaggtcatggatgagcagacgatggtgcaggatatcctgctgatgaagcagaacaactttaacgccgtgcgctgttcgcattatccgaaccatccgctgtggtacacgctatgcgaccgctacggcctgtatgtggtggatgaagccaacattgaaacccacggcatggtgccaatgaatcgtctgaccgatgatccgcgctggctaccggcgatgagcgaacgcgtaacgcgaatggtgcagcgcgatcgtaatcacccgagtgtaatcatctggtcgctggggaatgaatcaggccacggcgctaatcacgacgcgctgtatcgctggatcaaatctgtcgatccttcccgcccggtacagtatgaaggcggcggagccgacacctccgcaaccgatattatttgcccgatgtacgcgcgcgtggatgaagaccagcccttcccggcggtgccgaaatggtccatcaaaaaatggctttcgctgcctggagaaatgcgcccgctgatcctttgcgaatatgcccacgcgatgggtaacagtcttggcggcttcgctaaatactggcaggcgtttcgtcagtacccccgtttacagggcggcttcgtctgggattgggtggatcagtcactaatcaaatatgatgaaaacggcaatccgtggtcggcttacggcggtgattttggcgatacgccgaacgatcgccagttctgcatgaacgggttggtctttgccgaccgcacgccgcatccggcgctgacggaagcaaaacaccaacagcagtttttccagttccgtttatccgggcggaccatcgaagtgaccagcgaatacctgttccgtcatagcgataacgaactcctgcactggtcggtggcgctcgatggcaagccgctggcaagcggtgaagtgcctctggatgttgctccacaagataaacaggtgattgaactgcctgaactaccgcagccggaaagcaccggacaactctggcttacggtacacgtagtgcaaccgaacgcgaccgcatggtcagaagccagacacattagcgcctggcagcagtggcgtctggcggaaaacctcagcgtgacactcccctccgcgccccacgccatcccgcaactgaccaccagcgaaacggatttttgcatcgagctgggtaataaacgttggcaatttaaccgccagtcaggctttctttcacagatgtggattggcgatgaaaaacaactgctgacgccgctgcgcgatcagttcacccgtgcaccgctggataacgacattggcgtaagtgaagcgacccgcattgaccctaacgcctgggtcgaacgctggaagacggcgggccattaccaggccaaagcagcgttgttgcagtgcacggcagatacacttgccgacgcggtgctgattacgaccgctcacgcgtggcagcatcaggggaaaaccttatttatcagccggaaaacctaccggattgatggtagtggtcaaatggcgattaccgttgatgttgaagtagcgagcgatacaccgcatccggcacggattggcctgacctgccagctggcgcaggtcgcagagcgggtaaactggctcggattagggccgcaagaaaactatcccgaccgccttactgcggcctgttttgaccgctgggacttgccattgtcagacatgtataccccgtacgtcttcccgagcgaaaacggtctgcgctgcgggacgcgcgaattgaattatggcccacaccagtggcgcggcgacttccagttcaacatcagccgctacagccaacaacaactgatggaaaccagccatcgccatctgctgcacgcggaagaaggcacatggctgaatatcgacggtttccatatggggattggtggcgacgactcctggagcccgtcagtatcggcggaattccagctgagcgccggtcgctaccattaccagttggtctggtgtcaaaaataa

SEQ ID NO: 6778 - DNA, 1665 bp, Escherichia coli
atggcaatacaacaccctgacatccagcctgctgttaaccatagcgttcaggtggcgatcgctggtgccggtccggtcgggctgatgatggcgaactatctcggccagatgggcattgacgtgctggtggtggagaaactcgataagttgatcgactacccgcgtgcgattggtattgatgacgaggcgctgcgcaccatgcagtcggttggcctggtcgataatgttctgccgcacactacgccgtggcacgcgatgcgttttctcaccccaaaaggtcgctgttttgctgatattcagccaatgaccgatgaatttggctggccgcgccgtaacgcctttattcagcctcaggtcgatgcggtgatgctggaaggattgtcgcgttttccgaatgtgcgctgcctgttttcccgcgagctggaggccttcagccagcaagatgacgaagtgaccttgcacctgaaaacggaagaagggcagcgggaaacggtcaaagcccagtggctggtggcctgtgatggtggggcaagttttgtccgtcgcaccctgaatgtgccgtttgaaggtaaaactgcgccaaatcagtggattgtggtagatatcgccaacgatccgttaagtacgccgcatatctatttgtgttgtgatccggtgcgcccgtatgtttccgccgcgctgcctcatgcggtacgtcgctttgaatttatggtgatgccgggagaaaccgaagaacagctgcgtgagccgcaaaatatgcgcaagctgttaagcaaagtgctgcctaatccggacaatgttgaattgattcgccagcgtgtctacacccacaacgcgcgactggcgcaacgttttcgtattgatcgcgtactgctggcgggcgatgccgcgcacatcatgccggtgtggcaggggcagggctataacagtggtatgcgcgacgcctttaacctcgcatggaaactggcgttggttatccaggggaaagcccgcgatgcgctgctcgatacctatcaacaagaacgtcgcgatcacgccaaagcgatgattgacctgtccgtgacggcgggcaacgtgctggctccgccgaaacgctggcagggtacgttacgtgacggcgtttcctggctgttgaattatctgccgccagtaaaacgctacttcctcgaaatgcgcttcaagccgatgccgcaatattacggcggtgcgctggtgcgtgagggcgaagcgaagcactctccggtcggcaagatgtttattcagccgaaagtcacgctggaaaacggcgacgtgacgctgctcgataacgcgatcggcgcgaacttcgcggtaattggctggggatgcaatccactgtgggggatgagcgacgagcaaatccagcagtggcgcgcgttgggcactcgcttcattcaggtggtgccggaagtgcaaattcataccgcacaggataaccacgacggcgtactacgcgtgggggatacgcaaggtcgcctgcgtagctggttcgcgcaacacaatgcttcgctggtggtgatgcgcccggatcgctttgttgccgccaccgccattccgcaaaccttgggcaagaccctgaataaactggcgtcggtgatgacgctgacccgccctgatgccgacgtttctgtcgaaaaggtagcctga

SEQ ID NO: 6779 - DNA, 951 bp, Escherichia coli
atgagtaagcgtaaagtcgccattatcggttcaggcaacattggcaccgatctgatgattaaaattttgcgtcacggtcagcatctggagatggcggtgatggtcggcattgatcctcagtccgacggtctggcgcgtgccagacgtatgggcgtcgccaccacccatgaaggggggatcgggctgatgaacatgcctgaatttgctgatatcgacattgtatttgatgcgaccagcgcgggcgcacatgtgaaaaacgatgccgctttgcgcgaagcgaaaccggatattcgcttaattgacctgacgcctgctgccatcggcccttactgcgtgccggtggttaacctcgaggagaacgtcgctcaactgaacgtcaacatggtcacctgcggcggccaggccaccattccaatggtggcggcagtttcacgcgtggcgcgtgttcattacgccgaaattatcgcttctatcgccagtaaatctgccggacctggcacgcgtgccaatatcgatgaatttacggaaaccacttcccgagccattgaagtggtgggcggcgcggcaaaagggaaggcaattattgtacttaacccagcagagccaccgttgatgatgcgtgacacggtgtatgtattgagcgatgaagcttcacaagatgatatcgaagcctcaatcaatgaaatggctgaagcggtgcaggcttacgtaccaggttatcgcctgaaacagcgcgtgcagtttgaagtcatcccgcaggataaaccggttaatttgccgggcgtggggcagttctccgggctgaaaacggcggtctggctggaagtcgaaggcgcagcgcattatctgcctgcctatgcgggcaacctcgacattatgacttccagtgcgctggcgacagcggaaaaaatggcccagtcactggcgcgcaaggcaggagaagcggcatga

SEQ ID NO: 6780 - DNA, 1014 bp, Escherichia coli
atgaacggtaaaaaactttatatctcggacgtcacgttgcgtgacggtatgcacgccattcgtcatcagtattcgctggaaaacgttcgccagattgccaaagcactggacgatgcccgcgtggattcgattgaagtggcccacggcgacggtttacaaggttccagctttaactatggtttcggcgcacatagcgaccttgaatggattgaagcggcggcggatgtggtgaagcacgccaaaatcgcgacgttgttgctgcctggaatcggcactattcacgatttgaaaaatgcctggcaggctggcgcgcgggtggttcgtgtggcaacgcactgtaccgaagctgatgtttccgcccagcatattcagtatgcccgcgagctcggaatggacaccgttggttttctgatgatgagccatatgaccacgccggagaatctcgcaaagcaggcaaagctgatggaaggctacggtgcgacctgtatttatgtggtggattctggcggtgcgatgaacatgagcgatatccgcgaccgtttccgcgccctgaaagcggtgctgaaaccggaaacgcaaactggcatgcatgctcaccataacctgagtcttggtgtggcgaactctatcgcggcggtggaagagggctgtgaccgcatcgatgccagtctcgcgggaatgggggcgggcgcaggtaacgcgccgctggaagtgtttattgctgccgcggataaactgggttggcagcatgggaccgatctctatgcgttaatggatgccgctgacgacctggtgcgtccgttgcaggatcgaccggtacgagtcgatcgcgaaacgctggcgctgggatacgctggtgtttactcgagcttcctgcgtcactgtgaaacggcggcggcgcgttatggcttaagcgcggtggatattctcgttgagctgggcaaacgccggatggttggcggccaggaggatatgatcgtcgacgtggcgctggatctgcgcaacaacaaataa

SEQ ID NO: 6781 - DNA, 1737 bp, Escherichia coli
gtgataaacagccctaaccttgaaggtccggtttttgaaaattgttatttcgaggattgtaaattcaacaacatacagctttatgagactaatgatgatactgtggggtcaggaaataaaaaaccaataaaaggtatgtttaaaggttgttttatttctaaatgcaaaattgaaaattatagatgtgagacgtctaaaatctacaccgttacacaacctgatagtattcaagaaaaattaggttcttatctctttatgcagtctttcgttcaggattgtataattcagggaggacgttgtcctggttcgagtatacttctgagtcatttttataactgtacgatagcgaaacttgatgctcatgggatggattttttggcaaacgcattcaataagtctggtgataacgaaaccagggcgcaggatcagggaactgtgtttgattgttgtaatttgaatagtattaaaatgaactgtggtcttggtaatgtgagttcagatgaatataagtttaaccccgaagagtatttttctgattacattgaaagaagatcgagaaatcttaagttggatgataatttttctaactgcgtagagaatatcgagaaggctgttacaacttcatttagcaagggaaattcagagaatgataatatctcctttaattgttgtgatttgaggagggccaatttagacaattattacagagaagatttgtgcaaagactgttctattgatccagattcaatttatttagaagatggtgttacaccgataaaatatatttatatgaatctggacggagctataagtaaagaccaaatacctaatttcttaaaaaaggtaagtgctatcaatagcgatgtaaaagatttttataatactgagctaaagattaaggaagaatataataacgcattttcagatttagagtcgtttttgtctacactttatgttgaaaataaatcgtacaaagagaaatatcattttaataacggtagggctgagttttttattttcaaagatatgcagtataaagcacaaaatatcattactaatatgatagaaagtgaccgaattaagtttattgaatctatcataaaaaaaatcattccaccggcagatgtaaaaatgcctactaaagattcagacaaatttattcgacaaaaacagcatgagtctcataaccaatttgatattgattataaattgaattatggtgaccttgtccccctttttgacggtgttgaagaaaaacaaattgaagtgctaaaaatccaacttgaaaatataaaaagtttcaaagcatattacgactcagaactcaataagtttgcttccgattttcgaaatttttccggtgcatttgcaattaactgggaggatttactaaaaaactatcaggaaataagagcttccattaaagattacgatgacttattgcgagaaattaaagagttaaccataaatcgggataaatcattagaggagaaatgtactttatttgataacaaaagggacaagtggaatagtcaagaagtacaggatgaagtaaaggcattaaacaagaagattgctgactgtgacaatgagatacgttctaatcttaatattgttcaaaattttagacgcgagaatcaatataaagctaataaaaaaatcagtaacgcgatgcttaatattctggattggttagaacggtatcccgatattgtgaaaaatataacccaggcttaa

SEQ ID NO: 6782 - DNA, 1662 bp, Escherichia coli
atgagtgatatagcattaacggtcagtattctggctttggtggcagtcgtcggtttgtttatcggcaacgtcaaatttcgcggcataggattaggtattggcggcgtgctgtttggtgggatcatcgtcggccattttgtttctcaggcggggatgacattaagtagcgatatgctgcatgttattcaggaatttggcctgatcctgttcgtttataccatcgggattcaggtagggccgggcttctttgcctcattgcgcgtctccggattacgcctcaacctgtttgctgttctgatcgtcatcatcgggggtctggttaccgccatcctgcataaactgtttgatattccactgccggtagtgctggggattttctccggtgcggtaaccaatacgccagcgctgggggcagggcagcagatcttgcgcgacctgggtacaccaatggaaatggtcgatcagatggggatgagttacgcgatggcgtatccattcggtatttgcgggattttgttcaccatgtggatgttgcgggttatgttccgcgtcaatgtcgagacagaagcccagcagcacgagtcttctcgcaccaatggcggcgcgctgatcaggactatcaatattcgcgttgagaaccctaacctgcatgatttagccattaaagatgtaccgattctcaacggcgacaaaattatctgctcgcgtctgaaacgcgaagaaaccctaaaagtaccttcgccagataccattatccaactgggcgatttgctgcatctggtggggcagccagcggatttacataatgcgcaactggtgattggtcaggaggtcgatacctcgctgtccacgaaaggcactgatttacgcgtcgagcgtgtggtggtcaccaatgaaaacgtgcttggtaagcgtattcgcgacctgcactttaaagaacgctatgacgttgttatctcgcgcctgaaccgtgccggggtcgaactggtcgccagtggcgatatcagcctgcagttcggcgatatcctcaacctggtggggcgtccgtccgcaattgatgccgttgccaatgtgctggggaatgcgcagcaaaaactgcaacaggttcagatgttgccggtgtttattggtatcgggcttggcgtattgttaggttctattcccgtctttgtgccgggattcccggccgcgttgaaactggggctggcgggcggtccgctgattatggcgttgatcctcgggcgtatcggcagtatcggcaagctgtactggtttatgccgccaagtgccaacctcgcgctgcgggagctggggatcgtactgttcctctcggtagtggggctgaaatctggtggggattttgtaaataccctggtcaatggcgaagggctaagctggattggttatggtgcgctgatcaccgccgttccgctgattactgttggcattctggcgcggatgttagccaaaatgaattacctgaccatgtgcgggatgctggctggctccatgaccgatccaccggcgctggcgtttgctaataatcttcatccaaccagcggtgcggcggcgctttcttacgccactgtctatccgttggtgatgttcctgcgcattatcaccccccaattactggcggtgctcttctggagtatcggttaa

SEQ ID NO: 6783 - DNA, 717 bp, Escherichia coli
atgatctacaaaagcattgcggagcggttaagaattcgacttaactccgcggatttcacgctaaacagccttcttcccggtgaaaaaaagctggcggaagagtttgcggtatcgcggatgaccatccgtaaagccattgacctgctggtagcgtgggggctggtggtccgccgccacggtagcggcacttacctggtgcgcaaagatgtactgcatcaaaccgccagcctgactgggctggtggaggtgttaaaacgccagggaaaaacggtcaccagccaggtgctgatttttgaaatcatgcctgcgcctccggccattgccagccagttacggattcaaatcaacgagcagatctacttctcccgtcgcgttcgttttgtggaagggaaaccgctgatgctggaagacagctatatgccggtaaaactgttccgtaacctttcgctgcaacatctggaagggtcgaagtttgaatatattgaacaagagtgcgggattctgattggcggtaattatgaaagcctgacgccggtgctcgccgatagactgctggcgcggcaaatgaaggtagcggaacacacgccactgctgcggatcacctcgttgtcatatagcgagagcggggagtttttgaattattcagtaatgttcagaaatgccagcgaataccaggtggagtaccatttacggcgactccacccggaaaagagttaa

SEQ ID NO: 6784 - DNA, 1617 bp, Escherichia coli
atgctcagtcaaattcaacgctttggcggcgcgatgttcacgccagtgctgctgtttcccttcgccgggattgtggtgggtcttgccatcttgctgcaaaacccgatgtttgtcggggaatcactgaccgatccgaacagtttattcgcgcaaatcgtacatattattgaagagggcggttggacggtattccgtaatatgccgctgatttttgctgtcggtttacccattggccttgctaagcaagcgcaggggcgagcttgtctggcggtgatggtgagtttcctgacctggaactatttcatcaacgcgatgggaatgacctggggaagctacttcggcgtcgatttcactcaggacgcggtggcaggtagcggtctgacaatgatggccgggattaaaaccctcgataccagcattatcggcgcaattatcatttccggcattgtgacggcgctgcataaccgtctgttcgataaaaaactgccggtgtttctcggcattttccaggggacgtcttatgtggtgattatcgccttcctggtgatgatcccctgcgcctggctgacgttgctcggctggccaaaagtacaaatggggattgaatctctgcaagcgttcctgcgttcggcgggtgcgcttggggtctgggtttacaccttcctcgaacgtattctgatcccaaccggtttacaccacttcatctacggaccgtttatctttggtccggcagctgttgaaggcggcattcagatgtactgggcgcagcatctgcaagagttcagtttgagcgccgagccgctgaaatcgttgttcccggaaggcggttttgccctgcacggtaactcaaaaatctttggtgccgtgggcatttctttagcaatgtacttcactgctgcaccggaaaatcgggtaaaagtggcgggcttgctgatccctgcaaccttaaccgccatgctggtgggaattaccgaaccgctggaatttaccttcctgttcatttcaccgttgctgtttgcggtacacgccgtgctggcggcctcaatgtcgaccgtgatgtacctctttggtgtggtgggcaacatgggcggaggtctgattgaccaggttttaccgcaaaactggatcccgatgttcagcaaccacgcggatatgatgctgacccaaatcgccattgggttgtgctttaccctgctgtacttcgtggttttccgcaccctgattctgcaattcaacatgtgcacgccgggacgtgaagatgcggaagtgaaactctactcaaaagccgaatataaagcctcgcgaggccaaaccaccgcggcagagccaaaaaaagagctggatcaggctgccggtatcctgcaagccctgggcggggtcggcaatatctccagcatcaacaattgcgcgacgcgtttacgtattgcactgcatgacatgtcacaaacgctggatgacgaagtctttaaaaagctgggagcgcacggcgtcttccgtagtggcgatgccattcaggtgatcattggtttgcatgtatcccagctgcgtgaacagctcgatagcttaattaattctcatcaatcagcagaaaatgttgccattacggaggcagtataa

SEQ ID NO: 6785 - DNA, 1323 bp, Escherichia coli
atgaccaaattctcagtggttgtcgcaggcggtggaagcacctttacgccaggcatcgtgttgatgctcctggcgaatcaggaccgtttcccgcttcgtgcactgaaattttatgataacgatggtgcgcggcaggaagtgattgccgaagcctgtaaagtcatccttaaagaaaaagcgccggacattgcgtttagttacaccaccgatcctgaagtggcattcagcgacgttgattttgtcatggcgcacatccgcgtcggcaaatacccgatgcgcgaactggatgaaaaaatcccgctgcgccacggcgttgttggtcaggaaacatgcggacccggcggaatagcgtacggcatgcgttccattggcggcgtcctggaactggtggattatatggaaaaatattcaccaaatgcctggatgctcaactactccaacccggcagccattgtcgcagaagccacgcgtcgtctgcgcccgaatgcgaaaatcctcaacatctgtgacatgccaatcggtattgaaagccggatggcgcaaattgttgggctgcaagatcgcaaacagatgcgcgtgcgctactacggcctgaaccactttggctggtggacatcaattgaagatttgcagggcaacgacctgatgccccagctgcggcaatatgtctctaagcacggttatgttccaccgcagcaagatacacatactgaagcgagctggaacgacacctatgcaaaagcgcgggatgtccaggcactggacccggatacattgccgaacacctatctgaaatattatctcttcccggattatgtcgttcagcattccaaccctgaacatacccgcgcgaatgaggtgatggagcatcgcgagaaacaggttttcgatgcttgccgcgccattacggcggcaggaaattcagcggcgggcaagctggaaattgacgaacatgcgtcatacatcgtcgatcttgcggcggcgattgccttcaacactcaggagcggatgttgctgattgtgcctaacaacggggcaatccataactttgatgatgaagcgatggtcgaaatcccgtgtctggtcgggcacaacggaccagaaccactggtggtcggcgatatcccgcagtttcagaaagggttaatgagtcagcaagtggcggtggaaaaactggtcgtggacgcctgggaacagcgttcatatcagcacctgtggcaggcgattacgttgtcgaaaacggtaccgagcgcctcggtcgccaaagctattctggatgagttgctggaggccaacaaagcgtactggccagagttacgttaa

SEQ ID NO: 6786 - DNA, 1716 bp, Escherichia coli
atgaattcgttacaaatcttgagttttgtcggttttacgctgctggtggcgatcatcacctggtggaaggtccgtaaaacagataccggatcgcaacaaggctattttcttgccggacgttcactaaaagcgccggttattgccgcttcgttaatgctaaccaacctttccacggaacaactggtcggcctttccgggcaggcctacaaaagcggcatgtcggtgatgggctgggaagtcacctctgcagtgacgctgatcttcctcgcgctaatctttttaccgcgctatctgaagcgcggcattgccaccatccccgattttctggaggaacgttatgataaaacgacgcgtattatcatcgacttctgcttcctcattgccaccggcgtctgctttctgccgattgttctctactccggcgcgttggcgctcaacagcttgtttcacgtcggggaatcgctacagatttctcacggtgcggctatctggctattggtaattttgcttggtctggcgggaattttgtatgcggtgatcggcggactgcgcgcaatggcagtggcggactccatcaacggtattgggctggttattggcgggttgatggtgccgatatttggcctgatcgcgatgggcaagggcagctttatgcagggcattgagcaactcaccaccgttcacgccgagaaattaaactcagtcggtggcccgaccgatcccttgccgattggcgcggcatttaccggtttgattctggtgaacaccttttactggtgtacaaatcagggcatcgtgcaacgcacgctggcgtcaaaaagcctggcggaagggcaaaagggggcgctgttaacggcggtgctgaaaatgctcgacccgctggtactggtgctgccagggttgattgcgtttcatctgtatcaggatctaccgaaagccgacatggcctacccgacgctggtcaataacgttctgccagtgccactggtgggtttcttcggcgcggtgttatttggtgcggtgatcagtaccttcaacggctttctgaatagcgccagtacgttattcagtatgggtatttaccgtcgcatcattaaccagaatgccgagccgcagcagctggtcaccgtcgggcgcaaatttggtttctttatcgccatcgtttcggtgctggtagcgccgtggatcgccaacgcgccgcaggggctgtatagctggatgaaacagctcaacggcatttacaacgtgccgctggttaccatcatcattatgggctttttcttcccgcgcattccagcgctggcggcaaaagtggcgatggggattggcataatcagctacatcaccatcaactatctggtgaagttcgacttccatttcctctatgtgctggcctgtacgttctgcatcaacgtggtcgtgatgctggtgatcggttttatcaaaccgcgcgccacgccgttcaccttcaaagatgcgtttgcggtggacatgaaaccgtggaaaaacgtcaagatcgcgtcaattggcatcctgttcgctatgattggcgtctatgccgggctggctgaattcggcggctacggtacgcgctggttagcgatgatcagttatttcatcgctgccgtagtgattgtctacctgatttttgacagctggcggcatcgtcacgacccagccgtaacctttactcccgacgcgaaggatagcctatga

SEQ ID NO: 6787 - DNA, 1494 bp, Escherichia coli
atgaaacgccccaattttctgttcatcatgaccgatacccaggccaccaatatggtcggttgctatagcggtaagccgctgaatacgcaaaatattgatagtctggcggcggaaagtattcgctttaattccgcctacacctgttcaccggtttgtacaccagcgcgcgccgggctgtttaccggtatctacgctaaccagtccggcccgtggaccaacaacgtcgcgccgggcaaaaacatctccactatgggacgctactttaaggatgcgggctatcacacctgttacatcggcaaatggcatctcgacggtcatgactatttcggcactggcgagtgtccgccggagtgggacgctgattactggttcgatggggcgaactaccttagcgaactgacggaaaaagagatcagcctgtggcgcaatggcctaaacagcgttgaggatttacaggcgaaccatatcgacgaaaccttcacctgggcgcaccgcatcagcaatcgggcggtagattttctgcaacagcccgcgcgcgccgaggaacccttcctgatggtggtttcgtatgatgagccgcatcacccgttcacctgtccggtggagtatttagagaaatacgctgatttttactacgaacttggcgagaaatcacaggatgacctggcgaacaaaccggaacatcaccgcttatgggcgcaggcgatgccatcgccagtcggtgatgacgggctttatcaccatccgctctattttgcctgcaatgactttgttgatgaccaaatcggacgggtcatcaatgccttaacgtcagagcaacgtgaaaatacgtgggtcatttatacctccgatcacggcgaaatgatgggcgcacataagctgatcagtaaaggagcggcgatgtatgacgacatcacccgcattccgctgatcatccgttcgccgcaaggggagcggcgacaggtcgatacgccagtcagtcatatcgatttactgccgacaatgatggcgctggcagatattgaaaaaccagagattctgccgggggaaaatatccttgccgtgaaagagccacgcggtgtaatggtggaatttaaccgctacgagattgagcatgacagctttggcggttttattccggtgcgttgctgggtgacggatgactttaaactggtgctcaacctcttcaccagtgatgaactttacgatcgccgtaatgattcaaatgaaatgcataacctgatagatgatatccgttttgccgacgttcgccgcaaaatgcatgacgccttattggattacatggataaaattcgcgatccgttccgcagttaccagtggagtctgcgtccgtggcgtaaagatgcacgaccgcgctggatgggggcgtttcgtccacgcccacaagatggctattcgccagtggtacgcgactatgacaccggcctaccgacacaaggggtgaaggtggaagagaaaaaacagaagttctga

SEQ ID NO: 6788 - DNA, 450 bp, Escherichia coli
atgggtatcatagcgcaaaataaaatcagttcattgggcatgctgttcggtgccatcgctttaataatggggattatccatttttcattcggccctttttccgcaccaccgccaacgcttgaaagcatcgtggcggacaaaacggctgaaattaaaagaggtcttctcgccggaataaaaggcgaaaaaattaccaccgtggagaaaaaagaggacgtagatgtcgataaaatcctcgatcaaagcggtatcgcactggccattgctgcgctactttgcgcatttattggcggtatgcgtaaggaaaatcgctggggcattcacggcgcgctggtttttggcggcgggacgctggctttccataccttgctttttggtatcggcatcgtgtgcagcattttgctgatattccttatcttttccttcctgaccggcggttcactggtttaa

SEQ ID NO: 6789 - DNA, 2160 bp, Escherichia coli
atgctttttagcttttttcgaaatgtgtgccgtgttttgtatcgcgttcgcgttacgggtgacaaccaggcactgaagggcgagcgcgttctaatcacgcctaatcacgtctcttttattgatggcatactgctggcattgtttttacccgtgcgtccggtatttgccgtttacacctcaataagccaacagtggtatatgcgttggctgaaatcatttatcgactttgttcctctcgacccgacgcagcctatggcgattaaacatctggtacgtctggtggaacagggccgaccagtggtgattttccctgaaggacgaatcaccaccactggctcgctgatgaaaatctacgatggcgcgggatttgtcgcggcgaagtctggtgcaacggttattcctgtgcgtattgaaggggcggaacttacgcacttcagccgcctgaaaggtctggttaaacgtcgcctgttcccgcaaattacgctgcatattttgccaccaacgcaggtggagatgccggatgcgccgcgtgcccgtgaccgtcgcaaaatcgctggcgaaatgctgcatcaaataatgatggaagcgcgtatggcggtgcgcccgcgtgaaacgctgtacgaatctttactgagcgcaatgtaccgcttcggagccgggaagaaatgtgtcgaagacgtcaactttaccccagactcctatcgcaaattgcttactaaaacgctgtttgttggacgcatccttgaaaaatacagtgttgaaggcgaacgcatcggcttaatgctgccaaatgcaggcatcagtgcggcagtgatttttggggccatcgcccgtcggcgcattccggcaatgatgaactacaccgctggggtaaaagggctgaccagtgctattacggcggctgaaatcaaaaccatcttcacttcccgccagtttctcgataaaggaaaactctggcatctgccggagcaacttactcaggtacgctgggtctatctggaagatttaaaagcagatgtcaccactgccgacaaagtgtggatcttcgctcatttgctgatgccgcgtctggcacaggttaaacagcagccggaagaagaggcgctgatcctttttacctccggttctgaaggccatccgaaaggcgtcgtccatagccataaaagcattctggcgaacgtcgagcagattaaaacgattgccgacttcactaccaacgatcgctttatgtcggcgttaccgctgtttcactcctttgggctgacagtaggcctgtttacgccactgctcacaggtgcagaagtgttcctttatccaagcccgctgcattaccgcattgtgccggagttggtgtatgaccgcagttgcaccgtgttgttcggtacctcgactttcctcggtcactacgcgcgtttcgccaacccgtatgacttctatcgtctacgctatgtggtggcaggcgcagaaaaactacaagaaagtaccaaacagctttggcaggataaatttggcctgcgcatccttgaaggctacggtgtgaccgagtgcgcgcctgtcgtttccatcaacgtaccgatggcgacgaaacccggtacggtagggcgtattctaccaggaatggatgcgcgcctgttgtcggttcctggtatcgaagagggcggacgcctgcaactgaaagggccgaacataatgaacggctatctgcgggtggagaagccaggtgtactggaagtgcccaccgccgagaatgttcgcggcgaaatggagcgcggctggtatgacactggcgatattgtgcgtttcgacgagcagggctttgtgcagattcagggccgcgcaaaacgctttgccaaaattgcaggcgaaatggtatcgctggaaatggtggaacaactggcacttggtgtttcgccagataaagtccatgccactgcgattaagagcgatgccagcaaaggcgaggcgctggtgcttttcaccacagataacgaactgacgcgcgataagttacaacagtatgcccgcgagcacggcgtgccggagcttgctgtaccgcgcgatattcgctatctgaaacagatgccattacttggcagcggcaaacctgactttgtcacgttgaaaagctgggtagacgaagcggaacaacacgatgagtga

SEQ ID NO: 6790 - DNA, 1419 bp, Escherichia coli
atggttactatcaatacggaatctgctttaacgccacgttctttgcgggatacgcggcgtatgaatatgtttgtttcggtagctgctgcggtcgcaggattgttatttggtcttgatatcggcgtaatcgccggagcgttgccgttcattaccgatcactttgtactgaccagtcgtttgcaggaatgggtggtcagtagcatgatgctcggcgcagcaattggtgcgctgtttaatggttggctgtcgttccgcctggggcgtaaatacagcctgatggcgggggccatcctgtttgtactcggttcgatagggtccgcttttgcgaccagcgtagagatgttaatcgccgctcgtgtggtgttgggcattgctgtcgggatcgcgtcttacaccgctcctctgtatctttctgaaatggcaagtgaaaacgttcgcggtaagatgatcagcatgtaccagttgatggtcactctcggcatcgtgctggcgtttttatccgatacagcgttcagttatagcggtaactggcgcgcaatgttgggggttcttgctttaccagcagttctgctgattattctggtggtcttcctgccaaatagcccgcgctggctggcggaaaaggggcgtcatattgaggcggaagaagtattgcgtatgctgcgcgatacgtcggaaaaagcgcgagaagaactcaacgaaattcgtgaaagcctgaagttaaaacagggcggttgggcactgtttaagatcaaccgtaacgtccgtcgtgctgtgtttctcggtatgttgttgcaggcgatgcagcagtttaccggtatgaacatcatcatgtactacgcgccgcgtatcttcaaaatggcgggctttacgaccacagaacaacagatgattgcgactctggtcgtggggctgacctttatgttcgccaccttcattgcggtctttacggtagataaagcagggcgtaaaccggctctgaaaattggtttcagcgtgatggcgttaggcactctggtgctgggctattgcctgatgcagtttgataacggtacggcttccagtggcttgtcctggctctctgttggcatgacgatgatgtgtattgccggttatgcgatgagcgccgcgccagtggtgtggatcctgtgctctgagattcagccgctgaaatgccgcgattttggcatcacctgttcgacgacgacaaactgggtgtcgaatatgattatcggcgcgaccttcctgacactgcttgatagcattggcgctgccggtacgttctggctctacactgcgctgaacattgcgtttgtgggcattactttctggctcattccggaaaccaaaaatgtcacgctggaacatatcgagcgcaaactgatggcaggcgaaaagttgagaaatatcggcgtctga

SEQ ID NO: 6791 - DNA, 1782 bp, Escherichia coli
atgcgtagttttagccaactgtggccgactctcaagcgtctgttagcgtacggttcgccgtggcgtaaaccgctggggattgcggtcctgatgatgtgggttgcggcagcggcagaagtcagtgggccgctgcttatcagctattttatcgacaatatggtagcgaaaaataacctgccgttgaaagtggttgcagggctggctgcggcgtatgttgggctacaactgtttgccgccgggctacattacgcgcagtcgctgctgtttaatcgggcggcagttggcgtagtgcaacagttgcgtaccgacgtgatggatgctgcgttacgccagccattaagcgagtttgatacccaacctgtcgggcaggtgatttcccgcgtcactaatgacactgaagtgatccgcgacctctacgttaccgtagtggcaactgtcctgcgtagcgccgcactggtgggcgcgatgctggtggcgatgttcagcctcgactggcgaatggcgctggtggcgataatgattttcccggtggtgctggtggtaatggtgatataccagcgttacagcacgccgattgtccgtcgtgtgcgcgcctatctggcggatatcaacgacggctttaacgaaatcatcaatggcatgagcgttatccagcagttccgtcagcaggcgcgatttggcgaacgtatgggtgaggccagtcgttcacactatatggcgaggatgcaaaccctgcgcctcgacggttttctgctgcgtccgctgctgagtctgttttcatcgctcattctttgtgggttgttgatgctgtttggcttctccgccagcggcaccattgaagtgggcgtgttgtatgcatttatcagctatcttgggcgacttaacgaaccattaatcgaactgaccacgcagcaggcgatgctgcaacaggctgtagttgctggtgagcgtgtgtttgaactgatggacggaccgcgccagcaatatggcaatgatgatcgcccgttacagagcggcaccatcgaagtcgataacgtgtcatttgcttatcgcgatgacaatatggtgctaaagaacattaatctctctgtgccttcgcgcaattttgtggcgctggtcgggcataccggcagtggtaaaagtaccctcgccagtttattgatgggctattacccgctaacggaaggtgagattcgccttgatggtcgtccattaagttcgctaagtcacagcgcgctgcgccagggcgtggcaatggtgcagcaagatccggtggtgctggcggataccttcctcgccaacgtgacgctggggcgtgatatctccgaagaacgcgtctggcaggcgctggaaaccgtgcaactggcggagctggcgcgtagcatgagtgatggtatttacacgccgcttggcgagcaggggaataatctctcagtcgggcaaaagcaactgctggcactggcacgcgtgttggtggagacgccgcaaatcctgatccttgatgaggcaacagccagcattgactccggtactgaacaggcgattcaacatgctctggcggcggtgcgtgaacataccacgctggtggtgattgctcaccgcttatcaactattgttgatgccgacaccattctggtgcttcatcgtgggcaagctgtggagcagggcactcaccagcaactgctggcggcccagggacgctactggcagatgtatcaactgcaacttgcgggcgaagagctggcagccagcgtgcgtgaagaggaatcattgagcgcctga

SEQ ID NO: 6792 - DNA, 312 bp, Escherichia coli
atgcctggaaaaacagtcgctctacccgatatcgataaaacgctgaaaaatgcgcgggttgaactcaaaaccagtcccgacgccaaaaacaaacttcgtgaagctgcgcaagccgttggggtagatttaagcgcttttattttgagcgcagctatggaacgcgccgaaagtgtgcttgataaccaacgtcgccgtgagctttcgaatcaaagctgggaactgatgaaccaactcatcgctgaacctgctcaaccgacgctcgccctcaaggcgttaatgaaaaggaaaaacagcgatggtcgacaagcatga

SEQ ID NO: 6793 - DNA, 543 bp, Escherichia coli
atggtcgacaagcatgaagagattactctgcccatagtcctctcctgtaattatcagtctgatattacttatcctgggcaaaaacagtttgattgcggtaaccctgttatcgataaatttgtacgcgcatcgctaaagaaaagtgtgcgtaatagcgactgtgctgctaaagctcttattgacagacaaagtggtgaactgattggcatctgtacttttacggcatattcgctggaaaaacaacgcgtttctggcgtccttcagggttcacaaccttcagagattggtgttgtcagattagtcatgttaggggtagcgcggaaatatcaaaagcggggctttggtcaggacctactatgtgatttttttgaacatgtaaaaataattcaccgtgcattaccaattaaaggggtttatcttgatgctgaccctgccgccattaacttttatactcgcctcggctttgttcagctttcagcgaggcccaatgttttcggtgctgtaccgatgtttttagcgattcagcatattctcgcggcttag

SEQ ID NO: 6794 - DNA, 936 bp, Escherichia coli
atgttaactaaaagaatattattttctttaatgctaatagtttcaccatgcgtggtggcaagcgagaaagcgcatgaattgtatgacagcatatacggtggtcaacctgcgcccgatgttataaatagactgcataaaatggctgaattgggagatgtcgacgcgcagagcctgttaggctgggaatattatcagcctcgctttgataccaaacctgatgttcaggaagcgattaaatggtttgagttagccgctaaacacggtgatagagaagctccgttagcgctggggagtatctactacgacggtgagctggtgcgggtggattatgccaaagcgtatgcactatttaatcaggccgcgcaatacggtgtgaatttagcatggtccaggttgggcatgatgtacgccaatggtcagtatgttgaggtagattgtaagaaagcgaaggaatatcttgataaaggtgtccacatttatggtggtccggaagactttctggctacatgtcgaaaagacatgattgacagaaaaacggttgacgatacgttacccgtgatcacggttacccgttctgggatgcgggataattttttagataaaggtttttcctgcatggatagcctcttcgccaccaccaataaattaggcgaagtggccaatcttcgcgtgacattcagcattcgtagcccatccggtaaggagattaaccaaacggttggcttcgcgcctttcggtttaaaccggctgaatattagctttactgattacatatttgattcatttaccagtaattcgtctctaattctttataaaccggaatttgagcgaaaatcttgtgcaactgtaaggaccacaatcgttgccgcaacggcaaccattaacggcaaggatgtggagttgctgaaagcgggggcaattgaacaaaagtggtaa

SEQ ID NO: 6795 - DNA, 912 bp, Escherichia coli
atgaaaattaccgtattgggatgcggtgccttagggcaattatggcttacagcactttgcaaacagggtcatgaagttcagggctggctgcgcgtaccgcaaccttattgtagtgtgaatctggttgagacagatggttcgatatttaacgaatcgctgaccgccaacgatcccgattttctcgccaccagcgatctgctcctggtgacgctgaaagcatggcaggtttccgatgccgtcaaaagcctcgcgtccacactgcctgtaaccacgccaatactgttaattcacaacggcatgggcaccatcgaagagttgcaaaacattcagcagccattactgatgggcaccaccacccatgccgctcgccgcgacggcaatgtcattattcatgtggcaaacggtatcacgcatattggtccggcacggcaacaggacggcgattacagttatctggcggatattttgcaaaccgtgttacctgacgtcgcgtggcataacaatattcgcgccgagctgtggcgcaagctggcagtcaactgtgtgattaatccactgaccgccacctggaattgcccgaatggtgaattacgtcatcatccgcaagaaattatgcagatatgcgaagaagtcgcggcagtgatcgaacgcgaagggcatcatacttcagcagaagatttgcgtgattacgtgatgcaggtgattgatgcaacagcggaaaatatctcgtcgatgttgcaggatatccgcgcgctgcgccacaccgaaatcgactatatcaatggttttctcttacgccgcgcccgcgcgcatgggattgccgtaccggaaaacacccgcctgtttgaaatggtaaaaagaaaggagagtgaatatgagcgcatcggcactggtttgcctcgcccctggtag

SEQ ID NO: 6796 - DNA, 189 bp, Escherichia coli
atgaatactaacgtttttcgactgctcctgctgggaagcctgttcagccttagcgcctgtgtgcagcaaagcgaagtgcggcagatgaaacacagcgtcagcacactgaaccaggagatgacgcaactcattgacatcctccacgccctgaaggacgtggatccctgctacgttcaggctgtcgcctga

SEQ ID NO: 6797 - DNA, 1269 bp, Escherichia coli
atgtttgccctctgtgatgtaaacgcgttttatgccagctgtgagacggtgtttcgccctgatttatggggtaaaccagtggttgtgctatcgaataatgacggttgcgttatcgcccgaaacgctgaggcaaaggcgctgggtgttaaaatgggcgatccctggttcaaacaaaaagatctgtttcgtcgctgtggcgtggtttgctttagcagcaattatgagctttacgcagacatgagcaatcgggtgatgtcgacgctggaagaactatcgccccgcgtcgagatttacagtattgatgaggcattctgcgatctgaccggtgtgcgtaattgtcgcgatctgactgattttggcagagaaattcgcgcaacggtgctacaatgtacccatcttactgttggtgtggggatcgcccagaccaaaacgctggctaagcttgccaatcatgcggcaaaaaaatggcagcggcagacgggtggggtggtggatttatcaaatctggaacgccagcgtaaattaatgtctgctctccccgtggatgaagtctgggggattggacggcggatcagcaaaaaactggatgcgatggggatcaaaaccgttctcgatttggcggatacagatatccggtttatccgtaaacattttaatgtcgtgctcgaaagaacggtgcgtgaactgcgcggcgaaccctgtttgcaactggaagagtttgcaccgacgaagcaggaaattatctgttcccgttcgtttggtgaacgcatcacggattatacgtcgatgcggcaggccatttgtagttacgctgcccgggcggcggaaaaacttcgcagcgagcatcaatattgtcggtttatctccacgtttattaagacgtcaccatttgcgctcaatgaaccttattacggcaatagcgcgtcggtaaaactgctgacgcccactcaggacagcagggatatcattaacgccgctacgcgatctctggatgccatctggcaagcgggccatcgctaccaaaaagcgggcgtgatgctgggagatttcttcagtcagggagtcgcgcagctcaatttattcgatgacaacgcaccgcgccccgggagtgagcaattgatggcggtaatggatacgctaaatgctaaagagggcagaggaacactctattttgccgggcaggggatccagcaacaatggcagatgaagcgtgccatgctttcaccacgttatacaacgcgaagttctgatttactgcgggtcaaataa

SEQ ID NO: 6798 - DNA, 1299 bp, Escherichia coli
atgcgagttgtcatactgggaagtggtgtggtaggcgttgccagcgcctggtacttaaatcaggcaggacatgaggtcaccgtcattgatcgggagccgggggccgccctggaaaccagtgccgcgaatgccgggcaaatctcccccggatatgcagcaccgtgggcggcaccaggtgtgcctttaaaagcgattaaatggatgttccagcgccatgcgccgctggcggttcgtctcgacggtacgcagttccagttgaaatggatgtggcaaatgttacgtaactgcgacaccagccactacatggaaaacaaagggcggatggtgcgtctggcggaatacagccgtgattgcctgaaagcattgcgcgccgaaaccaatattcagtatgaagggcgtcagggtgggacgctgcaactgttccgtaccgaacaacagtatgaaaatgcgacccgcgatatcgccgtgctggaagatgccggcgtaccgtatcagctgctggaatccagccgcctggcggaagtggagcccgcgctggcagaagtggcgcacaaactgacgggggggctccagctgcccaatgatgaaaccggagactgccagctgtttacccagaatctggcgcggatggcggagcaggcgggggttaaattccgctttaatacgcccgttgaccaactactttgcgacggcgagcaaatctacggcgtgaagtgtggcgatgaagtgattaaggccgatgcgtatgtgatggcgtttggttcttactcgacggcgatgctcaaaggcatagttgatattccggtgtatccgctgaaaggctactcgctgactattccgattgcacaggaagatggtgcgccggtgtctaccatccttgatgaaacctacaaaatcgccattacccgtttcgataaccgcattcgtgttggtggaatggcggaaattgttggctttaacaccgagctgttgcaaccgcgtcgtgaaacgctggagatggtggttcgcgatctctatccacgcggcggtcatgtcgagcaggcgactttctggactggtctgcgcccgatgacgccagacggcacgccggttgtcgggcgtacacgctttaaaaatctgtggctgaataccggtcacggcacgctcggctggacgatggcttgcggttccggtcagttgttaagcgatctgctctctggtcgcacgccagcgatcccgtatgaagatctaagcgtagcgcgctacagccgtggatttacgccatcacgcccgggccatttacatggcgcacacagctaa

SEQ ID NO: 6799 - DNA, 1437 bp, Escherichia coli
atggctagctttaaagacatctgcccattcgcccccgccattcctccatcttccgttaacccaggcgtacgacgcccgcctgggcggctcttcctgtcggcggaactcaagaatcaaattttgcagaacatgaagtatctcagcccgcaaaaattcagctggggtgatgccccctggcagatcattgaccttagtaccgcgggcaaagtgaacatacaggtggacaacaataccatcattacgttggggactcccctgaatcagcaacataacgagttcatgatggtcgccaaatggtgcgaatgggctatacagcaggatggtttgcaagaaaacctgcaaaaaaaactgcacgaggtcctggaagaaaaccggcaaaacaaacagtcagaaattccccaagaagacctgaaagaaaggctgaaagaaatcaaggaagatatcctgaaagaaaaccagtcagcaagccagattgaagaccgggcagaagcattgcgcagaatgaaggaatgtctcataacaagacagagtatgctcgatcttagcaaccttggactgacttcactccctgaaaatttgcctccacatctgattgaatttaactgcagtagaaacatgttgaccgcgttaccggaggtaatgccaaaggggctgagagtgcttgaatgtatggagaactttttgatcttgttaccgaaggtgcagcccccgaaactgatggtactgaagtgctatgaaaactatattatctggctgcctgagctgtcgactaacctgagagtgattgactgttctgaaaacttcttgcaatttttaccgccgtcgatgccccagtacctgtatacactgcgctgtgctttcaacagtattagcttaatacctgatgagatgctggagaacttgactcgcctgaaggtatttgactgttctagtaacgatttgatctcttcaccacggctgccgcccaaactaatcatatactactgtggagaaaaccagtttaaaactgtaccggtgccgcagccccgaagcctgaaggtgtttagctgtaatggtaacccgtgggacaaagacaatttaccgacgctgctcaaagccgtcgagggcctgaaaaaccaggagggtctggaggagcttttggactttttgcacaaggaaggtctggttgacctggaaggactcgaggagctggaggacctggatgaccttatggatctggagttcctggatgacccggaactcctggagcgcgtgaaggtacaggaggacctggagctcctggatcaacagttgggcctgttgagtctggaaaaacaacaggactcgcagcctgttaatcaacaatctgaacatgaacccgaatctgcatcaagggtgaagcgtgatttatctgaagtcgagttcgagtcaacaatgaaacgtaagcgttttatgtag

SEQ ID NO: 6800 - DNA, 153 bp, Escherichia coli
atggttgacggggatacaggtaatgcggggctggtttttcttcacctgttgcagtcggaagaagcccttacgctgactttcttgagccggtgttttgagttcattagccagagcctgcaatggtttgtcatccataatttaactttcttctga

SEQ ID NO: 6801 - DNA, 1737 bp, Escherichia coli
ttggatgccacaacaataattagccttttcatcttaggatccatccttgtcaccagcagtatattacttagttcattttcttcccgtcttggcattcctattctggttatttttctggcgatcggcatgctggcaggagtcgatggcgtcggcggtatcccgtttgataattaccccttcgcctacatggtaagtaacctggcgctggcgattattttgctcgacggcggaatgcgcactcaggccagttcctttcgtgtggcattaggaccggcactgtcgctggcgacgctgggcgtgcttatcacctctggtttaaccggcatgatggcggcgtggctgtttaatcttgatttgattgaaggcttattaatcggcgctatcgtcggctccaccgatgctgcagcggtcttttctctgctgggtggtaaggggcttaacgaacgtgttggctcgacgctggaaattgaatccggcagtaatgatccaatggcggtctttctgacgattaccctgattgcgatgatccagcaacatgaaagcagtgtcagttggatgttcgtggtcgatattctgcagcaatttggcctcgggattgtcatcggtcttggcggtggttatttactgctgcaaatgattaatcgcatcgccctgcccgccggtttatatccattgctggcattaagcggcggtattttaatttttgctttaaccacggcgctggaaggcagcggtattctggctgtttatctgtgcggttttctgctgggtaatcggccgattcgcaaccgctacggcatcctgcaaaatttcgacggcctcgcctggctggcgcaaatcgccatgttcctggtgctggggctgttggttaacccaagcgatctgctacctattgccattccggcgctcattttgtccgcatggatgattttcttcgcccgtcctctttcggtatttgccggattgctaccattccgtggcttcaatctgcgtgagcgcgtgtttatcagctgggtgggattacgcggcgcggtgccgattattctggccgtgttcccgatgatggcggggctggagaatgcacgtctgttctttaatgtcgccttctttgtggttctggtttcactgctcttgcagggaacatcactctcgtggacggcgaaaaaagccaaagtggtggttccgcccgtcggacgtccggtgtcacgcgttggcctggatattcatccggaaaatccgtgggagcagtttgtttatcaattgagtgccgataaatggtgcgtgggcgcggcactgcgcgatttgcatatgccaaaagagacgcgtattgcggcactgtttcgtgataaccagctgcttcatcctaccggcagcacccgactgcgcgaaggcgatgtattgtgtgtaattggtcgggaacgcgatcttccggcgctcggtaaactgttcagccagtcgccaccggtcgcgctggatcaacgcttctttggtgacttcattctcgaagccagcgccaaatatgctgatgttgcgctgatatatggcctggaagacgggcgagaatatcgtgataagcaacaaacgctgggtgaaattgtccagcagttgttaggcgcggcaccggttgtcggtgaccaggtagagtttgccgggatgatctggacggtggccgagaaagaagataatgaagtgttgaagattggcgtacgggtggctgaagaggaagctgaatcttaa

SEQ ID NO: 6802 - DNA, 612 bp, Escherichia coli
gtgaaattgagatggtttgcctttttgattgtgttattagcgggttgttcatcaaagcatgactatacgaacccgccgtggaacgcgaaagttccggtgcaacgtgcgatgcagtggatgccaataagccagaaagccggtgcagcctggggcgtcgatccacaattgatcacggcgattatcgctatcgaatcgggtggtaatccgaacgcggtgagtaaatcgaatgccattggtttgatgcagttaaaagcttcaacctccggacgtgatgtttatcgccgtatgggctggagtggtgagccgacgaccagcgagctgaaaaatccggagcgtaatatttcaatgggggcggcttacctgaatattctggaaaccggcccgctggcaggcattgaagatccgaaggtactgcaatatgcgctggtggtgtcatacgctaacggggcaggtgcgctgctacggactttctcgtcagatcggaaaaaggcgatcagcaaaatcaacgatctggatgctgacgagttcctcgatcacgtagcgcgaaatcatcctgcgccgcaggctccgcgctatatctacaaacttgagcaggcactggacgcgatgtaa

SEQ ID NO: 6803 - DNA, 1971 bp, Escherichia coli
atgagactcaaaaaacgttatctctgcacagcattatcacttgcctttacccagcaggccgtagcggctcaggagagtgacacgctgaccgtatggtccagtccggtatcatcaacgacgaccaccgttctcgatcaacccaccatgaaggccctggataaacagaatgtcgctcaggcattaagtgtcgtccccggcgtggtgctgcaaaagtcaggtagccgcaacgaagaacaggtcaaagttcgtggctttgatagtcgtcaggtgccggtctatttcgacggtgtgcccatttatgttccctatgacggcaacctcgatctggcgcggattctgaccaacaatttgggggcagttgaagtttccaaagggtattcgtcgctgcttcaggggcctaatcagatgggcggagccattaatatcaccacccagaagccaacaaaacctctggaagcaaatctgggatatcgccagggatggagccgtagccaggacaatgcctacgatatgcatgcttcatttgccgccagcagcgatctggggtatttgcaagtcagcggtagccagctaaagcaggattttctcggcctgccgcatggtgtaaataatgatattgcaggcaaacacggcaagatgattaattcatcggctgatgataaacgcggcattgtgaagctcggttttacaccacgcgaaaacgatgaatacacagtgacttacattaagcaggatggtgaaaaagataacccgccatacagtggaaatagtggtcaaaaatcacgctactggcagtggccagagtatgacaaagaaagtttttattatcagggaacgacccaactaaacgatcgttttaccctgaaaagtcggctgtatcgcgacacctttgaaaatacgctaatgatgtacaactcgctggctgatttgaaaaataaaaaaggcagctacagccattattccgattacagcgacggtgccgggttacaactggcagccgatgtgcgtgaaaacgatctgctgtcgtttgccgttaactggaaagatgacgtacaccgggaaaaaggtgcgccacacgccgcttacgatcgctatgaagatcgtacctggtcgctcgccagtgaatatcaatgggctgctgccgataatgtcgatgtcgtggctggaatcagctatgactggcgcgatagcgtagaagcgaaaaaacatgagaaagatggcagtatcacccattatgacgacaacaatcagtcagcttttaactggcaggtgatggggaaataccactttgccaatgaagacacgctggcgctttcgtactatgaccgcacacgctttccgacgctgaaagaacgctataccacgtccaaacctgcgtataaccagatagcgattgttaacccgcagctcaaaccggaacgcgcgcgcggggtggatttaacctggaatggtgccttcacgcacgactgggggtttgaggtcagcgtttactataaccgggtgagtgatgccatcctctcgcacaatatcgatgccgataccattcaaaatcagaacagcggcacggtggattacagcggtctggatgccggtattaaggggaaaatcagcaatatactggatgtaggattgagctacgccctgatccacgctgacgccaaacgcaaagacatcggcaagataaccgatctgccaacgcagacaatgaccgcatggatgactctcaaaccgtgggagccgttaagcgtaacgctgtcggaagaggcgcgttcctccagctacagcaacagtgacggttcacaaaaagccgccggttttgcggtgactcacattcgagccgattacaccttaggtcatggcttcagcgtcaatgcgtcggtcaataacctgtttgataccaaatatgcctacagtgaagggtttattgaagaaggtcgcaatttctgggcaggtatcgagtatacgttctga

SEQ ID NO: 6804 - DNA, 981 bp, Escherichia coli
atgagaaccgtaaacggatgtattttgctgctggcagctatcagtatcacttttgccgccgtaagtggggcttatcatctcgatatgcagcaattgctggcgctcattcttcgtcaagaaaatgttcctgtgcaggaacaaattgtcttctggcaaatccgcgtgccgcgtattcttgctgcgctgtttctgggcgcggcgctggcaggggccggaaccacctatcagggaatgttccgtaatcccttagtgtcaccggatattttaggcgtctccgccggtgccggacttggtgcctgcgcggcaatcctgtggggattatccattgtttacatccagctgtacgcattttgcggcgggctgatggtggtcgcgggcgtctggttgattacgcgtcgggtgacccgccacgatccgatcttaaccctggtgctggtaggtattgcgttaggcacgttgtgcggagcggggatatcgctaataaaaacgctggccgatccttacacccagttaccgtcaattaccttctggttgctgggggggctgtccaccgtgaccttacgcgatctctgctatgctgcaccgatcattctcataggctccttgcccctgttttttctccgctggcgcatgaatttactcacactttccgacgacgaagcccgttcgctgggactgaacgtgacacgtctgcgctttggattaattgtctgcgccacactcatcaccgccagcacggtagcaatagcgggcataattggttgggtcggcctggtcgttccgcacattgcccgcttgttgaccggtcataaccatcagcagctgttgcccatggcaatgtgtactggcgcgattctgctcctgcttaccgatacgctggcacgcagcattggaacaacagaaatcccacttggcattctgaccgcttttgttggtgcaccgtttttcctgtttttgttgttacgcggaggtcgccagtga

SEQ ID NO: 6805 - DNA, 414 bp, Escherichia coli
atgtcactaaccagacggaggtttacacagattcttgcgtcgacattgttcctgcatcatctgccgtcctttgcacaatcagtcaaattctgggcctcactgacgcttcccgaagcccaaaacattacacgcatcgtcagcgcaggcgcgcccgccgatttactattgctggctgtcgcgccagaaaaaatggtcggtttttcctcttttgattttgcccgtcaggcattaattccattgccagagcacattcgccagttccccaggctgggacgactcgccgggcgcgccagcacactctcgctggaagggcttatggcgttacatcccgatttggtcgttgattgcggcaatacggatgaaacctggatctcccaggcacggcaggttagcgaacagacacaaataccctag

SEQ ID NO: 6806 - DNA, 1335 bp, Escherichia coli
atgagccataaacctgcgcatttattattggtcgatgacgatccgggattgctgaaactgcttggcctgcgtctgaccagcgaaggctacagcgtggtcacagctgaaagtggcgctgaaggattacgggtactgaatcgcgaaaaagtagatttagtcatcagcgacctgcgaatggatgaaatggatggtatgcagctatttgctgaaatccagaaagtgcagcctggaatgccggtaattattcttaccgcgcatggttctattcccgatgccgttgcagcaacacagcagggcgtttttagtttcctcaccaagcctgtcgataaagacgcgctatatcaggcaattgacgatgcgctggaacaatccgcgccagccaccgacgaacgctggcgcgaggcgattgtcacccgcagcccgctgatgctgcgtttgctggaacaggcgcggctggtggcgcaatcagacgttagcgttttgattaacggccagagcggcaccgggaaagagattttcgcccaggctatccacaacgccagcccgcgcaacagcaaaccatttattgctattaactgtggcgcattgcccgagcaattgctggagtcggagctgtttggtcatgcgcgtggcgcgtttactggcgctgtcagcaatcgcgaaggtttattccaggcggcggaaggcggtacgctatttctcgatgagattggcgatatgcccgcaccgttgcaggtcaaactgctgcgcgtgttgcaggagcgtaaagtgcgcccgctgggcagtaaccgcgatattgatatcgacgtgcggattatttctgccactcaccgcgacctgccaaaagcgatggcgcgcggggaattccgcgaagatctctattaccgcctcaacgttgtcagcctgaaaattccggcactggcggagcgcacagaagacattccgctactggcaaatcacctgttgcgccaggcggcagagcgacataaaccgtttgtccgcgcgttctccaccgatgcgatgaaacgcctgatgaccgctagctggccgggtaatgtgcgccagttggtcaacgtgattgaacagtgcgtggcgctgacctcatctccggtgattagtgatgcgctggtggagcaggcgctggagggtgaaaatacggcgctgccaacctttgttgaggcacgtaatcagtttgaactcaactatttgcgtaagctgctgcaaattaccaaaggcaacgtcacccacgcggcgagaatggcggggcgcaaccggacagaattttataaactgctttcccgacacgagctggatgcaaacgatttcaaggaatga

SEQ ID NO: 6807 - DNA, 669 bp, Escherichia coli
atgaaaaagcaccttctgcctctcgctttgctgttatccggaatatctccggcccaggcgctggatgtcggcgatatatcatcgtttatgaacagtgacagcagcacgctgagcaaaacgatcaaaaacagtaccgacagtggtcgcctcatcaatatccgtctcgaacggctctcttcaccgcttgacgacgggcaggttatctcaatggacaagccggatgagttgctactcactcccgctagcttgctgctacccgcccaagccagcgaagtgatccgcttcttctataagggacccgcagatgaaaaagagcgctactaccgcattgtctggtttgatcaggccctcagtgatgcgcagcgcgataatgccaaccgcagcgctgtggccactgcttccgcccgcatcggcaccattctggtcgtcgcaccccgccaggcaaactaccactttcagtacgccaacggctccctgacaaatacaggaaatgcgacgctgcggatcctcgcctacggcccctgcctgaaagccgccaatggtaaagagtgtaaagagaattactacctgatgccgggcaagtcgcgtcgttttacccgcgtggacacggcggataacaaaggacgggttgcactttggcagggtgataagttcattcccgtgaaatag

SEQ ID NO: 6808 - DNA, 243 bp, Escherichia coli
atgacaaaaaaacacctatcactgttttctccttttatgctgacagaaaaaataaagccatgtaatcgtatcgttatggctcctatgacgacctggtcagctaatcctgatggaaccatctctgagcaaaaactcgaatattataaatgtcgctcacaaaatattggtttagtaattacaggatatacctatgtcacgccaaggaaattcaggcatcgaaaggaactggctggtttccgttaa

SEQ ID NO: 6809 - DNA, 858 bp, Escherichia coli
atgatcaggcagaagattctacagcagctcctggagtggattgagtgtaatcttgagcaccctatttcaatcgaagatatcgcacagaaatctggctacagcagacgcaacatccagcttctgttccgaaatttcatgcatgtgcctttgggagaatacattcgcaaacgaaggctttgtcgtgccgccattcttgtccggctctccgcgaaatctatgcttgatattgcactctctttgcattttgattcacagcaatcattcagccgcgaatttaaaaagttattcggctgctctccccgtgaataccgccaccgtgattattgggatctcgcaaatatcttcccttcttttttaatacgtcaacagcaaaagacggagtgtagattagtcaactttcctgagacacctatttttggcaattcatttaaatatgatattgaagtgtcgaataaatcaccggatgaagaagtcaaactgcgacgtcatcatttagccagatgtatgaagaattttaagacggatatctatttcgtctccacgttcgaaccgtcaacaaaatcagtcgatttgctcacagttgaaacttttgccggtacggtatgtaaacaaaccgattcagagatgccaaaagagtggataattaaccgaggactgtatgcctctttccgctatgaaggtgagtgggagcactaccctgaatgggcgcgaaacctctatctgatggaattacctgccagggggttagccagagtgaacggcagtgatattgagcgattttattacaatgaagatttcgtagaaaaggatagcaatgatgttgtttgcgaaatatttatccctgttcgtccggtttag

SEQ ID NO: 6810 - DNA, 1179 bp, Escherichia coli
atggcacttacagccagacaggtcgaaacagccagacctaaagaaaaagactataaactctctgacgaacgtggtttatatctgctggttaaaaccacgggagcccgctactggcggcttaaataccggatagcaggaaaagagaaaaaactgtccctcggcgtctatcccgatgtttcccttgctgaagccagaatcaaacgcgacgatgcccgaaaaattatctccgaagggggtgacccgggcgaaaagaagcgaaaggaaaaactcactcagaaaatctctgccaccaatacgttccatgccctcgctacggaatggcaccagcataaatctttatcatggtctgaaagttacgccagaagcgtactggaggcgctggataaagatattttcccgtatctgggcaaacgaagcgttactgatatcctcccgctggaaatgctggaaattctgcgtcgcatagaaaaacgtggctcactggaaaaactgcgtaaggtccgccagtactgtaatcagatttttcgttatgccatcgccaccggacgagccactgtcaatccggcatctgaactgaccagtacgctggcgacgccaaaagctgcgcatttcccccacctgagagcagatgagctccctgtttttctccggaggctcgctgaatatcatggcagtcctgttacccgcatggcgacaaatctgctgcttctgacaggcctcagaacgattgaactacggtccgctgaatggtcagaaattgattttgataatgccctgtggacaatccctgaaagccgcatgaaaatgcgacgtaaacatgtcgtaccactgtcacaacaggccactgacattctgctgcagctcagaaccttctccggacaataccggctggtttttcccgggcgttgtgatatcaacaagccgatgagcgaagccagcatcaatatggtgctcaaacgtatcggttacgatggcagggcaaccggtcatggttttcgtcacaccatgagcaccattctgcacgaacagggctttaattcttcctggattgaaatgcagttagctcatgtggataaaaacgccatcagaggcacctataaccacgcacagtatctggatggtcgccgtgaaatgatgcagtggtacgccgactacattgattcactctccagccagtaa

SEQ ID NO: 6811 - DNA, 246 bp, Escherichia coli
atgaatatccatgcccaatggtgtataatccaccgcatggatatttcacttctcaccaccacccgtgacccggaacagcttcgcacactggcgattgccatggtgcagaaagtcaaggctgagaatgctggccttctggaccgtatgcgtattctggaagagcagatgaagctctcactccagcagcgttttggtaaaaaatgcgaatcgctgatcggacttcgatgccaatccgtgatcgaatag

SEQ ID NO: 6812 - DNA, 1602 bp, Escherichia coli
atgaatatctatgccttaagtggtatactctacggcatggatatctccgctctcaccacgacaaatgacatcgaaaaactgcgcgcgatggcacttgccatggtgcaaaaagccatgtcggagaatgctgaaaaagagcgggaattacaggccaaaagccagcgtatccagcttctggaagaaatgctgaaactggtgcgtcagcaacgcttcggtaaaaaatgcgaaacactggccgggatgcagcgttccctgttcgaagaggacgtggacgctgacatcgccgaaatcactgcgcaactggataaactgctgccgccctctgttgaagaagacgacaaagcgccccgttcacgtccggttcgtaaacctttaccgtcccatcttccgcgtgttgaaaaggaaatcctgccggccactgatcattgccctgaatgtgacgaaccgctgcgccatatccgcgatgcggtgagtgaaaaactggagtatatccccgcgcacttcgtggtgaaccgctatgtgcgcccgcagtacagttgcccctgttgccagaaggtgttcagtggtgaaatgccggctcacatcctcccgaaaagtgccgttgaaccgtcggtcatcgcgcaggtggttatcaacaaatactgtgaccatgcgcccctgtatcgtcagaataacatcttcgcccgcgcggatgttgacctgccagagagcacgctgtcagatatggttggtgccgcaggcgcggctctgtcaccactggcgaaactgttacacacgaaactcctgacccgcggcgtgatacacgccgacgagaccgggctgcgtatcctggacacgaaaaaaggcggtaaatcacgttcgggttatctgtggtgttatgccagcggagaaagaagtggtccacagatagtcagcttcgactgccagaccgggcgtggtcatgaacatcctgaaaactggcttcagggctggagcgagacgcaggttgtcgatggttaccaggcttaccggacgatggcgggtaaaacgcccggtattatccttgccggatgctgggcccacgccagaaggggcttcgccgacctgtataaaatgaacaaagatccacgggcagccatcgcggtgaaaaagatcgccgggttgtacaggctggagaaaaagatcagcagccgtcccgtggagaaaatccgccagtggcgacagcgttatgcccggccgatagtgaatgacctgtttgcctggcttgaggagcaggagcaaagatgccctccgggaggtgcattacacaaagcgatcgtctatgcgctggcgcggcgtgtggaactgagtctgttcctggaggatggcgcggtccccctcgacaataacccttgtgaaagagccatcaaaacggtggtcatgggcagaaaatcgtggctcttcgccggttcacggatagcgggagagcgtgcggcccggataatgagtctgctggaaacggctaagctcaatggtctggagccacatgcctggctgacggatgtactgaagagactgccgttatggcccgaagatcgtcttgaggaactgctgccactgccggggttcaccttctcagcttaa

SEQ ID NO: 6813 - DNA, 162 bp, Escherichia coli
atgacgagttgggcccatgacttctcatcgtttgtttgttggtttgacctttttggcgtgatcgtgcgccgtcctggccgcctcggcgatcaggagcggccacttatggtcgttgatggggatgtagtgccgtttcagtgcgggatccgtgaattccattga

SEQ ID NO: 6814 - DNA, 486 bp, Escherichia coli
atgaaaaaattagcgatcataggcgcaaccagcgtaatgatgatgaccggcaccgctcaagccaattttaccagcagcggcaccaacgggaaggtcgacctgactataaccgaagaatgccgcgtgacagtcgagagcaaaagcgagtcgttcttgcgaagcggcctgatcgccaacaggcacatcactagcctcgggatccaatccacggggtgtgggacaggacaacgtgtcgcgctcaagcttggcgcgggctcgtacgacgacacgaacgaggcgcacatgacgcacgaaaacggcactgacaagcttctggtgagtatgggctctgcgacgggcgatgggacccaagacggcggtgtatattatatcaaccggggcgggaactggaacgggcagatggtgttcatcgtacgaaatgaccaacagcacctaccaaccggcaagtacaccctgaacctcgaaggcgggttctggacaaaataa

SEQ ID NO: 6815 - DNA, 792 bp, Escherichia coli
atgaatcaaatcgaccgtttgctcactattatgcagcgcctgcgcgatccggaaaacggctgcccgtgggataaagagcagacatttgccaccattgcgccttacacccttgaagaaacctacgaggtgctggacgccatcgcccgtgaagattttgacgatctgcgcggtgaactgggcgatctgctgttccaggtggtgttttacgcacaaatggcccaggaagaagggcgctttgactttaatgatatttgcgccgcgatcagcgataaattagaacgtcgccatccgcatgtttttgctgacagttctgccgaaaacagtagtgaagtgcttgcccgttgggagcaaatcaaaaccgaagagcgcgcgcagaaagcgcagcattcggcgctggacgatattcctcgtagtttaccggctttaatgcgtgcgcaaaaaatccagaaacgttgcgccaacgttggtttcgactggacgacgcttggtccggtagtcgataaagtctacgaagagatcgacgaggtgatgtacgaggcgcggcaggctgttgtcgaccaggctaaactggaggaggaaatgggtgacctgctgtttgccacggtcaacatggcccgccatttagggacaaaagcagagattgcactacaaaaagccaatgaaaaattcgagcgccgttttcgcgaagtggagcgtattgttgccgcgcgtggactggaaatgacaggtgttgacctcgaaacaatggaagaagtctggcaacaggtaaaacggcaggaaattgatctctaa

SEQ ID NO: 6816 - DNA, 3408 bp, Escherichia coli
gtggagatctctgtcaccagccagacggcgggcaccagtgccgtcactgcaaccatcaacagcagcagccagagccgggacgtgacgtttatcggcgatatcaggacggcgcagatcgcgagtctggaggtggcgcaggataacgccgtggctgacggcacaatggcgaacacgctgcaggtgaaggtcaccgatgctaacgggaatgcacttgccgggcagacggtcagcgtgttggcggacaacggcgcaacgatcgtcccgacggtcaccacgcagccggacggtacggtggagatctctgttaccagccagacggcggggatcagtactgtcacagccagcatcaacaacagcagtctgagccggaacgtgacatttatcgccgatgtcagcacggcgaagatcgctgatctggtggtcattaaggatggttcagaggcagacggttcgacggcgaatacgctgcaggtgaaggtcaccgatgctaacggtaatacgcttgccggacagacggtcagcgtgttggcaggcaacagcgcaacggtcactccgacggtgaccaccaagccggacggcacggtggagatatctgtaaccagccagacggcgggaatcagtgcagtcactgccagcatcaacagcagcagtcagagccgggacgtgacatttatcgccgatgtcaggacagcgaagatcgctgaactggaggtcatccgggataacgcggtggcagacggttcgacggcgaatacgctgcaggtgaaggtcaccgatgctaacggtaatacgcttgccggacagacggtcagcgtgttggcaggcaacagcgcaacggtcactccgacggtgaccaccaagccggacggcacggtggagatatctgtaaccagccagacggcgggaatcagtgcagtcactgccagcatcaacagcagcagtcagagccgggacgtgacatttatcgccgatgtcaggacagcgaagatcgctgaactggaggtcatccgggataacgcggtggcagacggttcgacggcgaatacgctgcaggtgaaggtcaccgatgctaacggtaatgcgcttgccgggcagacggtcagcgtgttggcgggcaacagcgcaacggttgctccgacggtcaccacgcagccggacggcacggtggagatcagtgtcaccagccagacggcgggcaccagtacagtcaccgccagcatcaacaacagtagccagagccagaacgtcacctttgtacctggtgatgcatcgcggctcacttcaaccgttgaaacaaataagtcgaactatacggttggagagacaatcaccatcacggtaacgctccgggatgcgttcgataatctggtaaccggtgcagcttcacagttagccgctgatggtgtgctgacggtggctggcactgacccgtcagaaacgggaagctgggttgaatcaggtggcgtgtataccacaacccgaatggcgacgattgccagtaccaatcagcacgccaacctgcaattgcagacgtggagtgatggcgtaacgtcagatcgctatgacatacagtccggttctccggcgcaagccacatcaactatcgctacggataaaaacgcctacaccgctggtgacactataaccgtcgctgtgacgctgaaagacgcgcacggtaacctggttgaagggggcgagtccttattgtctggtgataacgtaacagtagaaggagccgtacgttcaggaggatggtctgaaaccgccggtgtttatactgctacatggtcggcgcaaatggcgggagactctcaccacgcgacgctgaagttgtctgaatggggcagcagtaaacaatcagagagttattccatccacagcggtgctccggtgcaggcaaattctgctatcaggacagataaatcggcatatatcgccggggagccattaaccgtcacaataacgttgcgggatgagtttggtaaccctgctttagggctgacatcagaagtcatcgagtcttatattgatagtttcgcggtaggcggcgcaactcccgattctatgcggtgggtcgagcagaataatggtgaatataccattgtctggacagcatgggttgccgaggaaaatctggttgccagtctgaaattaaaaacatgggcaacggagattaagtcctcgttatacggaatacaaccaggtgcagcggcaaaaaatcaatccacgattgtcgcggacaaaacgatatatatcgctggggatagcataacggtgaccgttgttcttaaagatgcccagggtaactttattactgatggtgttgttcagcttaatgaggaaaacgtacaagtcaggaatgcggatcctatccagggcaataattgggtttacaacggcaatgggcaatatcaaagacagtatatggcgcattttgcggaagcgaatttgaatgcgcaactgaagatggctggttggagcgatgccaattattcaaacaattacactatcaaaccaggtgaagtgagtccgcttggttcacagcttcgtatacgagaagttttagtagtggaaggggcggatttacctgtcagtgttttattagttgatgattttggaaatccggtggataacggtctggatttgctggatgatacagtgtacttacaaaatgtagaaaaaaaagaaggggaaaaatggagatatgtgggtgatggcatatatgaacgtacatatatggcctaccaagaaggagaaaatttaacttcatttatggagattaaaggttggcgtatatacggacaaccatcctataccatccttccttttgtggaagtcgagttgctgagtgttaatggtgtaaaattcagggcgacagatggttttccggaaacagggtttgatggtgcaaaattcacgctgttactaacccataatatgaaaaatacggattataattggacggctgggatttatggaattaatgttgacagtaatggagaagtaacattatctgtgctgataagaagtgaagttactattaccgggaaacccaagaatggtaaagggaatgatgttgtatttaaattcaagattaaaaaatggtttactagtttaggtgctaccagtagtaatacctgggatatcataaacacttcatgtagctatggtcaaatgccgtcatctttagaattagcgcagcggccaagcggtggggtagtaccgcgaaaagtaggtacgttgtggggcgaatatggtaatttaaaaacttatgggaacgcttttagcggtacggattattggacaagcactcagctcatgggagtacacgagaaatttaatcctgaaactggtatatcagagcttggaacaggaaagtcctctggcttgtgcgtagagtattattaa

SEQ ID NO: 6817 - DNA, 1698 bp, Escherichia coli
atgcaactgcaacatggaaaaaataatacacaacaatatatatttggcgactttgtattaaaaaacaatggaatattattattcaaaaacaaagaatatcatattcccccgaaagaacttggcgttatcattctattacttaatgctgacggtgaaatttttagcaaagaagagattatcgataaggtctggagcgcgagtgttgccagtgatgaatctctaacacgatgtatttatgcattgcgcaaacttttgcatgagaataaacagtgtaagtatatcgaaacggtctatggtcgtggataccgttttactgtacctattgtgattgtgaccgataatgaaccggtaaagtcgaccaccactcttgccgtttttccctttcgtactgaaggttcgatcaatgttctaaaactccattacgaacttgtccagggcctttcaaaatatgctttttgtggtttagatattttacccgcttcggtaacaaatgaggccagtgatttctccaccatccatcagtttatcaataaaacaggtccagaatattatattatgggtcaggtcgttcactatggtaaaaactggcgtttatttattgagttaattcatgccagaacacataaattgattgatcatcaaagtattgattttaaccccgataatcctctttccgtattattatcacaagtaattaatattcttattgaaaaaatacccaatattaattttaaatctattaatacacaacaaatgccatctctggattctgctgttatgtatatgaatggcagaatggaaatgtaccgttatacaccagagagtttgaaacgagcattagtaatatttagagattgtgtgagtacgcaaccgcaaaataccttgccctactgtttcctggcggaatgccatatatcattagccctccttggactcagtgaacaaaaacaagcaataactacggcagtaacctccattgaaaaggctctggaaattaacccttcaaattctcaggcattgggtttactgggtttaatcagtgggctaaaagatgaacattcagtgtctaatgtgctatttaagcaagcacatttactcaaacctaattcgccagacgtttattattatcagtctctgctatgttttttgaacggtgacctagcaagagcatttaatttaatagaaaaaagcattgctcttgaacccaataaaatgggcataagcattcttaaattaatgatactttattacacatcccccctcgataacgcgatatcttttgcattaaatcttaacagtcaaaacacctgtaataatccaattattacctctattctggctatgttcatggcactgaaaggacataatgacaaagccaaaagtttattgcttaaacttgagcctgaacatggtcttgattacacctgtgttaactcgctttatacgaagtttctgatctatggcgcatctataaaaaatgacattatgaagttactggcaaatattaacactaacaaaatcaatggtgtgatcttgccgttaatttacactgtttatggtaagaaagaatatgaaaagcgctggcaacaattaattaaagagaatgatttatggtcaaatgttttgcttcatgacccccgtttactcagtgtgaaaaacgaatttaatactattggtgtgatgcgtacttctgcgtaa

SEQ ID NO: 6818 - DNA, 1350 bp, Escherichia coli
atgattaataaagataataatttaaatatagatattctacgtcagcagaatgcaaacattcctcttcaagaggcatcctcgcaaagtgaggagcctcatcaactagaaaacagcaaaagcgagggtaatttgtataacagcgccagtaaggataataatattggcgctatgctcaagaaagatgttgaaaaactatcaactttagtcagtgaacgtggcccgcgaaatgaagactggaaatgccagcatgacatacagcttaacttcgttaaaaacatgctcagaaatttcccaactgagaacctgtcagagaaaggatccgcgctcttacacgaaagttatttgctgataaaaaacgttctgcagcttacagaaaatgttaatactattgacgtaaaattaaaggataccgctacaatattgaccctgcataactctgtgagaaaaaccctggctaacgttgctcacaacacaaccgggtcaagtgcaatggcaacgaccaaaggtaccttaaatcacgctatcgcttctttagacagttctgtgcctgaaatgagaagttcagcaaccagcagtactttaacggccagtagttcaaacgaatttaaaagtgataaatatatatgcagtgatattgctgatttgatgagtgtgctcggtagcgactacctcgaaatctatgcaaatagcgttgagataatgagcgcatactggcaggacttcagtgaacatatccaaagcaatatgggaaaatggactcactctaataaaaaaggcgatgcgatagtttttgacgtcaatgcattccaaaaagccttgatgcatttttattatatcgataaatatcctaatggtgatttccactatcattacaatccagactatgttttataccctccggcacctgctgacaaaattggtgtaccactagaagaagcagaaaaatggtgcgccgctttaggacttccggtaattccacccgatcccaaacaccgcacaccttctccgattgtcgaagttgaaccgcaaggtagcggtctgtatgttattattcccaaccctcagattattgacagtatgagtcagtcttcagactcaatggtgcatagggacgataaagggaaggaaaaaaatatatctaaagaattcaccggttatgaaataagcacagctgaataccaggcatggctggcgggttataacggccaggcagaaaacatgaaaaccgacgtgcaggttatcacgactaaatacagtacagccaactccacctacgatacaattatcaaattattatcttcaaccattactgcgttgtttgattcagcgaaagattatttacgtttctga

SEQ ID NO: 6819 - DNA, 141 bp, Escherichia coli
atgcattcagttatgagtagctatctggatcaaattaatcgtgatattcaaggaagagatcaggcactcaatttattacagcaaataatacaaaccattattgatactgatagtgctatcgttcaaggcattcgctcataa

SEQ ID NO: 6820 - DNA, 942 bp, Escherichia coli
atggccacctatgaaattaaaaatgcgaccagcatacataatattaacaatctcgataaaacaatctttgatagagattatggtaaagaaaacaacataccaaatgataataaaattgtgcaatactataaccttaaagatattaagcatgacataagctctcagtttataatattaaaaaatacagacagagaagtctgtccggaactaagagtaaaacttttggataatcttaattactcaaggaatacgctagataatttgaggggtgaccttgaccaagctacaatttcattcagtcaatcaagcagttctgcagaacagagttctattaaaatatctaaatataatatccttgatatgctagataatttgaccatgcgacaacaggctgttatggaggaatttttaagggtattcacatcaatgtataaagcctctgctatgtctgaggctattatgagcaacgtttttgaacaacttgtccagtatcagaaaacagaaaccgtacacgccacaatggcaagttcggcaggtgttcttgccgggtcaacagttggcgcagctggagctgcagcatctgttgtagcaaatttcagaagccatcccgaaaagatgcaaacccttacacctgatcagaagcacactatcagtggaactgatgataaaacacagcgaggattaaaaagggaagttcaagatcaacaagcttatctcaagcaaatagatgaagaaataaaaacaacaacgaaagatacaacacttgatgaagaacaaaaagaagagaccctgaaatattacgataaagaaaaagaaactacggaagaaaaaattagagataaaaacgagcgtattagtataaaacataacaggaaatataataaatattttactataggtaaagcagatgtactttcacagcttgttaatcaatcaacttaa

SEQ ID NO: 6821 - DNA, 1782 bp, Escherichia coli
atgtcggcaccgattacgggacaaacgatcacgtttgaacaaatcagtgaaacattgcgtacacagtatagcgatgcggaaaaaagactgcaggacagcagcaaaacgcaagttgatcccatgcggcttaataaaaacccgaaatcccttgataacgatattcgcgctcgtcttgaaaacaaaccgatgcttgctccgcctacaatacaggtttcagattcagacaacgccactacagcaaagacgaatgatgcccgcctgacaatgattttgggtaatttaacaggcattgccgatcaggatattacaacacgtttgcataataaccttgacagcaccctgcttcgacacgaaatggcacataataagtttcgtgaattaagtgacgcttactcctcgtcattagatgatgcgcaaaaagccgacgatatcatgcatcaggccaataataattacaatgcggtcgataaaaaggtgcaatcgctggagaaaaaagtcaacacattgaatcaagagctgtcgcaactgcaacctggcgatccgcaatataataaagtactgacgcaaaaaaatgcggctgaaaaaacactcacgctgtcattacaaaaaaaatcgttagctgagaaatcgttaaatacagccattatggatgctgatgctgcgatcggccaaagtatggaaatttttgacgaaattcaacagcaagaacagattaataacttcaccaccaatatttgcctgacacaggaaaaccagaaaaatagaaacgcgacagccacatttatccttttgattacttcagtaatggaagttattggtgataccaattgcgactctattaaaaatcaatctgaggtaatgaaagagattaaccatgtcagggaaaataaactcaatgaaacagcacgtaaatatactaccacgactaaagttttaaaaatcgttaatgagtgtgtaactgtagttacctttgccgtaagcgcagtcttaattgttgttggtcttcttgctgcagttccaagtggtggttcaagtattgcgggtgcattggcacttattggaggaatagcgggcgcagtagtattaggtgtagatatcacttgtcaaatcgctctgggcaccacggctaccggctggattttagggaaagttgttgaaggtctttcggctgcgattaaaacagttgatcccactctgctcgcaatcaccgcgcttctggacgttattggtgtcgatcaagatacgattgaactggttaaaagtatttacgcaagtgcagccgcttctattgtcatggcgacagtaatgattggtgcagctgtaatatgttctgtagcaataggggccgttgtttctgcattatcaaaaacagccgccgaagaagtcaccaaagaaataacaagcactataaaatcaaccattgaatccattattaattccgtttcaaaaaatattataaaggtattagacagcgtatgcagcgtgctacaaacatcagccgtagtgttgaagttgattgccaaaataagtaatggcctggagaaaataggcttactcatctgtgcaatagcaacatcgacgatgaattgttttgttgctggaaactctgccgacatggcaattttacaacaggacatgagtaatctatcaaaaacgcgtgaacaaatgctttcagtattgcaaagggtggataaaaccgtcgaacaagaggtaagccagatggtaagagtattacaacaccgaactgaagccttaaaatttgcttcccattctatcgtataa

SEQ ID NO: 6822 - DNA, 183 bp, Escherichia coli
atgaacataaacggaaaaaacgcttcttttacgtctgaagagttagccaggaaatatcatgaggaaggcacagttgatttaaaaaataaccatggcgataaaataaatgagaagaataacaataaacacattacttactttcccgttgatgccattttagatgggaataaacatctgccatga

SEQ ID NO: 6823 - DNA, 198 bp, Escherichia coli
atgctatctcccgataacgatttctctttggtttattatatgggtcaatgccagatgggcttaaaaaacattaaaatggccacggagttatttaatacagtcgtaacctatagtcaaaatgaaaaaattaaagagatggctactacttatcttgaacttttgacagccaattccgaagaggaagttcaaacagagtga

SEQ ID NO: 6824 - DNA, 303 bp, Escherichia coli
  misc_feature (261)..(270): n is a, c, g, or t
atggaaagcgcaaatctggatttagaagaaaataaagaaattgccagtaagttcgaacgtgcattaggtatgggagcaacacttgcagagctgcatggcataaccccggatacccttgaaggcgtttatgcttacgcttataacttttatgaaaaaggaagacttgacgaagctgaactcttttttaaatttctctgtatttatgatttccaaaattataactatttaaaaggatatgccgccgtctgtcagttgaagaannnnnnnnnngtatcatatctgtttaatgctatctcccgataa

SEQ ID NO: 6825 - DNA, 1185 bp, Escherichia coli
atgcaaaaaacggctactactccatcaaaaatacttgatctcactgccgcggcatttttacttgtcgcctttctgactggtattgcgggcgctctccagactcccaccctaagtatattcctcgcagatgaactgaaagcccgtcctataatggtaggttttttcttcaccggtagcgctattatgggaattctggtcagtcaatttctggcaaggcactccgataaacaaggcgaccgtaaattactgatcctgctatgttgcttatttggagtgctggcctgcacgctttttgcgtggaatcgcaactacttcattctcctctcaacgggcgtacttctgagtagttttgcttccactgcaaacccgcaaatgttcgccctcgcccgtgaacacgccgacagaacaggccgtgagacggtcatgttcagtacatttttacgtgctcagatctcgcttgcctgggttatcgggccaccgctcgcttatgaactggcaatgggatttagttttaaagtgatgtatctcaccgctgccatcgcatttgttgtttgcggactgatagtctggttgtttttgccatcaatacaaagaaatattcctgtcgttacccaacccatagaaattttaccctccacccacaggaagcgggatacgcggctactttttgtggtctgttcaatgatgtgggcggcgaataatctctacatgataaatatgccgctatttattattgatgaactgcatctaaccgataaactggctggagaaatgattggtatcgctgccggtctggaaattccgatgatgttaatcgcaggctattacatgaaacgtattggcaagcggctattaatgctcattgctatcgtgagtggtatgtgtttttacgccagcgtactcatggcgacgactccggcaattgagctggaattgcaaattctaaatgccattttccttggtattctctgtggtatcggcatgctttattttcaggatctgatgcctgaaaaaataggctctgcgacaacgttatatgcaaatacctcacgcgtcggctggattatcgccggctctgttgacggaattatggttgaaatctggagctaccacgcgttgttctggctggcgatagggatgttgggtattgcgatgatttgcctgctgtttattaaagatatttag

SEQ ID NO: 6826 - DNA, 141 bp, Escherichia coli
atggacgatgagcggctgaagaatccgccagtcggttcttctgtcctcgaacgcatccgcgatattcgcgccagtatgcgccgtgtttatttgcaggtgatttgccccctactgactctcagccaactgtatcgccattaa

SEQ ID NO: 6827 - DNA, 315 bp, Escherichia coli; identical to SEQ ID NO: 1771

SEQ ID NO: 6828 - DNA, 990 bp, Escherichia coli
atgaccgatcgtttaaaggagctggctaccgcaggttttactctaacgcagacgtatacccgtgcggtgaaaaatgctgatgaggttgcgcgcgtacgcaatgagtggtggaaagcgaaattacccttcgtcaccgatggcgtggttgtgcgagcggctaaggaacccgaatcccgtcattggctaccgggccaggcggagtggctggtggcctggaaatatcaacctgtagctcaggttgccgaagtgaaggcgattcagtttgcggtgggtaagagcggtaaaatatcggtggttgcgtcactcgcacctgtcatgctggatgataaaaaagtccagcgggtgaatattggttccgtcaggcgctggcaggagtgggatattgcgcctggtgatcagatcctcgtcagccttgccggtcagggtattcctcgcattgatgatgtggtctggcgcggtgcagaacgtacaaaaccgacaccaccagaaaaccgctttaactcgttgacctgctactttgcttctgatgtttgtcaggaacagttcatttcacgcttagtctggctggggtcaaaacaggttctggggcttgatggcattggtgaggccggctggcgcgccctgcatcagactcatcgctttgagcatatcttttcctggcttttattaacgccagagcaattacagaacacgccggggatcgcgaaaagtaaaagtgcgcagttatggcatcagtttaatctggctcgtcagcagccttttactcgctgggtgatggcaatgggaataccgctaacccgggcggcgcttaatgccagtgatgaacggtcctggtcgcaacttttatttagcacagaacagttctggcagcagttgccggggactggatcggggcgcgccagacaggttattgaatggaaggaaaatgcgcaaatcaagaagctgggcagttggctggctgcccagcagatcacaggttttgaaccttag

SEQ ID NO: 6829 - DNA, 234 bp, Escherichia coli
atgggttcaacagaactggcggctaatctctttcgagctacccaaacagaagaaaaactcaagcgggatggcgtgaattcaaaacagcaagctaacaccacacactttgacgtgggtcgcaaggtgaggcaaaccattcaggaacttggcggaaccatgcctgaggagttgccgaccccgcaggtcagcatcaagcagttggaaaacagtgtaaaaattacagagaaaaaatag

SEQ ID NO: 6830 - DNA, 468 bp, Escherichia coli
atgaacgaacatcatcaaccttttgaagagatacggcattatggcactgaagggcaagaattttggtcagcgagagaattggcaccgttactggattatcgggactggcgcaattttcaaaaggtactggcccgcgcgactcaagcgtgcgaagccagcaatcaagctgcatctgaccatttcgttgaaaccaccaaaatggttgtattaggttcaggggctcaacgagaacttgaagatgttcatctctcccgctatgcctgttacctggtagtacaaaacggcgaccctgcgaaaccggttattgcggtagggcaaacttattttgctatccagacccgacggcaggagctggctgacgatgaagctttcaggcaacttcgtgaagacgaaaagcgtctttttctgagaaatgagttgaaagaacataacaaacaattagttgaggcagcgcagcagctggggtag

SEQ ID NO: 6831 - DNA, 288 bp, Escherichia coli
atgaaaaaagtcactcttccccggctttccggttggctggtcgcttccgtcgcgctgtttgtcgtgatcggctggacctcttcagcacagatcccggtcgtcatttataaactaagcctggtttcgctttccgcggtgctgggatactggctcgatcgcagtttgttcccctgggcacggcctgactcttttagcccctggaaggaacctcgttgctgcgcggcggcaatgattcgccgcgccatcatcgttgccgccgtctgtctttccgtcgccttagggctatag

SEQ ID NO: 6832 - DNA, 606 bp, Escherichia coli
atgtggctgaaatatatcgcgtctatgattattttcgttcttttcccgcttaacgcctctgaaccgccgcgagcctctctggcatggcgaaacgaactaattcgtacagctcgagaagtctgggggctgaatgctccagtggccgactttgccgggcaattacaccaggagtccgcctggcagccaatggtacgttcccccgttggcgcacaaggtatggcgcaatttatgcctgctacagcgacatggataagccagttgtatccacaattgcgtgaaaacaaaccgtataacccaacctgggcgattcgcgcgctggtgcaatatgaccagcatttgtggaaaaacatctctgcgaaaaatgattgtcagcgtatggcgtttaccctaagcgcctataacggcggtcaggggtgggttaaccgggataaaaaactggctgcatccaaagggttagatgccactagctggtttggtcatgttgagcaagtcaacgccgggcgcagcgccacgaactggcgagaaaatcgtcgctatccaaagatgatcctctatcaacatgccgcccgctatttactctggggacaggcaagctgtcttcattaa

SEQ ID NO: 6833 - DNA, 315 bp, Escherichia coli
atgaaactcagtatcgatttttgggaagtgatctcccttatgctttccttcgttggattaatgtttgctgccggaaaactgctgttagcacaaattgaaaaacgacttaatgagcgttttgagtctctggaaaatgcccgcagggaatcagaaacaagttggtcgaaactggaaagagaatttctcgaatttcgtgccgagcttccgctgcattatgtccgcagagaagattatcttcgtgggcaagcagtattagaagcgaagctggatgccttatatagcaaaatcgagctgttacaacgtggcagttattga

SEQ ID NO: 6834 - DNA, 456 bp, Escherichia coli
atggaaattttatctgtaatgaattgtgtcgtgacaagattacgtgagcacaaccccgaaatggacgtatttatttcatctacggatgcccagaaatatattccacagacacaacaagttgcggtgattgttaattatagcggttctgtctttaccacgcccgaaagcagtgatgccatcgtgcaacagcaaatacttcgcttaaccgccaccgttattgttggcaaaaattgtgacgcgttaaacgcacttgatcacatacgcagcgcattgggtggccttcagcttcctgattgcgatcgtctgctttggcttgaaaaagaaattaatacaggtgagagcggcggtttctgccgctacatcctggaaatggcgaccagctcgctgtttatcgcgaaacgggaaagcacggaccttaccctgcttactgaagttaattacgaggaaactgaatga

SEQ ID NO: 6835 - DNA, 198 bp, Escherichia coli
atgaaatacatctacaacggcccggcaagcggcgtcacccttgccgacggacaagaaatcttattgtggccgaacagtgaaattgatctgccagaagacaacgagtgggtcatgaccatgattgcccgcaatcatctgactcctgtcatcactcaggaagaacaaaataacggagaggaaattgtacatggcagctaa

SEQ ID NO: 6836 - DNA, 1425 bp, Escherichia coli
atggcagctaattatctgcacggtgtagaaaccattgaaattgaaaccggcccgcgtccggttaaagcggtaaaatccgccgtcatcgctttaatcggtacggccccctgtggtccggtaaataaaccaacattatgcctttctgaaagcgatgctgcgcagtttggttcgactcagactaactttacgatcccacaggcactgaaggcgatttatgaccacggtgccggtacggtggtggtgattaacgtgctggatccggcaaaacatggctccaacatcagcaatgaaagtatcacttttgatgctaacaaccaggcgaaactcactcaccgcaatgtgcgtaacgtggttctaaagccctcttcatcaaattcatcaacctataacaccgcagcatttagcgtagatgaacaaacaggcataattacccgtacaggagccgacattcctcctggtgcgaaagtttgcgcctattattcctggtgcgaccctacaaaggtcaccgcagccgatattatcggtgccgttaataccgcaggcgatcgcacggggatgaaactgctacaggacacctataacctgtatggtttctacgccaaaatcctgcttgctcccgtgttctgtacgcaaaaatcagtaactacagagctgattgcacaagcggaaaaacttggtgcgattacctacattgatgccccgattgggacgacattccagcaggtattggcaggacgcggttcgcaaggggctatcaacttcaacaccagctctgatcgtgcgcgtttatgttacccacacgtcaaagtttacgatggcatcactaaccaagaagttctcgaaccgctctcttcgcgcgctgccgggctacgtgccaaagtagacctcgaaaaaggtttctggtggagcaactcaaaccaagaaattcagggtattaccggtattgaacgttcgctttccgcaatgattgatgatccacaaagcgaagtgaatcagctaaacgaaaacggcattaccactattttcaatagttacggctctggtctgcgcttgtggggcaaccgcactgcagcgtggcctaccgtgacccatatgcgtaactttgaaaacgtccgccggacaggcgatgtaattaatgagtcaatccgttatttcagtcagcagtatattgatatgccgattaatcaggcgctgattgatgccctgaccgaatcggtaaatacctggggccgtaagctgattgccgacggcgcactgcttggctttgaatgctggtacgatccggcgcgaaattcaccgactgaactcagcgctgggcatttattgctgagctataaattcaccccgccgccgccgctggaacgtctgacgtttgaaactgaaattacttctgaatatttagtctctctggagagcaatagctaa

SEQ ID NO: 6837 - DNA, 525 bp, Escherichia coli
atggctggaaaaattcaaattaaccgtattaccaacgccaatatttatctcgatggtaataaccttttaggtcgtgcaaccgaaattaaattgccggatgtcagtttaattatgcaggagcataaagcactgggcatggtgggtaaaatcgaactcccggcgggtttcgataaactggagggcgaaattaaatggaactccttctatcaggacgtaatgcgtaaaacggcaaacccgtggcaggcggttgcattacagtgccgctccagtattgattgctataactcccaggggaaagcgaatcaattagcgctagtgacacatttaaccgtgatgtttaaaaagaatccactgggcacatttaaacagaatgaaaacccggaattcagcagcgcctttggttgcacttatattaaacaagtagttgatggtgaaacgctgcttgaacttgattatatggccaatattttccgggttaatggtgtggatcaattaagtacctatcgcaataacatcggtggctaa

SEQ ID NO: 6838 - DNA, 318 bp, Escherichia coli
atgaaagaacattatatcttacagttcccgtttacttcagcggcgggagacgtaattaacactctgcaattacgtcgcctgaaagtaaaagatatgcgcaacgcgcgccggatcagcgaaaaacctgaagagtgggatgaaccgctaatggcggcaatgaccggactggtgccagaagatttagctgaaatggatttgctggattaccaggcattgcagaaacgatttcaatccatgcttagcgtggctacagaatccgccactgttatggcaagcgatggcgttactggcgagatggtttcgctttccacccagtga

SEQ ID NO: 6839 - DNA, 2376 bp, Escherichia coli
ttggccaacgatattattacccagcttcaggcgcgtaatgagacgttgacgcaggcaatagcccgttacggctcactcaacgccagaacattgttaactctctctactcagcaggcgacagttatcaaactaacgcagcagcttgccgattccgctctccgcctggaggaaaatagccgcagccgcgctaatctgatggagaaaacccaaacatttgccgggcaatttagcaaagtattcaatgttgaagcccccgactggaagttgccgtatgagtttcaggacaacatggtcaatatggcgaccaaaggtgggatgaatgctacaacccgcgagacgctcagccttaatctgcgcgactggagcatggattttaaccagcagcagaccaccttacagaacgcagcccaaacgctgatcgaaggcaatttgtcgtcgatacaggatctcaaccgttatatgccggagatcgccaaagctgccaccgccacgcgcgaaagtgctgaaacatgggcgaatgccgcgctcgcaacccatgatcgactgaatattgccctggaaaatttccacgccgcgcaaaacatgatgtacggcattagcaaaagcggtgggcctgccattgctgaacaaacgcagtggatagagaaatttgcaggtaaaaccggcgctcagggtctggaaggtatggctgaactgagcgccaccatgcagatcgccatgaaaaacggggccagcgccagtgcggcggcggagaatttcgaccactttctgcaaaccaccttttcgaaaaaaaccgatagctggttcgccagccagggcgtcgatctgcaaggctctctgcttgaacatcagcaaaacggtatgggtgttagcgaagccatgactcatatcgtacaaatgcagcttgagaagatgaatccggcgatcctcgacaccttcaaacgcactatgcagattgaagatttatctgctcgcagcaatgcgctgcaatcgatggtaacgcaatttaatctgggcgaaatgttcggcgatgcgcaaacggtggaattcctggcacctatgctggcgaatatggaggaatatcgccagttaaaagcctctgccatgcaagccaccagcaagaatctgattaacgctgacttttctgcgcaaatggcctcgcccattgaacagactaaagcgttacagctggcattaaatgatttatggctcagcattggtttgcagcttatgccggcgattggcgagctggcacaaagccttacgccggttattcgccagttcagcgcctggctacgcgaacatccggcgctggtgcaaaacattgcgaaaatcgtcggggcggtttggctgtttaacggcgcgctgaatgttttaaagctgggcgcgaacctcatcacctcgccgtttattcgtctggtcgatatcttcctgaaagtcaaggcaagtctggcgctcacaggcggggcaagtaagatgctatcagcggttaagtcattgggtggcagcgcaaaatggctaatgcaactgcttggtcgtggcctgattggcgcactgaaacaggtaggtcagaccgtcttctggttgggtagggttttattgatgaatcccattggtctggtcatcactgcgattgcgggcgctgcttatctgatttgtcgcaactgggagcctatctccaggttcttttcgaccatctggcaacgtatcaccacggcctttgacggcggcattgcaggaatttgtcggttgattctcgactggtcaccgctggagttgttctatagcgccttttccagtgtgatgaattggtttggtgtcgagatgcctgcaagttttagcgagttcggcagcaatcttctgggcagtctggttgacggcataatgaatgccttccccgctctgaaaggcattattgatcaggtaaaaaacgccatcccagactggctaaaaaccacgatgggtattagtacagaaggatcggctacagctattacaagcacgactaataccgcatccgtctcccccgcgaccgttgttccaggcgttgccggtgcgattttaacgccgccggtgggcaaacaactcgcgccatccggcaaaacggctacgccgtcatcggcgccagcggcaaaaaatacagccgccaaacccgtatctgcctctttacctggtaaatccgtaaccaaaccggcgacgctaccctcccgttcctcaggaaaagtccaggtaaatttttcgccacagattaccgtgcagggaaacggacaaaacaccactaaagagattcagaacgtgttgacgatgagtaaacgcgaactggaaagaatgattaacgacgtaatggcgcaacaacagcgccgggggtatgcctga

SEQ ID NO: 6840 - DNA, 954 bp, Escherichia coli
atgtatgccgttttaggagagattgaatttaaggttgtcacattctgggacggctttaaaagcacaatgggcgtggattacgccacacatgcccgtatagaaggcaaacccggcgtgcagtttattggcgataagctggatatgctggcgctggaattttccctgcacagccagttttgccagcccacaacagagctgaaccgactgcgtgaagccatgcttgctcacaaggcgatggcactggtatttggcaatggcgattatcgcggctggtttgtgattacggagctaaccgccacccaccagcacaccgatccctggggcaatgtgattgcccaaaacggaacgatgtcgctccaggagtacaccggcgatcctaaaaatccacttttacctccggcgattaccacccaggagcccaacatcgaggaaaaggcgagcgattttcccgacaaggtggagtcctggtttgatcagatattaaacgccattgaagaaggtatgcgtaaggccaaagagatgctggatgaactgacacaatccattgaagatattaaaaaaacggtggcaaaagtgaaagcaatgattaaagaggccaaagcgttaaaagaaaagtgtgaaaagataattacgtcattgaaaaagacaatcgacgccatcgaaaccctgtttaaacagccaatggatctgcaaacgctggcaggcctaccaaaagcgttgtcggcgcagattaaagctttactgggtaacatgccaggtatccgggactgcgccaatgacgccagtacgctggttgaccatgctcaggcgcttttcgacgacattaccagcgacatcgccgaagcgacgttcgataaagccacgtcgttggttgagcaggcacgtacaacggtacaacaaaccactcccgcagtgagccagcttgctgccgtaaccattaccaggagctggtaa

SEQ ID NO: 6841 - DNA, 210 bp, Escherichia coli
atgcgataccttgaacatatcaccaccgatggcgaacgctgggataacctggcatggcattactacggtgatgcactggcttatgaacgcataatcgccgccaatccacatgtagccatttacccggtactgccttccggtattcagctcattattccggtcatttccgttaataaaaccttatcggagatcccaccatggctgagataa

SEQ ID NO: 6842 - DNA, 1041 bp, Escherichia coli
atggctgagataagcgtaactggtggcgtctttgccacactcacgcccatttttaccctctggtatgggcataaagatatcacttatgacatcacaccctatgtcaccagcatcagttaccacgacagcatcaaaaacgagtcggataccatcgcaattacactggatgacacagatggacgctggataaaagagtggtatcccggcaaaggcgatacgctggcgctgcatatggggtatcagggagaaaagctgctcgattgtggtcagtatattattgataaaattgatatttcagcgccaccttctacggtaaatattgatggcatcgccacttccgtcaatcaggcgctgcgcacccgtaacagccagggctttgaagaaacgacgctttcggctatcgccagccgtatcgcacaaactcacggcctaaagctggtgggcaaaatcgagcctctgacaattgaccgggtgacacagtacggcgaaaccgatgttggatttctcaaacgtctggccagtgaatatggttatgccgtaaaagtgacgacgaaagagctgattttttcacatttacccacgctgcgctgcctggcacctgtgaaaaagatcgaccgcaaagacgtttcgcatttcaccttcaaagataccattaaccgtatctacaaaaacgccaccgtacagcatcaaaatagtaagaaaaaagaactggttatctacacccacgacagccagcaaaaaccgtttgcccgtggagtcggcaccagtgccgacacgctaaaactgaacagtcgggcgacggacgttggcgcagcacaggcaaaggccaacgctgcactcgacagccacaacgaatatcagcaaaccggaacgctcacaatgatgggctgcccggaactgacggcgggcaataaaattgaactgaccgattttggcgtgatttccggtcagtggctgattgataaatctactcacagttttgtgcgcagcggctataccactgaaatcgacgtgtcacgcgggccagcgaccagccagtaa

SEQ ID NO: 6843 - DNA, 702 bp, Escherichia coli
atgaaaggagtaacccgtcaaacggggattatcagcgatattgacgaaaccagcgttcgggtgcgagtcacgcttccagagtgtgacaatctgaagagcaactggcttgcggtacttcaacgcaattcccaggacaataaagactactggctaccggatatgggcgagcaagtggaagttctgctggacaataacggtgaagatggcgtggtgctgggcgcagtttattctacggttgacaccgcgcctgtagcctcgcgcgacaaacgttacgtccagttttctgatggcgcagcgtttgaatatgaccgcagcacgcaccagctgacgatcaacggcggtatcgagaaaatcgtgattgaggttatcaacggtacctgcctgacatcgcccaacgttgagattaaagcccaacaggtcaccgtgacttccgataccgtcgatgttaaagcgaccgatgtcagcatcgacgccactaaggtcgaggttaaagcagcagcagtgacggtagatgcgcccatgagcacctttactggcaacgtcacggtaatgaaaaaactcacctggcttggcgggatggcaggaagtggaggcatcggtaacgcagccacgataaccggcaatgtcaacgtgatcggcaacgttcaggccagcggcgcattgcaggacagcggtggcaactccaaccaccattcacactga

SEQ ID NO: 6844 - DNA, 360 bp, Escherichia coli
atgaaaacaaaaacacgcccctcaacgctgcactggcaaccggccttgcagcggcctgaagaatacgtctgcgggctggatgatattcaccaggcgatacacatcattctgcgcacaccgcgcggcagtgatcctcacagaccgctgtttggcagcaacttgtggcactacatcgattaccccatcgagcgggcaatcccgcatgtggtacgggagtcggtggaagccatccgccagtgggaaccgcgctgtcggttgctgaaggtgacaccagtaatcgacggtgaacatctgacgttacgtgtgcaatggcgcgccgctgacggcgttatcaactcaacggaggtgttatggcgatag

SEQ ID NO: 6845 - DNA, 1116 bp, Escherichia coli
atggcgatagccgaacccaattttattgaccgcgatcctgcgcaaattaccagtgagatgattgcgcaatatgaagatgccagcggtaaaaaactctatccggcacaggctgagcggttgctcatcgacctgtttgcctatcgtgaaaaccttgtacgcatcgccattcaggaagcggcgaaacagaacctggtcgcgtattcccgcgcgccaatgctggattatttaggggagctggtgggcgttcaccgtttgcctgcacaaccggcaaaaacgacgttgcagttttcggtcgtcagtgcgtataccagcaatatcctgattccccaggggacgcgggccagtgcctctgatagcgtgatgttcgccaccgatgaagatgttctgcttccggccaggagtttgcatatcgccgttcctgccaccagcctcgcagcaggtgaacagggcaacggctggcagcctgcacaaattagcgcactggtcgacaggattggtcattatgacatcaacgtaaccaacctgactgcgtcaacgggcggctgcggtgaagagagcgatgacgcattgcgccagcgtatccaactggcaccagaaagctttagtaatgcgggcagctatggcgcataccgctttcatacgctttctgttagccagtcgattattgacgttgcagtactggggccggacgagggattgccagaaggctgcgtggagatctacccgctaaccctgaatggtctacccggcacggagttgctggcgcagattgaacaagaagtcagcaaggagaaaaaacgaccgctgaccgacaaagtgagtgcgaaatgcgctcttcgagtgccgtatgagatccgtgcgcagctaacgctgtttaccaccgccgatcaggagacaacgctggctgcggcgcgtaaagcgattagcctctggacgcaacagcggcagaaacatctggggcaggacattgtaccaaaccagataatcaaagtgttacaggtcgatggcgtctatgacgttgcgctgaatatgcctacaaaacgtattttgcaggcgcatgagtgggcggaatgcaccgcaatagacgtcacgattgccggagtcagcgatggataa

SEQ ID NO: 6846 - DNA, 717 bp, Escherichia coli
atggataaattgctgccaccgccgccgcttgccagcgatgagcgtttttcgattctggcaaacatcgccgccgagcgttttgcccaactcgatctgacggcgttgatggtttatctggtcgacctggttgatgcttcggcattaccagcccttgcagaacaatttcacgttcaggggctggaaggttggttatttaccaccgatgagcgggagaagcgcgagttaattaagcaagccattgagctgcataaatataaaggaacgatttgggcggtacggcgggtactggaaatactttcgctaccaggaactatttcagaatggtttgaatatgggggaaaggcttacttttttaaggttgatattacactagaggaaaaaggattaaatgaagatgaattcaatgcacttatcacattaattcatgaatataaaaatgtccgatcaaagctggaaagcattgttatttggcttattaatcgaagcccaataccagttattggcagtgccatgcaaggaggggaagtcattacagtattgcctcctgttgcagaaagcctcagccagtcatctggaatatttttagcgacaggttattgtgtggaggaatatattcaactactaccttatcaacccgatcgactaacacaatcccaaccgatgaaggtcggcacaggatactggagcaccgaaattatgtctgtatatccggagtaa

SEQ ID NO: 6847 - DNA, 1641 bp, Escherichia coli
atggcaagtgaattttttacaatattaactgctgcaggcaaagccaaaattgcctcagcactggccgagcaaaaacagatccgtctgcaaactatggtagttggcgacggtaatggtaaatatatcgaaccgacagaaagtcagaccaaagtagtccatgaggtctggcgtggtcagctcaatacattaaaaattgcgccagataatccggcctgggttatcgcagaagcgattattcccgaacaagtcggaggctggtatgtacgcgaagttgggttactggataccgacggcacgctggtcgctattggtaaattcccggaaacctataagccacgattacctgcgggggccagtaagcaaatcgttatacgcgcggtcatggaagtcaccaatgcagatgcggtgacgcttttgatcgacccttcagtcgttgtggcaaccagggaatatgtcgatgacgcgttgaaaacacatcagcaatcacgaaatcatcctgatgcgacgctgacacaaaaaggttttacgcagctgagtaatgcgactaatagcgatgatgaaaccaaagcggccacgccaaaagcggtaaaaacggcatatgacctggcaaatagcaaagctgccaccagtcataatcatgcctggaatcagattactggtatccctgatggtacactgacgcagaaaggagtcgttaagcttaacaatacaacaaatagcaccagtacgacggaagctgcaacaccaagtgcggttaaggcagcgatggataaggctattgctgcggcaccgtccagccatacccatgcctgggggcaaataacaggtatccccgacggtacgctgacgcaaaaaggggtcgtgaaacttaataatgcgaccaacagcaccagtacgacggaagctgcaacgccgaacgctgttaaggcagcgatggataaggctattgctgcggaaagctgtcctgtagggatgcctattccttggccatctgattctataccttcaggctacgctctgatgacaggtcagacatttaataaagcctcctatcccaaactgggaattgcatatccatctggtgttattcctgacatgcgcggatggataattaaaggaaaaccatccagtgggcgagctatattatctactgaactggatggaattaaatcacataaccatacgggcagtatttcgagtactgatttagggacaaaggcaacatcatcttttgattttggacacaaaacgacatctgcctctgatcttggttctaagacaacatcgtcgttcaatcacggaagtaaatcgtcgaccagcacagggggccattcacatcaaataacatgtaaaggtgatgctgattacggtggcaatgcactaaccgctgattctataggtgactctcgttatgactacgttaataccgatactgtaggtgatcactctcatactacagccattggtacccatgcacatactatcgcattgggtagccatacacatgaactttcaattggcacccattcgcattcaattgcccttggttcccataatcactccctaaccattaataataccggcaacaccgaaaacaccgtcaaaaatatcgcattcaactatattgtgaggctagcatga

SEQ ID NO: 6848 - DNA, 708 bp, Escherichia coli
atgaatacttttaccttttccgatgaagctcaaatactaactgtatataatttttcacaagactcccaagaatatatcggtgagtctgatgcatacattgcacctaatacaggcttgccaaattattgcacattaatttcacctcccgaaaaggttcctggttttactccagtgtgggagaatgaaacatggagacttattgaagatcatcgaggccaaactgtttataacaaagttgatggtagccagcttattattcaagaattgggccaattacctgaaaatgtaacagtcatttccccgacaggttcttttgaacgttgggatggtgaaaaatggcaaccatctataaccgatgctaaagaggcgaaatactctgcaatcaaaaatcaacgcgatgccatcacaaccgattacatcatcatcaacaaccatcacttccacagtgatacaaatagccgtatccaacagctttcactcacaaaaatgggagcggagaaaaaaattccgccagggttaatgtggaaaactaaaaataatggtctgattgagttaaccaacgaaatcgctgcccagtttgaatcggtcaccatggatcacgatatgcgcttgttcgcaaacgcccagcaccatatcgcggcggtggaagcactggacgatattcaggcggtgctcgactacgattattcaacaggctggcaaccatga

SEQ ID NO: 6849 - DNA, 456 bp, Escherichia coli
atgagtaaaaccactgtctggctcgcttgttataagggccgaacagagcaccgtggtattgcccgactggctgactggcttacccgtaaaatcacacgtggtcattattcccactgtgaattagccattaagcatggtgaaaagagttacctttgttactccgcatcactgcgcgatcgcggtgtacgcggaaaaataatgccattgccagcggataagtgggatatgctgccgctccaggccagccttcaggatgtggaaacttttttccgtaaacatgatggcaaaaaatatgactggcgcggagcattaggaattattatcggtaataaagaacagcgcgatcgcctgttttgcagtgaattttgtgctgaatttctgcaactgaaggaaagctggcgctattctccaaatcacttgtacgctttagtcagcagttggcaataccagcaataa

SEQ ID NO: 6850 - DNA, 792 bp, Escherichia coli
atgccattaaatggagtcagtgctgcgatgcgcgaacgggtatcgcagcagttaaaagaaatagaacgtcgctatggcgtgaaagtgctgtacgcctgcgaatcaggcagccgcggctggggatttgcctcgcccgatagcgactacgatgtacggtttttgtatgtccatccgctggaatggtatctgcgtgtagagtcaccgcgcgatgttatcgagctgcccatcgacgacgaattagatgtttccggttgggagtggcgtaaggcgctgggattattgaaaggcgcgaatccgacgctgatagaatggctggattctccggtggtctatcaacaagatgaagaaacgataacggcgcttaaggcaatggtcccaatgtggttttcttcgttgcgtgcacgctggcattactattcgatggcgcagaaaaacttccgcggctatttgcagggcgatgaagttcgactgaaaaaatacttttacgtgctgcgcccgctgctggccgtgcgctgggtcgaagcgggtaaaggcgtgccgccaatgcgctttgctgagttactggcaggaagcgagcttgatgcgccgttacgcgaagagattgacgaactgctggagcgtaaacagcgagcgggggaggcggaatatggtccgcgccgtcctttgttacatgcgtttattcgcgcggagctggcgcgtggggaaattccaccgattttaccggacagtcgagatggagatgttcgggagctagataatttgctgtatcaaacggtaatgcgccgggcataa

SEQ ID NO: 6851 - DNA, 471 bp, Escherichia coli
gtgttattggcatttagtcagttaacgaagccgattgatcatttgtatcgggaattgcaatttgcactgcgtgaagcggtaggtacgcgtacgctggatgagttgctggaagataaacaagtcattgatgacgttgtcagcgaacaggtgaaatcgcgtatgttgccatttggtatggagattgcttcattaggggtgaaagatatcgtcctgcctggcgatatgaaaaatatccttgcgcagctggttgaggcggagaaatccgcgcaggccaatgtgattcgtcgacgtgaagaaacggcagcgacgcgttcgttactcaataccgctaaagtcatggaaaacaacccggtggcgttacgcttaaaagaactggaaacgctggagagagtggctgagcggatcgataacatctctgtatttggtggtctggatcaggttctgcacgggttagtgaatatcaaaggatga

SEQ ID NO: 6852 - DNA, 645 bp, Escherichia coli
atgattaagaaaataagcgtaagaaaagatcagctggcattactctccagaaatggcgattactacaaagtgctgcatgcaggcgagcatcttttaccctggttaaatacgccagaagtcttgctgattacgctcgatggcagcgaagttcccgacgtgctggcggattatttgcgccgctttcagcctgattgggtggaaagatattgcgtggtggccgacttgtcggagactgaagccggggcgttgtatatggacggtattttgctggagatcctgccgccatcaacgcgtcgtttgtactggcgtgtagaggatgatttgacgctggtgcggatgaatacgcagcaagtccaggttcaaacggaggtgatgaatgcggtattgcagccacggcgcaaagggactgttaaaggccgcgatgcgatactgacggtgcaggttccggcctggcacgtaggtgtactgaaaatcgatggtgaaacgcaggcgctgttaccgccggggctgactgcgtactggaaaattaaccatctggttgaagctgaagtggttgacacccgcttgcaggtactggaagtcagtgggcaagaaatcttaacgaaagataaggtcaatctgcggattaatctcgccgctaactag

SEQ ID NO: 6853 - DNA, 813 bp, Escherichia coli
atgattaatcgcgatactcaactctgcatgtcgctggccggccgccccggtaacttcggcacgcgttttcacaattatctttatgaaaagctggggctgaatttcatctataaagcgttcaccacccaggatattgcagcggcggtgaaaggggttcgcgcgttgggtattcgcggttgcgctgtgtcgatgccgtttaaagaaagctgcatgccttttctcgacgcgatcgatccgtcggcgaaggtcattgattccgtgaataccatcgtgaatgacgacggcaggctgaccgggtttaacaccgactatatcgcggtgaaaagcctgattacccaccaccagctcaataccaccacgcgagtgatgattcgcggcagtggcggcatgggcaaagcggtgattgccgcctttcgcgacgcggggtttacggatgttatcattgccgcccgcaaccgcgagagcggcccggcgctggcgaagcagtatgggtttcagtggcaaccgcagccggaaggcatcgcctgcgacattctggtcaacgtgacgcccgttggcatgagcggcggtaaagagagccatgagctggccttcagcgaagcgatggtctcaacggcaagcgtcgtttttgatgtcgtggccttgccgccggaaacgccgctcattcgcctggcgcaacggcttgataagcagacgattagcggtgcggaggtgattgctttacaggccgtcgagcagttcgcaatgtataccggcgtacggcctgatgcgcaactgattgctgaggcggcacaatttgcacgagaaggataa

SEQ ID NO: 6854 - DNA, 522 bp, Escherichia coli
atgaaacgttttagtctggccattctggcgctggttgttgcgaccggcgcacaagctgccagtgaaaaagtcgagatgaacctcgtcacgtcgcaaggggttgggcagtcaattggtagcgtcaccattactgaaaccgataaaggtctggagttttcgcccgacctgaaagcattaccccccggtgaacatggcttccatattcatgccaaaggaagctgccagccagccaccaaagatggcaaagccagcgccgcggaatccgcaggcgggcatcttgatccacaaaataccggtaaacatgaagggccagaaggtgccgggcatttaggcgatctgcctgcactggtcgtcaataatgacggcaaagctaccgatgccgtcatcgcgcctcgtctgaaatcactggatgaagtcaaagacaaagcactgatggtccacgttggcggcgataatatgtccgatcaacctaaaccgctgggcggtggcggtgaacgctatgcctgtggtgtaattaagtaa

SEQ ID NO: 6855 - DNA, 522 bp, Escherichia coli
atgggtcatccggaaaaaggctgtatcgttgcaccaggtgtcgcagagtttcatgtgcgtcacggtttgcctgccagcgatatcattgcgccgaatctggttgagctggagatactctgtgagcatccggtaaataacgtcgaagaagcggttctggcagcgcgtgaactcattgcgcaagggccacaaattgtgttggttaaacacctggcgcgggctggctacagccgtgaccgttttgaaatgctgctggttaccgccgatgaagcctggcatatcagccgtccgctggtggattttggtatgcgccagccggtaggtgttggtgatgtgacgagcggtttactgctggtgaaactgcttcagggggcaacgctgcaggaggccctggaacatgtgaccgctgcagtatacgaaatcatggtgaccaccaaagcaatgcaggaatatgagttgcaagtggttgctgctcaggatcgtattgccaaaccagaacattatttcagcgcaacaaagctctga

SEQ ID NO: 6856 - DNA, 606 bp, Escherichia coli
atgaaattgttctacaaaccgggtgcctgctctctcgcttcccatatcaccctgcgtgagagcggaaaggattttacgctcgtcagtgtggatttaatgaaaaaacgtctcgaaaacggtgacgattactttgccgttaaccctaagggacaggtgcctgcattgcagctggacgatggtactttgctgacggaaggcgtagcaattatgcagtatcttgccgacagcgtccccgaccgccagttgctggcaccggtaaacagtatttcccgctataaaaccatcgaatggctgaattacatcgccaccgagctgcataaaggcttcacacctctgtttcgccctgatacaccggaagagtacaaaccaacagttcgcgcgcagctggagaagaagctgcaatatgtgaacgatgctctgaaggatgagcactggatctgcgggcaacgatttacaattgctgatgcctatctgtttacggttctgcgctgggcatacgcggtgaaactgaatctggaagggttagagcacattgcggcatttatgcaacgtatggctgaacgtccggaagtacaagacgcgctgtcagcggaaggcttaaagtaa

SEQ ID NO: 6857 - DNA, 1503 bp, Escherichia coli
gtgtccactgcaaaccaaaaaccaactgaaagcgtcagtttgaacgctttcaaacaaccgaaggcgttctatctcatcttctcgattgagttatgggaacgttttggttattacggcctacaaggaattatggctgtttacctggttaaacaactgggtatgtctgaagcggattcaatcacccttttctcttcctttagtgccctggtttatggtctggtcgctatcggcggctggttaggtgacaaggtactgggtactaaacgcgtaattatgcttggcgctattgtgctggcgattggttatgctctggttgcctggtctggtcacgacgccggtatcgtttatatgggtatggcggctattgcggtcggtaacggcctgtttaaagctaacccgtcttctctgctttctacatgctatgagaaaaacgacccgcgtctggacggtgcattcaccatgtactacatgtccgtcaacatcggctctttcttctctatgatcgccaccccgtggctggccgcgaaatacggctggagtgttgcgtttgcgttgagcgttgtaggcctgctgatcactatcgttaacttcgccttctgccaacgctgggttaaacagtacggttcaaaaccagacttcgagcctatcaactaccgtaacctgctgctgaccattattggtgttgtggcactgatcgctatcgccacctggctgctgcacaatcaggaagttgcgcgtatggcgctgggcgttgttgccttcggtattgtggttatcttcggtaaagaagccttcgcgatgaaaggtgctgcgcgtcgtaaaatgatcgttgccttcatcctgatgctcgaagccattatcttcttcgtgctgtacagccagatgccaacgtcactgaacttctttgcgattcgtaacgttgagcactccattctgggtctggccgtagaacctgagcagtatcaggcactgaacccgttctggatcatcatcggtagtccgattctggccgctatttataacaagatgggcgataccctgccgatgccaaccaagtttgcaatcggcatggtgatgtgttctggtgcgttcctgattctgccgctgggtgcgaaattcgcgtctgacgctggtatcgtgtctgtaagctggctggtcgcgagctatggcctgcagagtatcggggaactgatgatctctggtctgggtctggcaatggtcgcacaactcgttccgcagcgtctgatgggcttcattatgggtagctggttcctgaccactgccggtgcaaacctgattggtggttatgttgcgggtatgatggctgtgccggataacgttaccgatccgctgatgtcactggaagtctatggtcgcgtattcttgcagattggtgtcgctactgccgttattgcagtactgatgctgctgaccgcgccgaaactgcaccgcatgacgcaggatgacgctgcagacaaagcggcgaaagctgctgtagcgtaa

SEQ ID NO: 6858 - DNA, 201 bp, Escherichia coli
atgcaggttaattgtttttttaatagcgaaattttctattcattcgtgatcaagatcacgatgctgtggcaatgtaaaaacattgcaagaactaggttaaaatcatttaaatttacacacgcaacaaatattgacctacaaaacattacactggctatttttcagaaactggactatctcactatgaaaaacgctaaatag

SEQ ID NO: 6859 - DNA, 1812 bp, Escherichia coli
atgttacgtcctgtagaaaccccaacccgtgaaatcaaaaaactcgacggcctgtgggcattcagtctggatcgcgaaaactgtggaattgatcagcgttggtgggaaagcgtgttacaagaaagccgggcaattgctgtgccgggcagttttaacgatcagttcgccgatgcagatattcgtaattatgtgggcaacgtctggtatcagcgcgaagtctttataccgaaaggttgggcgggccagcgtatcgtgctgcgtttcgatgcggtcactcattacggcaaagtgtgggtaaataatcaggaagtgatggagcatcagggcggctatacgccatttgaagccgatgtcacgccgtatgttattgccgggaaaagtgtacgtatcaccgtttgtgtgaacaatgaactgaactggcagactatcccgccgggaatggtgattaccgatgaaaacggcaagaaaaagcagtcttacttccatgatttctttaactatgccgggatccatcgcagcgtaatgctctacaccacgccgaacacctgggtggacgatatcaccgtggtgacgcatgtcgcgcaagactgtaaccacgcgtctgttgactggcaggtggtggccaatggtgatgtcagcgttgaactgcgtgatgcggatcaacaggtggttgcaactggacaaggcaccagcgggactttgcaagtggtgaatccgcacctctggcaaccgggtgaaggttatctctatgaactgtgcgtcacagccaaaagccagacagagtgtgatatctacccgctgcgcgtcggcatccggtcagtggcagtgaagggcgagcagttcctgattaaccacaaaccgttctattttactggctttggtcgtcatgaagatgcggatttgcgtggcaaaggattcgataacgtgctgatggtgcacgatcacgcattaatggactggattggggccaactcctaccgtacctcgcattacccttacgctgaagagatgctcgactgggcagatgaacatggcatcgtggtgattgatgaaactgcagctgtaggctttaacctctctttaggcattggtttcgaagcgggcaacaagccgaaagaactgtacagcgaagaggcagtcaacggggaaactcagcaggcgcacttacaggcgattaaagagctgattgcgcgtgacaaaaaccacccaagcgtggtgatgtggagtattgccaacgaaccggatacccgtccgcaaggtgcacgggaatatttcgcgccactggcggaagcaacgcgtaaactcgacccgacgcgtccgatcacctgcgtcaatgtaatgttctgcgacgctcacaccgataccatcagcgatctctttgatgtgctgtgcctgaaccgttattacggttggtatgtccaaagcggcgatttggaaacggcagagaaggtactggaaaaagaattgctggcctggcaggagaaactgcatcagccgattatcatcaccgaatacggcgtggatacgttagccgggctgcactcaatgtacaccgacatgtggagtgaagagtatcagtgtgcatggctggatatgtatcaccgcgtctttgatcgcgtcagcgccgtcgtcggggaacaggtatggaatttcgccgattttgcgacctcgcaaggcatattgcgcgttggcggtaacaagaaggggatcttcacccgcgaccgcaaaccgaagtcggcggcttttctgctgcaaaaacgctggactggcatgaacttcggtgaaaaaccgcagcagggaggcaaacaatga

SEQ ID NO: 6860 - DNA, 1509 bp, Escherichia coli
atgaataaatcgctggtagcggtaggcgtcattgttgcgctaggcgtagtctggacaggcggcgcatggtatacaggcaagaagattgaaacccatctcgaagagatggtcgcgcaggcgaacgcgcaactcaaactgaccgctcctgaatccaacctggaagtgagttatcaaaactatcatcgcggcgtattcagcagccaattgcaactgttggtgaaacccattgccgggaaagaaaatccgtggattaaaagcggtcagagcgtcatcttcaacgaatcggttgatcatggtcccttcccccttgcccagctaaaaaaactgaacctgctcccgtcgatggcatcaattcaaaccacgctggttaataacgaagttagcaagccactgtttgatatggcaaaaggtgaaacgccttttgagattaactcccgcattggttacagcggagattccagttccgatatttcgctcaagccactgaattacgagcaaaaggatgaaaaagtcgcctttagcggcggcgagttccagttaaatgcggacagagacggcaaagctatctccctttccggggaggcgcaaagtggtcggatagacgcagttaacgaatacaaccagaaagtgcagttgacctttaataatctgaaaaccgacggttccagcacgctggcaagttttggtgagcgcgtaggaaaccaaaaactgtcactggaaaaaatgaccatttcagtggaaggcaaagaactggcactgctggaaggcatggagatcagcggtaaatcggatctggtcaatgacggtaaaacgatcaatagccaactggattactcgctaaacagcctgaaggtacagaatcaggatctaggcagcggcaagctgactttaaaagtcggccagattgatggtgaagcctggcatcagtttagccagcaatataacgcgcaaactcaggcgctgctggcacagccagaaattgccaacaatcccgaactttatcaggagaaagtgacggaagccttctttagcgccctgccgctgatgttgaaaggcgatccggtgattactatcgcgccgctaagctggaaaaacagtcagggtgaaagtgcgctgaatctgtcgctgttcctgaaagatccggcaacgactaaagaagcgccgcaaacgctggcgcaggaagtagaccgctcggttaaatctctggatgcgaaactgaccattccggtggatatggcaactgagtttatgactcaggtagcgaagctggaaggttatcaggaagatcaagcaaaaaaactggcgaaacagcaagttgaaggtgcgtcagcaatggggcagatgttccgcctgaccaccttgcaggacaataccatcaccaccagcctgcaatatgctaacggtcagatcacgttaaacgggcagaaaatgccactggaagattttgttgggatgtttgcgatgccggcattaaacgttccggctgtacccgctattccgcagcagtaa

SEQ ID NO: 6861 - DNA, 1647 bp, Escherichia coli
atgtcaaacaaaccctttcattatcaggctccttttccactcaaaaaagatgatactgagtattacctgctaaccagcgaacacgttagcgtatctgaatttgaagggcaggagattttgaaagtcgcacccgaagcgttaactttgttggcgcgtcaggcgtttcatgatgcgtcatttatgctgcgtccggctcaccaacaacaggtggccgacattctgcgtgacccggaagccagcgaaaatgataaatatgtggcgctgcaattcctgcgcaactccgacatcgcggcgaaaggcgttctgccaacctgtcaggataccggcaccgcgattattgttggtaaaaaagggcagcgtgtatggaccggtggcggtgatgaagcggcgctggcacgcggtgtctataacacttatatcgaagataatctgcgctactcgcaaaacgcgccgctggatatgtataaagaggtgaataccggcaccaatctaccagcgcagatcgatctttatgccgttgatggcgacgagtacaaattcctctgtatcgccaaaggtggcggttcggcaaacaagacgtatctctatcaggaaaccaaagcgttactaacgccggggaaactgaaaaattacctggttgagaagatgcgcacgctgggtacggcggcctgtcctccgtatcatattgcgttcgttattggtggaacttctgcagaaacgaaccttaaaacggtgaaactggcttccgctaaatactatgatgaactgccaacggaagggaatgagcacggacaggcgttccgcgatgtggaactggaaaaagaattgctgatcgaagcgcaaaatcttggtctgggtgcgcagtttggcggtaaatacttcgctcacgacatccgcgtgattcgcctgccacgtcacggcgcatcctgcccggtcggtatgggcgtctcctgttctgctgaccgtaatatcaaagcaaagatcaaccgtcaggggatttggatcgaaaaactggaacataatccaggcaaatatatcccggaagagctgcgcaaagcgggagaaggcgaagcggtgcgcgttgaccttaaccgtccgatgaaagagatcctcgcacagttgtcgcagtatcccgtttctacacgcttatcgctgaatggcacgattatcgttggtcgtgatattgctcacgccaaactgaaagagcggatggataacggtgaagggctgccgcagtacattaaagatcatccgatttactacgctggtccggccaaaacgccggaaggttatgcttccggttctcttggcccaacgaccgccggccggatggattcttatgtcgatcaactgcaagcgcagggcggaagtatgatcatgctggcgaaaggcaaccgcagccagcaggtgacggatgcctgtaaaaaacacggcggcttctaccttggcagtatcggtggtccggccgctgtattggcgcagggtagtattaagagcctggaatgtgttgaatatccggaactgggaatggaagccatctggaaaattgaagtggaagatttcccggcatttatccttgtggatgataaaggaaatgacttcttccagcagatacaactcacacagtgcacccgctgtgtgaaataa

SEQ ID NO: 6862 - DNA, 1590 bp, Escherichia coli
atgcgcaaacagcctgatgcccttcgctacgaccgccaaactatttttggccttgtccgtgagcgtccgatcgacattcacaaagatcccgtagcactgaacaaatatatctgcgaatacctgacgacaaagggcgtgtttgagaatgaagaaacagacctgggcactgttgatgttctccagtcatcagaaacacaaactgatgcagtggaaactgaggtatctgatatcccaaaaaatgaaaccgcgccggaagctgaaccatctgtagagcgtgaggggccgttctatttcctcttcgcagataaggacggagaaaaatacggtcgcgcaaacaaactctctggtctggataaggcactggctgctggcgccactgaaatcacaaaagaagaatattttgcccgaaaaaatggcacatacacaggcttaccgcaaaatgcaaataccgctgaagattcagaacaaccagagccgataaaagttaccgctgacgaagtaaacaaaattatgcaggcagccaatatcagccagcctgacgccgataagttgcttgctgcatcacgtggtgaatttgttgaagggattagtgacccgaatgatccgaaatgggtgaaggggctccagacccgcgattctgtgaaccagaaccagcatgaatcggaacggaactaccaaaaagcggaacaaaacagtccaaatgcgttacaaaacgagccagaaacgaaacagcctgaaccagtagcgcaacaggaagtggaaaaagtctgcaccgcctgcggtcagaccggcggcggcaactgccctgattgtggcgcggtgatgggcgacgcaacataccaggaaatattcgatgaagagaatcaggttgaagttcaggaagatgatccggaggaaatggaaggcgctgaacatccacacaaggagaacactggcggcaatcagcatcacaatagcgataatgaaactggcgagacggcagatcacccaattaaggtgaacggtcatcacgaaatcacatccaccagcaggacgtgtgaccatctaatgatcgaccttgaaaccatgggaaaaaatcctgatgccccgatcatctcaataggtgcaatatttttcgatccgcaaaccggagatatgggaccggaatttagtaagactatcgatctggaaactgctggcggagtcattgatcgggacaccattaaatggtggcttaagcaatcacgcgaagcgcaatctgccattatgaccgatgaaatcccgttagatgatgcactgttacaattgcgagaatttatcgacgaaaactccggtgaattttttgttcaggtttggggaaatggagccaacttcgacaacacgattttgcgccgttcatacgaacggcaggggatcccctgcccgtggcgttactacaacgatcgcgatgtacgcacaatcgttgagctggggaaagccatagacttcgatgccagaacggctattccattcgaaggtgagcgccataatgcacttgatgacgcccgttaccaggcaaaatacgtttcagttatctggcaaaaactgatcccgagtcaggctgattcttaa

SEQ ID NO: 6863 - DNA, 237 bp, Escherichia coli
atgattgtctctcccggcaaatgggtatccgaagagcagttaattgcgctgaaaggaataaaaaaaggtacgttaaaaaaggcccgggaaaaatcgtttatggaaggaagggaatataagcatgtcgctcatgacggtatgccatgggataacagtccatgcttttacaacctggaagaaattgatcgctggattgagcgccaggcatcagcgagaccaagacgtcatcttacttga

SEQ ID NO: 6864 - DNA, 1281 bp, Escherichia coli
atgaaatatccgacaggcgtggaaaaccatggagggaaattacgtatctggtttgtttataaagacgtaagagtcagggaaaatctgggggttcctgacatagcaaaaaacaggcgcgttgcaggtgaactacgctcctctgtttgttacgcaataaaaactggtgttttcgactatgcaaaacagtttccctcctcacgcaatctggaaaaatttggtgaggcccgacaagatttaaccataaaagaactggctgaaaaatttctggcactgaaagaaactgaagtcgccaaaacatcactcaacacataccgtgccgtcatcaaaaatatcctgagcataatcggtgaaaaaaatcttgcctcatcgattaataaagaaaaattactggaggttcgtaaagagttactgactggataccagatccccaaaagtaactatattgttacacaaccagggagatcggctgtaactgtaaataattacatgacaaatcttaacgccgtgttccagtttggtgttgataacggttacctggcagataatccgtttaaggggatctcgccattaaaggaatcaagaaccattccggatcctctttcgcgggaagaatttatccgtcttatcgatgcgtgcagaaatcagcaagcaaaaaatttatggtgtgtttctgtttatactggagttcgccctggtgagctgtgtgcacttggatgggaggacatagatctgaaaaatggaacaatgatgatcaggagaaatttagcaaaagaccgtttcacggtaccaaaaacacaggcgggaaccaatcgggtcattcatcttattaagccagcaatcgacgctctccggagtcagatgacattaacgagactgagcaaagagcatatcattgatgttcacctcagagagtatggcagaacagaaaaacaaaaatgcacctttgtttttcaacctgaagtgtcagcgagagtaaaaaattatggtgaccattttaccgttgactcaataaggcagatgtgggacgcagcgataaaacgtgccggactccgccatcgaaaatcatatcagtcgagacatacttatgcctgctggtcgctgacagctggtgctaacccggcatttatagcaaaccagatgggccatgcagatgcgcaaatggtatttcaggtatacggaaaatggatgtctgaaaacaataatgcacaggtagctttgttaaatacacagttaagcgagtttgccccaaccatgccccataacgaagcaatgaaaaattaa

SEQ ID NO: 6865 - DNA, 1215 bp, Escherichia coli
atgaagatcgtaaaggctgaagtttttgttacctgtccggggcgtaatttcgtcacattaaaaatcaccactgaggacggtattacgggccttggggatgccaccctaaatggacgtgagctttccgtggcctcttatttgcaggatcacctttgtccgcagcttattggtcgcgatgcgcaccgtatcgaagatatctggcagtttttctataaaggtgcttactggcgtcgcggtccggttacgatgtcggccatttcagcggttgatatggcgctgtgggatattaaagccaaagctgccaacatgccgctttaccagttactcggcggcgcgtctcgtgaaggggtgatggtttattgccataccaccggtcacagtattgatgaagctctggatgattatgcccgtcatcaggagctgggattcaaagccatccgcgtgcagtgcggaatccctggtatgaaaaccacctatggcatgtcgaaaggtaaaggtctggcttatgaacccgcaaccaaaggacagtggccggaagagcagctgtggtcgacggagaaatacctcgatttcatgccgaaattgtttgacgcggtacgtaacaagtttggttttaatgaacatttgctgcatgacatgcaccatcgcttaacgcctattgaagcggcgcgctttggtaaaagcattgaagattatcgcatgttctggatggaagacccgacgcctgcggaaaaccaggagtgtttccgcctgattcgccaacacaccgtcacgccaattgcagtgggtgaagtcttcaacagcatctgggactgcaaacagctgattgaagaacaacttatcgactatatccgcaccacgctgactcacgcgggggggattaccggtatgcgccggattgccgattttgcttcgctgtatcaggtacgtactggctcacacggtccttccgatttgtcgccagtctgcatggctgcggcgctgcactttgatctgtgggtccccaatttcggtgtccaggaatacatgggttattccgaacaaatgcttgaagtcttcccgcacaactggacttttgataacggctatatgcatccgggagacaaaccgggtcttggcatcgaattcgatgaaaagctggcggcgaaatatccctatgaacctgcttatctgccagtcgcacgtctggaagatggcacgctgtggaactggtaa

SEQ ID NO: 6866 - DNA, 1404 bp, Escherichia coli
atgaatacagtacgcagcgaaaaagattcgatggggacgattgatgtcccggcagataagctgtggggcgcacaaactcaacgctcgctggagcatttccgcatttcgacggagaaaatgcccacctcactgattcatgcgctggcgctaaccaagcgcgcagcggcaaaagttaatgaagatttaggcttgttgtctgaagagaaagcgagcgccattcggcaggcggcggatgaagtactggcaggacagcatgacgacgaattcccattggctatctggcagaccggctccggcacgcaaagtaacatgaacatgaacgaagtgctggctaaccgggccagtgaattactcggcggcgtgcgtgggatggagcgtaaagttcaccctaacgacgacgtgaacaaaagccaaagttctaacgatgtctttccaacggcgatgcacgttgcggcgctgctggcgctgcgcaagcaactcattccgcagcttaaaaccctgacacagacgctgagtgaaaaatcccgtgcatttgccgatatcgtaaaaatcggtcgaacccacttgcaggacgccacgccgcttacactggggcaggagatttccggctgggtagcgatgcttgagcataatctcaaacatattgaatacagcctgcctcacgtagcggaactggctatgggcggtacagctgtgggtactggactaaatacccatccggagtatgcgcgtcgcgtagcagatgaactggcagtcattacctgcgcaccgtttgttaccgcgccgaacaaatttgaagcgctggcgacctgtgatgccctggttcaggcgcacggcgcgttgaaagggttggctgcgtcactgatgaaaattgccaatgatgtccgctggctggcctctggcccgcgctgcggaattggtgaaatctcaatcccggaaaatgagccgggcagctcaatcatgccggggaaagtgaacccaacccagtgtgaggcattaaccatgctctgctgtcaggtgatggggaacgacgtggcaatcaacatggggggcgcttccggtaactttgaactgaacgtcttccgtccaatggtgaaccataatttcctgcaatcggtgcgtttgctggcagatggcatggaaagtttcaacaaacactgtgcagtgggcattgaaccgaatcgtgagcgaatcaatcaattactcaatgaatcgctgatgctggtgactgcgctcaacactcacattggttatgacaaagccgccgagatcgccaaaaaagcgcataaagaagggctgaccttaaaagcggcggcccttgcgctggggtatcttagcgaagccgagtttgacagctgggtacggccagaacagatggtcggcagtatgaaagccgggcgttaa

SEQ ID NO: 6867 - DNA, 549 bp, Escherichia coli
atgcaaacggaacacgtcattttattgaatgcacagggagttcccacgggtacgctggaaaagtatgccgcacacacggcagacactctcttacatctcgcgttctccagttggctgtttaatgccaaagggcaattattagttacccgccgcgcccttagcaaaaaagcgtggcctggcgtgtggactaactcggtttgtgggcacccacaactgggagaaagcaacgaagacgcggtgatccgccgttgccgttatgagcttggcgtggaaattacgcctcctgaatctatctatcctgacttctactatcgcgccaccgatccgaatggcattgtggaaaatgaagtgtgtccggtatttgccgcacgcaccaccagtgcgttacagatcaacgatgatgaagtgatggattatcaatggtgtgatttagcagatgtattacacggtattgatgccacgccgtgggcgttcagtccgtggatggtgatgcaggcagccaatagtgaagcaagaaaattgttgtctgctttcgcgcagcacaattaa

SEQ ID NO: 6868 - DNA, 1920 bp, Escherichia coli
atgaataagtttatcgctgctgaagctgcggaatgtataggctgtcatgcttgtgaaattgcctgtgcgatggcacataatcaagaaaactggccgctgagtcacagtgactttcgaccgcgtatccacgttgtagggaaaggccaggctgcgaatccggtggcctgccatcactgcaacaatgccccttgcgttacggcttgtccggttaatgctctgactttccagcccgatagcgtacaactggacgagcaaaaatgtattggttgtaaaagatgcgcaatcgcttgcccctttggcgtcgttgagatggtcgatacgattgcgcagaaatgcgacctttgtaaccagcgcagttccggcacgcaagcctgtattgaagtctgcccaacacaggcgttacggctgatggacgataaagggttgcagcagataaaggtggcccgccagcgcaaaacggcagcaggaaaagcgtcatcagacgctcagccatctcgcagtgcagcgttgctccccgttaactcgcgtaaagccgcagataaaatttcagcgagtgaacggaaaacccactttggcgaaatctattacgggctggatccacaacaagcgacttatgagagtgaccgctgtgtttattgcgccgaaaaagctaactgcaactggcattgcccgctgcataacgctattccggattacatccgtctggtgcaggaaggaaagattattgaagcggcagaactttgccaccagaccagttccttgccagaaatctgcggcagggtatgtccacaggaccgtctttgtgaaggcgcatgtattttgaaagatcactctggcgcagtctctatcgggaatctggaacgctacattaccgataccgcgctggcgatgggctggcgtcccgatgtcagcaaagttgttccccgtagcgaaaaagtggcggtgattggcgcagggcctgcagggttagggtgtgctgatattctggcgcgcgcgggagttcaggttgatgtctttgatcgccatccagaaattggcggtatgctgacttttggcattcctcctttcaaactcgataaaacagtcttaagccagcggcgagagatattcaccgcaatgggaatcgactttcatcttaactgtgaaattggccgcgatattacctttagcgatttaacttctgaatatgatgcagttttcatcggcgtggggacttacgggatgatgcgagcagatctgccgcatgaagatgcgcccggtgtcattcaggctctaccgttcctgacggcccatacccgccagctcatggggttgccggagtctgaagagtatccgctgacggatgtggaaggtaagcgagtcgtggtattgggcggtggcgatacgaccatggattgtttgcggacttccatccgcctcaatgccgccagcgtgacctgcgcgtatcgtcgtgatgaagtcagtatgccgggctcgcgcaaagaggtggtcaatgcgcgcgaggaaggtgtcgagtttcagttcaatgttcagccgcaatatatcgcttgtgacgaagatgggcgtttaactgcggtgggccttattcgtaccgctatgggtgagccgggtccggatggacgccgtcgtcctcgtccggtagcgggttcagagtttgagctgcctgccgatgttctgattatggcctttggtttccaggcgcatgccatgccgtggttgcaaggcagcggaattaagctcgataaatggggcctgattcaaaccggggacgtcgggtatttacccacccagacgcatctgaaaaaagtctttgctggtggtgatgctgttcatggcgcggatctggttgtcactgcaatggccgcaggaaggcaggcggcgcgcgatatgttaactctgtttgatacgaaggcatcgtga

SEQ ID NO: 6869 - DNA, 489 bp, Escherichia coli
atgaaatcgttaattatcgttaatccggctgactgtattggctgccgtacttgtgaagtagcctgtgtggtcgctcacccttcagaacaggagttgaatgccgatgtctttttaccccggctgaaggtacagcgactggacagcatcagtgcgccggtgatgtgccatcagtgtgaaaacgccccttgtgttagcgcttgccccgtgggggcgctgacgatgggcgagcaggtggtgcagaccaattctgcccgttgtattggctgtcagagttgcgtgagtgcgtgcccgtttggaatgatcaccattcagtcgttgccgggggatacccggcaacaaatcgtgaaatgcgatctctgtgaacagcgggaagaggggccagcctgcgttgaatcttgcccaacacaggcgctgcagttgcttactgaaagagaactcaggcgagtccgccagcagcgtattgttgccagcggtgagaatcctctgtga

SEQ ID NO: 6870 - DNA, 177 bp, Escherichia coli
atgagtcaggaaattcgatacctctacagtgaatattttgctgatgatacttccctttgccaaatgaaattaacctctttctctattaccgcgtttttccagaagcaagagattgggtatcaagaggctggctgctatgatatggcgtcttgttttttaagcgaggaaagattttga

SEQ ID NO: 6871 - DNA, 1611 bp, Escherichia coli
atgaaagggaaatctacattaactcttctgctcgctggtatattttcgtgcggcacatgccaggcggcaggggcagaagtgacgagtgaatctgtatttaacattcttaattccacgggggcagcaactgataaaagttatttatcgttaaatccagataagtatcctaattatcgtcttctgattcactcagccaaattaaaaaatgaaataaagagccactataccaaagacgaaattcaaggattgttaacattaacagaaaatacacgaaagttaacgttgacggagaaaccctggggaacatttattcttgcttctactttcgaagatgacaaaacagcggcagaaacccactatgatgctgtctggctgagggatagtttatggggctatatggcattagtatcagatcagggaaatagtgtagccgcaaaaaaggttctgctcactctgtgggaatatatgtctacgcccgaccagattaagcggatgcaggacgtcattagcaacccaaaacgactggatggtattcctgggcaaatgaatgctgtacatatccgatttgacagcaactcccccgtgatggcagatgtgcaggaagaaggcaagccgcagctgtggaaccataaacaaaatgatgcgttaggtctttatcttgatctccttatacaagcaatcgacactggtactattaacgctgaagattggcaaaaaggtgaccgattaaaatcggttgcgctgctgattgcttatctggataaagccaatttctatgttatggaagattccggagcgtgggaggaagatgcccgattaaacacatcttccgttgcactggtgacctctggactggaacgtttgtcaaacctactctcgaagaaagactctgtttttgtctctgatttactacgcgaagctaaagccaatgaactggatgaaccactttcaacaacgaggttgaaccacctcatagataaaggttatgaaagaataacgctacagcttgatttagggggagaatctcctggttatctggaaaaagataaacattacagagaagccgatgcggctttacttaatgttatttatcctgcaaatctttcaaagataaataccagaagaaaagagcaagttctaaaaatagttaaaaaactagcaggtccgtatggtataaaaagatacgagaaggataattatcagtcggcaaatttttggttcaatgatattaaaaccgataccgatcaaaattcacatgcgaaaagagaaatgagcttcattccatcaacagaagcagaatggttttttgactcatggtatgcaaaatcagcagcaattgtttataaagaatcaagaaaagaagagtatttgaatgactcagtgcaatttatgaatagatcattggcccaaataacaggcgagaatatgattggtgcaaatggcaggagtgtacctgaaatggcacttcccgaaagctataactatatccacaagtcgggaactttgcatgaagcgccaagccctatcattccgctaaattggtcgaaagcttcaatgactctcatgttgaaagagatgtccaaccttatcaatgatgagggaaataaatag

SEQ ID NO: 6872 - DNA, 1248 bp, Escherichia coli
atgctaccatctatttcaatcaacaataccagcgcagcttacacagaatccatcaatgaaaataacaatgatgaagttaatatattagtacaagagctcaaaaacctttttaatggtaagcaaggaataagcacctgtgttaaacatctacttgcgcttataaaaaatgccatacgaggaaacgacaatcctgatagatttaatattaataattcctcagttgcttatattgatattggctccaatgatacagaccatattactattggtatcgataaccaagaaacaataaaattacttgcgagctataaagacaaagaactcgtccgtgctatcattaatgacaacatagttgagaagactcatgatgatataaataatgctgactttactgatggtagtatcgttgttagtggtaatgagggtgctattgactccaatgatacagccgatattactagtggtatctataatcaagaaccaataaaatcacctacgaacgatgaaaacaaaaaagtcggccaaaccatcatccatgaaaatgtagtagagaatactcatgatatcaataacaaggaaatgatcttcagcgcattaaaagaaatatatgatggagatcctggttttatcttcaataagatatcacaaaaactcagacatacgataacggaatttgatgagaatgggaaaagcgaaccaacggacttatttacctggtacggtaaagataaaaaaggcgattctctcgctattgtaattaaaaataaaaacggaaatgattacttatctctcggttactatgatcaggacgactaccacattcaaagaggaattcgtattaatggtgatagtctcacccaatattgtagtgaaaaagccaggaatgcttcagcgtggtttgaaagcagtaaagctatcatggcagaatcatttgcaacaggttccgatcatcaggttgtaaacgagctcaacggggaaagactgagagagccaaacgaagtttttaaacgtttaggtcgagcaataagatataattttcaagtggacgatgcaaaatttagacgcgataatgtaaaagaaataatttctactttagtcgataacgaagttgaccgttctcaaaataaatatgaccactttaaggaaatcgaagataaagttgaaaaaaggcttcaaaatcgccaggctaaatatcaaaatgaaattaatcaactatctgcattgggtgttaattttgatgataattaa

SEQ ID NO: 6873 - DNA, 933 bp, Escherichia coli
atggacaacgacaaaattgatcaacacagcgacgaaattgaagttgagagcgaagaaaaagagcgcggcaaaaaaatagaaatagatgaagaccgactcccctcccgggcgatggcaattcatgagcatatccgccaggatggtgaaaaagagctggaacgcgacgcaatggcgctactgtggtcagccattgcggcgggtctgtcgatgggcgcttcattactggcaaaagggatatttcatgtcgaactggaaggtgtgccgggcagcttcttgctggagaatctcggttatacctttggttttattatcgtcattatggcccgccagcaattatttaccgaaaacaccgtgactgcggtactacccgtcatgcaaaaaccgacaatgagcaacgttggcttacttatgcggttatggggcgtcgtgctgctgggtaatattctcgggacaggtattgcggcgtgggcatttgaatatatgccaatcttcaatgaagaaactcgcgatgcatttgtcaaaatcggcatggatgtgatgaagaacacccccagcgagatgtttgccaacgcgatcatttccggctggctgatcgccactatggtatggatgtttcctgcagcgggtgcggcaaagattgtggtgattatattgatgacctggcttattgccctgggtgacaccactcacatcgttgtcggttctgttgaaatcctctatctggtgtttaacggtacgctgcactggagcgatttcatctggcccttcgcactacctactttagcggggaacatctgcggcggcacctttatcttcgcgttaatgagtcatgcacagattcgtaacgacatgagcaacaagcgcaaagcagaagcacgccaaaaagcagaacgtgcggaaaacattaagaaaaatgataaaaacccggcataa

SEQ ID NO: 6874 - DNA, 1698 bp, Escherichia coli
gtgcacgaaatattcaacatgctgctggcggtcttcgatcgggcagcgttaatgcttatctgcctgttttttctcatccgtatccgcctgtttcgcgaactgttgcacaagtcggcacactcaccgaaagagctgctcgccgttaccgccattttctcgctgttcgccctgttcagcacctggtccggcgttcccgtagaaggctcgctggtgaacgtacgtattatcgcggtgatgtcaggcggaattctgtttggcccgtgggtgggcatcattaccggcgtgattgcgggtattcaccgttatttaattgacatcggcggcgtgacggcgatcccctgctttatcaccagcattctggcgggttgtatatcgggctggatcaacctgaaaatccctaaagcgcagcgttggcgcgtcggtattctcggcggcatgttgtgtgaaacgttgaccatgattctggtgattgtctgggcaccaactaccgcgttggggatcgatatcgtctctaaaatcggcattccaatgatcctcggtagcgtctgtatcggctttattgtgcttctggtgcaaagcgttgagggcgaaaaagaggccagcgccgcgcggcaggccaagctggcgctggatatcgccaacaaaacgctgccgctgtttcgccatgtcaatagcgagtcattacgcaaagtctgcgaaattatccgcgatgacattcacgccgatgcggtggcgattactaataccgatcatgtgctggcctacgttggcgtgggtgaacataactatcagaatggcgatgacttcattagcccgactacccgtcaggcgatgaattatggaaaaatcatcattaaaaacaatgatgaagcccaccgcacaccagagattcattccatgctggtgatcccattgtgggagaaaggcgttgtgaccggaacgctgaaaatttactactgccacgcgcatcagatcacctcgtcattacaggaaatggcggtcggtctgtcacaaatcatctccacgcaactggaggtttcgcgcgctgagcagctgcgtgaaatggcaaataaggcagagcttcgcgccctgcaaagcaaaattaatccccatttcctgtttaacgctttgaacgctatttcatcgtcaatccgcctgaatccggatactgctcgccagctgatctttaatttgtcgcgctatctgcgctataacattgaattaaaagatgatgagcaaatcgatatcaaaaaagagctgtatcaaattaaagactatattgccattgagcaggcccgctttggcgacaagctgacagttatctatgatattgatgaagaggtgaattgctgcattcccagcctgctgatccagccgttggtggaaaacgccattgtccacggtatccagccttgcaaaggtaaaggcgttgtcaccatcagcgttgcagagtgcggtaattgggtacgtattgcggtgcgagataccgggcacggcatcgatccaaaggtgattgagcgggtcgaagcgaatgaaatgccgggcaataaaattggcctgctgaatgtccatcatcgtgtgaagttattgtatggcgaggggctgcatatccgccgcctggaaccaggaacggaaattgcgttttacattcctaaccaacgcaccccagtcgcctcacaggctacgttattgctttga

SEQ ID NO: 6875 - DNA, 858 bp, Escherichia coli
atgaaagcaccaggcttgcccgccgatcaacaatttttcgccgatctgttcagcggcctggtgcttaacccgcaactactggggcgcgtctggtttgccagccagcctgcctcattgccagtgggcagtttatgtattgattttccccgtctggatatcgtgctacgcggcgaatacggcaatctgctggaagcaaagcagcaacgtatggtggaaggagaaatgctgtttattccggcacgcgcggctaatttaccggtcaacaacaaaccggtgatgctgttaagcctggtgttcgcaccgacctggcttgggttatcgttttacgatagccgcaccacgtcgttgttgcatcctgcccgccagatccagcttcccagcctgcaacgcggcgaaggtgaagcgatgcttaccgccctcacccatcttagccgttcgccgctggagcagaatatcattcagccactggtgttaagtttgctgcatctttgccgcaacgtggtgaatatgccaccgggcaattcgcagccgcgcggcgattttctctatcacagcatttgtaactgggttcaggataattatgcccagcagctcacccgcgagagcgtggctcagttttttaatatcacgcccaatcatctgtcaaaactgtttgctcagcatggaacaatgcgttttatcgagtatgttcgctgggtacgaatggcaaaggcaaggatgattttgcagaaatatcatctgtcgattcatgaagtggcacagcgttgcggttttccggacagcgactatttttgtcgcattttccggcgtcagtttggcctgacgccgggagagtacagcgcccgttttcagggctaa

SEQ ID NO: 6876 - DNA, 207 bp, Escherichia coli
gtgaaaccggttgactggcagtcagaaatgggcgaagtcgaactggtgatcatgctgacgttaggtgctaacgaagggatgagccatgtgaaagtcttctcgcagctggcgcgcaaactggtgaataaaaacttccgccagtcgctgttcgccgcgcaagatgcgcaaagcatcctgacgctgctggaaacggaattaaccttctga

SEQ ID NO: 6877 - DNA, 249 bp, Escherichia coli
atgacggatccactgagatttggtgtgcgggatcgctacgccaaaaccaacgccggtggtaacaatctcttcccgctgccagacatcttcttccagctcaaacggatgttcagtacgcccgttaacgccgaggttaccgcacaggaactggatcgcctgctctttattgctaaaggcctgatcaacgaagatattctccagcgccagctgatgcgccgcgcgataaatgcactctatcttgtgcgataa

SEQ ID NO: 6878 - DNA, 1149 bp, Escherichia coli
atgtccacgtatacccggcctgtcatgcttttgctgtctggcctgcttttgttgactctggcgatcgcagtgttaaatacactcgtgccgctttggctcgcccaggaacacatgtccacatggcaggtaggcgttgtcagctcatcctattttaccggcaacctggtcggtacattgctgacagggtatgtcattaagcgcattggctttaaccgcagctattatctggcctccttcatttttgccgctggctgtgccggccttggcctgatgattggattctggagctggttggcttggcgttttgtcgccggtgtcggctgtgccatgatttgggtggttgttgagagcgcgctgatgtgcagtgggacgtcacgtaaccgtgggcgtttgcttgctgcgtatatgatggtttattacgtgggaacgtttttaggccagttactggtcagcaaagtttcaaccgagctgatgtccgtattgccgtgggttacaggtttgacgttggcagggatcttaccgctgttgtttacgcgtgtgctgaatcagcaggctgaaaaccatgatgcgacgtcaattacgtcaatgctaaaactccgtcaggcgcggcttggcgtgaatggctgcattatctcaggaatcgttctgggatctctatatggcctgatgccgctgtacctcaatcacaaaggggtgagcaatgccagcattggtttctggatggcggtactggtcagtgcgggtatccttggacaatggccgattggacgtctggcggataagtttggtcgactgctggtgttgcgtgttcaggtctttgtcgtcattctcggcagtatcgcgatgcttagccaggcggcgatggccccagcgttattcatcctcggtgccgctggctttacgctatatccggtggcgatggcatgggcttgcgagaaagttgaacatcatcaactggtggcgatgaaccaggccttactgttgagctataccgtgggaagtctgcttggcccgtcatttactgccatgctaatgcagaatttctccgataatttattgtttatcatgatcgccagcgtatcgtttatctatttgctgatgctgcttcgcaacgccggtcatacgccgaaacccgttgctcacgtgtaa

SEQ ID NO: 6879 - DNA, 1431 bp, Escherichia coli
atggctgggaatgttcaggaaaaacagctgcgatggtacaacattgcgctgatgtcttttatcactgtctggggttttggcaacgttgttaataactacgccaaccaggggctggtggttgttttttcatgggtgtttatctttgcgctctatttcacaccttatgcgctaattgttggtcagttaggctcgaccttcaaagatgggaagggcggggtcagtacctggattaaacacacgatgggacccggactggcttacctcgccgcgtggacctactgggtagtgcatattccctatctggcacaaaaaccccaggcaatactgattgcgctcggttgggcgatgaaaggcgacggttcgttaatcaaagaatattcagtcgtagcgttacaggggttaacgctggtgctgtttatcttctttatgtgggttgcttcacgcggtatgaaatcgctgaaaatcgtcggttctgtggcagggattgcgatgtttgttatgtcgctcctgtatgtggcgatggcggtaaccgcgcctgcaattactgaagtgcatattgcgaccacaaacattacctgggaaacgttcattcctcatatcgactttacctacattaccactatttcaatgctggttttcgcggttggcggagcagagaagatttctccttacgttaatcaaacgcgcaacccaggaaaagaatttccaaaagggatgttatgcctggcggtgatggttgcggtttgtgccattctgggctcgctggcgatggggatgatgtttgattcgcgtaatatcccggatgacttaatgaccaacggtcagtattacgcctttcagaagctgggcgagtattacaacatgggtaatactttaatggtgatttacgccattgcgaataccctgggacaagtagctgcgctggtattctcgattgatgcgccgcttaaagtactattaggcgatgctgatagcaaatatattccagccagtttatgtcgtaccaacgcttctggtacgcccgttaatggctattttctgaccctggtactggtggcgattctgattatgctgccgactctcggcattggtgatatgaacaatctctataaatggctgttgaaccttaattcggtagtgatgccgctgcgttatttatgggtatttgttgcatttattgcagtcgttcgcctggcgcagaaatataaaccagagtatgtctttattcgtaacaggccgctggcgatgactgtcgggatctggtgttttacctttaccgcttttgcctgcctgacagggattttcccgaaaatggaagccttcaccgcagagtggacttttcagttggcgctgaatattgcgacgccatttgtcctggttggactggggctgatattcccgttacttgcgcgtaaagcgaataagaaatag

SEQ ID NO: 6880 - DNA, 1200 bp, Escherichia coli
ttgtggccagccggtcaaccgacgaccactgtaacaacgacgggtggtaacgcagcggcaaccgttgcggcgacgggtggcgctccggtagtgggtgatatgcccgcacaaactgcaccgccaacaacggcgaaccttaacgcctggctgaataatttctataacgcggaggcgaaacgtaaatcgatcttcccgtcttcgctgcccgctgatgctcagccatttgaactactggtgattaatatctgttcgctttcctggtcggatatagaagccgccgggttgatgtcgcatccgctgtggtcgcatttcgatattgagttcaagaactttaactccgccacctcctacagtggcccggcagcgatccgtttactgcgcgccagctgcgggcagacttcgcacactaatctgtatcaaccggcaaataacgactgctatctgtttgataacctgtcgaaactgggctttacccagcacctgatgatgggacataacggccagttcggcggttttttgaaagaagttcgcgaaaatggcggcatgcagaccgaattgatggatcaaacaaatctgccggttattttgctgggctttgatggttcgccggtttatgacgataccgccgtgcttaaccgctggctggacgttaccgaaaaagataaaaacagccgtagtgccacgttctacaacacgcttccactgcatgacggcaaccattatccgggcgtcagcaaaacagcggattacaaagcgcgggcgcagaaattctttgatgaactggacgccttctttactgaactggagaaatcgggtcgtaaagtgatggtggtcgtggtgccggaacacggcggcgcgctgaagggcgacagaatgcaggtatctggcctacgtgatatccctagcccgtctatcacagacgtccccgttggggtgaaattcttcggcatgaaggcaccacatcagggggcaccgattgtcatcgaccaaccgagcagcttcctggctatctccgatctggtggttcgcgttcttgatggtaagattttcaccgaagacaatgttgactggaaaaaactcaccagtgggttgccacaaacagcaccggtctccgagaactcaaatgcagtagttattcaataccaggataaaccgtacgttcgcctgaacggcggcgactgggtgccttacccgcagtaa

SEQ ID NO: 6881 - DNA, 1653 bp, Escherichia coli
atgaaattattgcagcggggcgtggcgttagcactgttaaccacatttacactggcgagtgaagctgctctggcgtatgagcaggataaaacctacaaaattacagttctgcataccaatgatcatcatgggcatttttggcgcaatgaatatggcgaatatggtctggcggcgcaaaaaacgctggtggatggtatccgcaaagaggttgcggctgaaggcggtagcgtgctgctactttccggtggtgacattaacactggcgtacccgagtccgacttacaggatgccgaacctgattttcgcggtatgaatctggtgggctatgacgcgatggcgatcggtaatcatgaatttgataacccgctcaccgtattacgccagcaggaaaagtgggctaagttcccgttgctttccgccaatatctaccagaaaagtaccggcgagcgcctgtttaaaccatgggcgctgtttaagcgtcaggatctgaaaattgccgttattggcctgacgacggatgatacagcgaagttaggcaacccagaaaacttcaccgatattgagttccgtaagcccgccgatgaagcgaagctggtgattcaggagctgcaacagacagaaaagccagacattattatcgcggcgacccatatggggcattacgacaatggtgagcacggctctaacgcaccgggcgatgtggagatggcgcgcgcgctgcctgccggatcactggcgatgatcgtcggtggtcactcgcaagatccggtctgcatggcggcagaaaacaaaaaacaggtcgattacgtgccgggtacgccatgcaaaccggatcaacaaaacggcatctggattgtgcaggcgcatgagtggggcaaatacgtgggacgggctgattttgagtttcgtaatggcgaaatgaaaatggttaactaccagctgattccggtgaacctgaagaagaaagtgacctgggaagacgggaaaagcgagcgcgtgctttacactcctgaaatcgctgaaaaccagcaaatgatctcgctgttatcgccgttccagaacaaaggcaaagcgcagctggaagtgaaaataggcgaaaccaatggtcgtctggaaggcgatcgtgacaaagtgcgttttgtacagaccaatatggggcggttgattctggcagcccaaatggatcgcactggtgctgactttgcggtgatgagtggaggcggaattcgtgattctatcgaagcaggcgatatcagctataaaaacgtgctgaaagtgcagccattcggcaatgtggtggtgtatgccgacatgaccgggaaagaggtgattgattacctgaccgccgtcgcgcagatgaagccagattcaggtgcctacccgcaatttgctaacgttagctttgtggcgaaaggcggcaaactggacgaccttaaaatcaaaggcgaaccggtcgatccggcgaaaacttatcgtatggcgacattaaacttcaatgccaccggcggtgatggctatccgcgccttgataacaaaccgggctatgtgaataccggctttattgatgccgaagtgctgaaagcgtatatccagaaaagctcgccgctggatgtgagtgtttatgaaccgaaaggtgaggtgagctggcagtaa

SEQ ID NO: 6882 - DNA, 858 bp, Escherichia coli
gtgactgatcttcaacaaacgtattaccgccaggtaaagaacccgaatccggtgtttacaccccgtaaaggtgccggaacgttgaagttctgcgaaaaactgatggaaaaggcggtgggcttcacctcccgttttgatttcgccattcatgtggcgcatgcccgttcccgtggtttgcgtcggcgcatgccaccggtgctgcgtcgacgggctattgatgcgctgctgcagggactctgttttcactatgatccgctggccaaccgcgtccagtgctccatcaccacgctggccattgagtgcggactggcgacagagtccggtgcaggaaaactctccatcacccgtgccacccgggccctgacgttcctgtcagagctgggactgattacctaccagacggaatatgacccgcttatcgggtgctacattccgaccgacatcacgttcacaccggctctgtttgctgcccttgatgtgtctgaggatgcagtggcagctgcgcgccgcagtcgtgttgaatgggaaaacaaacagcgcaaaaagcaggggctggataccctgggtatggatgagctgatagcgaaagcctggcgttttgtgcgtgagcgtttctgcagttaccagacagagcttaagtcccgtggaataaaacgtgcccgtgcgcgtcgtgatgcgaacagggaacgtcaggatatcgtcaccctggtgaaacggcagctgacgcgtgaaatctcggaagggcgcttctctgccagtcgtgaggcggtaaaacgtgaagtggagcgtcgtgtgaaggagcgcatgattctgtcacgtaaccgcaattacagccggctggccaccgcttccccctga

SEQ ID NO: 6883 - DNA, 705 bp, Escherichia coli
atgaacccattcaaaggccggcattttcagcgtgacatcattctgtgggccgtacgctggtactgcaaatacggcatcagttaccgtgagctgcaggagatgctggctgaacgcggagtgaatgtcgatcactccacgatttaccgctgggttcagcgttatgcgcctgaaatggaaaaacggctgcgctggtactggcgtaacccttccgatctttgcccgtggcacatggatgaaacctacgtgaaggtcaatggccgctgggcgtatctgtaccgggccgtcgacagccggggccgcactgtcgatttttatctctcctcccgtcgtaacagcaaagctgcatacctgtttctgggtaaaatcctcaacaacgtgaagaagtggcagatcccgcgattcatcaacacggataaagcgcccgcctatggtcgcgcgcttgctctgctcaaacgcgaaggccggtgcccgtctgacgttgaacaccgacagattaagtaccggaacaacgtgattgaatgcgatcatggcaaactgaaacggataatcggcgccacgctgggatttaaatccatgaagacggcttacgccaccatcaaaggtattgaggtgatgcgtgcactacgcaaaggccaggcctcagcattttattatggtgatcccctgggcgaaatgcgcctggtaagcagagtttttgaaatgtaa

SEQ ID NO: 6884 - DNA, 279 bp, Escherichia coli
gtggatgtggactggctgatcgccgagcgtcccggcaaggtaaaaaccttgaagcagcatccgcgcaagaacaaaacggccatcaacatcgaatacatgaaagccagcatccgtgccaaggtggagcacccgtttcgcatcatcaagcggcagttcggcttcgtgaaagccagatacaaggggctgctgaaaaacgataaccaactggcgatgttattcaccctggccaacctgtttcgggtggaccaaatgatacgtcagtgggagagatctcagtaa

SEQ ID NO: 6885 - DNA, 570 bp, Escherichia coli
atgttctcggcaataagccagaaaacggggctcagtaacgtaacaccgatacttggtactagtgataacggtaacggtacaaatctggcaattattggctttaactcagagcctgataaaaaagcagtcagtacggcggccagttttgctaatagcagctaccgccttttctctacagaaatgaataacctcaataaacgtatgggggacattcgcgacagtggagaagccggggtctggggacgctatatgctcggtcaggggagtggcactgacggttatcagaatacatacaaccacctgcaactcggtgcagacaaaggcataagaattgaatcagcaatgctatacactggcttaatatttacccatacaagtaccaatgcagagctgagcggcagctattatggcgatactaaaagctatggtctgggtgggtatacgtccatcttctttgataacggtttttatactgattttatcgctaaatacatccattcaacaaacgtttatagctatttaagtccaagtgaaccgccccgggtttcctggagagtgttttatctgtga

SEQ ID NO: 6886 - DNA, 447 bp, Escherichia coli
gtggcgttcatcattgatgtgtttgccggatacatcgtggggtggcgggtctcatcgtccatggaaacgacattcgtgctggatgcactggagcaggcgttatgggcccgtcgaccgtccggcacggtccatcacagtgataaaggttctcagtatgtatcgctggcctacacacagcggcttaaggaagccggattactggcatcaacaggaagtacaggcgactcgtatgacaacgcgatggcggagaacatcaatggtctttacaaagcggaggtaatacaccgtaagagctggaaaaaccgtgcagaagtggaactggccacactcacgtgggtggactggtataacaatcgacgattgctggaaaggctgggccatactcctccggcagaagcagaaaaagcttattatgcttccatcggaaacgatgatctggcagcctga

SEQ ID NO: 6887 - DNA, 309 bp, Escherichia coli
atggagactttcgatactgataaatttcgctcagaactggatcttttatcaaaaaggatcatgcctggttgtggtcttgtttttgagctatatcaacgtcgtttgagcgctgcgattgatgaatttatcgccagattgccgaaagaacaacatgctcaggcgtttgaactggctcgccaggagtttgattatctttctgcagaagagattgcagatgaaatacgccgagacgcagaaaaaggctattgttgccacggctttgatcgcgattgctgccctcttggttgcggtgatttagatgattattaa

SEQ ID NO: 6888 - DNA, 648 bp, Escherichia coli
atggttaatacaaaaaaatttgtgatgattgcgttaagttcattattgttggcagggtgtgactcagcgaaggatgccaataaatcaaactttgaaaaagcgattaatacgaaacttgagaaggaatgcattacaatcagtcctcttgggaggtttgatagtaagccttatccagttcaattatctgtcgcccaaactaatcgatatacatctcaggaacgggcagacgaaataaataccaaagagttttccatgtttgatgcactggttaaagctggtttattgacagtaaaagataccctggttgatgaaactattggattttctaaaacaggtaaaaaagtgcctgggcgtgaatatgctctgacagagaatggaaaaaaatatctgaaatctccagagcgccctgatttctgtattggtcattataaggttgatgagatcattgattttactgaacctggtgatgctatgggaatgaaaataacaagggtcaattacacattcagtcctacgaatattgctgaatgggcaaagagcgatgatattcaggcagcatttccacttcttaagtttaatttgaaagagaaacagaaaaaccgtctatctctggttttgaaaaatgatggatggtccgctgaacgatag

SEQ ID NO: 6889 - DNA, 486 bp, Escherichia coli
atgaataatttacgtgataaaaaatcaaatcctgttattacattaattgttgtcgtgatttctttattcttccttcctgcaatcgccgcaggactggggactatgggagaaatttacattgatggtctgcgtgaattaccgtcttttggtataaaggcgataagtgttgcaatctggatgcttttagttgcatatctgatgtgttgcttcatgaaagctaagaaagattttattcgcttacctgctatactgacgtttattgggacggttctcctgccttttgtaagtagttttcaaaagatgatgattatatccggttcagatgtttccaccaaagcgacctttttgagcaaggttacagaaggtctgggaacaatgaaaagtggatttatgtttatagtacctgctttattatgtgcaatagcttccattatgctggctgttggaatgataaatattttacgtaatcgttatatggggcgctaa

SEQ ID NO: 6890 - DNA, 276 bp, Escherichia coli
atgagccagtatcgtttaacaggaaaatcagcatcgcgtagttatgaacttctggttggctgggataccccgctttccaggttttttcttgttattgagccagaacttgacgagccggtatattcgaatatttatgagaaagatccatcatctttgacgcttgagttttttcagtcagttcttgaacgttacgggatagagaatgtatctctgctgcctggtcatgagtcaggtttgtatgagaaattgcatgatgatagaagaaataataactag

SEQ ID NO: 6891 - DNA, 351 bp, Escherichia coli
atgaaaataaaactagggtcaggttcggtatctgtaaatggtgttgtgtatgaaggaaaggggaaagttatttccatattaaataatgaagtcattattgatggtgtcgttcatgggaaagccgtagctcttcctgaaattactgttattgttaatggtcatgttgattcattacataccgagttgggaaatataatcattaatggtaatgctggtatggttaaaactgcatcgggggatgtttcttgtgaaaatgtttcaggaaatgttgagtctatgagtggtaatgttaattgtaaaaatgtttatggtggagttaaaacattatctgggaacatatataaagaatga

SEQ ID NO: 6892 - DNA, 624 bp, Escherichia coli
atgcctaaagttatagcatttttaaatggtaaggggggggtgtctaagacaacctcggcagtcaatattgctactgctcttgctcgtaagggatacaaagttgtcgttgtggataccgatcctcagggaagtgttagtaactggtatgatgacagtaagtgtgtttttgatgtagcagaagctacgacagaaaaagaaatttaccgtttgcggaaggcgcttcctttgcacgattttatcattattgatggtgctgcggcgatttcggcgatatcggcagctgctgttatggtttctgatcttgtcattatcccagttactccttcgccgcttgattttgctgcatgtggcgcgatattggcagtgatagaagctcggcaggatttacgcccggtgattgctcgctttttgattactaaaaaagtacagcaaacgcatatgctatctttgctgaaagaatctattgcagaaacaagcataccagcattaaaaacaggaacgtcgtacaggcagtcatatataaagtctatgctagatggtggtactatatttgatacaaaagatagtgctgctaaaggtgaaatatcagtcattacagaagaaatacttggactattaaaatga

SEQ ID NO: 6893 - DNA, 210 bp, Escherichia coli
atgagtaaaatgaaacttgggaatcataaggcaacaaacaccgctctggatgcactaaagaaacctgctggagcaaccaggaaattacaaatgaatattccagaagagttacaccttgcatttaagttagcttgtgtggaagatggtgtcgatatgacacaggtaaatatagaactaattcaaaactggttgaagagtcgtaacttatag

SEQ ID NO: 6894 - DNA, 492 bp, Escherichia coli
atggagtatacaccaatagcgttaagtcccggagctatgttgcataaagggaaattcattggttatgtcatgaagatcagattttccgagtgttctggagatcatcttttttatttgagatatgatatggttgttgaacttgcaagagcattagcaagaaaaacacaccagatgtatcttaaagggacttttagtacagatgaaagtagtcaggctacgttagaaatggaaaaggattataagcagcatgatatttatttaacaagtgatgaaatatcgtcaccatctgtaaataactttgttgcattgttagattataatgtaagggatgcatcattattattatcactaatcaaaaatgataattctaaaattgatattagtataccagaagcagcggtggaaatatttacaggttatatgatgaatactgttattaaggcagggggagaagctttatctgaaaaacttatatcagatattggagtttaa

SEQ ID NO: 6895 - DNA, 279 bp, Escherichia coli
atgtacgcaatatcatttgatttaaccgttgcagatacagaaaaacatcatccgaaaggcgtgtcacaggcttacaacgatataagttcgacccttaaaaggtacggatttgagcgaatccagggaagcctgtacacaaatagcgatgaaaatatggcaaacctttttcaggctatgaacgcattaaaagctcttgaatggttcccaaattcagtcagggatatcagagcattcaggattgaacagtggtctgacttcacttcatctataaagggttga

SEQ ID NO: 6896 - DNA, 291 bp, Escherichia coli
atgagaacattagaagaagtaattgcggcccagtcacctgaaagtcaggctattatcaaagctatggctgataagatgaggctggaaattggagtgaaaacaatgaatacagtgcagattccaacaggtacgattaagacattcgggctgcttggtattccttacgaggtaggagagccagcccaggaactacccgatggtgatattcttgtcaacattatactggttcagacaggtgagaaagagttgtacaaactttcaaaactattacaagatcctgatgcagagtaa

SEQ ID NO: 6897 - DNA, 300 bp, Escherichia coli
atggctacctacagagaactactggctaaagagagtcctgaaatgcaggcgcgcgtagccgagcgagttgaaaaagccagcattcagctcgcacttagtgctttacgtgatgagctgaacatatcccaaaccgaactggctacaatgatgggagtaaaacaaccatcagttgccaggatggagcaaactgacaacgatccgagaatatcgacgcttaaacgttatgtaaaagctttgggcggcgagttaagcctggacgtgacattgcctacaggcaagcgtgtggctttccacctgtaa

SEQ ID NO: 6898 - DNA, 504 bp, Escherichia coli
atgcaccaagagcaggatatagcagatgcacttcatgaatccctagcctatttcaatcgatattgtcgctattcgctaaaaaggcttgctgcggattatcaggaagagattgataactaccaggatgatgtatgggaggctccgcagcgcgctgcgcggttaagtgcagcggtaaaaaactataaaacctcacggatgattgagtttattttttatatggctataaagctcaatcttgatttaaccccgctggttgttaagcgtttatgttcttgtctttttcagcgtactggtagccaggagcttattgttgagatttttggaaaaaagcagcgtgtaaatcgtagtgctgataatacaatggaacgaatcaatgacgtgactgaacgttatcgtaaatcggccacaagacattggcgtaagacattatcagatatagaaaaagttaaaaaaggctatcagaaagaaatacgtgcacggagaaaaaagaaaagcggtaaatga

SEQ ID NO: 6899 - DNA, 351 bp, Escherichia coli
atgaaagacaatcaaaaccaatcactccaggtaggtgacgcaactattcgtattggtgacatttttcatacccattggggctatgagcaaactaatatcgagttttatcaagttgtttcactacatggaaagaaaacagtagggcttcgggagattgctagggaagtcgtagagcacaccagttggtgtagtgcagagattcgccctgttcctgataagtttattgatgaagccatccataaacgccgggttatcgcaaaatgggggtctgtccttgtacggttcagtgatgtaaccaatgcatggcgaacttcaccagaagctttacaccattgttcctggggatactaa

SEQ ID NO: 6900 - DNA, 360 bp, Escherichia coli
atgactagtgttataaacaatttatcatcgttaaacctgatcccttgcagatctccatttgattctgtaatgggagaacgatgctatcagtcgattgtttctgttgatacgttcactgatttcattgttgaggctcaagctgatggtatgctgaatgaatgcaatcttcgcgaaaatgataggtattctcgattattgagaacatatcttttcaggagtatggcagttattcatgctgtaattgatctacgagcaggtattgttcatttgattgtatactcgctcgtgacaaatgagattacggagtttgaagccgaatatttcatttgtcagattcgtcagaatctagaccgttattga

SEQ ID NO: 6901 - DNA, 597 bp, Escherichia coli
atgatggagagaaaacaacttaatttaagaataaatgatcaatttcttattggagaaattgacaacaaattacatagtgaaaaacttattcacaagcatcatgttaccgatgcgattaatacaattaaatatcttgaaattctttttacatcaagcaacctaaaacgttataaaaacaaagagcactatataaaacatatagttgcaaaatcattattgccaaaagcagaagaaattatccgtattcaaaaagatgagttttcgtcgcattacgaacacttaaaacaaactgtttcagaaataccaaattataaagatatatacaaccatataaataatgaaaacaaaaaaataaaaatacctgttcttatatcacctgttgttatgatgatgatatcccttatcacccttacagataacatcattaagcaacaacggattctttatctttgtggagaaatatcaaaaaaggacttctatagcaatagaagagttgttcttaaaaagttttctaacgttaggctaaaattacatcataatcgaaaagaatacagcgaaaaactttcaacactgatagaaaaaaagggaatgcaatag

SEQ ID NO: 6902 - DNA, 459 bp, Escherichia coli
atgttccgtctggcgaaaccggaagattacgagttcataccagatattaacctatgggaactgtcatttgacaaacgccctgttcgtggcgttcgctgtgaagatcctgttcttggtgcccagcaatacaacgatactcaacaaagcattcttttaaacagacaacgccagaaattaagaaaacagaacttttttagcttagaaaatatctcatgggatggaatattcgattggtgtttatcaaagggaacacaggaagagtgttaccttattgtcaaactttattatgcaaaaaataaggatgaacattacagcactttaagtaaactaaaaaaatgcgaaggattttaccatgaatcagatttgtacttatgggtcagtatgttttttatgagtggtaacaaaatcgcatcgactgataaactgacactagttgaagaaaaaggtgggtatatatga

SEQ ID NO: 6903 - DNA, 216 bp, Escherichia coli
atgagcgataagatccaagaaatcacacaaaaaattgagaaattgcagataaaattgagcaaaattgaagaggaaaaaaacaagatacaatcaaagctggttaagttagaagaagagaaaaaatcaatacagcgcaagctgattctacaggagaaaagagaagagcttgaaatgcttttagacaaagaaagttttgatattttattcaataaatga

SEQ ID NO: 6904 - DNA, 693 bp, Escherichia coli
atgatttaccgttttaaaaccgattttatgcgtcagatagccatgctgttttcgctgggatatacaaggtggtttggtggcgaaattcctctaaaccctcactataaattcgtgtcactaaaagcacgttttgatgaactctatgctatcaatgcaacagcacaacaacgtttcaggagaagagaaaaaggagtagcaaactgcaaatttcttgtctggtttgatgaaaaaaatgcaactcttttatgggtgttacttgcaacagaaggggatgtatacaatgaagaaaaattttatgatggtatgaataaaaaaactcgtatttctgtttcaggttatgaactaaaaacagttccacatcgaggtagaaaacctagcgtttcatgggctatgaagaaagaaacttatgaaaagtggcatgcggatataaagaagtcgataagaacaagaaatgatgagaatatagaaaaattatggtattcactcaggagggtggcagggtttagtgagttacgtagacaggtatttaagttacagagatatgcaatgacagagtggaaacgctccagaagaggtgaatatccttatgagaagatttttgttggatggttaggacgatttaaacaaagtgaaaccatcacagatgaagagcttttgttaatagcgaagtcaaaaaaggctgatatcttttag

SEQ ID NO: 6905 - DNA, 1866 bp, Escherichia coli
atgcaagcaaatgatgagtttcttcgcttggtatttgaaaacatatggccctggtggacatatgcctgggttttagttttttctttgttatgtgtgtttacattttcgggacatgcagaaaaaagtggtgataagagtactctgcgtttcattattgaagcagccaggaagaaattacttgttgcatggattttatgtactcttttgttctttctctttgtgtacataatagcgtggaaacactttggggaagattcacataaagcatcactttatatggagttattgtatgagcggattggtgacaaatctttctcatttggtgattattgtggtatagcatttgtgctactttttccctatgcctgtcagataattaatcgccgtcttataagaccaaaactatcatcatggcttcgtcgttttcgtgtgtctcagacctcggatactatgagtgatattcgtgttgagaaaggtaaatattcgcctaaaaacttcaatcctttagattattataaggatggtcatttctttttaggattagatgaaaatgataaagcaatctacgttacagatgactatttgtctaaagtaaatattaaaattttaggcgcaacgcaaacgggtaaaggtgttattcagggggttattgcagaccaggcaatattgaaaaattggggtttgtggttctgggatcagaaaccagataaatttatttactcgattatgaaacaacgttgtgagtcagaggggcgagaaatatatgaagttgatttgaatggtgaaggtataggtgattatgcgccatttaagaatggtacaaaacgtgaaattttggataggttttttaatgcgttttctcttgagactggcgggactgatgcagactattacaaaaataatgcacaggaggttatgtactatatatatactttttgggaccgttctttaaacgatttacaaaaattgttgtctggtagtgatgatagaataccggaggaaaaacaggaatggatagctaaaaatggagctaatattagaacgcagcttaataaatggttagagcttccttgtctatctcccgctgatggtcagggattaaatgtaactgaactggttaagtcaggtgcggttatttatgtaaaaggtagcacaaaagataaggttgtcagggctgttttaaaatcaatgttgcgtgagtggtctgcggctgttattcgtgaacaaccaaaaaatcatgtgttagggataattgatgaggcccgttttgttatctcgtcagaggttgctgatagtctggcaactatattatcctcaaatgcaagtttgtctattgcatatcaagagagagatgaccttttaaatataccggatgaaaaaccgcagattgctcagtcaataaaaaaagggacggaaacaaataccaatttgacacttgtttatcgttgtaatgacgagacggctgaatgggttgccaaaaattctggtacaactgcgaagagtctgacaaaacttgaagaagtcgaaactgacggttatggcgcggaaacatggaagggacgacgaatgattggacaggaagaggattactatataccagtaaatacggttcttgcagttgaagaacgagttggtattatgcagactatgtttgaactcagtcgggttttatttacatgctgggttcctgttcaacgtttttatacacttccggcccgccctcaaacggagcaggataatgttcaggattgtataaagaatgatggttcaatttctccaagtgatgaggattactttaatcctgacatgattagtgatgaagagctagcgatgataaataaaacagtatcgtcagacagtaaataa

SEQ ID NO: 6906 - DNA, 1065 bp, Escherichia coli
atggataaaaagacaaaaacatatccttttggtgaaattgagttttttgaccagttagaggaacatgcatgggaccagattcatgatggtatgctaccaattatggatttgtatcttgatccgacagtaaccgatatatttataaacaggtatgacaatatatatacatctgtcaatggcaagtatgtaaagaccgacagttccttttccagtgaacgtgcacttaaagcctggattgatcaaatcgcaacggtgttgaggcagccattttcaacgtcaggaaactataaatatggtgatgtcattgagcctgtacttgatgcccgatttcccgatggttcccggttgatgtgtacagacccggtgatttcaccgcagggttctacggtaagtcttcgtaaagtacctaagcaaatactggaagaaaaagattttataaattccggtatgttgacgagagatattcttgattatctcattagtgttatacaaaaacggaaaaattttattgttgctggtaatactggttctggcaaaacatcacttttacgcttgctcgccaggtatattgatacgatggagcgtgttatcaccgccgaagacactcaagaacttcatatacacaggtattttccgttagggattgctctggaagctgcacatcgtaaagatgtgaatgcggatcttccttctctggttcacctgactatgcgtggtaatcccgatcgtgtatgggttggggaggtaagaacggcagaggctatagctgcttattacatggttctggcaagtggaactataggtaatgctacaactctgcactccgttacccctatgggggcaatacgcaaaatgacctggcttatgtcaagctatctcagtatcgattttcagatagctcaggatttaattatgtcagaggttgacgtgattattcagtgccggagaacatcaaagcatggaagaagaattacagatatcgtcgaaatacgtgaagggaaaattgttcctatattcaagtttgatgaagagcaagaagtacatgtcaggtttgacaaaaaatga

SEQ ID NO: 6907 - DNA, 246 bp, Escherichia coli
atgagaacaaatgtggcagtaaaaaaacgtagtataaacgtatacttaaatgcagggttacttgaagaagcaaaagatcttgatctgaatgtttctgctatctctaacaaagctctcgaaaaagcggtaagggagcgtaagcgtgaacgctggatagaagaaaaccgtgctggcattgaggcattaaaccgttttgtggaagataccgggattttttcagatgatgaaaattttggggtaatttag

SEQ ID NO: 6908 - DNA, 318 bp, Escherichia coli
gtgaaacaattttctgtctacaagaacaaatcgcgaaataaacaggcgtacccctattttattgatatacaggcagagatgcttgcacaccttaacacccggttggtgatgcctttaacgccaaaagataattcaaactcgcaggtaaagacgttaacgccagtaataaacatcaaccaggtagattatgtggttctgactactatgataacgacaacggatgcaaaaaatctgaactctgataatgtcgttatggatgcttcatatttacgagatcaactggtttctgcaattgacatgatgattctgggtatttaa

SEQ ID NO: 6909 - DNA, 327 bp, Escherichia coli
atgcaaacgatcacaacgcatgaacagttattagttgatggaaaaatcacagaaagaaccgccacacatatagtgacgggcgctcacgggtatgaaacgctttgcacaagcggctataacatcaggtacaacgagaaacaagaactggtagaaagttgtgaaaagatagcggagggcgaactacctgtaacatgccctacctgcttcgcagtctggcaagacgtacataagttcacgccaggcgactttgacactgaatcggggaaaggagattttgctgatacaaatctcacagaaatcatgattggaaaaatgtcagacacataa

SEQ ID NO: 6910 - DNA, 333 bp, Escherichia coli
atggctgaaataaaaggaaaaataaccaacccagcactggttaatgcaaaagttttttacaacagacgaacaaagctggggatacctacagaggtctttttgatcctgatgttcctgaatgtttttgctgttgtgctgtgcgttatgtatttcagcacattttccgttatttcgctgattttatttgttctggtatcggttgttcctatgaagttcgtttttcatggcgatcccgatgctcataaagcctggatttatggttatttgtcaccttccaggctgaacaatacccacgcagtgaagcgtcgtatcacatttatagacgctatttag

SEQ ID NO: 6911 - DNA, 348 bp, Escherichia coli
atgctcaatcgcatttccagaaagatatcaacattccagataatgctttacgtagcattagtgacaggaagtgtcacaccggctatggctgctggtaatagtacagttaaacttcctacgccggatgatagttttttacagaaaatcgttaactggatgcaaagtattctggatctggttggtggggctggagctttgttctttgcgtttgtcagtgggtttgcttgtattgtgttgtggggacttgcaccgcaacagagccaggctatcgggaaactgtttcgtgctgctgttgcagcaattgcagcgtttaacctggcgttctttattgcctggctgcaaaaatga

SEQ ID NO: 6912 - DNA, 2601 bp, Escherichia coli
atggggcagagctataacgaacatctgaatctggcaggcatcgaacaacattccgggcaggtgtatacctatactggaggtgcttttggtgctattgaactgacaggtgttgatccaacgggtgttaccccttctcagggtagccgtatttctttattacttcgtaatatcgttcagttactgcccctttctgtcacactgactcagtattatatccataatgacggcgttaagatccggctgacagggcgtgataatcaacgcagtcagttactttctatgcgtcgccaggcatatcttaataaatgtcgtaatttaaatgcctcaagaattatatggacgctggatgttcacccggaagagaatattaatcgcctggcatctgccgagtttttaaagaatctttttaacagcatgtttgatgacacagcaagacgtaaagtcaggctggcactgtcaaatcgcgaatcgtttatcattgagcgtcaggcatttgaaaaacagtgcctgttgctgaaagaaacattacgcgatctggacttacgcctttcttttatttcagaagataacaggattcttgattcagaagggatctggcgattacagaagttccttgcaacatttaatcaccattggctggctccacgccgtaaggtcactgtacccaatgatatgtgggattgtctggcgcttgaaggtgacgatatcgaggccattacctggcgtggcgttgatatgttgaagatccagggtgtacggcctgtttacgttcgcctggccagtgtgttgaaaataggcgatgaatctgtacctgaatgtgcctgggcgctgacaaatggcagaccagttttacagcgaggtaactacgtttacttcatgcggttcactcccgccagtgcctttaagaagtcactgatgatcagcgggaaagaaaacgaacttgtcaggactcaaatcagtttgagcgatttaatgactgacagtacgagcaaagatattctcgatgaaaaattgcgcagaaattcacatctgatgaagatgcgcgaagaactggagaatatttcatattcagatgagcgcctggggatctgccaggccgggattgctgtatttaatacagatcccgataaattacttgagacttgtgcggatattaaccgtagtgtctctcagaccatgcaagttgtatgggagacggtagcacaactggatgcttacaaggttatgcaaccagcctactcacgcaatacatttcgtgcattacagcttaacgcatctcagatgggggctgcatccttgttctttaaatcccatccaggtattcctgaatgggagctaaatggacgcatggaggaagccttctatattcttgaatcagatgatggcgtgccgtttttctttacgccaaaagttaaagaaaagctactgcttcttggtaatggggcgacccgtggcggcaagacttttatgaaaaactgtattgccagccattttattaaattcggtgggctgtataactgtctggatatcgatcctggctcaatcccaatggctaatttctttggggatgatggggcagcatttacccttgatagcgattttcagtgtggttttaacatgttcagtatggcgcaaagcaaggatgacagggtatttcttgcgcatcttatagagcagttaaaagcaatggcagcagaaaatgacagtgagcaggataaatatttaacgcctgatgaacttgaaaatataacagtgtgtgcgagtgatcttcttgtacaaaaattttcgccgaatgaggggcgtttaagctcaatcacgttgtcaacgctggtttctaagtgtggtcagagcgttaaacgcaagttagcgccatttattagtaatggtatttatggacgtttatttgataacaaagaggacgcgattggtgttcttgataagccggtagctgtttacaacctttcaggtgtgaaagataaccataatcttgcgcggcttgtgcaccgtgaaatcttctttcgtgtcgttcgtttgtttgaatcaccggaatatcgcacgataccaaagttttttgaaatagatgaggcacagtacaccctgtctgtaccacatgccgcagagttcgctacacagaaagcccgaacctggtttaagcatggtgggggtatgggattctggactcagaacccggagcactattcatcactggatgagtggactacgttacgttcctcggcgtcggtgtttatctttatgccggataatgaggcaacagttaaagcattccatgatgcttatggcttcgatgaagaagaagtgaatattattcgcagccttaaggtaaaacagcagtcgtatataaagatcccggacatgcagattgcaaaagtggtgaatctgtttgttgaggctgaacagtatgctgtttgtacatcaacgtctaatgaagcagccctggcagcggaaatatggaaacgtgaatcagatcccgatgttgcagtgcgacagattgtagaaggtctgataacgaagtgtaataaggacttgatcccaacgcctacagagactgaaaaggataaaacggaggggtttttcttatga

SEQ ID NO: 6913 - DNA, 822 bp, Escherichia coli
atgagaaaacaacttgcagtaatcttgttttctgtaatgacaggattgattacaacacctgctatttcttctggcattcctgttgctgatgctgctcagattcttggtcaggccagggctatgatgcaggatatcaaaaactataaagaatatatggaacagacaattctcaataataaagaattgctggaagcatataagcaatacaaccagatgcttgaggattataagcaaattttacgtgaggccgaagggctgaaagataaactttcatcgattgactataagaattttatggatgaaatagcccttatctctaaccagttcgatcccgtttatggcggggggcgtatggttaaaaatacgggtaatgcgccgtgggataatgcctatgagcgtaatttgttgcttaatggctatgggcttacaaacgaagaatatgccgaaatgctggcagcgataccatatacgagtgatgaccgcgaacgtgcccggcagatgtttgaatataggcagcgcagggttgttgaagggatttcaaaagatgcctttgttggtgaattgcaaatacaattaaaaaagcaaggaaaaactctaggggaattacaggaaagacgtttaaggttaggtgataacgatacgacagcctctatccagtttttagctgaacaaaatgaacaactgttacaacaaattcagagtttacagttacagcaagcagaggcgatgaaatatagtggtcgtcttgaggatcactattttaacaagcgagcgcaacaggaagaattaaaggcacgtcagttacagagggcatggcaatga

SEQ ID NO: 6914 - DNA, 468 bp, Escherichia coli
atgaaaaaatatctgattcttttcttcatgatgttttcagcctcggcaatggctaagattggctatgttgatgagcatcaaaaggaagttgacctaaaagttgacgctctgatttctaaatatgaaaaagaatgtgaaggtaaacgcaatagtaatatgtgtaaatcccaagcatgggataaggctcattttgaatatgaagatgaatttagaggcgaagataaatataatcataagcattatgatggcctgacaaaagatcaggcagtcgcgaagttacatgaacttattaaattgcataatattgtttctaaagatgaacgtaatcccgaaagttggcctggaaaattagatacgctaactattaatggtgagattaactatatagttagaaaacactggccagcatggattaatccatgtgataagatttgtgcggaactgttacttagacaaataggtaaatga

SEQ ID NO: 6915 - DNA, 990 bp, Escherichia coli
atgcttcgaggattctttttgtctttaattaacagactcttatttgtagttctgtttttatctgtctcattttatgccagtgcagaaacagctatgcgcacaaactttcagaatggcgtaagtgagatggttaataaaatactaaatagcccggatagtgatttgcgagtctggactattgccgcatcaactttcctggctgcggtaacggcattcgtctatttctggcggttcgtggaaaatggtggggcgttagttgatttattcacgcttgcaatcatgtttatgttatcaatgtcattgcttgcttcttactcaatggttgttgatactatcacaggcgctttttatgcgatatcaaatacactacagaaactggcgttaggtaatattaagccgagttttctgcaaaattttgtagagggcgtgttaacaaaggctatttcagcaccatcggttgatatttttgatggcatgaatatggttggcatggcgctcttgtgggaaatatgttctgctattttgtctgttgctatatatcttgctgatgtttggattgatgttgggacagcaatagcaaaaattacaggtgttatgtttattccttttttggttgcgccagcaacaagaggaatttttgatggatggtttaaattctatattggatgggggcttgcagcggttgtacttaaaataacatctattgtggtaatgataatgatcagggcatcaattaactctgcgggtagtttccagggcgctggcgatgttatcgcgtcagatggtactgttaatggcgttcttaatataacagctaataatatcagcttgttacgtgatatttgtgcatattctgtaatcgctgcaattatggtgttcagttgttttatatttgcgtacatgatcggttctggtgttggttctgcaagtcagggcttgaataatatggcagtgaaactagccaagaaagcggctaaagcattattgtaa

SEQ ID NO: 6916 - DNA, 720 bp, Escherichia coli
atgctgcttgaaaaaaaagaaatcgaaaaagtaaatcgaacatcctttaaggatcgtgttggtgaactaaaaaaagacagaaatttgtttttctggattgctttgcttcttgccgggacgacgatatatcagtcatattctgttcaggaggcaatagagaaaagccagaatactacagaagtagtatgggtgaaattattgcctgatggttcacataaaatatcacaatttacgccagacaatgagcagcctatatatacaccaacagtgaactcattgctgtcaaagtatgtgcagaagcgctatggacagttaaaagagactatagaacgggattatgcagaagcggcagtatttatgtctcctgtacttacaggggagtttgccgatcccaaaggatttaatgtcgctcagaaagttgtggatattcaggccgatatggcagcaaaaaggatttatatagaaataaaagatattgaccattatgacgcaatagaaggtcagtttgatggtgatgtcaaacctgtaattcgaacgcttgttacttatcaggagataacaagggattatcagggtaaagaaatttcatcggttcaacaaatgaggcgtcttcaatggacgttgttacaacgtaacgaacttagtaaacaatcgctggactggcttaacatcaatccgctgggaatccagattattgatgataaatccgtacaacagtaa

SEQ ID NO: 6917 - DNA, 834 bp, Escherichia coli
atgttagcgaaaagaactctcttattttctggagtcctggctgttgtcatgactacgttcagtgcaacagcacagcaatgtagggtggttaactggcggcctggaacaatagttaaagtgcagtccgctttatatctgggaacccgtatagaactgccggaaggctcaatgttattaacgaaagaacccttttcttctaatgcgctatgggccagcacgggagccgcaaatcaggtcatgattcagcctaccagtgaagagccggaagggctgaaaacgatggtaactgtatttatgactaacgggcagacgctggatattgaggccgttcgggtatctcagaaccagaatcaacagtgtgttcagatccgtggtgcaggtatgcgttccgcagacagaagtgcattaaacacggcttacagtatgggggcatccggggctgatgtagctcgtttacagaatgaagtgaatacattgcggagtaacagagaaagcgaagtcaaaaacgcagttcttgaagctcttcgtcgataccgatatttcatttatacccgttataactggacgacaggtaaaggttttagcggaaagaatatgatctctgatgtttatgatgacgggcgttttacttatatccgtatcgcaaaaccgaatcgtggattacttgcggtacatgcagatgtcggaggaaaaccagcggttattcctaccaagtacgacgatgcatatgccatttatcatatgtcagggatatatcccaaatttacccttaccctggatggcgtaaagctggaagtcagccgtgcggataatgcgactgatggggagagctaa

SEQ ID NO: 6918 - DNA, 1407 bp, Escherichia coli
atggaagaacgtcaggagaaagtagaagaaaaaccagctacttaccgtaaaaaaatacagtattacgcttttggtacttttggtgtgatcctgataattcttttcatcaatatggtgataagtattgcctcaaggaacgaggaagaaccaaaggagaatgcgaaacaggaaactgccagcactgcgccaaatacaacggaaaagtttaatgcgctactgaaaaacagtggtgcacgtccttctgcctccgttaatcaggctaatacggttggaaataaggatagtgccagtaatggaaatccgaatagtgaaacagataaaaaacctgttcacccttacagccgggaaaaagaggcgtctcaggagaggggggcgagagcaagtgatgcgggatcacctgatgaaatcagggcacgctttaaggctgatgagattaaccgagcactgcgtgcaaggtcagataaaacaaattttgacagcactaaaaatacggttgcgggtagtggtaatgcatatgccccggctgcatcgtttaccggaaaccggactaatgcgcagcgtatcagcgatataaacgcagagcagaatggattgcaggaacgtatccaaatgatggaatcaaaagttcgtgctgatgaagccgctttgccaggacgactggaagaagcccggatacgtggggaacagcaatttgcagaagcccgacagggtggagcaggaagtaacgcgacatcggtaactaaggggagtacccagagcgtaccgtccggtgttgtgggatatacagccagtaatccttatggggcaagtgttgatggaatgatgaagttgccagtaggtacggtcctgaatgccattactacatttacggctatttctgattattccggcggctcaatgaaggccatgcttacgcatgatatctatgatgcgacgcatagctacattcttgcgcctaaaggaagtgagttcgttatcagggtcgttaaagcctcccaggtaaacgaaatccttcaaagccgtattggattccaggttacatggcttgtattgcctgatggtaacagggtcgattttaaaacctcgtcgtctcttgaccgaatggggactccggcggttgaaggtgatgaggtggacagacatttgctcgctcagtttcttggcgtagcggcctatgcccttgtggggacgaaaaccagctacgaaggctcaggtgatagtaacgagagttttgccgggaattttggcgaaggcgctcgtactcaggcaggaaatatcgctcaaaaatacctccaggttgtgcctacaacaacgttacatgcgggagcaccgatcagggtctttaccgaagatgagatatacatgaagccgtggagaaatatttatgaaacggattatacgggctga

SEQ ID NO: 6919 - DNA, 495 bp, Escherichia coli
atgaaacggattatacgggctgaaatattgttttttgctgcattctttgcattttcctgtcaggcagcaagaagccctttccaggtagacaggatgcgagaaagtgcgcctgttcagataccacagcaggatgtgcatgtgcagggaaactttcaggagttacaaccactggacaggaaccagaaagatcctcgctggcagtatatcgatccgttgagtgtttatatgcgtacagtttggcccgataacatcaggactatcagagcagcggtgaactatctcctggaaccaactggatatcgcctggtaacgagtcatccggcaccgcgtgaggcttctctgcttgttgataagccattaccgccaattgccagaatgcaacgcacaatgcccgtagttgatgctcttcagttgctggttgggcttgataattatgttgttattgatcgcgcccacaggctggtttcatttcagaaaaatgggggcggtgtatga

SEQ ID NO: 6920 - DNA, 210 bp, Escherichia coli
atgcggattatttttgtggctttcctgtctattgcaacggtgattctttgcttatttatgacggggtgtgcacaacgttatgagagtggtcatgatcagcttttcgaactgtcagaacgccatatcatttaccgggatctgactgttccggcatcgatgagcaatttgccggagaagcagcagataagcgtaccggggattgagccgtga

SEQ ID NO: 6921 - DNA, 528 bp, Escherichia coli
atgcagggacgttggggtagtacaactgatatgaaggatatgcgtagtttgcgcgagataagagaagcggtgattgctgaaattaatgccgtgtcagagccggtggtggagaaaacagggccagaaaacaaagaatcgaccacaggaataaaaatatctgaaaaaatacaggcgataattaataaatacgcagaaaaatatcaaattagtgaaactttgttgaaagcgttaattaaaacggagtctggatttaatccaaacgctgtcagcagaaaaggtgcaaagggactgatgcagttaatgcctgtacataccaaaaggcataatgctgatccatttgatgttgaaaccaacgtgaaaattggtacagggcatctttcatatcttctcgataaatacggggatttacggcttgctctggctgcatataacgctggggaaggtgctgttgataaatatggcggtatccccccttataaggaaacacaacagtatgtaaataagatcatggcaatgttaggaggttaa

SEQ ID NO: 6922 - DNA, 360 bp, Escherichia coli
atgacaaaaataaagatactgatacttgcagcttttgtctcatttggaaccgtgcatagcgccagcgcggaaaatggaagtgatgctctgtcactgacaggagaatttcttgagcaacctgttaacagtagtgatccatgtactgtttttctctgtatggctggaatgcttaagggggaatcgcctggtgaatgtagtggggcaaagaaaaaatttttcagcattatcaaaaggaagcatggcagttttcatccaggaagaacatttaatgcccggaaagcgtttcttggtgattgtccgtcagcacctggagatattgtaggcaagatacttgataaatatggaaaattacgctggtaa

SEQ ID NO: 6923 - DNA, 444 bp, Escherichia coli
gtggcaagaaaaggtgtaaatgaagtcaccctggttggttttgttggtaatgctccggtgatatctcaggccagtagcggggataagatcgcggttatttccgttgcaacaactgaaacatggacggacagaaagacaggtgctgaaaaagagaaaaccgagtggcatcgagttgttattttcggaaaaacagccgagataacggaacaatatgtaaaaaaaggcacattgctgtacattcgcgggaaactgcaaacccgtaagtggctggaccgagacaatatagagcgttacagcacggaaattattgttaatccggcagggggagaaatgcagatgctggggagtcgccaggataaagtaaccggaggaaaagccggaaacgagattcctgaaaatggcgctggcagtacggacaagcagcaaagcaatgaaaccgactaa

SEQ ID NO: 6924 - DNA, 948 bp, Escherichia coli
atgattagtccggcaattgattattttgcggcaaacttgccataccgaccttatcacgcgaatgaattgctctatgggcttcgtatcgataaggctgctaaagcagtgctggcgcgttatatacagcataatccgcctcatgcaatgtactggcttgtttttgacgttgacaggccaattgcggcgattgactggaatgatcttaatgcgcccacacctaattttacggtcaaaaatccggttaatggtcatgcacacctgttttatgggttaaaaacggcggttcgtgttgccaaagacggtagcattaaggcgatcgagtttgctgctgcggtagagcgaggattacgtgacaaacttaaatcagataccggctatgcagggctgatttgtaaaaatcctctccatacatactggcaggttgttgaatggcgtggagaactttatgagttagctgaactggctgattatgttgatttgtacgcgccaacagcggctaacgatgaacaggcattcgatatcgactttagttatgggcttgggcgaaattgttggctcttcaatctgacccgtatctggtcatatacagcaatccggcagggctggcctgatttcccgcaatggaaagaagcggtgattcagcgtgtcgaaatgtataacgtgcagttaagcgtgcctttgtctcacaaagaatgtgtatgcattggctccagcatcgccaaatggacgcataaacgcttcactgaagctggatttgagcaatatgtggctgatacccatacatcagaaattcaggctcgtagagggcgtaagaatcgctcagaagtgcaggctgttaaggggcgtaaaggtgggaaaatatctaaaagaggggttgttgaggattctgcgcggagtttgaaaccgtgggtagagttagggatcagtcgggcaacctatatcagataa

SEQ ID NO: 6925 - DNA, 261 bp, Escherichia coli
atggtctgtatacttgttgtgtcaaataacggtcgggaagagttgattgattttaatcccgatcatgatttagcgcacattatcaaatcataccggacaccagaaaacaggatggtatgtattatccaagatggtaagcgcattcttcgttgggatcgcagttatgcttcccgtgcaaaaaatcactggcgtaaggtagatccagacagttttgagattttagggtctgttgaatatctccgctatgttggtcagggttag

SEQ ID NO: 6926 - DNA, 726 bp, Escherichia coli
gtgcgggtggtggtggctgaaaagaacaattccttaatcccccgcatatcgccgtcaggggtggcaaaacaaagtccatgctataacgttgtgtcgcgtaagcgacgccgtttcctcaatcgctggattaaatcactggcgacggtcgcagggcgtgtcaaaatcaaaaatgaactctgccgccgtatccggcataaccgatattgggttaatgaggctaacaagtttggcatagaggcactttgcgaactgatgttagctatcctggatgatctcgatttacgctcctgggaaaccaggcataacctcgaaacactggcagaacgtgccggactggtgacacgcagtgacgcggggcgtaaatctatttcccgtgccagtaggggatgtgatcgcctggtctggttgaatgcgatcattacagataaagcgccgtttaacccctatgatgcacggtgtgcctgtaaacacattgaagtaaccgaagacttctttgccatactcggcattccgttaaaactggtttatcgggaacgtgccaggctgttaaaggcagatcctaatgaaattatttactccggtgatgccagactgatagctatcagagtccagaactggacacggaaagcggcagccggattagcccggatgaaagcgaaacgcgacgcagctcgacaacgcaaaaaagaatattacgctcacccacctacccctattccgctctga

SEQ ID NO: 6927 - DNA, 1347 bp, Escherichia coli
atgaaagtatttcacaatatatttaagcacatctcttcaaaccatcaagataagcattcagataaagttaacagtcatcaacaccatggcaaggttgataaaaaacatcgttcaaagatagttgaaattgataagctggataaacatttgcaaatagataacgattttggcctgcatatcatctattttctgcaacatggctgctggaacgtaactgaacatagttctcagatagaaaaaatatggttttacaatagtgagccatctatagatattaaagaatataatagttttgccgataatactactgacacgtttatctttacaattataccagacaataaccatgtgataaaattatcgtctcccattaccgttacgattgagcgtaaggacggttattattttattaatttctccggggataaatcagacataatttataaagttgatgggttttctatcatagagagaaatttctttactcttcttagtggtaatttcaaacctgactggcgttgggctgtctctaaagagacgtttactaaggaaaagtttgatagctatgttgaatctgttttttcaaaaatagacttttataaacagtgtggtgtgattaacccacaaaatgccaacacggcttattttggcgatacagatggaagagtaggcgctgtactttatgcattgctcgtttcagggcatataggcatcagggaaaaggggtggagtttattatgtgatttattaaaacacgaagacatggcttcattcgcatatgaaaataaaaaattgaaaaaactcttcactttattagataagagagacatgtttttgaatgagttgcatcaacatgtttttttaaaaggcgatgcgattaccccttgtatcttccttggggatcatacaggcgatagatttagtactatttttggtgataaatatatccttactttgctaaattctatgcgaaatatggagggtaataaagatagtcgtataaataaaaatgtcgtcgttctggctggaaatcatgaaatcaattttaatggtaactatagtgcccgactagcaaatcataaactctcttccggtgatacatataacttaattaaaacgctcgatgtttgtaattatgactcagaaacgaaagttttaaccagtcatcacggaataataagaaatgaagaaaatgaatgttattgtctaggtgctttgcaggttccatttaatcagatgaaagacccaattgatcctgaggaattagcaaatatatttaataaaaaacataaacaacacatggatgatcgtcttatccatctaatggtgatgctgccaacttactga

SEQ ID NO: 6928 - DNA, 810 bp, Escherichia coli
atggatcaagcaaacaaatggttggatctctcaggaaaagtggtgatcgtgaccgggggcagtatggggttaggcgaaaaaatggtcgaaaacctctctgcaaatggcgcaaatgtcgtttatgccgatctggctcccaaccagagctttaatgagatggaaggcattacctttataaaatgtgatgtcacaaaaaagacccaggttgaagctctcacacagacagtcgtagaaaagtttggtcatattgatggcctggttaataacgccggggtcagccgcccgcgactgttggtcgatgtatttaaacaaaaaccagagtacgaacttagtgaagacgactttgattttatggtgggagtgaatcaaaaagccgtttacctggtatcgcaggccgtagctcgtcagatggtcgaacagcagtcaggcgtcattattaatatgacatctgaagcaggtgttcagggatcgcgtggacaaagctgttattcagcgacaaaagccgccgtcaatgcattcaccttttcatgggcaaaagaactgggtccgtttaacgttcgcgttgtcagcgttgaaccagctataaacgttcctactcctatgaacagcgaagcgaatttccgtgctcttgcttatacacgcggcacagatccctcacatgttcataaagattacaaaggaattatcccgcttggtcgccctggcaaactcgaagaaatcgctgacttaatttctttcctggtttcggatcgttcttcctacattaccggttccgtgatcaatatcaccggcggtaaatcacaccattaa

SEQ ID NO: 6929 - DNA, 1467 bp, Escherichia coli
atggggaacagtaaaattgccaatagccctgcgttagcgaaaataagaaagtttggtggagtaatgagcggcatggtaatgccgaatctgggtgcctttgtaggatgggggttaatggccgctatcttcattcctaacggatggtttcctaatgaaaaattaggccagatggtcggccccatcctgaattatcttttcccattacttattgggtataccgcaggttataacattcacggtcagcgcggaggggtcatcgctgctttcgcaacgatgggcgtcatcgtaggttctgaaataaccatgataagcggcgcgatggtcatggggccgttatcgtcctggctattgaaaaagtttgaccagaaagtacagcaccgaattaaacctggcttcgagatgtttgtaaataatttcagtctgggaataataggactgctttgtgcaatctttgcttatatgacagtggggccggttatccgcgtcctgatcgttattatcacttcaggcgtgaactggtgtaccagtcataatttactgccgttactatcagtatttatggctcctgcacaggtgcttttcctgaataacgtggtgaaccacggtattctcgcgccaattggttttgcccaagttcctgaattgggtaaatcaattatgttccttgtggataccaataacggtcccttgctcggaacattgatggccatcgccctgtttggtcgtagtcgtgcgaagaaaacagcaccaatggcgatgtttatcgccggtattgcagggattggtgaagtctacttcccgtttgtactggctaatccgttgttagtcttcgcaacaatgggcggccttgctgtctctttgttcttacaggtgatcatgggcggcggtttgatcggtgtggcttcgccggggagtttgatcgccatcgccatgatgacgcctaaaagtgcgattattgccaacctggtatctatcagcgccggttttgtcgtctcctgtacacttggctggttaattctcaaaattagccccggttcagaagatgatgacgaagaaaatccggtcatcgtcggtggtcgtcaggtgagatctgttagcgactttgtccctggcatctcaaacgtgacggcggcaaccagtaataaaaccgttcaacgcattttggttgcctgtgattcaggtatggggtccagcgcgatgggggcatctgttttacgaaaacggttaaaagctgaagggctcgattacataactgttgtcaacgattccgcaaacagagtaggtagagattacgatattgtcattacgctttccggactactcgaacgcgcaagactaagttgcgagaatgaaaatactgtttttatgacggtgaaaaactttattaagttaagtgactatgatgaggcagtgtcctatataaaaacgcaagaaaatgttactcaacgtgaggaggcgacggcatga

SEQ ID NO: 6930 - DNA, 429 bp, Escherichia coli
atgacatccattttctcaccgaataacattatcctgaacgcaaaagcaggagataaatacgaggctattactcttactggtaatattcttaaacaaaatggttatgtcactgaagaatacatccagagaatgaaactaagggaggagatcgtttcaacctatcttggtaatggtctggcaattccccatggcactgatggttcagattgcgagattgttaaatctggaatctctctggtacagtttcccgatggtattgattttggcgatgggaatactgcctatataaccattggcattgccggaaaagaaggcgaacacttggatctgttaaataagatcgccttaatttgtattgacgaagataatgttaaagcattgcgtaacgctaaaaccattgaacaggttttacaagtactcaacatctaa

SEQ ID NO: 6931 - DNA, 699 bp, Escherichia coli
atgaaagctgccagacaagacattatccttcaaatacttgagaaagagaaaaagattgttgccagtaaattaagtgagcgtcttaaggtttctgaagacaccataagacgcgacttaaatgaactggctaaccaggggttaattcgtcgggttcatagcggcgcgattcgtgtggggcctgccattaccgactttaacgtcaggcaagatctgaatattaatgagaaggttaagcttgcaaagaaagcagtacatttaattaaagaaaatagcgtcattttaattgatggaggaacaactaattacgaattagtaaagctgatccctaaagatttaaagtgtacggttgtctccaataacatacctattctgcatcttttaagtgattatcagaatgtagaggtcattggtcttggtggtcgcctgtataaaaactctttagtgttgattggcgcagagactattcgcgaacttgaggcaattcgccctgatatttatttcatgggtgttgcgcatgttgatagcgaagtgggtgttaccattcctggtctagatgagtgctataccaaacaaaaaatggctcaagtctcaaatgaagttgccatcctcgtaacagaggaaaaacttgagacgcgttctaatttcgtcgtgtcctcactcaaggatattaactatatatttacgagtaaggacatctaa

SEQ ID NO: 6932 - DNA, 1173 bp, Escherichia coli
atgaaacgcgtattaattatcggcgctggccgccttggtaaaggttttgttggagaaacttttgataacgcaggctggaatattactttccttgataaagatccacgagttattgatgaattaaatcgtcataataaatataccgttcaggtattccgcaccgatgatatcatcatgcatgaggtaaccaattttcgtgcctttgctacagatgataactactccgtaatgaatgacttcctggaatcttccgttattatgtgtccgctatatccggaagattttgaagagtctgcgcgttatctcggaaaatgctttgaacagcagtttaaagttgaccctgataaaaaaatgacgctcatttgcctgaccaataaaaatcatattattaaagacatcgaagcctggtatcgcaatgccattccttcagcgcaggcgcgagactggtttgattcccatgtcgccattcgtgactcgatcgtcagacgttcaaccgatgccgaaacgcattacgcaacgcagatcgatagcaccgctgtcgcctccttattgattcaaaccccgctgtacaatgacattagcgacgtggaatggctggagccacgcgatcatctggaaatgcttaaagacattaaagtctttaccatcaatggcccacacgccaccactgcttattacggacacctgaaaggttataacaccattccggatgcctccgcagacccggaagtagccgcattagccaatgcggtacacgacgtcaccatcaaggcggtgatgacagaatatccgcaaatcacccgtgaagcccttacggacctggaatatttgccgaaagccaagaacgagctccccgactcaatccatcgcgtcgcctatgatcccgtgcgcaaattagcctttaaagaccgcttaatgggcgtggtgcagctttgcctgaaatacaatcttgattattcaccgctaaccaaagccatcgcctgtggcctcgcttactatgccgaagacgaccgcgcttctgtaaatctgcaacagcagatgcagaaaaagggcttgctgacgacaaccgcgcaaattatcggtttgccgaaagatcatcccgtcacgctaaatgttgcacaacaatatttagcgttggatgctgaaaatttaattccagccataccgtgttaa

SEQ ID NO: 6933 - DNA, 288 bp, Escherichia coli
atgatgtctgaatcaacatgctgtgcgaattttattattaaaaatgaacatggtattcatgcccgacctggtgcgtacattgtgaatcttttaaaaccgtttaactgtgcggtgaaaattgccaacctgtcacgcaatgatcattacgttaatgcaaaaagtcttatggcattaatgtcgctgggaataaaaaacgggcatgaagtcagtgttatttttgatggtaaagacgcacaaagcgcattacaaaagctgagcgctgaaattgaaaacggcttaggtgaatag

SEQ ID NO: 6934 - DNA, 1092 bp, Escherichia coli
atgattaccacagcaatattccctggaagatatattcagggggcgggagctattgagcaatgtttaggtgaggagttatcccgttttggcaacaaggcaatgattgtggaagatccggtagttaatcaaaccatcggcggcaaaattgccgacgcgctaaacgaagattttacttacgagctggaaatttttaatcgcgaatgctgcgatgaagaaattgaacgaatctgcaaatgcacgcaggcctgtggcgcgaagatgattgtgggtatcggcggcggcaaaacgctggacaccgccaaggccgtcggtgctactcttaatttgccgatcatcgtcatccctacgctggcgtctaccgatgcgccatgcagctcgctggttgtcatttacacggcgcagggtcagttcaaacgttatatgatgatcccccataacccgtcccttgttttcatcgactcgcaggtggtagccaatgcgccggtgcgtttcctgctctcgggtatcggtgatgccctggcaacctggtttgaagccgaagattgccggatcaaaggcgcaggaaatatgaccgggcgtccggggccgatgtctgcctatgcgctggcgaaattgtgcttcgacaccatcctggagtacggcgaacaggcggtaacggcttgccgtatgcatcaggttacccccgcccttgaacatgttatcgaagccaatacgctactttccgggctgggctttgagagcggcgggcttgctgccgcgcacgccattcataacgggctgacggttgtgcctgaaacgaaagcgttctggcatggcgaaaaagtggcctttggcaccctggccatgctgctaatgaccgacagaaaaccggagctgatagcccaggtttatacgttttaccgaagcgtggggctgccagtgacgcttgccgaaattggcatcaccgatagttcaccagagcatctgatgaaaattgcccaggccgcctgccagccgggcgaaacgatgcataacgaaccttttgagatcacgccagaaagcgtcgtcgcggctttaattgctgccgacgcatacggcaaaaaataccattaa

SEQ ID NO: 6935 - DNA, 651 bp, Escherichia coli
atgtttgcagcagttatctttgatatggatggcgtgcttgttgattcggaaccggtgtggcgagaagtggagtgcgaatactactttcgcaattacggcttatccctgcaacgtgaagatttcgatccttttaccggtatgccagtcactatctttttacgcaagttgcatcaacgccattctctcccggacaacaatctccggcaggtgcatgatgcgatagtggaagaagtcgcccggcgaatcaggctaaaacctgcgccattgccgggggtatatgaattactcaatcacctgcatcagcacaatattccactggcggtggcgtcatcttcaccgcagcggcagatagataatgttctcagcacgctgaatatgcgccactatttctccgtcgtgatttctgccgaagggctggcgcaaggcaaaccgcatccggagatttttctcaccgccgcattgatgacaggtcaagagccagaattttgcctggtgattgaagattcgctcaatggcgtggttgcggcaaaagcggcgggtatgcaagttattgcgctaccggcagagcaccagcaggacgacccgcgctttacgcttgctgacggcaaagtgaccagtcactggcaaattctcgaacgggttttcgcataa

SEQ ID NO: 6936 - DNA, 558 bp, Escherichia coli
atgagttaccagactaatcaggaaaaggtgttggctgaactacgcgccacgctgggtaatatcagcgccgatgaggttgaacgcttaattgaaatggtcgaagcggcagagaacgtcttttttgtcggcgttggccgggtgctgttgtcattgcaggcaatggcaaaacggctggcgcatatgggcattaaaacctacgttgtcgggcaaattacggagcctgccattaccgagcgcgatctgcttatcgtgggttccggaagcggtgagagcatgtttcccctcggcattgccagaaaagcgaaaagctttcatgcaagcgttgtgcatattggtgcaaaccccgaaagcagtatgaaagcgtatagcgacctttttgtacgcatcggtgtaaaaaccaaactcaacttaccttctgaaatcccctccattcagccgatgacctctcttttcgagcaatctttattgctgcttggggacatcgttgccctggaattaatcggtaagagaaaaatcaatatgcatgagctgtggcagttccatgccaacctggaataa

SEQ ID NO: 6937 - DNA, 711 bp, Escherichia coli
atggctgccccgaaaattgttttatctccgtcgctgatgtgcgcggatttgctcaatttgagcgatgcggtaaaagcgctggaggagattggcgtcgatgccctgcatattgatctcattgatagcgcttccagccccagtatgccgctggggctggagacgattaagcagttacgtaaagcgacaaacctgccttttgatatccacattatgtcgatgaataacgagtggtttatccagcaggttctcgagattggcgtgcagcgagtttcctttcactatgagacgtcgttacaccctgacagactggtcaatctcattaaaaaacacaatgttgaagctggcgtggcgttaaatcctgccaccagtttaacgtcgctggattaccttctgccttcgctggattacgttttgttgatgttgattaatccgggctttgcgggggataaaaatgagacacaggtgccttatgccatggaaaaagtgcgtaacctgcgagagaaaatttgcgggttagatgcgagcgtcgccatccaggtcgatggtcgggtttcttttgcctcgatcccagggcttatcgccgcgggcgcgaataatctggtacttggcagcaccgggctgtttattaaaggcgcgacgcttgctgacaataaaacgcagttggatcgccatgtgagtgaaggtctggcacagtcaggaggccagcaatga

SEQ ID NO: 6938 - DNA, 354 bp, Escherichia coli
atgtcatttctgttacccatccaactcttcaaaattcttgccgatgaaacccgtttgggcatcgttttactgctcagcgagctgggagagttatgcgtctgcgatctctgcactgccctcgatcagtcgcagcccaagatctcccgccatctggcattactgcgtgaaagtgggctattgctggaccgcaagcaaggaaagtgggttcattaccgtttatcgccgcatattccagcatgggcggcgaaaattattgagcaggcctggcgatgcgaacaggaaaaggttcaggtgattgtccgtaacctcgccagacaaaattgttccgcagacagtaagaatatttgtagttaa

SEQ ID NO: 6939 - DNA, 1290 bp, Escherichia coli
atgttactggcgggcgctatctttgtcctgaccatcgtattggttatctggcagccgaaaggtttaggcatcggctggagtgcgacactgggcgccgtactggcgttagttactggcgtggtccatccgggcgatattccggtggtgtggaatatcgtctggaacgcgacggcggcgtttatagccgtcattatcatcagcttgctgctggatgagtccggcttttttgaatgggcggcgctgcacgtctcacgctggggcaatgggcgcggtcgcttgctgtttacctggattgtcctgctcggtgctgccgttgcagctctgtttgccaatgatggcgcggcgcttattttgacaccgattgtcatcgccatgctgctggctttagggttcaacaaaggcactacgctggcgtttgttatggcggccggattcattgccgataccgccagcctgccgcttattgtctctaacctggtgaatatcgtttcggcagatttctttagcctcgactttcgcgaatacgcctcggtgatggtgccggtggatatcgctgcaatactggctaccctggtgatgttgcatctctatttccgcaaagatattccgcagaactacgacatggcgctgctaaaatctcccgcagaagcggttaaagatcctgccaccttcaaaactggcggggttgttttactgcttctgctggtgggatttttcgtcctggaaccgctcggcattccgataagcgccattgcggcagtgggcgcgctgatattatttgtcgtcgctaaacgcggtcatgcgattaatacgggtaaggtgctgcgcggtgcgccctggcagattgtcatcttctcgctcggcatgtatctggtggtttatggcctgcgcaatgccggattaacggaatatctttctggcgtactcaacgtgctggcggataacggcctgtgggcggcgacgctcggcaccggattcctcaccgccttcctctcttctattatgaacaatatgccgacggtactggttggcgcgttgtccattgatggcagcacggcatctggtgtcatcaaagaagcgatggtttatgccaacgtaattggctgcgatttggggccgaaaattacaccgattggtagcctggcaacgctgctctggctgcacgtactttcgcagaagaatatgactatcagctggggatattacttccgtacagggattatcatgaccctgccggtgctgtttgtgacgctcgccgcgctggcgcttcgtctctctttcactttgtaa

SEQ ID NO: 6940 - DNA, 321 bp, Escherichia coli
atgcagttggaagaagttgctaaagcgctgaaagagctaggtcacccgacccgtttgttcatatttaagcatctggtcaaagcgggggaacaaggtttgccggtcggtgagttgcaaaagcagcttgggatacccggctctacactcagtcaccatatttcagcactggtatcggtagggttggtcaaacaaaaccgtgagagtcggacgctgatgtgtgtttcgcaatacgcaatgctggaagcgataattgaatttttacgtgaggagtgctgcgtaaacagcaaaacagatggcgaaggagccacgaagaacaaataa

SEQ ID NO: 6941 - DNA, 1002 bp, Escherichia coli
atgagtagttggcttgcgatgctgcaagatgccgcagagatgtttgtgtttctcgccgtcgagctttctttgctgtttatagtgattagtgccggtgtcagcctgataagacaaaaggtgccagaccataaaatccagcagatgatgggggccagaaaagggagaggctatctcctggctgctctgttgggagccgttaccccgttctgtagttgctcgacaatacccatgttacgtggattgttatcagcgaaagccgggtttggtccgaccctcacttttttatttgtttccccattacttaatcccattatcgtcgggttaatgtgggtgacctttggctggaaagttaccttgttgtacgcgattatcgccgccggcgtctccgtacttgccagtattatcctggattccctgggatttgaacgtcatatcattgccagtaaaagctcatcagcaaattgttgtgctccagccaaaacttcgccggggacgacatatacgccaataaaagtgagttgctgtagtccagcggctaaagccattgagaaacctgtagtaaactgttgcagtaccaaagctgtggtaagtattaatcccataaaactagccaccaaagatgcgttgcaacagtttaaagatgtactgccatatcttttgttaggggtattaataggctcttttatttatggctttattccctcagagtggattgccgctcatgcaggggcagataatcccttcgccatcccattgagcgccgttgttggtattccgctatatatccgggcagaggcagttatccctctggcatctgttttgatgacaaaaggaatgggtctgggagcattaatggcattaatcatcggcagtgccggcgcaagcctgacggaagtgatattacttaaatcaatgttcagaataccgatgatagttgcattcctgacggttatcttaggtatggctatcttgatgggctatttgactcaaatgctattttaa

SEQ ID NO: 6942 - DNA, 1197 bp, Escherichia coli
atgtcaattgactttaccccaggtatgataaatacatatcacggcgatatttataaccgcacaacagataccgacaatgttaaaacaccagacacaccgatgtggccttgtgataatcaggaagaacagcaacccattaatttttcattgtctgaagaaggatataacgctgaacaatttgatttagcgcaacaacaactccaacaaattaatgcgtgccacacgaacaccacatatacaaatgcagactactcaaaagttgtggctcaacttgtaaaacttattaataacattgaaacgataagttcgacaccacttacgcaacagacacaatcaatacttaatcagattaataacattagatacgaaaagaataaaaactctgaatctaaaatcattgttgtctttaatcctaagcccaataagccaatcataactaaaattctcgtagaagagggaataccagtaagattcagtgtccaaaccgtttcttccgaaaataaaaatttttctgggctacgaactgatttaccaactgatataaaagatattcaacgcttgtaccaaaaaatgacaaggttgtatattgagcacagtgaaaatgaaaacaggatgaaagtctttgctggaaccaactttattgatttcaatatgacaggacaggacctgtccgggttcgttctaaccttgtcaaggttttatttcgaagatctacttaatgtaaacttcactgacgcaaatttatttgatactattttttcacataaggaaaaccccatcacaaaattacataaagatgaacaatatgttgacaaacaaatcaatggtttattttcaacattattaaccattaatgacaactctttaagagcaaaagcggaaattgcttcgacaataatagaattattagaaaccagggtaaacaatctttcatacaacgacataataaaatatcagcaagaattccaaaaagaatgttacaagcaagttaaagattttacaacaccctctcgatacaatagaattaaaaaatgggcacaaatgtctgaatatcaattcgaaatatttcaacacgatacgtttcatcctaaaaaaatgtcatacgcaccttatttaaagagatcgctacctgatgaaaaaactataaattatggggtagaaatagaaacaccaattggcaaaagaattcgctggtga

SEQ ID NO: 6943 - DNA, 258 bp, Escherichia coli
atgtcagtacaagaaaaaacagtacagattgattcttttgatgcgaaatttttagatataaatacattaagcaggcttatttatgaacgtaagagttttgtgatcgaaaatgtttctgatgttagtgaaacggtaaaaagagtggagcatgaaatagagaaaacgaaattaagtcgtcgtgtatatactgagtacaggagtacagctttagctggttctttatggtcaccaacccatcatgcttggtatgacttataa

SEQ ID NO: 6944 - DNA, 162 bp, Escherichia coli
atggctctgctctggaaccaggccgcaggaagcatcaatctggagtttatcagctactggaattccggtgtattggcagcccctgataatcacctgacccacgaagagcgctctgctttgcagaaactctggggcggtttggagacaggagatgccatttaa

SEQ ID NO: 6945 - DNA, 213 bp, Escherichia coli
atggatacctgttttaagatccttcagctcaagttcgaccagaagctggctaaccgttgtatcggacttgcaaaacaccaatggggattgatctctattttgcgacacagacgcattatcaatacatcgatggtgcgatcaaatacctcagtggtctcaccgtggatcaaatccagcaattgctcacagattaagactcgtcgggagttttga

SEQ ID NO: 6946 - DNA, 342 bp, Escherichia coli
atgaatttaaaaaatataattttaagtactgttttatcaatcgctagttgtcatgccttggctgtaggtaattctcaaatagcgctatctaaccttcatgtggaaaacaccccaagtgggacgaaggcaattgtgggttatgctgaaaataaatcaaactctgttgtcaaaaatgcttatgtaaaatttaatcttttaaaagatggagtcgttatcggtcaaacaatcgacacagcatccaatcttgaaccaggccagaagtggaaaatacaagccttcattaacacctttaacggcagccctgactcattcaaagtcactgaagtgaaagtagttaactga

SEQ ID NO: 6947 - DNA, 270 bp, Escherichia coli
atgggacgctggtttgctggcaggctcatgaaagagctggggttggtcagctgtcagcagccgactcaccggtataaacgtggtggtcatgaacatgttgctatccctaaaagcaacagcaaacagcgaccactggggagccctgcattgcgggattgtattgttcagcgggccatgctgatggcgatggggccgaggagagtgattttcatacgctctcatatggttttcgacttgtgcgaaatgtccactacgcgatccgcacggtga

SEQ ID NO: 6948 - DNA, 210 bp, Escherichia coli
atgaatgttggtttctctactctggaggcatgggtatgtcagctcagacgggaacgtcaggatatcacgccttctgcagtaccactcacatcagagcagcaacgtattcgtgagctggaaaagcaggtgcgtcgtctggaggaacaaaatacgatattaaaaaaggctaccgcgctcttgatatcagactccctgaatagttcccgataa

SEQ ID NO: 6949 - DNA, 717 bp, Escherichia coli
atgaacagcaacgcgttgctcaaaaattcttccttatttgtggcttatatgggatgtctcggatggggaagtgcatatttttacgggtggggtgtctctttttattatggtttcccatggtgggttgtcagtgcaggtattgacgatgttgcaagaagcctgtttcatgcaattactataatggtcatcctgtttctctcatggggcgcgggagtacttttctttcttggaataaaaaacaaagcaagcatgcatgaattgagctttttcagactttttcttgcctcattcttattgtttgttccggtggtgattgagttctctgtgctaaagaatcatctggcattaaaacttcttaccttatcagtagcggtatcccttattcttgtttttcttataagaacctgtggccaccgtgtttcagcatcatgtttttcagagagtatctttgtaaagaaacatatttctgaaatatgttttgtcggctttgtcatatatttctgggttttttcattttctgttggcttttacaagccgcaattcaagaaagaatatgaaatgatgaattataatgacgggtggtattatgttttagccagatatgataccactcttgttttatcaaaatcatttaagtcaggtaatggcagatttctggtgatcgggtctgagcagttaaaagattatgaatttaatatggttcgggttaacctgtag

SEQ ID NO: 6950 - DNA, 501 bp, Escherichia coli
atgaataacacagacacattagaaaaaataatcagacaccaaaaaaacaaagaccccgcatatccctttcgggaacatttgttgatgcagctctgtattcgcacaaataaaagaatgcaggataatatatctgaatttctgggggtgtatggaataaatcactcagcatatatggttctcaccacattattcgcagcggagaaccattgtctgtcaccttcagagataagccagaaacttcagtttaccagaactaatattacccgcattacagattttttagaaaaagccggatatgtaaaaaggacggatagcagggaggatcgccgtgctaaaaaaatcagtctgacatctgaaggtatgttttttattcagaggctcactcttgcacaaagcatgtatctgaaagaaatctgggattatctgacccatgatgaacaggaactgtttgaagtcattaataaaaaattactggcacatttttctgatgccagctcataa

SEQ ID NO: 6951 - DNA, 252 bp, Escherichia coli
gtggttaaataccagcgtgatgtcagagaagtcgcgctggcacttgagctcaatcctgaccatttgcgtaaatggatacggttgtataagcaggaatttcagggtattgagtccgctggtaatgctattatccctgaacaacgcgaaattcagcagcttaaagcgcagataaagcgcgttgagatggaaaaagaaatactaaagcaggctgccgtgctgatgagcgaaatccccgggaagctgtcgcgctaa

SEQ ID NO: 6952 - DNA, 600 bp, Escherichia coli
gtgtgtgctccggtaggaaatacaaaacaattgagtaacactttcaatgaattaaggtttagtttactgttgcctgcagatctacccaaagggcgctatgaggttccaattaaatatatcagggggatacagcatcattattataatggctggcgtgagcattataaaatgccctacagtcaggttaagcagttacctgctacaaatactctaatgctgtcatttaataatactggaagttgtcgcccttccgctcaatctcttgaaataaaccacggtaatctttctattgatagtgcccatggtaattatgcaagccaagctgttaccatttattgtgacgtcccggttactgttaaaatctcactattcagcaatacacaaccagcatataataatcagggggttgcggttggtttgggcaatggctgggattcaataatatatcttgatggtgtcaagcgaaatgaggaaacattgcgctggaatactgcaggatccaggacagtgacagttggaagcaagttgtatggtgaagcaggcaagataacttctggtgctttgtctggttcaatgacgatgatcatgcatcttccctga

SEQ ID NO: 6953 - DNA, 378 bp, Escherichia coli
atgaaaaaatggttccctgcttttttatttttatccctgtcaggctgtaatgatgctttagctggatggcacaatgtaatgttttatgcttttaatgactattctggttatgattctggtaatatgacaatttttgacaggggacaattcactattccatggaaaacaggagcagcatccgcaatctatagctcatgtcagactccagaattcgtgagcggtgtttactttcaggaatatatagcatgggtgttagttccgagaagtacccaaaccactgatagatatactgttttttttgatgtctacagtaaatatggctggaatcaggaaaatacaggtgattatgggtattattatttcctcaacggatattaa

SEQ ID NO: 6954 - DNA, 318 bp, Escherichia coli
atgattaagtcggttattgccggtgcggtagctatggcagtggtgtcttttggtgtaaatgctgctctaactactccacaggggcagggtagagtaacctttaacggaactgttgttgatgctccatgcagcatttctcagaaatcagctgatcagtctattgattttggacagctttcaaaaagcttccttcaagcaggaggcgtatccaaaccaatgaatttagatattgaattggttaattgtgatatcacttcatttaaggggggggggaggagtctcggcagcaaaaaaagggactgtgaagctggcttttag

SEQ ID NO: 6955 - DNA, 801 bp, Escherichia coli
atgccactgctggataagctgcgtgagaagtacggggtcggaccggtatgcagtgaactacatattgccccgtcaacgtattaccattgtcagcagcagcggcatcatcctgataaacgcagtgcccgtgcgcagcgcgatgactggctgaagagagagatacagcgcgtatacgatgaaaatcatcaggtgtacggtgtgcgtaaagtctggcgtcagttgttacgggaaggaatcagggtggccagatgtacagtggcgcgcctcatggcggttatgggacttgccggtgttctccggggtaaaaaggtccgcactaccgtcagccggaaaaccgttgctgcaggtgaccgcgtaaaccgtcagttcgtggcagaacgtcctgaccagctgtgggtggctgattttacttacgtcagcacatggcagggcttcgtctatgtggcgttcatcattgatgtgtttgccggatacatcgtggggtggtgggtctcatcgtctatggaaacgacattcgtgctggatgcgctggagcaggcgttgtgggcccgccgtccgtccggcaccatccatcacagcgataaaggctctcagtatgtgtcactggcctatatggagcgattaaaagaagcaaaactgctggcatcaacagggagtacaggcgactcgtatgacaacgcgatggcggagagcatcaatggtctttacaaagcggaggtaatacaccgtaagagctggaaaaaccgtgcagaagtggaactggccacactcacgtgggtggactggtataacaatcgatga

SEQ ID NO: 6956 - DNA, 327 bp, Escherichia coli
atgactaaaaatactcgtttttcccccgaagtccgtcaacgggcagtccgtatggttctggaaagtcagggcgaatatgactcacaatgggcgacaatttgttccattgctccaaagattggctgtacgccagagactctgcgtgcctgggttcgccagcatgagcgggataccgggggcggtgatggtgggctcaccaccgctgaacgtcagcgtctgaaagagctggaacgtgaaaatcgtgaactgcgccgcagtaacgatatccttcgccaggcttccgcttattttgcgaaggcggagttcgaccgcctctggaaaaaataa

SEQ ID NO: 6957 - DNA, 747 bp, Escherichia coli; identical to SEQ ID NO: 6098

SEQ ID NO: 6958 - DNA, 261 bp, Escherichia coli; identical to SEQ ID NO: 6099

SEQ ID NO: 6959 - DNA, 561 bp, Escherichia coli
gtgtctacttatgagaatatacttcgcataacggatactctgatccagcaacgcggatttttggggttcagttacgcagatctggaaaaagaaattggtatcagaaaagccagtattcatcaccatttcccgaggaaaactgatcttggtatagcctactgccaatacaaaacagaagtatttgatagacttaatataactctccataatgtttcttcaggtgtacaacgtctcaggacatatcttgatgcatttgctggttgtgctgaaagaggggaaatgtgcggtatttatgccatgctatccgacagccatcagttttctcctgaattacaggaggctgtaagtcaactggcacatcaggagatacagatgattaaagatattatcacctccgggcagaatagtggagagttcaaaacagttcttcttccggatgagctcgccgttatagtctgttctacactaaagggggcactgatgttaaatcgacttccaccacatgatacctattcaggaaccgttaacgctttaattaaaatgcttgatacccgtacttaa

SEQ ID NO: 6960 - DNA, 366 bp, Escherichia coli
atgattgatgtcttagggccggagaaacgcagacggcgtactacacaggaaaagatcgctatcgttcagcagagctttgaaccgggaatgacggtctcccttgttgcccggcaacatggtgtggcagccagccagttatttctctggcgtaagcaataccaggagggaagtcttactgctgtggctgccggagaacaggtcgttcctgcctctgaacttgctgccgccatgaagcagattaaagaactccagcgtctgctcggcaaaaaaacgatggaaaatgaactccttaaagaagccgttgaatatgggcgagcaaaaaagtggatagcgcacgcgcccttattgcccggggatggggagtaa

SEQ ID NO: 6961 - DNA, 906 bp, Escherichia coli
gtggatagcgcacgcgcccttattgcccggggatggggagtaagcttcgtcagccgttgtctccgggtgtcgcgtgcgcagttgcacgtcattctcagacgagccgatgactggaaggacggccgccgcagccgtcacacggatgatacggatgtgcttcgccgtatacaccatgttatcggagagctacccacatatggttatcgtcgggtatgggcgctgcttcgcagacaaacagaacttgatggtatgcctgcgatcaatgccaaacgtgtttaccggaccatgcgccagaatgcgctgttgcttgagcgaaaacccgctgtaccgccatcgaaacgggcacataccggcagagtggctgtgaaagaaagtaatcagcgatggtgctctgacgggtttgagttccgctgtgataacggagaaaaactgcgggtcacgttcgcgctggactgctgtgaccgtgaggcactgcactgggcggtcacaacgggtggcttcgacagtgaaacagtacaggacgtcatgctgggagcagtggaacgccgctttggcagcgagcttccggcgtctccagtggagtggctgacggataatggttcatgctaccgggcgaatgaaacacgtcagttcgccaggatgttgggacttgaaccgaagaacacggcagtgcggagtccggagagtaacggaatagcagagagcttcgtgaaaacgataaagcgtgactacataagtatcatgcccaaaccagacgggttaacggcagcaaagaaccttgcagaggcgttcgagcattataacgaatggcatccgcatagtgcgctgggttatcgctcgccacgggaatatctgcggcagtgggccagtgatgggttaagtgataacaggtgtctggaaatatag

SEQ ID NO: 6962 - DNA, 2091 bp, Escherichia coli
atgcgaataaccactctggcttccgtagtcattccctgtctcggattttcagccagcagcatagctgctgcagaggatgtgatgattgtctctgcatccggctatgagaaaaagctgactaacgcagccgccagtgtttctgtgattagccaggaggaattgcagtccagccagtaccacgatctggcggaggctctgagatcagtagagggtgtggatgttgaaagtggtacgggtaaaaccggtgggctggaaatcagcatccgaggaatgccagccagttacacgctgatactgattgatggtgttcgtcagggcggaagcagtgacgtgactcccaacggtttttctgccatgaataccgggttcatgccccctctggccgccattgagcgtattgaggttatcagggggccgatgtccacactgtatggctctgatgcgatgggcggtgtggtgaatatcattaccagaaagaatgcagacaaatggctctcttccgtcaatgcagggctgaatctgcaggaaagcaacaaatggggtaacagcagccagtttaatttctggagcagtggtccccttgtggatgattctgtcagcctgcaggtacgcggtagcacacaacagcgtcagggctcatcggtcacatcactgagcgatacagcagccacgcgtattccttatcccacggagtcacagaattataatcttggtgcacgtcttgactggaaggcgtcggagcaggatgtgctctggtttgatatggataccacccggcagcgttatgataaccgggatgggcaactggggagtctgacggggggatatgaccggaccctgcgctatgagcgaaacaaaatttcagctggctatgatcatactttcaccttcggaacatggaaatcgtatctgaactggaacgagacagaaaataaaggtcgtgagctcgtacgcagtgtactgaagcgcgacaaatgggggcttgccggtcagccgcgggagcttaaggaatcgaaccttatcctgaattcattactgcttacccctctgggagaatctcatctggttacggtggggggcgagtttcagagctcgtccatgaaagacggagttgtccttgccagcacaggtgaaactttccggcagaaaagctggtcggtatttgctgaggatgagtggcatctcacggatgcacttgcgctgactgtgggcagccgctatgaacatcatgagcaattcgggggacacttcagtccgcgtgcatatctggtctgggatgtggcagatgcctggacgctgaaaggcggtgtgaccacgggatataaggcacccagaatggggcagctacataaagggattagtggtgtatccgggcagggaaaaacaaatctacttggtaaccccgacctgaagccggaagagagcgtcagttatgaggctggggtgtattacgataaccccgccggtctgaatgccaatgtcacaggttttatgactgacttctccaacaagattgtctcttattccataaatgataacaccaatagctatgtaaacagcggaaaggcccggttgcatggtgtggaatttgccggcacattgccgctgtggtcagaggatgtcacgctgtcactgaattacacctggacccgaagtgaacaacgtgatggtgataacaaaggtgcgccgctgagttatacccctgaacacatggtgaatgcgaaactgaactggcagatcaccgaagaggtggcatcatggctgggtgcccgttatcgcgggaaaacaccacgtttcacccagaattattcgtcactgagcgctgtacagaagaaagtgtatgatgagaaaggagaatacctgaaagcctggacggtggtggatgcaggtctgtcgtggaagatgacggatgccctgacgctgaatgctgcggtgaataacctgctcaacaaggattacagtgacgtgagcctgtacagtgccggtaagagtacgctgtatgccggtgattacttccagacgggatcatcaacaacaggatatgtgatacctgagcgaaattactggatgtcgctgaactatcagttctga

SEQ ID NO: 6963 - DNA, 441 bp, Escherichia coli
atggatctttttgcccgcagggttatcggctggagcctgtcagcgaatgccgatactgcactgataagcagtgccttgcggatggcgtatgaggtgcgtggtcagccgcgggacgtcatgttccatagcgaccagggaagtcagtatacaggactgaaatatcaacagcttctctggcgttacaggataaagcaaagtgtcagccgacggggaaactgctgggataacagtcctatggaacgcttcttccgcagtctgaaaacagaatgggtgccgacggatggttacgtaggcaaggacgaggcccggcaacaaattagcggttatatcctgaattattacaatagcgtcaggcctcaccattacaacggtgggttgacgccggaagaatcagagaacagataccgtttttactgtaaaaccgtggccaatattacttga

SEQ ID NO: 6964 - DNA, 2637 bp, Escherichia coli
atgtcatatctgaatttaagactttaccagcgaaacacacaatgcttgcatattcgtaagcatcgtttggctggtttttttgtccggctctttgtcgcctgtgcttttgccgcacaggcacctttgtcatctgccgaactctattttaatccgcgctttttagcggatgatccccaggctgtggccgatttatcgcgttttgaaaatgggcaagaattaccgccagggacgtatcgtgtcgatatctatttgaataatggttatatggcaacgcgtgatgtcacatttaatacgggcgacagtgaacaagggattgttccctgcctgacacgcgcgcaacttgcaagtatggggctgaatacggcttctgtctccggtatgaatctgctggcggatgatgcctgcgtgccattaacctcaatgatccatgacgctactgcgcatctggatgttggtcagcagcgactcaacctgacgatccctcaggcatttatgagtaatcgcgcgcgtggttatattcctcctgagttatgggatcctggtattaatgccggattgctcaattataatttcagcggaaatagtgtacagaatcggattgggggtaacagccattatgcatatttaaacctacagagtgggttaaatattggtgcgtggcgtttacgcgacaataccacctggagttataacagtagcgacagatcatcaggtagcaaaaataaatggcagtatatcaatacctggcttgagcgagacataataccgttacgttcccggctgacgctgggtgatggttatactcagggcgatattttcgatggtattaactttcgcggcgcacaattggcctcagatgacaatatgttacccgatagccaaagaggatttgccccggtgatccacggtattgctcgtggtactgcacaggtcactattaaacaaaatgggtatgacatttataatagtacggtgccgccggggccttttaccatcaacgatatctatgctgcaggtaatagtggtgacttgcaggtaacgattaaagaggctgacggcagcacgcagatttttaccgtaccctattcgtcagtcccgcttttgcaacgtgaagggcatactcgttattccattacggcaggagaataccgtagtggaaatgcgcagcaggaaaaaccccgctttttccagagtacattactccacggccttccggctggctggacaatatatggtggaacgcaactggcggatcgttatcgtgcttttaatttcggtatcgggaaaaacatgggggcactgggtgctctgtctgtggatatgacgcaggctaattctacacttcccgatgacagtcagcatgacggacaatcggtgcgttttctctataacaaatcgctcaatgagtcaggcacgaatattcagttagtgggttaccgttattcgaccagcggatattttaatttcgctgatacaacatacagtcgaatgaatggctacaacatcgaaacacaggatggagttattcaggttaagccgaaattcaccgactattacaacctcgcttataacaaacgcgggaaattacagctcaccgttactcagcaactcgggcgcacatcaacactgtatttgagtggtagccatcaaacttattggggaacgagtaatgtcgatgagcaattccaggctggattaaatactgcgttcgaagatatcaactggacgctcagctatagcctgacgaaaaacgcctggcaaaaaggacgggatcagatgttagcgcttaacgtcaatattcctttcagccactggctgcgttctgacagtaaatctcagtggcgacatgccagtgccagctacagcatgtcacacgatctcaacggtcgaatgaccaatctggctggtgtatacggtacgttgctggaagacaacaacctcagctatagcgtgcaaaccggctatgccgggggaggcgatggtaatagcggaagtacaggctacgccacgctgaattatcgcggtggttacggcaatgccaatatcggttacagccatagcgatgatattaagcagctctattacggagtcagcggtggggtactggctcatgccaatggcgtaacgctggggcagccgttaaacgatacggtggtgcttgttaaagcgcctggcgcaaaagatgcaaaagtcgaaaaccagacgggggtgcgtaccgactggcgcggttatgccgtgctgccttatgccactgaatatcgggaaaatagagtggcgctggataccaataccctggctgataacgtcgatttagataacgcggtcgctaacgttgttcccactcgtggggcgatcgtgcgagcagagtttaaagcgcgcgttgggataaaactgctcatgacgctaacccacaataataagccgctgccgttcggggcgatggtgacatcagagagtagccagagtagcggcattgttgcggataatggtcaggtttacctcagcggaatgcctttagcgggaaaagttcaggtgaaatggggagaagaggaaaatgctcactgtgtcgccaattatcaactgccaccagagagtcagcagcagttattaacccagctatcagctgaatgtcgttaa

SEQ ID NO: 6965 - DNA, 135 bp, Escherichia coli
atggcgggctctgttcggattgtcggcaaagtgcgctttgtttatgccagatgcgacgctgacgcgtcttatctggcctacaaagggctaacgtgcaggtttttagcttcaggtaatattgcgtacctgcattag

SEQ ID NO: 6966 - DNA, 1461 bp, Escherichia coli
atgactactattgttgacagcaatctgccggttgcccgcccgtcatgggagcattctcgtctggaatcacgcattgtgcatctcggttgcggggcgtttcaccgcgcgcaccaggcgctgtatacccatcatctgctggaaagcaccgacagcgactggggtatctgcgaagttaacctgatgccaggtaacgaccgtgtgctgattgaaaacctgaaaaaacagcaactgctgtacaccgtggcggaaaaaggcgcggaaagcaccgaactgaaaattatcggttcgatgaaagaagcgctgcatccggaaatcgacggctgcgaaggtattctcaacgcgatggcgcgtccgcagacggcgattgtctctctgacggtcacggaaaaaggctactgcgctgatgcggcaagcggtcagttggatctcaataacccgctgatcaagcacgatctggaaaacccgactgcgccgaagtctgcgattggttacatcgtcgaagccctgcgtctgcgtcgtgaaaaagggctgaaagcgtttacggtgatgtcctgcgataacgtgcgtgaaaacggtcatgtggcgaaggtcgcggtactggggctggctcaggcgcgtgacccgcagctggcggcatggattgaagagaacgtcaccttcccgtgcaccatggttgaccgcatcgttccggcggcgacgccagaaaccttacaggaaattgctgaccagctgggtgtttatgacccgtgcgccattgcctgcgaaccgttccgtcagtgggtgattgaagataacttcgttaatggtcgtccggactgggataaagtgggcgcacagttcgttgcagacgttgtgccgttcgaaatgatgaagctgcgtatgctgaacggcagccactctttcctggcatacctcggttacctcggcggctatgaaactattgccgacaccatgactaacccggattatcgcaaagcggcctttgccctgatgatgcaggaacaagcgccaacgctgtcgatgccggaaggtacggacctgaacgcctatgcgacgctgctgatcgagcgtttcagcaacccgtctctgcgtcaccgtacctggcagattgcgatggacggcagccagaagttaccgcagcgtctgctggatccggtgcgtctgcacctgcaaaacggcggcagctggcgtcacctggcgctgggtgtggctggctggatgcgttacacccagggcgtggatgagcagggtaatgccattgacgtggtcgacccgatgctggccgagttccagaagattaacgcgcagtatcagggcgcagaccgcgtgaaagcgctgctgggcctgagcggtatttttgccgatgatctgccgcagaatgccgactttgttggcgcggtgacggcggcatatcagcagctgtgcgaacgcggtgcgcgcgagtgtgtggctgcgctgtaa

SEQ ID NO: 6967 - DNA, 195 bp, Escherichia coli
atgtacgtttgtttgtgtaatggtgtaagtgacaaaaaaattcgccaggcagtccgtcagtttcatccgcaatctttccaacaattgcgtaagtttattcctgtgggaaatcaatgcggtaagtgcatttgcgccgcgcgcgaagtgatgcaggacgagttgatgcagatgccagaatttaaagagattgcctga

SEQ ID NO: 6968 - DNA, 477 bp, Escherichia coli
atgaaaggtgatgttaaaatcataaattatctcaataaactattgggaaatgagcttgtcgcaatcaatcagtattttctccatgcccggatgtttaaaaactggggcctgatgcgtctcaatgacgtcgaataccatgaatctatcgatgagatgaaacacgctgataaatatatcgagcgtattttgtttttagaaggaatccctaacttacaggatttaggcaaactggggatcggtgaagatgtcgaggagatgctgcaatccgacctgcgattagaactggaaggcgctaaggatctccgtgaggctatcgcgtatgccgacagcgttcatgactatgttagccgtgatatgatgatcgagatccttgccgatgaagaaggtcatattgactggctcgaaactgagctggatctcatcggtaaaatcggtctacaaaattacctgcaatcacaaataaaagttaaagattaa

SEQ ID NO: 6969 - DNA, 468 bp, Escherichia coli
atggacgctacccttccctttctgattttgtacgcttgtttatcagccctactttttttctgggatgcaaagcatggcttgttacctgacagatttacgtgcccgttactctggtcaggtcttttgttctatcaagtttgtaatcctgacggtttagccgatgcgttatggggggcgattattggttacggcacattcgctgtcatttactgggggtatcgcatactgcgtcataaagaaggattaggctatggtgatgtgaagtttctcgccgcccttggtgcctggcatacatggaccttcttgccacgactggttttccttgctgcctcattcgcttgcggagccgtagttattggtctgctcatgagaggaaaagagtcattaaaaaacccgctgccgtttgggccatttctggcggctgcgggtttcgttgtaggctgggatagtttgctggcaggccgttaa

SEQ ID NO: 6970 - DNA, 618 bp, Escherichia coli
ttgtgtcattttcgccgtgtctgggctacggcacagaaactggcggcagatgacgatgtcgatatgctggtgattttaaccgcctgttattttcacgatatcgtgaccctggcgaaaaatcatccgcaacggcagcgttcttcaatcctggcggcagaagagacgcgtcgcctgctccgtgaagagttcgcgcaatttccggcggagaaaattgaggccgtttgtcatgccattgccgctcacagtttcagcgcgcaaatcgcccccttaacaacggaagctaaaatcgtccaggatgcggatcggctggaagccctgggggcgattggcctggcgcgcgtatttgccgtttcaggggcattgggcttggcgctgtttgatggcgaagatccgttcgcacagcatcgcccgcttgatgataaacgctacgcgctggatcatttccagacaaagttactgaaattaccgcaaaccatgcaaaccgcaagaggcaagcagctggcacagcacaacgcgcaatttttagtcgagtttatggcgaagctcggtgccgaactggcgggggagaatgaaggtatcgatcacaaggtgatagatgcgttttcacccgctggctga

SEQ ID NO: 6971 - DNA, 309 bp, Escherichia coli
atgactgtttttggtaataaccatattgccaacaaagcacaaaacttcgaagtagttgcacaatatcagttcgacttcggtctgcgtccgtccgttgcttacctgcaatctaaaggaaaagacttgggtgcgtggggtgatcaggacctggttgaatatattgatgtaggtgcaacctattacttcaacaaaaatatgtccacttttgttgattacaaaatcaacctgattgataagagcgatttcacgaaagcatctggcgttgctaccgatgatatcgttgctgtaggattggtttaccagttctaa

SEQ ID NO: 6972 - DNA, 243 bp, Escherichia coli
atgttctctctgattcaacgtggtcagatatacaccgatagcgctggctatccagtaaaaatcattcgtagtactgatcactcagtgttcttcaagaggatggatggctatcctggaagagtgtgcatccgaaaattcaataatttattcgaacacattgatcacagagaatatcaccagatcctggctgaaacagagcaggagaaccatctgaaaaaattacgtgccatgcaaaggagataa

SEQ ID NO: 6973 - DNA, 345 bp, Escherichia coli
atgtcagatttggctatgaaggttttgaaatggcaatcaactggcgatgtcggcatcagtagcgcaactcttgcctcaatcgcatgtggcctgaaaaagaatatctatggtcatcacttcggcgctccccatgacgtatccgatttccgacgatgcgttgcacttgttgagcagatcccagaaatcagagattcattcgacaaggttgcaaagcgcgttccggcattcaaaggaatcctcaacgaatgggattccctcgttgctctgttgaagtctgaaatgaagatacacggaaacaaagcaccagagacttacagaagaatcagcgagctacgcaaggactaa

SEQ ID NO: 6974 - DNA, 192 bp, Escherichia coli
atgaccgataccagcctgattcctgagaaagaagtgatgaacaagctcggtgtttcatcacgtcagacaatctggaactataccaaacggcacggatttccgaagccagtcagaacccaccccaaatcataccttcgtgaagctgttgaagggtggattcttaacggtggcgttaatcagaaatgctcctga

SEQ ID NO: 6975 - DNA, 897 bp, Escherichia coli
atgacggtcgcccagtgtctcgactactggttcgacaactacgtctctacaactctcagagaaaagacccaggcactttaccgatcaacggttatgaagcgcatgcatgacgcctttcctaatcgtccggcatcttctatcacggttaagcaatgggttgacctgcttaccgaagaagaaaaagataatccacgccgagcaaggcaggtgctaagtcaactaagatcagcaattagttggtgcatgcggcgtcagttgatagatagttgcgcaattatgagcatccagccaagggacttcggctcccgcgctgaggtaggggatcgggtactgtcgtatcacgaactggctaagatttggcttgctattgaaagaagccgtgcgtctacgtcaaataagctccttcatcagatgcttatgctgtggggggcgaggctctcagagcttaggctggcaacaaagacagaatttgacctgctggacaacgtatggaccgtaccgaaagagcatagcaagatgggtaatgttatccgccgtccaatcttcgaacaaattaagccttttctcgaaaaggccatgacaacgtacaatgatgttcttttccctggagaagacataaacaaaccgatcagcatcgctgcagccaaccgattcgtaaatagaataaggggagggatggatataggttactggcgaacacatgatttcagaagaacgcttgttacacggctgtccgagatgaatgtcgagcctcatgttactgagcgaatgctcggtcatgaacttggcgggataatgtccgtatacaataaacacgactggatagaggctcagcgcaaagcgtatgagcttcacgctgataaattgttctggcacatcaggagcatttctgattaa

SEQ ID NO: 6976 - DNA, 228 bp, Escherichia coli
atggcgattaaaaagctggatgtggtgacgcaggtctgtccgtttccactcatagaagcaaaagcagcactggcagaaatggccagcggcgatgagttggtaattgagtttgattgcacccaggcaactgaagcaatcccacagtgggcggcagaagaaggacatgccatcaccgattatcagcagattggcgatgcagcgtggagcatcaccgttcaaaaagcctga

SEQ ID NO: 6977 - DNA, 1005 bp, Escherichia coli
atgcagcgtgggcgtttttgcctgactggtggttttcgcgatatgtatatcgcgaaaaataatcgcatgttttacgccttgctgattgcaatttcggtacaaagcgtgggggtttttgcgttaattcaggcgggcctactgacttacgaagccggggcgttcccgtggcttggtactgttataggtgggtatcttttcgggctgggaattgttctggcgggtggatgtgccaccgggacctggtatcgcgcgggtgagggattgatcggcagttggatcgcgcttttcacttatatggtgatgagtgcggtgatgcgttctccacacgccagtggtttaaatcaaaccttgcagcactacactactgaacataactctattgctgatacttttaatttgtctgtgtggccgttggttgccgttttgctggtgataacgctctgggtggtgatgaaagagttgaagaagccaaaactcaaagtcgcgaccttaccgccgcgccgaaccgggatcgctcatattctgtttgaaaaacgctggcatccctttgtcacagctgtactcatcggtttgattgcgcttttagcctggcccctgagtgaagcaaccggacgtatgtttgggttaggcatcacttccccaacggccaatattctgcaatttctggtcgcgggtgacgtgaaatacattaactggggcgttttcctggtgttagggatcttcgtggggtcatttattgccgccaaagcgagccgtgagttccgcgttcgcgctgctgatgcacaaacaacattacgtagcgggttaggtggtgtactgatgggcttcggtgccagcattgcaggtggttgctctatcggtaatggactggtcatgactgcaatgatgacctggcagggctggattggccttgtatttatgattctcggagtctggactgcgtcctggcttgtgtatgttcgaccgcagcgtaaggcgcgactggcaactgctgcggcaaattaa

SEQ ID NO: 6978 - DNA, 1359 bp, Escherichia coli
atgtcgcataacgttactccaaacacctctcgcgtggaattgcgtaaaacgcttacgttagttccggttgtaatgatgggtctagcctatatgcagccgatgacgctgtttgatacatttggtatcgtttcaggcctcacggatggtcatgtgccgacagcctatgcgttcgcattgattgcgatcctgtttacggctctgagctacgggaagctggttcgccgctatccttctgctggctctgcatacacttacgcccagaaatccattagcccgactgtcggctttatggtgggttggtcttctctgctcgactatctgttcgcgccgatgatcaacattctgctggcgaaaatctattttgaagctctggtgccttccattccatcgtggatgtttgtggtggcgctggtggcctttatgaccgcctttaacctgcgtagtctgaaatccgtagcgaacttcaacactgtaatcgtcgtgttgcaggtagtgctgatcgcggtgattctgggcatggttgtttatggcgtatttgaaggtgaaggcgctggtacgctggcgagcactcgtccgttctggtctggcgatgcgcatgttatcccgatgattaccggggcgacaatcctgtgcttctcctttaccggctttgacggcatcagcaacctgtcggaagaaaccaaagatgcagagcgcgtgatcccgcgtgcgattttcctgactgcgctgatcggcggcatgatcttcatctttgcaacttacttcctgcagctgtacttcccggatatctctcgctttaaagatccggatgcgtcacagcctgaaatcatgctgtacgttgcgggtaaagcgttccaggttggcgcgctgatcttctccaccattaccgtactggcgtccggtatggcggcgcacgcgggcgttgcgcgtctgatgtacgtaatggggcgtgacggtgtgttcccgaaaagcttcttcggttatgtacacccgaaatggcgtactccggcaatgaacatcatcctggttggcgcgattgccttgctggcaatcaacttcgacctggtaatggctacggcgctgattaactttggtgcgctggtggcgttcaccttcgttaacctgtcggttatttcgcagttctggatccgtgagaagcgtaacaagacgctgaaagatcacttccagtatctgttcctgccgatgtgtggtgcgctgactgtaggtgcgctgtgggttaacctggaagagagctcaatggttctgggtctgatctgggctgctatcggtctgatttacctggcttgcgtaaccaagagtttccgtaacccggttccgcagtacgaagacgtagcataa

SEQ ID NO: 6979 - DNA, 456 bp, Escherichia coli
atgtcgtatcgaattttaaaaacattttcaaagctaaaatataaaataaaatttattggaaattggaatggcagcgagtttggaaagaaacttaggctgcattattctaactatccaaatattgaaatgattgatccgatttatgatcttcaacaattatttcacttacgaaataattgcataggatatatacatggtcattcggctggaggaacaaacccttctttagtcgaggcaatgcattttagtaaacctatatttgcatatgattgtaagtttaataggtacactactgaaaatgaagcatgttatttttctaatgaatctgacctcgcagagaaaatcataatgcattgtgagctatcattaggtgtctctggcacgaaaatgaaagaaattgctaaccagaaatacacttggagacgaatagcagaaatgtatgaggattgctattaa

SEQ ID NO: 6980 - DNA, 606 bp, Escherichia coli
atgaaaaaaattgctattatcggtactgttggcataccagcatcatatggcggatttgaaacattagttgaaaatttaacaagatacaattcctcgggagttgaatataatgttttttgttcatcgtttcactacaaatcccaccaaaaaaaacataatggggcccgtttaatttatattccgcttaaagccaatggatggcagagcattgcgtatgacataatttcgttagcatattctatttttttgaagcctgatgtgattctgattttaggggtttctggttgttcatttttgcctttcttcaaactcttaacacgcgctaagtttattactaatattgatggcctggaatggcgaagagataaatggaattcaaaagtgaaacgtttcttaaaattttcagaaaaaatcgcagttcaatattcggatgtcgttattacggataatgaggcaatttctgagtacgtttttaacgagtataataaagatagccgagttattgcctatggaggggatcatgcatggttaaatactgaggatgtatttacaacaagaaattataaaagcgattactacctttctgtatgtcgtatcgaattttaa

SEQ ID NO: 6981 - DNA, 960 bp, Escherichia coli
atgaatgttgctattttgttgtctacgtataatggcgaaaaatatttagaggaacaactggattcattgctgcttcaaagttatcaggattttgtagtgtatatccgtgatgacggatcatctgatagaactgtaaatataataaaccaatacgtaatgaaagataacagatttattaacgtgggtaattcagaaaatcttggttgtgctgcttcgtttattaatttattaagaaatgcttcagccgatatttatatgttttgtgaccaagatgattattggcttccgaataaattacagcgtgctgtggattatttttcggctattgatcctttacaacctaccttgtatcattgcgatctaagcgttgttgatgaaaaacttaatattatacaaaattcatttttgcagcatcagaaaatgtcagcgtatgattcaatgagaaaaaataatcttttcatacaaaattttgttgttggttgttcatgtgctgttaatgcttcacttgcggaatttgttctttcgcgaattggagagcagcatgtaaaaatgatagctatgcatgactggtggttagccgtgactgcaaaactttttggtcgaatccattttgataatactcaaacgattctttatcgacaacatcagggcaatgtattaggtgcaaaatcatcaggtatgatgcgttttattcgattaggattaaatgggcaagggatttcgcgagtagtatcttttagaaaaaaagtttgtgcgcaaaataagcttcttttagatgtctatgataaagatttaaatcttgagcaaaaaaaatctatcaggcttgtaattgagggccttaaagagaactcttcaattgctgaccttttaaaatgtttctatcatggtagctatatgcaaggttttaaacgtaatcttgccttaatatattcagttctttacacaaaaaaaagaagatag

SEQ ID NO: 6982 - DNA, 1284 bp, Escherichia coli
atggcaagccctataatcagcggaacaatgatgtcaaatccctgcccttccacctttttggataaaaatagagttgttgctgctgagcttaatatcacaaataacgagaaaaaatattcacctggcagtaatttcgcaaaatggatgttgcaggaaataaaacgcttaatagcaaatattatgtccggctctcgcagtgttaataccgaaatccttaactattttcaccctatgccaggcactgaaaataatggtaatcgtacctggatggcggcaactggagaggatgagtatatcgaaataaaacaaacaggtgataagtcatttaatattactctggttggtagagataaacgtttacgaaaagaaactccatattcaggagtggctgtagcgactattatcaaatcgttgtctgaaaaaactgctgcgttagaaacacattccgctgacacggttttgagaaagaaattagttaatagtattgttatcaataatacggactttaattacgaaattcctgcgggaattttaagtaatatatatgatttattaagcctgcgagttcaaaaagatgaaggatatgtacctgttcaggaaagttttaaaagaacagatgttttttttgattccataattatggatgctcatagaactataaaagaacaaaatcaacaaaatggtgctactaaaataacttgctgcggtgttgagttaagtaaagatattcttaaaatatttgcagagaaaattgaaataattgaacaagatacaaagaatagtcaaaacacatttgaacaaatggttgaactggtttactttaatgataatgactgtgctcgggtaagggaattattaaagaaatcaaatggtaacattgcggatgataagattgatgaaataatcgcttgcttatccagtcatcaggggattacatgtttttattattcttccgtacaaggctatcagagctatttaaaaaatacatctcaagatgttagcgagttactctcaaagagtttggatgatgccatttcatcaacatcgggtttaaaaaactcaggaaataccttttttgggactgggaaatatcttaaagaaattgattttactataaatgggtttagtcagaagatgtatttgatggcggttaataatgttggaaatgaagttaagcttcagtgttctcgttattttactaccggtagggtcgacgaacaaaactccaaaatcgataaagtcacttttacatttttcggtgccgcaacaactgctgatttatga

SEQ ID NO: 6983 - DNA, 1446 bp, Escherichia coli
atggttagtgtgacgagttataaatatccaacggaaacagagaatgataatagtcattttcagagtcaaactcagagccagggccagggcctgagccagagtctaagagatagtatcgagggtaatattgaagcatttgatgcgatggaacaaagtggcctgctcgataattgtagaacattatctaaaaatgccacttttcgtgaggttttccgaagtttattattatacattttagattctttacatatctatcggcatgatatcagtggtaaattggtttcttattttcatgttacgcctgaatcagcgaatgcgaattataaaacatggatcgctaccacagggatggatagctatataaaaattgagcagaccggcagtgataagtttaaagtcactgatgtgtatcgtgagttaaaaggcaacagtttgaaaaaacagagtagagacagggattttagtggtcgaaatgtgaaagagtttatagggttattatcagagcacgatgtattggaaaagtatcaactctcaaaagtaacagttgctgcaaatgctcttaagctagaagttgttaataataattctgaaaataaacgcagttttggagttactgatgctgagcgccaattaaaaaaagcgttaaatgaacaaactcaattaactccagataaattaattccagatgattgtagttataaatcagacataaaaaaactagatgttctggagggagagtttagttcacttcttgctgatgcagcaagacacgttggagagggtagctcaattatttcatgttgtggagttaaaataaatagcacaatccatgaatttctgaggaataaaaccatggctttgtctggccatggaggtgttagaaaatataaagctttcgaaaagctttttagtgaaattgtatttacgccagatgaatgtaatattgtgagaaactctctacagaaagatggtgttgagaaaaaaatcagagaaaatattatttcttgtctctccagtatttcaggaataggtaacctgtattatgcttgttcacaggcatttcctgtcgcgcttgataggggggatattaatgtaatacaggcaaacgattctgtttctgccgggcttgatgataacccagggttttgtgctttgctgggaaaaacaaatttgcttgttgctgacttttcacagcatacattcacacaaacccattatattgtaaaagccgaaataaatgaagctggtaacgattttaatattgctaatttcatttatcgaacatacggtgaggattatattcataacgactcagtggatgactctcttaatgagcgttccgctgaagattataggtttctggatgactctttgttacctgaaaacgatttccgcaacaggaggagaattttttcaggcaatattgcaatcgcaacctacaaataa

SEQ ID NO: 6984 - DNA, 1503 bp, Escherichia coli
atgaagacgtttttctctcgcttaattaccgttattgcctgcttttttatcttctctgccgcatggttttgcctgtggagtatcagcctgcacctggttgagcgccctgatatggcggtgctgttatttccgtttggtctgcgtctggggctaatgttgcaatgcccgcgcggatactggcccgtattgctgggcgcggaatggctgctgatttactggctaacgcaggcggtcggtttaacccatttctccttattgatgatcggtagtttactgacgttattgcccgtggcgctgatctcgcgctatcgccatcaacgtgactggcgcaccttgctgttacagggtgcggcgctgacggcggcggcgttgttgcagtcgctgccctggctttggcacgggaaagagtcgtggaatgcgctgttgctgactttaactggcggcctgacgctggccccgatatgtctggtgttctggcactatctcgccaataacatctggctgccgctcgggccgtcgttagtttctcaaccgatcaactggcgcgggcggcatctggtctggtacttgctgctgtttgttatcagtctctggctccagttgggattgccggacgaactgtcgcgttttacgccattctgcctggcgctgccgattatcgcgctggcctggcactatggctggcaaggggcgctgattgcgacgttgatgaacgccatcgcgctgatcgccagtcaaacctggcgcgatcatccggtggatttattgctctcgctgctggtgcaaagtctgacagggttgttactgggcgcaggtatccagcggttgcgtgaacttaaccagtcgctgcaaaaagaactggcgcgcaatcagcatctggctgaacgtttgttagaaactgaagagagcgtgcgccgcgacgtggcgcgtgagctgcacgatgatatcggtcagaccatcactgccattcgtactcaggcgggcattgtccagcgactggcggcagataacgccagcgtgaagcagagcgggcagctcatcgaacaactgtcgctgggtgtttacgatgcggtgcgccgtttgttagggcggttacgtccgcgccagctggatgatctcaccctggagcaggccatccgctcactgatgcgggaaatggagctggaagggcgcggcattgtcagtcatctcgaatggcgaatcgatgaatcagcgttaagcgaaaaccagcgcgtgacgctatttcgcgtctgccaggaagggttgaacaacattgtgaaacatgccgatgccagcgcggtcacgctgcaaggctggcagcaggatgagcggttaatgctggtgattgaagacgatggcagcggtttaccgccagattccgggcaacacggttttggccttaccggaatgcgcgagcgcgtaacggcgctgggcggcacattgaccatttcctgtctgcacggcacgcgtgtcagcgtttctctacctcaacgttatgtctaa

SEQ ID NO: 6985 - DNA, 1767 bp, Escherichia coli
atgaataattctattaaccataaatttcatcacattagccgggctgaataccaggaattgttagccgtttcccgtggagacgctgttgccgattatattattgataatgtctctattctcgacctgaacaatggcggagaaatttccggcccaattgtgattaaaggacgttacattgccggtgttggcgcagaatacgctgatgctccggcgttgcagcggattgatgcccgcggcgcaacggcggtgccagggtttattgatgctcacctgcatattgaatccagcatgatgacgccggtcacttttgaaaccgcgaccctgccgcgcggcctgacgaccgttatttgcgaccctcatgaaatcgtcaacgtgatgggcgaagccggattcgcctggtttgcccgctgtgccgaacaggcaaggcaaaaccagtacttacaggtcagctcttgcgtacccgctctggaaggctgcgatgttaacggtgccagttttacccttgaacagatgctcgcctggcgggaccatccgcaggttaccggccttgcagaaatgatggactaccctggcgtaattagcgggcagaatgcgctgctcgataaactggatgcatttcgccacctgacgctggacggtcactgcccgggtttgggtggtaaagaacttaacgcctatattgctgcgggtattgaaaactgccacgaaagttatcagctggaagaaggacgccggaaattgcaactcggcatgtcgttgatgatccgtgaagggtccgcagcccgcaatctcaacgcgctggcaccgttgatcaacgaatttaacagcccgcaatgcatgctctgtaccgatgaccgtaacccgtgggagatcgcccatgaaggacacatcgatgccttaattcgccgcctgatcgaacaacacaatgtaccgctgcatgtggcatatcgcgtagccagctggtcgacggcgcgccattttggtctgaatcacctcggcttactggcacccggcaagcaggccgatatcgtcctgttgagcgatgcgcgtaaggtcacggtgcagcaggtactggtgaaaggcgagccgatcgatgcgcaaaccttacaggcgaaagagtcggcgagactggcacaatccgctccgccgtatggcaataccattgcccgccagcctgtttccgccagcgactttgccctgcaattcacgcccggaaaacgctatcgggtcattgacgtcatccataacgaattgattacccactcccgctccagcgtctacagcgaaaacggttttgatcgcgatgatgtgtgctttattgccgttcttgagcgttacggacaacgactggctccggcctgtggtttactcggcggctttggcctgaatgaaggtgcgctggcggcgacggtcagccatgacagccataatattgtggtgataggtcgtagcgcagaagagatggcgctggcggtcaatcaggtgattcaggatggcggcgggctgtgcgtggtccgtaacggtcaggtacaaagtcatctaccgttgcccattgccgggctaatgagcaccgacacggcgcagtcactggcggagcaaattgacgccttgaaagccgccgcccgtgaatgcggtccgttacccgatgagccgtttattcagatggcgtttctttccctgccagtgatccccgcgctgaaactaaccagtcaggggctgtttgatggtgagaagtttgcattcactacgctggaagtcacggaataa

SEQ ID NO: 6986 - DNA, 1233 bp, Escherichia coli
atgttaaagtggtcggcttttcccctgaaacatgccacgggtaacaccatgagtgaatttattgccgaaaaccgcggcgcggatgccatcacccgaccgaactggtcagccgttttctcggtggcgttttgcgtcgcctgtctgattatcgttgagtttttgcccgtcagtttgttgacgccaatggcccaggatttaggcatttcggaaggggttgccgggcaatcggtgaccgtgaccgcctttgtggcaatgtttgccagtttgtttattacccagacaattcaggccactgaccgccgctatgttgttattttgtttgccgttttgctgacgctctcctgcttgctggtttcctttgctaactcattcagtttgcttttaatcggtcgtgcctgtctggggctggcgctgggtgggttctgggcgatgtcggcgtcgctgaccatgcgtctggtaccgccgcgtacggtgccgaaggcgctgtcggtgatcttcggcgcggtttctattgcgctggtgattgccgcaccgttgggcagttttttaggcgagcttatcggttggcgcaatgtctttaatgcggcggcggtgatgggcgtgctgtgtattttctggattatcaaatcattgccttcgctgccaggcgaaccctcgcatcagaaacaaaatactttccgcttattacaacgtccgggtgtgatggcagggatgatcgccatcttcatgtctttcgccgggcagtttgctttcttcacgtatattcgcccggtgtatatgaacctggcgggattcggcgtggatggcttaacgctggtgctgttgagttttggtatcgccagctttattggtacgtcgctttcgtcgttcattcttaaacgttcggtaaaactggccttagcaggcgcgccgttaatactggctgtgagtgcgttggtgctgacgttgtggggaagcgataaaatcgttgctaccggcgtggcgattatctgggggctaacttttgcattggttcctgtcggctggtcaacgtggatcacccgctcactggccgatcaggcagaaaaagccgggtctattcaggtggcggttattcagcttgctaatacctgtggcgcggcaatcggcggttatgcgctggataatattggtctgacttcgccgttgatgttgtccggcacattgatgttgctgacggcgttattggtcaccgcaaaggtgaaaatgaagtaa

SEQ ID NO: 6987 - DNA, 1146 bp, Escherichia coli
atggttgcagtgacagtactgatccccgccgtccggctggtgactgagatctccaccgtaccgtccggctctgtgatgaccgtcggggcagtcgttgcgccgttgtccgccaacacgctgaccgtctgcccggcaagcgtattcccgaacgcatctgtgaccctcacccgcagcgtgttcgccattgcaccgtctgccactgagttatcccgggtgaccaccagatcagcgatcttcgccgtcctgacatccgcgataaacgtcacgttccggctcaggctgctgttgttgatggttgcagtgactgcactgactcccgccgtccggctggtgactgagatctccaccgtcccgtccggctcggtgatcaccgtcggggcagtcgttgcgctgttgcctgccgacacgctgaccgtctgcccggcaagcgtattaccgaacgcatcggtgaccttcacccgcagcgtattcgccattgcgccgtcagccactgagttatcctgcgtcacctccagactcgcgatctgcgccgtcctgacatctgcaacaaacgtcacgttccggctcgcggtactgctgttgatactggcagtgacggcactggtgcccgccgtctggctggtgacactgatctccaccgtgccgtcctgccctgtgatgacagtcggagcgaccgttgcgccgttgtccgccaacacgctgaccgtctgcccggcaagcgtattaccgttagcatcggtgaccctcacctgcagcgtattcgccattgcgccgtcagccacggcgttatcctgcgtcacctccagactcgcgatctgcgccgttctgacatccgcgataaacgtcacatcccggctctggctgctgttgttgatgctggcggtgactgcactgactcccgccgtctggctggtgacactgatctccgccgtgccgtccggctctgtaatcaccgttggggcaaccgttgcgccgttgcctgccatcacgctgaccgtctgcccggcaagcgtattaccgaacgcatcggtcaccctcgcccgcagcgtgttcgccgtcgaaccgtctgccaccgcgttatcctggctaacgaccagatccgctatcttcgccgtcctgacatccgcgacaaacgtcacgttctga

SEQ ID NO: 6988 - DNA, 273 bp, Escherichia coli
atgctggcagtgactgcactgattcctgccgtctggctggtgacagagatctccaccgtgccgtccggctttgtggtcaccgtcgaagcgaccgttgcaccgttgcctgccaacacgctgaccgtctgtccggcaagcacattaccgaacgcatccgtcaccctcacccgcatcatgttcgccgtcgaaccgtctgccactgagccgtccttaatgaccaccagatcagcgatctgcgccgtcctgatatcggcgataaacgtcacgttctga

SEQ ID NO: 6989 - DNA, 243 bp, Escherichia coli
atggcagagattattcccatgactgaagaacagaaattccagttagagatttacaaactggtcatgaaccagaacgcagccgcggaggaagcatttcagttcattggcactgacgaactgaagcttgagctattcaaaattcacttccagtcaggcggcgctaattcagatatcacgatccgcacacttgaagcggtgcgtaaatctaaggaagcgttagacctgttcactaccggagcataa

SEQ ID NO: 6990 - DNA, 426 bp, Escherichia coli
atggcgactgagaaaaagaatgtcggtcgcccttcggattacctgccggaggtggctgatgatatctgtgcgctgcttgcctccggggaaagtctggttaaggtttgcaagcgccccggcatgccagcaaaggctactgtatttcgctggctgtcagagcatgacgactttagagacaagtacgcgaaggcaactgaggcgcgagctgattctattttcgaagagatattcgaaattgctgacactgcgattccagatgctgctgaggtggcaaaggcaagacttcgcgttgatacccgcaaatgggcgctggcccgaatgaatccccgtaagtatggcgacaaggtaactaacgagcttgtcggcaaagacggcggcgcaatccagattgaaacatcaccgatgagcactctattcgtaaaatga

SEQ ID NO: 6991 - DNA, 1416 bp, Escherichia coli
atgacctcgattaatcctatctttgaaccgttcattgaggcgcatcgctacaaagttgccaaaggcggtcgaggtagcggtaaatcatgggcaatagcgaggctgcttgttgaagcggcgcgccggcagcctgtgcgtattctctgcgctcgtgaactgcaaaacagtatcagcgattcggtaatccggttgcttgaagacaccatagagcgggaagggtattcggctgagtttgaaattcagcgttccatgattcgtcatctcggaacgaatgctgaattcatgttctacggcataaaaaacaacccgacgaagattaaatcgctcgaaggcattgatatctgctgggttgaagaagcggaagcggtaacgaaggaatcgtgggatatcctgattccaaccatccgtaagccgttctctgaaatatgggtaagtttcaacccgaaaaacatcctcgacgatacctatcagcgattcgtcgtaaatcctcccgatgatatttgtctgctgacggtgaactacaccgacaatccgcactttcctgaagttctccgtctggagatggaagagtgtaaacgcagaaatccgacactgtatcgtcacatctggcttggtgagccagtaagcgcaagtgatatggcaatcatcaaacgtgaatggcttgaagctgctaccgatgcgcacaagaaactcggatggaaagcgaaaggcgctgttgtctctgcgcatgacccgtcagatacagggccagatgctaaaggttacgcatcgcgtcacggttcggtggttaagcgcattgccgaaggtctgctgatggacatcaacgatggtgctgactgggctacttcgctggcgattgaagacggcgctgaccattacctgtgggatggtgatggtgttggtgccgggctacgcagacagacaacggaagcgttctccggcaagaaaatcaccgctacgatgttcaagggcagcgaatcgccatttgatgaagatgcaccatatcaggccggagcatgggctgatgaagtcgtgcagggcgacaacgttcgcactattggcgatgtattccgcaataagcgagcgcaattctattacgcgctggctgacaggctgtatctgacatatcgggcggttgtccacggtgagtatgcagaccccgacgacatgctgagtttcgacaaagaagcgataggcgagaagatgctggagaagctgtttgcagaactgacgcagattcagcgcaaattcaataacaacgggaagctggagctaatgactaaggtcgaaatgaagcagaagctaggtattccatctcctaacctggctgatgcgttgatgatgtgtatgcattgccctgagtcggctgcgcaacccgactattccagttactcaattccttgtggtgtaggttga

SEQ ID NO: 6992 - DNA, 2199 bp, Escherichia coli
atggcagaaaaaaagatgactgactggcatcgcaaggtgctgtgcaactttgataatgcctggtcagcaacgcaggatatgcgtgagcagattattgaggctcaacgtttcgtccgggtgtccggcgcacagtgggaaggcagcacaaacgctggttactcatttgatgaaggtaggtttgagcattacccgcgctttgaactaaataagattgcccgtgaatgtgatcgcatcattggcgagtatcgacagaatcgcatcagcgttaaattcaggccgaaggacgataaggcatcggaagcgttagccgaaaagatgaacggcaaattccgcgctgactatcaggaaacatccggtggcgaagcgtgtgataacgcatttgatgatgctgtaacgggcggattcggttgtttccgcatgtgtgccgattacgaagatgaaatggatccgagtaacgagcaacgccgtataagccttctccctgtttacgacccagcgacatgcgtcttctttgatcaggacagcaagcaatatgaccgctctgatgctatgtgggctatggaaatgttctccatgacgcctaaagcgttcgaggctgaataccctgattccatcgcggcaagcctttctcgtgatgacactggcactcaatatgactggtcaacgcccgatgccatctatgttggacgctactacgaagttcgcatagagaaggtgaagctcacggcgtggcgcaaccctgttagcggagaaacggcaatctatgatgaagagcaaatcaaagatgttgtcgacgagctaaccgatggcgcattcgaactgattggtgagcgaacggtgaagaaacgccgcgtttattgcggccttctgtctggcgctgaatggctggaagaaccgaagcgtattccgggcgaacatattcctctcatcccggtatatgggcgtcgttcatttgttgataatcaggagcgaatcgaaggccacgcagcaaaagcgatggatgcacagcgtcttgagaacctgatggtttccatgattgcagataacgccactcaggctggcggtgatggtattcctgtagttgatgttgacatgattcctggtcctctcgccactcattgggcggagcgcaacaaaaagcgcccggcgttcctgccgatggtcagtctgaaaaacaaaaacggagatattactgcgcaggctcaggtcagcagttatacacctccaacacaaatgcctcctgctcttgccgggctattacagtacaccggaacggctattcagcaaattacaggtgcgtcgcagcttgagaacatgccgagcaacgtcgctaccgataccgttgatagcatctttaacaggatggacacgcagtcatatatctacatggacaacatggctaaatccatgcgtcgcgctggcgttgtgtggctttctatggcgcgtgaggtctatggcagcgatacgccaatgcgcatcgttaatgaggacggcagcgatgacgtggcgctgatgactggtgaagtggttgaccgtcagacagggcaggttatcgcgcttaacgacctttcgcagggtaactatgaagtgactgtcgatgttggtcagtcgttcgctactcgccgtgatgcaacggttaagtcgttactttccatgctggcacttatcccgcctggaacgccgaaacacgaccttgtgtcgtctcttattctcgacaatatggacggcgaagggatggacgaccttaaagaatacaaccgcaatcagttgcttctgtctggcgttatcaagccgaaaacgccagaagaacagcaaatggttgagcaggcgaaacaacaacaggccagtcagccagatccggctatggttgctgcgcaaggtcagcttcttgctggtcaggctgaattgcagaaagcgcagaacgaacaggcagccattcaggttaaagcattccaggcacagactgatgctcatgttgcagcggcaaatgttgtgaaaatcctcgcatctgccgatagccagcagaaatctgatatccgcgaggctctgaaactgctcggacagttccagcaacagcaaggagacaatgcccgtgctgatgcagagcttgtcctgaaaagtcaggcgcagggacatgcacaacgcatggacatcagcagcatcctgcaaaaatcaactcagcaacaaccacagcagtaa

SEQ ID NO: 6993 - DNA, 894 bp, Escherichia coli
atggaccagatggcagaaaacacaccagaagttgaaatcgaaaccgacgcgtcagagcagattcctgatgatgtcaaactggctgaagaagtcgaaacagaagatggcagtgagtactccggcaatgatgcagagaaagctactgaaactgatgacgacgaatcagaacaggaattctactttggtgacgaaaagctggattcgccaaccagcgaagatggcgcagagcatggactggtaaaacacctgcgcaagacgattaaagagaaagaccgcgagctgaaagagctgatgcgtcagtctcagaaacccgtcgagcagcagccggtaatcactcaaccaccgcgaatgccaaaactggacgatgaggacatcggtttcgatgaagaaatctaccagcaacgcatggctaagtgggcagaggataacggcaagtaccagcaacaggagatggctcgcaagcagaaggagcaggagcttcaggctgcctatcaagagcgattatccaaatatcagcaacgtgttaaggctctcaaagttcctggctatcaggaagctgagcaggccgtactcgaggaaatccccatcgagacacaaaacgcgatcctgtttgagtcagagaagccggaaatcgttgttctggcgctcggtcgcaacgctgaactgcgcaagcaactggcagaagctaccaaccccgtagcaattggtcgtctgctggaacgtatcgaatcgaaggccagaatcatgccaaaagcaaaaaccacggcagccacaaccccgacagttaaggggagcaacggcgcagtaatcaataacctcgacaaactgaaagccaaggcgctggaaactggtgactggacgccgtatttcgccgctaaaaaggcaaaaaaataa

SEQ ID NO: 6994 - DNA, 1254 bp, Escherichia coli
atggttaaccaattagcaaaagaccttgaaatcatgttcgaaaactacgttgaaggctttgaggccgcctgcgtagtttcccgtaacgctaaaaaattccgtcccggtgatacagcaatgcagcgagcaggtgatgttctgtatcgtccgcagcattaccacatgaacattgaagaaggcctcgatctcagcagcaaaacgccaacagcactggttcagcgccttgttccttctgtgttcaaggagccgaaaaacattctgtacactctggatgcgcgtgaaatgcgtgacccggaacataaaactgaagctggtcgcgccgcaggtatgcgccttgctgcacagattgactctgacctgatttccatggttacgcagcgtgctactaacgtgatcacgatggctgactcaaccactggttcacagggccgtgatttgtggaactgtgcggcaggtattgatgccaccatgacggcgattggtgtaccacagggtatcaaccgccgctctttctggaaccccttcaactacaaagaccttgctggcgagcttggtcaccgtgcctatgctcagggcgcaaccctgacagcatacgaaaaagcgcagatccctccggttgcgtccttcgatagctacaagaccgatatttctggtcgtgttccgaagggtacagcaacttccattacgctggcagcagcacctgcgcacaaggttgaagcgaaagatgctaacgatatgccagtggataaccgacaggggaccattacggtatctgctgaaggtttgcaggttggcgatgcgtttaccatcgcaggggtgaattccgtacaccagatcaccaaagataccaccgggcagccgcaggtattccgcgttctggcagttagcggaacgacagtaactatctccccgaaaattctgccgcctgacaacgcggatgtcgccagccgtccatatgcaaacgttgatgctaatgcggcaagtagcgcagcaatcaccattctcaacaaaaatgccgcaccggctaacctgttctgggctgatggttctgttgaactgatgtacggcaaactggcgttcccgactggtcagggtccacaggtaatgacagcaaccaccgagcagggcgctacgctgatcatgtcttacgccttcgaccacatcaaaggcgtaaccactgcgcgtttcaccactctgtacggttgctctgtactggttcctgaatatacgggcatcgttattgccgggcagtaa

SEQ ID NO: 6995 - DNA, 189 bp, Escherichia coli
atggcacgaacaatgctctataagccgggcaacatgatcacctgtggtcagtttgctgtcgattacatcattgttgatgacgaagaagttaaatctcacctgaaaaaaggttgggtaaaaactcctgaagaaaccgcaacgaagcaaaaagtggctaaggcggaagaagatggcgaaaacgaagggtga

SEQ ID NO: 6996 - DNA, 462 bp, Escherichia coli
atggcgaaaacgaagggtgatctcgttcttaaggctttacgaaaagccgggctgtattccaatgccacgttgacagatgctgaccctcaggcaattgaagatgccattaatgacctcgaagacatgatggcagcatggcaggctaaaggtatcgagcttgggtatcagtttgctgatacagaaaacggcatgatgccgttacctgatgatgattcaggcatccccgcatgggcaaatgatggcgtcgctttgaaactcgctgtgcaagtgtgcatggataacgtcattcagccgtcagacgctctccttaccgctgctgacagtgcatatcaaacaatctgcatcgctttaaccaaaataccaccacttgagcggcgaaatgacatgcctcgcggggcggggttaaaaagcgcgtttacgtggaatcggttttacatcgagaaagatgaaccgagtacgtga

SEQ ID NO: 6997 - DNA, 1419 bp, Escherichia coli
atgccgattcagcaacttccgcttatgaaaggtgtcggcaaagactttcgaaacgccgactatatcgactatctgccagtgaatatgttggctacccccaaagaaatccttaacagcagcggatatcttcgatcattcccgggcattgccaaacgttctgatgtgaacggtgtatctcgaggcgtcgagtacaacatggcgcagaatgctgtttatcgcgtgtgtggtggcaagctctacaaaggcgaaagtgaaatcggtgatgttgccggaagtggtcgcgtatcaatggcgcatggtcgaacatcacaggcggtaggcgttaatggtcaactggtcgagtatcgctatgatggtacggttaaaaccgtctcaaactggcctacagacagcggattcacgcagtatgagttaggttctgttcgtgacattacgcgcttacgtgggcgttatgcgtggtcaaaagacggaactgattcatggtttatcactgaccttgaagacgaatcgcatcctgaccgctacagcgcacaatatcgcgcagaatcgcagccggacggtatcctcggcatcggaacatggcgagacttcatcgtctgctttggttcatcgacgattgaatatttttccctgactggggcaaccaccgttggtgccgctttgtatgtcgcacagccatcactgatggtgcagaaaggcattgccggaacttactgcaaaacgccgtttgctgattcctatgctttcatcagcaatccggcaacaggtgcgccgtctgtatacatcatcggatccggtcaggtgtcaccaatcgccagcgcgagcattgagaaaatcctccgctcctacactgctgatgaactggctgatggcgtgatggagtctctgcgatttgatgcgcatgagttgctgattatccaccttccgcgccacgtacttgtgtacgacgcatcttcaagcgccaatggtccgcaatggtgtgtactgaaaacaggcctgtatgacgatgtgtaccgcgctatcgacttcatttatgaaggcaatcagataacgtgcggcgataagctggaatcggttaccggcaaattgcagttcgatatcagcagccagtacgacaagcaacaggaacacctgctgtttactccgttgttcaaagcagataacgccagagttttcgaccttgaagttgaatcttcaactggagttgcgcagtatgctgaccgcctttttctctctgcaaccactgacggcatcaattacggacgtgagcagatgattgagcagaatgaaccgttcgtttacgacaaacgcgttttgtggaagcgagtagggcgcatcaggaaaaatgtcggcttcaaattgcgcgttatcacgaagtcacctgtcactctgtctggttgccagataaggattgagtaa

SEQ ID NO: 6998 - DNA, 702 bp, Escherichia coli
atggctgattcgaatctcaatgagccggtaacaattcaggctacacgactcgatacatcaatccttccacgcaatatattcagccagtcttacctgctgtatgtcattaatcagggggctgatgtcggcgcaattgccgggaaggcaaatcaggctggtcagggcgcttacgatgctcaggtgaaaaacgatgaacaggatgtcgaactggctgaccacgatgcaagaatctccgcaaacacaaaagcgataaatctccttgaggtcaggttaacaactgccgaagggaagatagtcgtactgcgtagcgatgttgattacttgctggatgaggttatcgatattcaggcgcatctggtcactgttgaccaaagactggatgacgtagaaaacgatgtctctggcattaagagtgattacgtatcgaaaaccgtaaccgaattgcagtctcttgagtcaccgctggatgtaaaaacatcatattcagttgatggaattcaggttgttggagcaagaaataccggatggactgcagccacaggtacgccacttcttggctcattcaacgctaaccagtcatacacggtcggcactacgtacacacaatccgaagtcgcagctatcgctacaggtttggagcaggcgcggcagcgtattctggcgcttgaaacagcacttagattacatgggctgattgactga

SEQ ID NO: 6999 - DNA, 456 bp, Escherichia coli
atgattacattcaaaccaacacgaaacatcgacctgatagaagccgtgggaaatcaccccgacattatcgctggtagcaacaacggtgatggatacgactacaagcctgaatgccgttactttgaggttaacgtgcacggtcagtttggcggcattgtttactatcaggagattcagccgcttacattcgattgccacgccatgtacctgccagaggttcgcggattcagcaaggaaatcgggctggcgttctggcgatacattctgactaacaccaccgttcagtgcgtcacatcgttcgctgcacgcaaattccgccacgggcagatgtactgcgcaattattggccttaagcgtgtcggaaccatcaagaaatacttcaagggcgtggatgacgtgacgttttacagcgccacacgtgaagaactaatcgacttcctgaatcacgggagatag

SEQ ID NO: 7000 - DNA, 690 bp, Escherichia coli
atgttatatgcatttaagctgggcagaaaactgcgcggcgaggaaccttattgccctgaaaaaggcgggaaaggtggctctgataaaagtgcaaagtatgccgcagaagctcagaagtatgccgcagacctgcaaaatcagcagttcaataccatcatgaacaacctgaagccgtttactcctctggctgggaagtatgtcggcagccttgagaacttatcgtctctggaagggcaaggtcaggcacttaaccagtattacaactctcagcagtacaaagatcttgctggtcaggctcgctatcagagtctggctgcagcggaagcaacaggtggattgggttccaccgcaaccagtaatcagttagcaacaatcgcaccaacgcttggtcagcaatggctatctggacaaatgaacaattacaacaacctggcaaatatcggtcttggcgctcttcagggacaggcaaacgccgggcaaacatatgccaacaacatgagtcagatttcacagcaaagcgcggcgctggcggcggcaaacgccaaccgaccgtcagcattgcggcagggtgttagtggtgctgcatccggtgcgcttttgggtggtggtatagccagtgctctcgagctatcaactccgtggggtgctggtatcggtgctggtcttggtctgcttggctcgttgttttaa

SEQ ID NO: 7001 - DNA, 1452 bp, Escherichia coli
atggctacgtggcaacagggtattaattctggtggttttctggctggcattggtgcgcaaaacgagaatgcgccaaaggcaagcgacattaatgcaacgcttggtctgattcgcgaaaacaatgaactggctcgatcaggtgcaaataacgttggtctgaccgcgttacgtggtctggctggagttgctgatatttataagcagcagcaacagcaggagcgtaaagcggcattccagaaaggttatgcggatgcttatgcgtccggcgacagggagcagatgcgtaatcttattacagcattccccgaagagtttgaggaagtccgtaaaggcatggggtatgtcgatgacgcccagcgggatgattttggcaatctggcgcttaaggctcaggtagcttcgtcgcttggtccgggtgcatttggcaggttcatgatggataacgaaaaggagatgcgtcgtttaggtatccctccagaaactattgcggaaatgcaggttaatgacccgcagggcttccagcacttcgcaggtaatctggcactattttctctcggtcatgagaagtatttcgatatcaaagatcaaatggaaggtcggaatattgagcgtggcaagttggcagagacgattcgcagcaataaagctggggaaggtttaaaggcgcaaagcattgctgttagccgtgaaaactccctgcgcactgctggaggtgctgttcctgcatctgttaaagaatatcaatatttcaacagcctgtctccagagcaacaaaagatatatcttcgtgttcgaggtcgtcctgatgctggcggggagaatgttgtgcaactggcagatggcagaacggtaacggttggtaggaagcttcacggcgctggtgctaatgcgttctacgaaggaatagacaacgagggcaatatgattcgcgtccccgccagttctattgctgctccggctacatcggcagctaatgcacagaattacgaaatgaagaaagatcttgatgcaatttctggcgcatcaattgacgatcttggcttcatgacaggtattacaggttcttcaggttcttttgctcttggtgcagatattcgtagcagggcatctggtgttgaggagaggaggctatacaacgctgcacagcgaatcatgggcaaaatgcaaaatcaggggattgcagcagcccgagatatgggggcatctggcatcaacaccgaagcagaggccaataggtattttcagggtatgccaaagcctgatttctcaagtcctgaagcgctgcaacaatcaatgcgcgacattcagcaatataccgacaattacaaccagcaatataacgttaatgttggtaatagcgggaagaaatcatcaaggcaacagccagctactcagcaatcagcaggaggtagctacacgtcaaaatcaggcattcaatttacggtggaatga

SEQ ID NO: 7002 - DNA, 2013 bp, Escherichia coli
atgaaagtaactgcaaacggtaagacatttacctttcctgatggtacgagcaccgaagatattggcaccgccattgatgagtattttgctggccagtcagtaccaacacaacaaggtgttcagcaatcgccagcagacaactcacttgcatcaggatatgcacagcttgccactcagcagaaggaaggactagatcgctctgctgagcaaggggctgttttaggtgctgcaatgcgcgatgccgttaccggtgaaagccgaatgacaccagaaatggagagactgcaaaatgttggggctgcccctgagttgaactcactaagcatggatgccctgaaggctggatggtctcaacttttcggctccgacgcgtctcaggaaaagattcttcagagtatgggggcgaaattaaggcaggatgagaagggtaacactatcgtttccctgccatccggtgattatgccctgaacaagccaggtttatcaccgcaagacctgacttcgtttcttgctaatgcgttagcgttcacaccagcgggcagggctggaacggtgcttggtgccatagggaaatcagctgctacagatttagcactacagggtggcaccagccttgctggcggagaagatattgatcctgcacaaacggtaatttctgctggcattggtggtgttggcaaggggctggaaaatacagttagtgcggtttccagggctgttcgcggtgagatgtcaccggaagcaaaggctgctgtcgattttgcgtcggaaagaaacctgccgttaatgaccagtgacacgctgaaagataaaacctttatgcaggggcaggcccaaacattaggcgaaagagttcctttttttggaaccggtaagaaccgactgaatcaacaacaagcacgagaaaatttagtcagaacatttagcgatggtctggggggaatttcagataaacagctttatgagtctgcgactaaagggcagcaaaaattcattgaggcagcaggaaagcgatataaccgcataattgacgctatgggggatacccctgtcgatctctcaaacacggtaaaagctatcgacaatcagattgccgtgttaagccgcccgggcaaatctcaggatagagccgcagtaaaagtcttgcagcaatttaaagacgatatcaccagcggacccaatgacctgcgtctggcgagagaaaacagaactgaccttcgaaagcggttcatgaattcaaacgagactgttgataaagacacgctccagaaagccagcgatattgtctacaaggcatatacagcagatatgaaaaaagcagtatcccaaaaactaggctcagaagaagctgccaatatgtctagggttgatcgctcatgggctagattcaatgacatgatgggaagaacgcgcgttcaaaaggcaatagccagcggcaaggctacacctgaggatgtaacaaaactcgtttttagccaaaacccatcagaacgttctcagctttacaggcttctggatgacaatggtaggcaaaacgcacgagcagccatagttcagaatgctgtagataaggcgactgatccgtctggaaatattagtgttgaaaagtttattaatgcgttacaccggaacaggaagcaatcagcaactttctttaaaggcgtacatggaaaggaactggacggcgttattaaatacctcaacgatacaagacacgcggcaaaagcgaacgttcaaaacttaaatggtcagcagctttatggattgttagttggtggtggcatcataaacgcagcagtattagcggggatgctaaaaacggctgcgtttgttgttcctgctgctggtgtcgtaggaggagcagcgaaggcatacgaaagccctgttatacgaaatgccttgttacgtctggcaaatacgccaaaaggtagcacagcatatgacagagcgatcagtacggtcacacaatcgctcaccagagtcgcacaggcatcacaaaaagaagctcaataa

SEQ ID NO: 7003 - DNA, 420 bp, Escherichia coli
atggaaaaccgcataagcattgttgtagatgcagcggctggaccattagaacaatactttgcgaaggctcttgcaaactacaaaaacagaggcaccgtttcagcttatcttggtaagattggtgggtttgagagaaaccatcacgccgtcttatcgggaatttacaagtcgcacatcaggatccctggagtagatgatccttggttaaaaacaacgccaatacatcgtagagttagcgataactttttgatatttgcggtacacaacacatatccaattcatatccagatcattgctatcattaaacctgatggtcatgagaaggtaaaaaaactattgccagccatcattgatataactgaaaaaagattccaatctctaaatgagagggagcttaactcgttgatttcatacaaataa

SEQ ID NO: 7004 - DNA, 582 bp, Escherichia coli
atggccatcctgaatcaagagccaggaaaaattgaaaacgttttttctgacatatcaacatctatcgagcgttcaatttcagactttgatcgcagtcatagcggctctttgtctaaaaaacaggcttctgaagctcttagcaagatctactgcgttatgtcacctgtagaggaagtttgcaaaaagtacattacattcattgacatattaagtaatggtacggaagaagatatttcctcacttgatattcaacatgacgatgtagatatgttgaacgatcaaatatctaagcttgattatggtatcgcgaaactgttgtataccttcttcatcgctgagaacagcgatgcgtggaagccccatatgtcaactcttacaacaataaaaaaccactcaataaatacttttatagaatacaaaaggctaactatggggcttgtgacgctagcaatgcagcacataccactatcatatgctgaacctgaagagttcactgaagaagagttggcttcattcaagaaatcagttgaagattcacataaaagatttggcatggaagcaccaaaatggaaaaccgcataa

SEQ ID NO: 7005 - DNA, 159 bp, Escherichia coli
atgaactctgagttattacaaatcgttcaggatgctctctcaaagccatcatcaattgtaggctatcgagacgatgcggaacgcatcgctgatgagcagtcagagcttgttaagaagatggtgtttgaaaccctgaaaaaaatgtacgagaccagatag

SEQ ID NO: 7006 - DNA, 159 bp, Escherichia coli
atgaaaggaatgagcaaaatgccgcagttcaatttgcggtggcctaaagaagtattggatttggtgcgcaaggtagctgaagagaacgggcgatctgttaactctgagatttataagcgagtgatggacagcctgaagagagaggggataacggtatga

SEQ ID NO: 7007 - DNA, 222 bp, Escherichia coli
atgaggtttattgaggttgatgagattggctatgagaatgcacttggtagaggtaaatctttagttaacgttaatggcattgagtcgataaggagcggtgaatttacggagatcagaatgatgtcaggtggaatcattccttgccgtgattcagtagagtcaatcaaagcaagaatgagtggtcagtggctttataactacagtgatttgaaaaaacagtga

SEQ ID NO: 7008 - DNA, 891 bp, Escherichia coli
atgtcaagcttagcaaagtcaactgtaaattgcactaatagcatcatcatttccgacgtcaagattcatatggattcagaggggcgttactcgcttaatgaccttcatgtagcgtctgggaaggaggaaaaacatcagccagctttcttcatgcgtagaaatgaaactattgaattgattaatgaaatttttaattctgcgaatatgcagaataagaatcccgtcatttctaagaaaggtcgatatggtggaacctacgtgtgcaaggagcttgtttactcctacgccatgtggattagcgcagcatttgcgctgaaggttatccgtgcatatgacgcaatggttactgccacacaggagaggaagactattggcggtaaaacttcagtagctgaacgcacaccgctacgcgatgcagtaaacatgctggtaggaaagaaaggacttcgctatgacgatgcatacaatatggttcatcagcgttttggtattgacagcattgatgaactttcaattgaacaaatcccgctggccgtagagtacatccacagggtagtgcttgaaggcgagttcattggcaaacaagagaggaaagtcaacgagctttctgcaaaagaagcaaacagccttgtatggttatgggattatgccaaccgctcacaggcattattccgcgaactgtatccggcgctgaaacaaattcaatcgaactattccggcagatgtcatgattgcggttatgagttctcccgtattatcgatatagcgagagacgttttaatcaatcactcacgagatgttgatatcaatgagccagacggaccaacgaatctttccgcatggatgagacttaagaataaaaaattacctccttcagtacataactactga

SEQ ID NO: 7009 - DNA, 510 bp, Escherichia coli
atgaactggaacgaagtattcgtattaaaagacgatggactcctgtactggagtgaccaatatctttcaagacccaaaatgttcaatatctctaaagaaaagcctgcaggacatatattcaaggacaagaacaggaaaacatcttatataattatcaggtatcaagataaaatatacgccgcccataggataatatgggaaatgttttatggtgaaatcccttcaggaatgcaaattgaccataaagatggtaatgggttaaataattcaatagacaacctgcgtctagttagtctcggtgaaaacctaaaaaacaaatctaaatacacaaacaatacatctgggtgcgcaggtgtttcatggcataagacccataaaaagtgggtggcatatattagcgacgcagggaagcgcattaatctcggatactttaagagtctcgatgatgcaattgctgtaaggcgtgaggctgaaaagacctatggttatcatgagaatcatggtaggtga

SEQ ID NO: 7010 - DNA, 2691 bp, Escherichia coli
atgacagattcaataaatgccaatgttgtggtaagcatgccttcgcaactcttcactatggcgcgttcttttaaagccgtagctaatggcaaaatttatatcggtaaaattgacactgacccggtaaatcctgaaaaccagattcaggtctatgtggagaatgaagccggttctcacgttcctgtttcgcaaccaataatcattaacgctgctggatatcctgtatataacggacagattgccaaattcgttaccgtgcaaggccattctatggctgtttatgatgcgtatggtgcgcagcagttctattttcctaatgtgctgaagtatgaccctgatcagtcattgaaatatgtagaaggggcattgcttgttactgacttaggtaatgggacgtttaagaatagtagaaaagacgttgccattggggataatctaacaggaaccaattttattagaataaacggcggcgtctataaatgcactccagttgcaactggaattgttactgagatcaaacatagatacattatcgcaggcggggttaaaagctacctgtctcatatttctaggcatgtcagtggtacgcgtaggccgctgaactggaaattagaattcagcatcatagacgatgagattaccgcagatcttaaagatcagtatggttacacgaccatgggatttcaggggatttacatagacagcaatgatggaatggtatacatcggctggcagacgctagaccccgcatcggtatgggttacggtgcatgactgggtaacaggagcattggtaacacgtcttcattttccgaataacgttggtgcaccagaaggcatccacgtttaccgagtggcaggacagcgttacatcctgctgccgtacagcccatctcgcactatcagaatttaccctatcgaagatccgcgtacgctggttgataaaacgcagattacaaacttcactgaatcaacacgccttggagtgcgatatcagtttagtggctttggtaataccctgatatacgaaaatgcggatatgggttggccgaaaatttttgatgttgagacaggtgtatccaatatctttaacacactggatattaacagccttatagaaggatcttacagtccaatggggactattacggttgatgcaaatgttggaggtcgcggagccggtaaaccaaaacggcagggtgtcgctcttggttctcaacggatatttgctggtattggtgcatctaccacggcgggatctggaaatactttcgcagggttgcagggttatattgagtacagccttaatggttcagaattaggtcagtacctgctgtcacctgcagatttcaaaacatactgggatagttattcagggaagagtgtttactccactgaaaatgagggggtgcagtcttgtgatatttctggctctgaggaattgtatcttctacagtctattcgctatgacaatgggggcggatcaaattataggactttaaacatcattcgcgctaactgtccatctaatgaacctggaacagtagacatgactccgctatccaatgcctcctcacagttatttaaccctcgcggaagggtgattaacgctggccgtcaccctgtgaacccggctgatggtattgcgctatttacatcggcacaggctatttgtgactatttgcggaatacagatgcaggtagatatgtgacatatcttgaacaggatatgccactgtttgaaggtgggccatctgcgccaggacagatgacgctgccagcattctgcctattgcagatcgacttcatcaacggcgatacctgggaaattacagttaatggaactaacagggctaataattatacaggaaggatttccaaaaacggcgggtacaactcttttactaaggtgtcctcccgcagcatgtcgattctcggatcccctggtctggttgatgtatcaattcgctcacctaactcactaaatcttccagaatttgctggagactggtctactggtgtaagtataggagctgcaggtggggtgacaaactggcagccagaaggaacaggtaacggagcattatgggagtcaggatatgcaaaaaaccgtgtgttgcagatattcatgtccacaacatcaaaactgttcttccgctacgcagacgatgctattcgcgcaggtaacacaggctgggctgaggcatggtcgtcgctgaacacgaccgtcgattcaagtggtttcatcaaaaaagcctctccggttgtgaagattttctcagacggtagtagtgaaacaaatcgcgaatcagatggggtaaccgtcacacggctggcattgggtgaatatctgattgagggttgcgtaggtctgaatgcagatgcttcatggggggggattgatggtggatttgaaataccgcaggaccgaaacaagcagccgctcatctggctggattatgttgttaaccaagatggatctgtgttggtgaaaacgtttcaccgcactcatgataactcgcccgtttttgcacgtaacgacatccctggtgtttcgaacggtgacccgatcgacattcctgctaatcaattcgtttctgtgcgagtacagatgcctgaggattctgcatggaataagcttaaggaacaactaaataaggctgaattgatagaagatgatgttgtggaatag

SEQ ID NO: 7011 - DNA, 1167 bp, Escherichia coli
ttgaaacgccgtcttattattgctgcttctttgttcgtttttaatttatcgtctggttttgcggcggaaaacattcctttttcacctcaacctccagagattcatgccgggtcctgggtattgatggattacaccaccggtcagattctcaccgcgggtaatgagcatcaacagcgcaatcccgccagcctgacaaagctgatgacgggctatgtcgtggatcgcgctatcgatagtcatcgcattacgccagacgatattgtcaccgtggggcgtgatgcgtgggcgaaagataatccggtgtttgtcggttcttcactgatgtttttgaaagagggcgatcgcgtatcggtacgtgatttaagccgtggtttaattgtggattccggaaatgacgcttgtgttgcactggctgactatattgccggtgggcaacggcagtttgttgaaatgatgaacaactatgccgagaagctgcatctcaaggatacgcattttgaaacagtgcatggtctggatgcacctggccagcatagctcggcttatgatttagctgtgctttctcgcgctatcatccacggcgagcccgagttttatcatatgtacagtgagaaaagcctcacctggaacggtatcacccagcaaaaccgtaacgggttattgtgggataaaaccatgaatgttgacggcctgaaaacgggtcatacttctggtgccgggtttaatctcattgcttcggctgtagatgggcagcgtcgtctcattgcagtggtaatgggggctgacagcgcaaaaggtcgtgaggaagaggcaagaaaattactgcgttggggtcaacaaaactttactacggtgcaaattttgcaccgtgggaaaaaggttggtacggaacgcatctggtatggcgataaagaaaatatcgccctgggaacggaacaagagttctggatggtgctaccgaaagccgaaattccacatatcaaagccaaatatacccttgatggtaaagaactcaccgcgccaattagcgcccatcagcgggtaggggaaattgaactttacgaccgtgataaacaggtggcgcactggccgctggttaccctggaatctgtcggggaaggcagcatgttttcccggctgagtgattatttccaccataaggactga

SEQ ID NO: 7012 - DNA, 732 bp, Escherichia coli
atgaaaaagttagttcttgccgctttacttgcttcttttactttcggtgcttctgccgcagagaaaatcaattttggcgtttcagccacctatccaccctttgaatctataggtgctaataatgagattgtcggctttgatatcgacctggcaaaagccttgtgcaaacaaatgcaggcagaatgtacttttactaatcacgcgttcgacagcctgatcccgtcactgaaattcagaaaatatgacgccgtaatctccggaatggatatcacgccggagcgtagcaaacaggtatcgtttaccacgccctactacgaaaactcagccgtcgtgattgccaaaaaagatacctacaaaacgtttgccgatctgaaaggcaaacgtattgggatggaaaacggcaccacgcaccagaaatatattcaggatcagcacccggaagtgaaaactgtctcctatgacagttatcagaatgcctttatcgatctgaaaaatggccgtattgatggggtatttggtgacacagcggtggttaatgaatggctgaaaaccaacccgcaactgggcgttgcgactgaaaaagtgaccgatccgcaatacttcggcaccggcctgggtatcgctgtacgtccggataacaaagctctgctggaaaaactgaataatgcgctggcagcaattaaagctgacggtacatatcagaaaatcaatgaccagtggttcccgcagtaa

SEQ ID NO: 7013 - DNA, 1803 bp, Escherichia coli
gtggaatatcttttcccttgggtgatttttaatatgataaacaatatatctgatcaagcatcatcatttccaggcacacaactgaatcaaagtgataatttcctcgattcactgagggaatttttcgcgatattaaattccagtcgtaagggtgagttgtctacatgggacaccatctacttgcatctgatattagcaataaatgctgatagtgatctcataaaaaatgatgagttgctagtggaaaatattccatcagcgaattatcaatttaatatattttttagtaatgctttcgagattgatgttaaaaaatatcttggcaaatcagaagataacgaagttgaaataaaagtgggtaatgaaagaattaccattggaatacgtaatgtatcgaatgggaaacttgaaagacaaaaatttcttttcccactggactatgagaataaattacaacatcaattagacaagcattttacgattgaatcgcatccattattatacaggcatactatgggtagtaagattgcgaatgtgatttttgaaaaattatacagtcgtattgactttaacaaagagcaatatatatcctttataaaggatgcgtttattcatttttatgattatagcaggcgatatgcaattagtgagaatatcgcaaaagacgctgtaacaaacaatatcgcattgatgagtactttttatgacagtgaaaatacgtcaggtgaggttttaaataatgattttacagaagaagaatcatttgaaactgcgttaaatatcgagcatgcaatagtgcttggatttgctgatgataattttgaaacaaaacctgttcattatcaggatttattaacacgatttagtgcctttcaagataccgtgtttaatttgtttcctgaaatgcactcttcgcattacaacgatatttgtagcgtaagtgtggatatgacaaagggaacgcaatgcatgattcacttgatggtgaatgaagaagttcttatgtcgttgcctgttccagttgccatgatggtacgtgaagatgcaactaatttagtcaatcttaaaacactactcaatgatggttgctttattaaatatagtcattttaatgacgtggcattaataaagcaaaacataaataatctctatttatcacacactattgtgaatgaaagcatattgaaaaaatgttgttttgaaaacggcagtttaggtgatgttaaaatcacaaatagcaatgtaataaacagtgtattcaaaaatatttcgtttagatctgttaaaattaacaacgtaaatactcattctttaaaatttattaactgccattttttcaatgttgatatgataagagttaatttcagtaaatgtctttttcatgactgtagtatgcatggtgtcaagataaaaccatggttgccagtaaaatggacaaaagaattaataaatgattatttgtatggctgtttactatctctgtactctatctgtgcaagagatatatataatatgatcgccggtaataacgtgaaggttgctgcggatgctttccttgaaatactttattctcttaaaaataaatattgtattaaactattaagcgctcaggatcgggcgtttatatacgaatttgcaagaatgatcttcgcttatattaatgacaaaagcattgaaatcttattactttcttgttttgcggctgctgaccaaaaagcaatccagaggtatatacctcaggcgcaagatggggaagactttaggaatcatttacaatataagttggctcttcccactcattaa

SEQ ID NO: 7014 - DNA, 1230 bp, Escherichia coli
atggcaaggcagactaaaaaactcacagacactgaaatcaaaaacaccaaaccagcagacaaagagatcaatctcttcgatggtgatgggctactgctacgaatcgctccttcatcaaaaggagggaagaagaactggtatctcagatatccagtgccagtaaccaagaagcgcaccaagatgagcttgggtacctaccctcacctctcattagcaaaggcaagagctttgcgtgatgaatacctgtcgttacttgctaatggtgttgaccctcaagtccacatcactgaaaaaactaatgctctgaaagatgccacggagcacacgctacaagcagtttctcgaaagtggttagatgagaaaattaagacttctggcatctctctagaccatgcagaagatatctggcgcagcctcgaaaaaaacatcttttcaactctgggtgatgttcctatcaaagagatccgccccaaaatgctcaagcagcatcttgacccaattgagcagcgcggtgttctcgaaactctacgtcgtataatttccagactgaatgaaatctttcgctatgctgccacggaagagcttatagagttcaatcctgccgacaatctcgctcagcgtttcagtaaacctaagaagcaaaacatgcctgcccttccacctgatgagctaccacgcttcatggttgctttatctaacgcatctatacggttagaaacccgtatgctgatcgagtggcaattgttgacgtgggtaaggcccggtgaagccgttcgggcaagatggtgtgatattgatgaagagagcagattttggaatatcccttcagaattcatgaaaatgaaacgcccacataaggttccattgagtaaagaagctctccgcattttagaaaacatgcgccctatcagtggtcatagagaatgggttttccccagcatcaaagctcccctcagtcatatgcatgaacaaacagctaatgcggccataattcgtatggggtttggcggagagcttgttgctcatggtatgagatctattgcaaggacagcagccgaagaatacggtaagtttagaacggaggtgcttgaatccgctctggctcatactaaaaaagatgaaataatagccgcgtataaccgttcggaatacctagttgaaagagaagaactaatgaaatggtggggggattatgtcagcagcaaaaaatataagatgatggcagcataa

SEQ ID NO: 7015 - DNA, 126 bp, Escherichia coli
atggcactcatgaatctggtatacttaccgttacacattggggctgattctggattcgacgggatttgcgaaacccaaggtgcatgccgaggggcggttggcctcgtaaaaagccgcaaaaaatag

SEQ ID NO: 7016 - DNA, 606 bp, Escherichia coli
atgtcagaagattatgtaattgagtgggataaggattttgaagacgatctcaacgttgtcgccagcgtgtttttcccccacgagccaacgctatggtctggtatcgtctctcaacttgccaccactcctgaaatctttgaagacgaagatgaagacgaatatggattgcaagacgttctcaattgcagcggtggcgatttaggaaatgacgcattggggcaggcatttttacaaatcctacgcaacgaaggattaatccatattgttgactggaaaggcgaagaagaagatggtgagctggcaaattttgctgctgaccgcttctacgatctgtgtaaagacctgacagcctcagagacactacgaagtctgcttatcgacataactcaggaagatgaaattgcagatgcctgcgaagatggtgatcgttaccttgacgagatctttggacgcattcaggaccagcttaatgaacggggctaccaaattttcaatctgaatgaaggaacagatagttataacgtggccgttctgccaatgaacgaatataaaaaaatagatgatttcaacacgccgtggctggaagtacaggattttttaagctaa

SEQ ID NO: 7017 - DNA, 396 bp, Escherichia coli
atgacgaaagatgaactgattgcccgtctccgctcgctgggtgaacaactgaaccgtgatgtcagcctgacggggacgaaagaagaactggcgctccgtgtggcagagctggaagaagagcttgatgacacgggcgacactgccggtcaggatacccctctcagcccggaaaatgtgctgaccggacatgaaaatgaggttgtatcagcgcagccggataccgtgactgatacggctgatctggtcacggttgtggcactggtgacgctgcatactgatgcacttcacgccacgcgggatgaggctgtggcatttgtgctgccgggaacggcgttccgtgtctctgccggtgtggcagctgaaatgacagagcgcggcctggccagaatgcaataa

SEQ ID NO: 7018 - DNA, 1026 bp, Escherichia coli
atgtcgatgtacacaaccgcccagctgctggcggcaaatgagcagaaatttaagtttgatccgctgtttctgcgtctctttttccgtgagagctatcccttcaccacggagaaagtctatctctcacaaattccgggactggtaaacatggcgctgtacgtttcgccgattgtttccggtgaggttatccgttcccgtggcggctccacctctgaatttacgccgggatatgtcaagccgaagcatgaggtgaatccgcagatgaccctgcgtcgcctgccggatgaagatccgcagaatctggcggacccggcttaccgccgccgtcgcatcatcatgcagaacatgcgtgacgaagagctggccattgctcaggtcgaagagatgcaggccgtttctgccgtgcttaagggcaaatacaccatgaccggtgaagccttcgatccggttgaggtggatatgggccgcagtgcggcgaataacatcacgcagtccggcggcacggagtggagcaagcgtgacaagtccacgtatgacccgaccgacgatatcgaagcctacgcgctgaacgccagcggtgtggtgaatatcatcgtgtttgatccgaaaggctgggcgctgttccgttccttcaaagccgtcagggagaagctggatacccgtcgtggctctcattccgagctggagacagcggtaaaagacctgggtaaagcggtgtcctataagggtatgtatggcgatgttgccatcgtcgtgtattccggacagtacgtggaaaacggcgtcaaaaagaacttcctgccggacaacacgatggtgctggggaacactcaggcacgcggtctgcgcacctatggttgtattcaggatgcggacgcacagcgcgaaggcattaacgcctctgcccgttacccgaaaaactgggtgaccaccggcgatccggcacgtgagttcaccatgattcagtcagcaccgctgatgctgctggctgaccctgatgagttcgtgtccgtacaactggcgtaa

SEQ ID NO: 7019 - DNA, 333 bp, Escherichia coli
atgacgagcaaagaaacctttacccattaccagccgctgggcaacagtgacccggctcataccgcaaccgcgcccggcggattgagtgcgaaagcgcctgcaatgaccccgctgatgcttgacaccgccacccgtaagctggttgcgtgggatggcaccaccgacggtgctgccgttggcattctggctgttgcagctgaccagaccagcaccacgctgacgttctacaagtccggcacgttccgttatgaggatgtgctctggccggaggctgccagcgacgagacgaaaaaacggaccgcgtttgccggaacggcaatcagcatcgtttaa

SEQ ID NO: 7020 - DNA, 1320 bp, Escherichia coli
gtgacagcagagctgcgtaatctcccgcatattgccagcatggcctttaatgagccgctgatgcttgaacccgcctatgcgcgggttttcttttgtgcgcttgcaggccagcttgggatcagccgcctgacggatgcggtgtccggcgacagcctgactgcccaggaggcactcgcgacgctggcattatccggtgatgatgacggaccacgacaggcccgcagttatcaggtcatgaacggcatcgccgtgctgccggtgtccggcacgctggtcagccggacgcgggcgctgcagccgtactcggggatgaccggttacaacggcattatcgcccgtctgcaacaggctgccagcgacccgatggtggacggcattctgctcgatatggacacgccaggcggaatggtggcgggggcatttgactgcgctgacatcatcgcccgtgtgcgtgacataaaaccggtatgggcgctggccaacgacatgaactgcagtgcaggtcagctgcttgccagtgccgcctcccggcgtctggtcacgcagaccgcccggacaggctccatcggcgtcatgatggctcacagtaattacggtgctgccctggagaaacagggtgtggaaatcacgctgatttacagcggcagccataaggtggatggcaatccctacagccatcttccggatgacgtccgggagacactgcagtcccggatggacgcaacccgccggatgtttgcgcagaaggtgtcggcatataccggcctgtctgtgcaggctgtgctggataccgaggctgcagtgtacagcggtcaggaggccattgatgccggactggctgatgaacttgttaacagcaccgatgcgatcaccgtcatgcgtgatgcactggatgcacgtaaatcccgtctctcaggagggcgaatgaccaaagagactcaatcaacaactgtttcagccaccgcttcgcaggctgacgttactgacgtggtgcaagcgacggagggcgaaaacgccagcgcggcgcagccggacgtgaacgcgcagatcaccgcagcggttgcggcagaaaacagccgcattatggggatcctcaactgtgaggaggctcacggacgcgaagaacaggcgcgcgtgctggcagaaacccccggaatgaccgtggaaacggcccgccgcattctggccgcagcaccacagagtgcacaggcgcgcagtgacactgcgctggatcgtctgatgcagggtgcaccggcaccactggctgcaggtaacccggcatctgatgccgttaacgatttgctgaacacaccagtgtaa

SEQ ID NO: 7021 - DNA, 207 bp, Escherichia coli
atgacgcgacaggaagaacttgccgctgcccgtgcggcactgcatgacctgatgacaggaaaacgggtggcaacggtacagaaagacggacggagagtggagtttacggccacttccgtgtctgacctgaaaaaatacattgcggagctggaagtgcagaccggcatgacacagcgacgcaggggacctgcaggattttatgtatga

SEQ ID NO: 7022 - DNA, 1926 bp, Escherichia coli
gtgaatatatcgaacagtcaggttaacaggctgcggcattttgtccgcgccgggcttcgctcactgttcaggccggagccacagaccgccgttgaatgggcggatgccagttactatctcccgaaagaatccgcataccaggaagggcgctgggaaacactgccctttcagcgggccatcatgaatgcgatgggcagtgactacatccgcgaggtgaatgtggtgaagtctgcccgtgttggttattccaaaatgctgctgggtgtttatgcctacttcatagagcataagcagcgcaacacccttatctggttgccgacggatggtgatgccgagaactttatgaaaacccacgttgagccgactattcgtgatattccgtcgctgctggcgctggccccgtggtatggcaaaaagcaccgggataacacgctcaccatgaagcgtttcaccaatgggcgtggcttctggtgcctgggcggtaaagcggcaaaaaactaccgtgaaaagtcagtggatgtggcgggttatgatgaacttgctgcctttgatgaggatattgaacaggaaggctctccgacgttcctgggcgataagcgtattgaaggctcggtctggccaaagtccatccgtggctccacgcccaaagtgagaggcacctgccagattgagcgtgcagccagtgaatccccgcattttatgcgttttcatgttgcctgcccgcactgtggggaggagcagtaccttaaatttggcgataaagagacgccgtttggcctcaaatggacgccggatgacccctccagcgtgttttatctctgcgagcataatgcctgcgtcatccgccagcaggagctggactttactgatgcccgttatatctgcgaaaagaccgggatctggacccgtgatggcattctctggttttcgtcatccggtgaagagattgagccaccggacagcgtgacctttcacatctggacggcgtacagcccgttcaccacctgggtgcagattgtcaaagactggatgaagacgaaaggggatacgggaaaacgtaaaaccttcgtgaacaccacgctcggtgagacatgggaagcgaaaatcggtgaacgtccggatgctgaagtgatggcagagcggaaagagcattattcagcgcccgttcctgaccgtgtggcttacctgactgccggtatcgactcccagctggaccgctacgaaatgcgcgtatggggatgggggccgggtgaggaaagctggctgattgaccggcagattattatgggccgccacgacgatgaacagacgctgctgcgtgtggatgaggccatcaataaaacctatacccgccggaatggtgcagaaatgtcggtatcccgtatctgctgggatactggcgggattgacccgaccattgtgtatgaacgctcgaaaaaacatgggctgttccgggtgatccccattaaaggggcatccgtctacggaaagccggtggccagcatgccacgtaagcgaaacaaaaacggggtttaccttaccgaaattggtacggataccgcgaaagagcagatttataaccgcttcacactgacgccggaaggggatgaaccgcttcccggtgccgttcacttcccgaataacccggatatttttgatctgaccgaagcgcagcagctgactgctgaagagcaggtcgaaaaatggggggatggcaggaaaaaaatactgtgggacagcaaaaagcgacgcaatgaggcgctcgactgcttcgtttatgcgctggcggcgctgcgcatcagtatttcccgctggcagctggatctcagtgcactgctggcgagcctgcaggaagaggatggtgcagcaaccaacaagaaaacactggcagattacgcccgtgccttatccggagaggatgaatga

SEQ ID NO: 7023 - DNA, 546 bp, Escherichia coli
atggaagtcaacaaaaagcagctggctgacattttcggtgcgagtatccgtaccattcagaactggcaggaacagggaatgcccgttctgcgaggcggtggcaagggtaatgaggtgctttatgactctgccgccgtcataaaatggtatgccgaaagggatgctgaaattgagaacgaaaagctgcgccgggaggttgaagaactgcggcaggccagcgaggcagatctccagccagggactattgagtacgaacgccaccgacttacgtgtgcgcaggccgacgcacaggaactgaagaatgccagagactccgctgaagtggtggaaaccgcattctgtactttcgtgttgtcgcggatcgcaggtgaaattgccagtattctcgacgggatccccctgtcggtgcagcggcgttttccggaactggaaaaccgacatgttgatttcctgaaacgggatatcatcaaagccatgaacaaagcagccgcgctggatgaactgataccggggttgctgagtgaatatatcgaacagtcaggttaa

SEQ ID NO: 7024 - DNA, 411 bp, Escherichia coli
atggatcaggtagtcatttttaaacaaatatttgataaagttcgaaacgatttaaactatcaatggttttattctgagctaaaacgtcacaatgtctcacattacatttactatttagccacagagaatgttcatattgtattaaaaaatgataatacagtgttattaaagggcctaaaaaacattgtgtctgtcaaattttcaaaggataggcatcttatagaaacgacctctaataagctgaaatccagagagatcacatttcaggaatacagaagaaaccttgctaaagcaggagtttttcggtgggttacaaatatccacgaacaaaaaagatattactatacctttgataattcattactatttactgaaagcatccagaaaactacacagatcttaccactctaa

SEQ ID NO: 7025 - DNA, 174 bp, Escherichia coli
atgaatattgaaaacttaaaaacaaaagcagaagcagatatttctgaatatataacaaaaaaaattattgaacttaagaaaaagaccgggaaagaagttaccagtattcagtttaccgcacgggaaaaaatgacgggtcttgaaagctatgatgtcaagattaatttaatctga

SEQ ID NO: 7026 - DNA, 213 bp, Escherichia coli
atgtctaacaaaatgactggtttagtgaaatggtttaaccctgaaaaaggttttggtttcatcacgccgaaagatggcagcaaagatgtgtttgtccatttctcagcaattcagagcaacgatttcaaaacattaactgagaatcaggaagttgaatttggtattgagaacggacctaaaggtcctgccgctgttcatgtagtggcgctttga

SEQ ID NO: 7027 - DNA, 498 bp, Escherichia coli
gtgaatcagatattcatggtgatttttctcgtgttgtcaggatttatcgtcggaaatgtctggagcgaccgaggatggcaaaaaaaatgggcggaacgtgatgctgccgcattatcacaagaggtaaatgctcaatttgctgctcgaataattgaacaggggcgaactatagcccgtgatgaggctgttaaagatgcgcaacagaaatctgctgaaatttctgccagggctgcttatctgtctgatagtgttaaccagttgcgtgccgaagcaaaaaaatatgccatacgccttgacgcagcgaagcataccgcagatcttgccgctgccgtcagaggcaaaacaaccaaaaccgccgaaggaatgctcaccaacatgctcggagatattgcagcagaagctcagctttatgctgaaattgctgacgaacgctacatcgcaggagtgacttgtcaacagatctatgaatctttaagagataaaaagcatcaaatgtag

SEQ ID NO: 7028 - DNA, 534 bp, Escherichia coli
atgaacacaaaaatcagatacggcctgtcggctgccgttctggcgctgattggtgctggcgcatctgctcctcagatacttgaccagtttctggacgaaaaagaaggtaaccacacaatggcataccgcgatggttctggcatatggaccatctgtcggggtgccacagtggtggatggaaaaaccgtttttcccaatatgaaactgtcgaaggaaaaatgcgaccaggtcaacgccattgagcgtgataaggcgctggcatgggtggagcgcaatattaaagtaccactgaccgaaccacaaaaagcgggtatcgcgtcattttgtccctataacattggccccggtaagtgtttcccgtcgacgttttataagcggctgaatgctggtgatcgtaaaggtgcatgcgaagcgattcgctggtggattaaggatggcggacgcgattgccgcattcgttcaaataactgttacggtcaggttattcgtcgtgaccaggagagcgcattaacctgctgggggatagaacagtga

SEQ ID NO: 7029 - DNA, 312 bp, Escherichia coli
atgactcaagactatgaactggttgtgaaaggagtccgtaattttgagaataaagttacggtaactgtagccttacaggacaaagaacgctttgacggtgaaatttttgacctggatgtcgccatggaccgtgttgaaggagctgcgctggagttttatgaggcagcagccagaaggagcgtccggcaagtcttcctggaagtagcagaaaaattgtcagaaaaagttgagtcttatctgcagcatcagtactcctttaagattgaaaatcctgccaataagcacgagcgtcctcatcataaatatctatga

SEQ ID NO: 7030 - DNA, 207 bp, Escherichia coli
atggataagttaacaacaggtgttgcctatggcacatcggcgggtaatgctggtttctgggcattgcagttactcgataaagtaactccgtcacagtgggctgcaatcggtgtgctgggtagcctggtttttggcctgctgacgtatctgacaaatctttatttcaagattaaagaagacaggcgtaaggctgcgagaggagagtaa

SEQ ID NO: 7031 - DNA, 216 bp, Escherichia coli
atgtcaaataaaatgactggtttagtaaaatggtttaacgctgataaaggtttcggctttatttctcctgttgatggtagtaaagatgtgtttgtgcatttttctgcgattcagaatgataattatcgaaccttatttgaaggtcaaaaggttaccttctctatagagagtggtgctaaaggtcctgcagcagcaaatgtcatcattactgattaa

SEQ ID NO: 7032 - DNA, 213 bp, Escherichia coli
ttgtcccgtaaaatgacaggaattgtcaaaacctttgacggcaaaagcggcaagggtcttatcaccccatccgatggtcgtatcgatgtccagcttcatgtttcagcgctcaatctccgcgatgcagaagaaattaccaccggattacgcgtggaattttgccggataaatggtctgcgtggcccttcagctgccaatgtttacctttcatga

SEQ ID NO: 7033 - DNA, 753 bp, Escherichia coli
atgaaccttgaagccttaccaaaatattactccccaaaatctccaaaattgagcgatgacgctccagcgacaggcaccggttgtttaacaattacggatgtaatggcagcgcaggggatggtgcagtcgaaagcaccacttgggttggccttatttctggcaaaagttggtgttcaggaccctcagtttgcgattgaaggcctgctaaattacgcgatggcactggataacccgacattgaacaaattgagtgaagaaatccggttacagattattccttacctcgtgagttttgcctttgctgattactccaggtctgcggcaagtaaggctcgctgtgagcattgttcaggtacgggattttataatgtattgcgcgaagtggtgaaacactacagacgcggggaatctgtaatcaaggaagaatgggtgaaggaactatgtcagcattgccatggtaagggcgaagccagcacagcgtgcagagggtgtaagggtaaagggattgttctggatgaaaaaagaacccggtttcatggcgtaccggtatataagatttgtgggcgttgtaatggaaaccggtttagtcgtttaccgaccacgctggcacgacgtcatgtccagaagctggtaccagacctgaccgattatcagtggtataaggggtatgcggacgtcattggtaaactggtaacaaagtgctggcaggaagaagcatacgcggaagcgcaattgaggaaggtgacgagataa

SEQ ID NO: 7034 - DNA, 1050 bp, Escherichia coli
gtgcgggtattacttagacctgttctggtgcctgagcttgggctggtggtccttaagccgggccgtgaatccatacagatatttcataatcctcgagtgctggtggaaccggaaccaaaaagcatgcgtaatctgccatccggagtcgttcctgccgttcgccagccgctggcggaagacaaaacattgctgccgttttttagtaacgaacgggtgattcgtgctgctggcggcgttggcgcattgtccgactggctattacgtcatgttacatcctgccagtggcctaatggcgattaccatcacactgaaacagtcattcaccgttatggtaccggcgcaatggtgttgtgctggcactgcgacaaccaactgcgtgaccagacatcggaatcactggagctgcttgctcaacaaaatctgacagcatgggtgattgacgtcatccgtcacgcaataagcggtacgcaggagcgggaattatctttggctgaattatcctggtgggcggtctgcaatcaggtggtggatgcactacctgaggctgtatcgcgtcgttcgctgggattaccagcggaaaaaatctgctcggtgtaccgcgaaagcgacatcgtaccgggagagcagaccgccaccagcatattgaaacaacgcacaaaaaatcttgcaccgttgccttacgcccaccagcaacaaaaatcaccacaggaaaagacggtggtaagcatcaccgttgatccagagtctccggaatctttcatgaagctgcctaaacgtcgccgctgggttaaggagaaatacacacgttgggttaagacacagccgtgtgcttgctgcggtatgccagccgacgatccgcatcatctgattggtcacgggcagggcggaatgggaacaaaagcacatgatctctttgtgttgcctttgtgcagaaagcatcacaacgagctgcatacggatacagtggcatttgaagataagtatggctcccaactggagctgatatttcgttttatcgatcgcgcgctggcaattggcgtactggcgtaa

SEQ ID NO: 7035 - DNA, 252 bp, Escherichia coli
atgatgaacatcgaagaactgcgtaaaattttttgtgaagatggcctctatgctgtgtgcgttgaaaatggaaatcttgttagtcattaccgcattatgtgtttgcgaaagaatggggctgcgttaattaattttgtggatgctcgggtcacggacggatttatcttgcgcgaaggtgagtttgtcacttcattacaggcattgaaagagatcggaataaaagctggcttttctgctttttcaggagaataa

SEQ ID NO: 7036 - DNA, 156 bp, Escherichia coli
atgaagcagcaaaaggcgatgttaatcgccctgatcgtcatctgtttaaccgtcatagtgacggcactggtaacgaggaaagacctctgcgaggtacgaatccgaaccggccagacggaggtcgctgtcttcacagcttacgaacctgaggagtaa

SEQ ID NO: 7037 - DNA, 288 bp, Escherichia coli
atggcgtattttctggattttgacgagcgggcactaaaggaatggcgaaagctgggctcgatggtacgtgaacagttgaaaaagaagctggttgaagtacttgagtcaccccggattgaagcaaacaagctccgtggtatgcctgattgttacaagattaagctccggtcttcaggctatcgccttgtataccaggttatagacgagaaagttgtcgttttcgtgatttctgttgggaaaagagaacgctcggaagtatatagcgaggcggtcaaacgcattctctga

SEQ ID NO: 7038 - DNA, 240 bp, Escherichia coli
atgggtagcattaacctgcgtattgacgatgaacttaaagcgcgttcttacgccgcgcttgaaaaaatgggtgtaactccttctgaagcgcttcgtctcatgctcgagtatatcgctgacaatgaacgcttgccgttcaaacagacactcctgagtgatgaagatgctgaacttgtggagatagtgaaagaacggcttcgtaatcctaagccagtacgtgtgacgctggatgaactctga

SEQ ID NO: 7039 - DNA, 333 bp, Escherichia coli
atgtctgtcacaattcagggaaatacctcaaccgttatttcaaacaactccgccccggaaggaacatcagaaatagccaaaatcacaagacaaattcaggtgctgactgaaaagcttgggaaaatctcatcggaagaggggatgacgacacagcagaaaaaagaaatggctgcattggtacagaagcaaattgaaagcctctgggctcaactggagcagttgttaaggcagcaggcagagaaaaagaatgaagacgcgacagttcagcctgataaaaaagaagagaaaaaagacgatacaaataccgctggcaccattgatatttacgtctaa

SEQ ID NO: 7040 - DNA, 1314 bp, Escherichia coli
atgatcaaagagactgttacgatgagtcataaggaactccaccgacttcagattattcaggaacaagctgcggcacgcattggcatttctattcggcaggttaaacgtctggtgcaacggtatagaaatgaagggccttctggtctggtttcccaccgacgtggaaagcgtcctaataattccttttctactgaattcagagcaacagtaatttcactcctcaaaggccgttacgctgattttggacctacgtttgcgtgcgaaaaattgcgcgagatacacggtttatctttatccgttgaaactctcagaaagtggatgatagaagaggggttatggcgtgaacgccgtcgtaaaattgcccgtatatatcaacgccgcatgcgacgaccatcttacggtgaactgatccagattgatggctcacctcatgactggtttgaaaatcgaggccccagatgtacactgatcgttttcattgatgatgccaccagtgcgttgatggcgttgcgttttgtgcctgctgaaacaacccgggcttacatggaaaccctccggggttaccttaatgatcatggcgtaccgctcgctctctactctgatagacacagtatattcagggtaaataacccagagcgggaaggtgagctgacccagttcactcgtgcgataaagacactgggcatcgagccaatccatgccaacagcccgcaggcaaaagggcgggtagagcgcgccaatcagacactacaggacaggctggtcaaagaaatgcggcttcagaatatcagtgatattgaaacagcaaatgcatggttgccgacctttattgaagcctataacaaccggttcgctacgtcgcctcgtactactgataatgctcatcttgatgtgcaccattctgaagaggaactgggttatatcttcagcctacaggcgaagcgcgttctgtctaaaaatctcactttccagtacaaaagcagtgcgtttcaggtacgcagtgagggccggggatatcgacttaggcattcggttgttactgtatgcgagaactttgacggtgaaattaacgttctgtatgacgggaaagcgctgggctgggaaaagtatgttgatggcccggagcctataccactggatgatgaaaagagtgtccatgaacgagtggataatgcccgtattgatttacgctcaaaatactatgttaaacctaaagctgaccatccctggcttacgcgccgaacgcaaagtcatcagcaagttaagcccccgaagttacctaaaaagaagcctgatcccgataaaaaagattga

SEQ ID NO: 7041 - DNA, 1860 bp, Escherichia coli
atgagcaaaggaacgaccagccaggatgccccgttcgggacattactgggctacgccccaggtggggtagcaatctactcttcagattacagttctctcgatccgcaggaatacgaagatgacgccgtattccgtagctatatcgacgacgaatatatgggccacaaatggcaatgcgttgaatttgctcgccgttttctctttctgaattacggtgtggtcttcactgacgtgggtatggcgtgggagattttctcgctgcgcttcctgcgtgaagtggttaatgacaacatcctgccattgcaggcatttcctaacggctcgccgtgtgcgccggtcgcgggtgcgcttcttatctgggataaaggcggtgaatttaaagacactggccatgtcgccatcattacccaattgcatggcaacaaagtccgtattgcggaacagaacgtgattcattccccgttgccgcaagggcaacagtggacgcgcgagctggagatggtggtcgaaaacggcggctatacccttaaagacacgtttgatgacaccaccattctgggctggatgatccagacggaagataccgaatacagcttgccacagccggaaattgcaggcgaactgctgaaaatcagcggggcgcgtctggaaaacaaaggccagtttgacggtaaatggctggatgaaaaagatccgctgcaaaacgcctatgtacaggccaacggtcaggtgatcaatcaggatccgtatcattactacaccattaccgagagcgcagagcaggagctgattaaagccaccaacgagctgcacctgatgtatcttcacgccaccgacaaggtgctgaaagatgacaacctgctggcgctgttcgacattccgaaaatcctctggccacgtttgcgtctctcctggcagcgtcgccgtcaccatatgatcaccggtcgtatggatttctgcatggatgaacgtggcctgaaggtctacgaatacaacgccgattccgcctcctgtcataccgaagcgggcttgatcctcgaacgttgggcggagcagggctataaaggcaacggcttcaatcctgcggaagggctgattaacgaactggctggtgcctggaaacacagtcgtgcacgtccgtttgtccatatcatgcaggacaaagatatcgaggaaaactatcacgcgcagtttatggagcaggcgctgcaccaggcgggctttgaaacgcgtatcttgcgtgggctggatgaactgggctgggatgctgccgggcaactgattgatggggaagggcgactggttaactgcgtgtggaaaacctgggcgtgggaaaccgcgtttgatcagattcgtgaagtcagcgaccgtgagtttgctgcggtgccgatccgtaccggtcatccgcaaaatgaagtgcgtcttatcgacgtattgctgcgcccggaagtgctggtctttgaacctctgtggactgtgatccccggcaacaaagcgattctgccgatcctctggtcgctgttcccgcaccatcgttacctgctggataccgatttcactgttaatgatgaactggtaaaaacaggttacgcagtgaaaccgatcgccggtcgctgtggcagtaacatcgacctcgtcagccatcatgaagaggtgctggacaaaaccagcggtaaatttaccgagcagaaaaacatctatcagcaactgtggtgtttgccgaaagtggacggtaaatacattcaggtatgtaccttcaccgttggcggcaactacggtgggacgtgtttgcgcggtgatgaatcactggtcatcaaaaaagagagtgatattgaaccgttaattgtggtgaaaaagtaa

SEQ ID NO: 7042 - DNA, 660 bp, Escherichia coli
atggctgttattcaagatatcatcgctgcgctctggcaacacgactttgccgcgctggcggatcctcatattgttagcgttgtttactttgtcatgtttgccacgctgtttttagaaaacggcctgctgcccgcctcatttttgccaggcgacagcttgttgatattggctggcgcattgattgcccagggggttatggattttctgcctacgattgcgattctgaccgccgcagcaagtctgggctgctggttaagttatattcaggggcgctggttaggaaataccaaaacggtgaaaggctggctggcacagcttcccgctaaatatcaccagcgcgccacctgcatgtttgaccgccacggtctgctggcgctgctggctggacgttttcttgcatttgtccgtacgttgctgccaaccatggcgggaatttccggtctgccaaaccgccgcttccagtttttcaactggttaagtggattgctgtgggtcagcgtggtaaccagtttcggctatgccttaagtatgattccgttcgttaaacgccatgaagatcaggtaatgacgttcctgatgatcctgccaattgccttgttaaccgctggcttgttaggcacgctgtttgtggtgattaaaaaaaaatactgtaacgcctga

SEQ ID NO: 7043 - DNA, 297 bp, Escherichia coli
atgcaggatctggaggaagaaggttatctggttggcctggagaaagcgaagttcgtcgagcggctggcgcattactattgtgaaatcaacgtgctgcatcccttccgtgtgggaagcggactggcacagcggatcttcttcgagcaactggcgattcatgccggatatcaactgagctggcagggtatcgaaaaagaggcctggaatcaggcaaatcagagtggggcaatgggggatctcaccgcgttgcagatgatatttagcaaagtggtaagcgaagccggggaatctgagtaa

SEQ ID NO: 7044 - DNA, 141 bp, Escherichia coli
atggattttatgctgacggtttctggtgtggttatcctgtccattgcttatactgcagataaatatggctgccatttgttatcacgtattggcgcttattgttcgttgatgctgattttctcgtcgcttttttttgagtaa

SEQ ID NO: 7045 - DNA, 468 bp, Escherichia coli
atgaaccgcgtactgtgcgtggtcatcattgccctgctggtggcctgtggtgcgcttagtctggggctgaatcattaccgtgataacgccattacctacaaagcccagcgcgacaaaaatgtcagagaactgaagctggcgaacgcggcaattactgacatgcagatgcgtcagcgtgatgttgctgcgctcgatgcaaaatacacgaaggagttagctgatgcgaaagctgaaaatgaaactcttcgcgctgacgttgccgctggtcgtaagcgcctgcgtatcaacgccacctgtccaggtcccgtgcgtgaagccaccggcaccgcccgcgtggataatgcaaccggcccccaactggcagacaccgttacacgggattatttcaccctcagagagcggctgatgacgatgcagaagcaactggaaggggcgcaggaatatatccgtactcagtgcctgaaataa

SEQ ID NO: 7046 - DNA, 273 bp, Escherichia coli
atggacaataacaccatttctctacaggagttgctcgacagcatttccaggcttcgggaagacgtgaatacccttaccgtcgccttctcatatctggcattctcaattccaagggaacagatgcaatcaacgctggcatcaatccagtttgaatcatgcaatcccaaatggtctcaggaacaacaagactctttcaggcggcttgctgtattactggatgaaaaatatgctggtaaaattaccatttcggcggactcttcagagaacccgtaa

SEQ ID NO: 7047 - DNA, 345 bp, Escherichia coli
atgactcaaaactatgaactgattgtgaaagggatccgcaattttgagaataaagttacggtaactttagcgttacgggacaaaaaacgctttgacggtgaaatttttgacctggacatctcgctggaccgtgttgaaggtgcctcgctggagttttatgaggcagcagccagaaggagcatcagacaggtcttcctggatgttgctgccgggttatgtgaaggggatgagcagtcgccggaaaagcgccccgtaattttagaggcgcaggatgtgttgataacctacagaggaaaactaccgggaataattacgggttctctgaagagtccgccgaaatggtaa

SEQ ID NO: 7048 - DNA, 1050 bp, Escherichia coli
atgcttaatactgtaaaaatatccagttgtgagttaatcaacgccgactgcctggaatttatccggtcgttacccgaaaattctgttgacctgatagtcacggacccgccgtactttaaagtgaagcctgagggctgggataaccagtggaagggcgacgatgattacctgaagtggctggaccagtgtctggcgcagttctggcgggtgctgaaacctgtcggaagtctttacctgttctgtggtcatcgcctggcatctgatatcgaaatcatgatgcgtgaacgcttcagtgtgctgaaccatattatctgggcgaagccgtccggacgctggaacggatgcaacaaggaaagcctgcgggcgtatttccccgccacagagcgcattctgttcgcggaacattatcaggggccgtatcgtccgaaagatgccgggtatgcggcgaagggcagtgcactgaaacagcatgtgatggccccgctgatttcttactttcgtgatgcgcgcgctgccttggggataacggcaaaacagattgcagatgccacaggaaagaaaaacatggtgtcgcactggttcagtgccagtcagtggcagctaccgaacgaaagcgattatctgaaattacagtcgctgtttgcccgggtggcagaagagaaacatcagcgcggtgaactggaaaagccccaccaccagctggtggatacgtatacgtcactgaaccggcagtatgtggagctgcagagtgaatataagcatctgcggcggtattttggtgtgacggcgcaggtgccgtacacggatgtgtggacacataaaccggtgcagttctatccagggaaacatccgtgcgaaaaaccggcagaaatgctgcagcagataatcagcgcaagcagtcgtccgggtgacctggttgcagatttttttatgggctcaggttcaacggtaaaagtggcactggcgctcgggcgtcgtgcgattggcgttgaactggagaccggacgttttgagcagacagtcagggaagttcaggatttaatcgtttga

SEQ ID NO: 7049 - DNA, 690 bp, Escherichia coli
atgaataaccagtatttacagtttgttcgtgagcaactcatgattgccaccgccgatttgagtggatcaacaaaagggcagcttgaggcctggcaggagaatgccatgtttgatacagggcgttacaggcgtaaaaaaatccggtaccgcgatgaagtgactggaaaaatgataacgcgggataatccaccaatcccgggaaagcaatcgctggcgaagggggtgtcaattcctctcgtcagtccggttgagttttcgacatcatcgtggcggcgggctgttctgtctcttgaagaacatcataaagcctggttgttgtggtgttacagcgggagtatttgttgggaatatcagatcgcgataacgcagtgggtgtggaatgaatttaaaacccggtacggcaccagaaaaattgcagggaaaacgcaggagcgcgtgaagaagttgatctggctggcggcacaggatgtcagaggatggattaccgggtgtgaggtctaccagagacaggagcttgccagactgtgtggagttaagcctgataactggagccataattatgcgaactactggcgtgagatgtgcgatatttttaagagtctcgatagagaatctgtgatttgcaccgtgaaaataagagcgcaacaaaaagcgactttttcacgacgagatattgcaaaagtcaattaa

SEQ ID NO: 7050 - DNA, 366 bp, Escherichia coli
atgactgaacgcatagaatttgttttgccttacccgccaacggtgaacacttactggcgacgtcgtggcagcacatattttgtatcaaaagtcggtgagcgttatcgccgtgatgtggcgcttattgttcgccagcagcaactgaaattaaacctgtccggaaggccggcaatagaaattattgcagagccaccggataagcgccgtcgtgacctggacaatatcctgaaggcaccactggatgtactgacgcatgcggggctgctcatagacgacgagcagtttgatgaaattaatattgtgcgcggtcagcttgttcctggtgggcggttggggataaaaatcacagaactggagtacgcatga

SEQ ID NO: 7051 - DNA, 1056 bp, Escherichia coli
gtgcgggtattacttcgacctgttctggtaccggaactcgggctggtgatcgttaagccgggccgtgaatccatgccggtattccacaatacccgggtactggtggagccggaaccgaaaagcatgcgtaatctgccgtccggggtcgttcctgccgttcgccagccgctggcggaggataaatcattactgccatttttcagcgacgaacgagtgattcgtgctgctggtggcgctggcgcattgtctgactggttactgcgccatgttaaatcctgccagtggccacacggcgattatcaccacagtgaaaccgtcattcaccgttatggtaccggcgcaatggtgttgtgctggcactgcgacaaccagctgcgcgaccagacctccgaatcactcgggcaacttgctcaccaaaacctgtctgcatggatgattgacgtcatacgccatgcaatgaatggctcgcaggaacgggaattatcgctggctgaattatcctggtgggcggtccgcaatcaggtggcggacgcgctaccggaagcggtattacgtcgttcgctggggttgcgtgcggaaaaaatccgctcaatgtaccgtgaaagcgacatcgtaccgggagagcagaccgccaccagcatactgaagcagcgcacaaaaaatcttgcgccgctgcctcacgcccaccagcaaaacccgccacaggaaaagacggtggtcagcattgccgttgatccggagtcaccggctcagtatctccagcgccagaaatcacaacgggaagagatgcctgtatacacgcgttgggtaaaaacgcagaaatgcatgacgtgtggcaatcaggcagatgatccgcatcacatcattggtcatggactgggagggatgggaacaaaggctgatgatttgtttgttattccgctgtgccgtaaatgccatagcgaactacacgccggggtaaaagattttgaagaaaaacacggcagccagctgttgttgctgattcgttttttaatgcacgcgagaaattcgggtgttctgaagtggaaagcataa

SEQ ID NO: 7052 - DNA, 426 bp, Escherichia coli
atggcaaaagtatttacacaagaagagcgggaaaaaattaaagggcaggttgttgaacttgtacgtctgagcggtcgcgagacgttacggcaactggaagccaagacaggtgcgacaagatatctgatgagcgttcttgccagagagctggttgccagtggcgatgtatacgactctggttacgggttattcccgtctgaacaggcgcgtaaggactggcaaaatgctcgcaaaaaactctcaagggcaaaggtgaagaaacctgcagtggttgatccggaccttatctggtcgttaccagacggcgaaatacgccgctacgacaggcgcctgaatataatctgtcgcgagtgccggaagagcgaagctatgcagcgtgtactggcattttatcaaggaaatgttaggtattttagacgttactag

SEQ ID NO: 7053 - DNA, 771 bp, Escherichia coli
atggaaaccgtatctgacgcactgaaagcactgaaaaaagcctcttcacatgtggtggcagctcgccttggaatcagtcgtgaagaggctgtcaacgagctgtgggaactcaaaagaaaaggcgtcgttgataaaactggtcacacctggtttctggctggcgaaggtgaatcccgggtaaccgaagagcggccagtaaaatctgaagcacaggatatgctgaccggggaggtcgaacaaaaagttaccgcagacatgatgattgagtttatcggtcaggatggggctaaaacgtgtgaggaactggcgggtaagttcggtgtcagtactcgcaaggttgcttccacgctggcggtggtaaccgcaacggggcggctggcacgcgttaatcagaacggtaaatttcgttactgcatgccgggcgataatttaccagcagagccgaaagccgcgctggtaacggaaagtgatggtaaggcctttcctcagccagcaggtgctgcgttaccaggccgggaagccgcaacacaggaagaaattaaaacagaaactgtggcggacattgtgcagtcgttgccatcgtttaccgaaacgcaagcagatgagctgatttttccgtccctgcgcagggcaaacctggcgctgcgcagggcgaaaagtgatgttcagaagtgggagcgagtctgcgccgcgctgcgggagctgaacaagcaccgggatattgttcgacagattactgattcttcccgccgtgttgtatcggaaaagtga

SEQ ID NO: 7054 - DNA, 747 bp, Escherichia coli
atgaaaaacattgcggcagttggggttcttgaacgtattcgcagacttgcaccacaggggtcggttccaccgtaccggacggtggaggagtggcgggaatggcaacttgctgaaggacgaaaacgcagcgaggagattaaccgccagaatcgccagttgcgggtggaaaaaatcctgaatcgttcgggcatccagcctctgcacagcaaatgctcgtttgcaaattatcaggtgcagaacgacgggcaaaaatacgcgctgagccaggccaaatccatagctgacgaactgatgaccgggtgcacgaattttgtgttcagcggtaaaaccggcaccgggaaaaatcaccttgcagcggcgatgggcaaccggctgatggtgaaggggcgcagcgtgattatcgtcaccgtgtctgacgtcatgagcgtgttgcatgacagctacgacaacggcaaatccggggaaaaatttttacaggagctttgcggggttgatttgctggtcctggatgaaataggcgttcagcgggagacgaaaaacgagcaggtggtattgcaccagataattgatcgccggacagcatcactgtgcagtgtcgggatgttaacaaacctgaatcatgccgcaatgagtacgcttcttggtgagaggattatggaccgcatgaccatgaacggtggtcgatgggtgacgtttaactgggatagctggcgtccaaatgtcagcaatatgagggttgtgaagtaa

SEQ ID NO: 7055 - DNA, 963 bp, Escherichia coli
atgagcagcaagcttcatggtcttgtctgggaagggtgcgccttcaccggcatgatcttatccagggtggcggttatggcccgtcttgcagactacagcaatgacgagggcgtgtcatggcctgccattgaaactatccggcgtcagatcggtgcaagaagtgaatccacagtgaaatcggctattgcagaactggcgaaagagggctggctgacgaaggaagagcgtaaggtcggtgggcgtaatgtaagcaatatctatcggcttaatgtggaaaaactcgaagcagctgcggcggcggcgcgtgagtcatataaaccgaaaagaaaaattagcccggcaaaaaatgacccgttaacagttgacccgtcaaatattgacccctcaacggttgacccgtcaaattttgatggatcaactgttgataaaaaactgccgattaggggggcgatgattgaccccgatccgtcagtattaaaacctgatccgtcagataaaagatcttcttgtccggacgcttcgcaaccggacccgcagacggctgaacaggattttttaacccgacaccctgacgcggttgtgttcagtgcgaaaaaacgccagtggggaagtcaggaagatttggtgtgcgcacagtggatctggggacgaatcgtgagtctttacgagcaggcggccagctatgatggcgagatcactagaccgaaagaacccaactggacagcatgggccaatgacgttcgcacaatgcggatgctggatggcagaactcacagacaaatttgtgaaatgtttgggcgtctccagcgggattcgttctgggtaaaaaacatcatgagtccggcaaaactccgggaaaaatgggatgaactggttatccgcctggggcgttcgcctgcgcagcgttgcgtgaatcacatttctgaaccggacactgaaataccgccgggattcagggggtga

SEQ ID NO: 7056 - DNA, 426 bp, Escherichia coli
atgaaaatcaagcatgaacacatccgcatggcgatgaatgcctgggcgcatccggacggcgaaaaagtaccggctgcgaaaattaccaaagcgtatttcgagctgggaatgacgttcccggaactgtatgacgacagccatccggaagccctggcccgtaatacccagaaaattttccgttggctggataaagacacccctgatgctgttgaaaaaatgcaggctctgttaccggcgatcgaaaaggcgatgccgcctttgctggtggcccgtatgcgcagccacagttctgaatattaccgtgagatcgtcgaacggagggatcggctggtgaaggatgtcgatgattttgttgcgtcagcggttgttttgtatgaccagatgaatcgcggcggcccggcagggaatgctgtggtgatgcactaa

SEQ ID NO: 7057 - DNA, 201 bp, Escherichia coli
atgagtacaatcaagttttcttgcccagaatgtggtggcgaagtctttgacacatcctttaagccgcagggctctgacagtttcgcgggagccatctgcaaaaattgtggtcaccttgtaactgaagatgagtcctcgcagttcgatgacgaaatcgttgacaatatcttcggtgcactcaccagagactttctgaagtaa

SEQ ID NO: 7058 - DNA, 189 bp, Escherichia coli
atggaaacgttattaccaaacgttaatacgtctgaaggttgttttgaaattggtgtcactatcagtaaccctgtatttactgaagatgccattaacaagagaaaacacgaacgggagttattaaataaaatatgcattctttcaatgctggcccgtttacgtccgatacaaaaaggatgctggcaatga

SEQ ID NO: 7059 - DNA, 192 bp, Escherichia coli
atgaatacagcatttgcacttgttctgacagtttttcttgtttccggagagccagttgatattgcagtcagtgttcacaggacaatgcaggagtgtgtgactgcagcaaccgaacagaaaattcccggtaactgttaccctgtcgataaagttattcaccaggataatagcgaaatcccggcaggtctttaa

SEQ ID NO: 7060 - DNA, 993 bp, Escherichia coli
atgtttgcactggctgatatcaacagtttctacgcctcatgtgaaaaagttttccgcccggaccttcgcaacgaaccggtcatcgtactcagcaataacgatggctgtgtgatcgcgcgcagcccggaggcaaaagcccttggcatcagaatggggcagccctggtttcaggtgagacaaatgcgcctggagaagaaaatacatgtattttccagcaattatgcgctgtaccacagcatgagccaacgggttatggctgttctggagtcgctttctcccgcagttgagccctactcaattgatgaaatgttcattgatttgcgggggataaatcattgcatctctccggagttttttggtcatcagctcagggaacaggtaaagagctggacaggactcaccatgggggtgggcattgcgcctacaaaaacgctggctaaaagtgcacagtgggcaacaaagcaatggccacagttttccggtgtggtcgcgctgacggcagaaaaccgtaatcggatcttgaagctactggggctgcagccagttggtgaggtctggggagtaggacgcagactgacggaaaagctgaatgcgctgggtattaacacagcactgcaactggcgcaggctaacacggcattcatccggaaaaacttcagcgtcattcttgagcgtacggtacgcgaactcaacggcgagtccagcatatccctggaagaagtaccaccggcaaaacagcagattgtctgtagtcgcagttttggtgaacgaatcacagacaaagatgccatgcaccaggctgttgttcagtatgcagagcgggccgcagagaaactacgtggggagcgtcagtattgtcggcaggtgacgacatttgtacggacatccccctttgcagtaaaagaaccctgttacaacaatgccgctgtggaaaagctttcattgccacacaggacagccgggacattattgccgccgcatgcagagtcttaa

SEQ ID NO: 7061 - DNA, 210 bp, Escherichia coli
atgaatcagaagtggaagacgctaatagtttcagtattaacaccatcaagtattatatcagggattgcgttgatagttctctggggatatttcagtcgtctggatcgacttgatattttctttgatgtgatgaatattaaaagcatcttggtattggtttgttgtacaactattctatcattgattatgatcatttttatttttttataa

SEQ ID NO: 7062 - DNA, 849 bp, Escherichia coli
atggcctttatatacgtgttatactgtgcatttgattttgaccagagtgttaaagataactctggctggttatctattttaagtataggagtactaatagttgttatttcagccataataaacacgaggtatcttgaatatgacttatcgtttaaaaataatagaatgaaactgttgagacgtgttcagatctatcttgtcattccgttgtctattgctttactggtgcatcttcaggtaattccactggagatggtttttaggaatattgaaacttcagataagagtattaatttcaaagtgatagctgaactggctttcatgtcatattttatttttattctgacaatacttcccggcctcatttatctaaaaatgaatccacagcataaactttctaaaagaattagttctgcatttgtcgcatccttgatgatattattagttatatcgactcaaataaccgtattaccagtaatttttacccattcagttattaagctctcaggtataagtgacttcaaaatacatagctacattattaaaacaagtgaatatccggaggagtttttttccaatgcagtatggggtaaaaaaaatataaaaccgggggaatattactctgtgcaggctgtttctatgtttacgacaaaccagtttattctcctttgtcccaaggatattataaggttttatcgggaaagctggaagttcgacctgcttaatgtagacttcgatacaaataccaggaagaaactccaggaagaagcagcatattgcgtaccaatttctgcaatatctgtaaaacgatgggatatgcctcttcagggctcgaaaccctcaaattag

SEQ ID NO: 7063 - DNA, 336 bp, Escherichia coli
atggcgacaacaatcacagacgaagttttagcactgttccgtgatgagattccaggttatcagaatgaccacgggaaggaaattccgttagaactggactctgatttgttcgactatccacgagatgatttagaggacgctatacggaaatacaaagagaggtttgggattaacctggataatctggactggtctttgtaccttccatgggagtctgcaccattgcttcaacgatggttcaagctcaagcgggaagaggtagaaacaacacgtttaccgttaactgtacggatgtttgcagaatcagcagaagcgggaaaatggctgtatcagtag

SEQ ID NO: 7064 - DNA, 450 bp, Escherichia coli
atggatactaccgaagaacgcaatggaacatatttctacagaggacacccgaacctgtccaaaatagaactactcaacgtcatattccttgaagaattctgtaaggaattggggattgattcggtatcaggtgcagcaatcttatctggtcaaccgtggctgggtacaagagcgaagccgcaaggggcaaccctgggaacaagtgttgtctcaaagtatgcgcgtatactgatgagagatgcacgcatgccttttggtatttctgttcatacaccagtgggtgtaaggatgcagaaatctaataagcttgctgcaattatcgctcgttgggtcccgtggattggttgggcttcactgtcgatgagtctttacagggtttcgactcgtacccaggaaaaatacaatctgattgccaaacctcaagaccgtattaagtggacttccttctaa

SEQ ID NO: 7065 - DNA, 285 bp, Escherichia coli
gtggctaacctgcaacttgccgttaaaggtgaatacttcgatgccatgattcgcggagagaaaacggaagagtatcgcctgtgtaatgactactggaaaaagcgcctcgttaaccgtaagcatgaccgcctgattatcacaaagggatatccgaagcgcgacgattccagccgcagagttgatgttccgtatgacggatatgaagtgaagacaatcacacatccgcacttcggtgataaaccggtaaaggtatacgcgataaaggtaaatatcggcactgaataa

SEQ ID NO: 7066 - DNA, 987 bp, Escherichia coli
atgaaaatgaggtcatttacccgctcattagtctgcgcatccttgctggctctggttagcactggcgtaaacgccgcagaaaaagtgacgttaaagttagcacacaacctggaaagaagtcatgttgtacatcagagttttgaagagctggcgaaagaagtaaaacagctgtcaaaaggtaatatggtgatccgtatttaccccagcagccagatgggtaatgcgcgagaaactatggagttgttgcaaaatggtgcactggatatgaccaaaggttccgccagtgatctggagtcttttgataatatttatgctatctataatttgccgttcttatttaaagatcaggcgcacttcaacaaagtggtttttggtgaagttggtaaagaaattatggattcaacaaaagataaaggcttttttgctttatcagcttatgtagcgggtacacgcagtttctatgcgaaaaaaccgattactaagccagaagatcttaaagggctgaaaattcgtgttcagccaagcccgaccaccatcaaaatgattgaactgatgggtggctcacccactccaatttcatttggcgaagtttatactgcgatgcagcaaggtgtagtagatggcgcagaaaataacgtgccttcctgggtgcagactcgacatatcgaaattgccaaagtcttttctgaagatgaacatgcctcaattcctgactttttggttatctccaccaaaacatggaataaattaaccccagaacagcaacaaatcctcgaaacagcggcgaagaaatccgaagcttatcaacaaaaattgtgggaaaaaattgacgctgacacacgtgctcaggcgaaagctatgggtggtgaaatcgttaaggttgataaagccccattccgtgccgcagttcaacctctgtttgacgacttcaaaaaagatccaaaacaagctgctttgttagagaaattcgacaacgctgctcaataa

SEQ ID NO: 7067 - DNA, 504 bp, Escherichia coli
atgatatttaaccgcctgaaacttgcggtagaccgcgtcattgccgcgttttctgtcgccgtaatgcttgctctggttgtatgcgtagtctggcaagtatttagccgctacatacttaaccagccaagtacattaaccgatgagctggcacgctttttgatgatctgggtaggattattaggtgctgcatataccgtcggcgcgcagagacatctctctatcgatttatttgctctcgccctgaataagcgcaagcaattacttcttagtatagtcattaacattctcattttaggttttgccggttcggtcattgtgactggtggcctgaaattaattgataaaacgctggcaacatcacaagtatctgccgcgatgcaaataccgatgggatacgtatatatcattctgccattaagtggagtggtgatgatgttttatgccttgtgttttattaatcaaagcattcaacaactgaaacaacctgcgcaggaggccagttaa

SEQ ID NO: 7068 - DNA, 1302 bp, Escherichia coli
atggatagttatatcgcgcttacactatttggctgtttttttgtgctggtctttattggtgtgcccatttcgttctcaatcggtattgccactgtagcttcaatgctgttgatgtttccctgggatatcgcggcaatcactgtttcgcaacgactggctaatggactggataactttgccctgttggcaatcccatttttcatctttgccggaacgctgatgaacagcggcggtattgcgatacgtttgattaacctcgcccaggtaatggttggccgcgttcctggttcgcttggtcatgtgaacgtcctggcgaatatgatgtttggttccatttctggttcagccgttgcggcagctgctgccgttggtggcacactgaatcccattcagaccaaagaaggttatgatccggcattttctaccgctgtaaacgtctcatcttgtattactggattactgataccgccctcaaacgtgttaattgtgttttccctgacagctggcggcgtttctgtagcatcgctatttatggcgggatatttgccagggatcttaatgggtcttgcggtaatgatagtctgcggcattattgctaaacgccgtggctacccgctttcagaaagagcaacctttgctcaggcatgtaaagcgtttctggatgccttaccaagtttgcttctggtgttcattgtaatgggcggcattctgggcggcatttttaccgcaactgaagcgtcagcaattgccgttgtctacacatttattctctcggtgctgatttaccgggaagtaaaatggcgcgatttacccaaactgattctggaatcggttgttaccacttcgattgtattactgttgatcggtttttccgtgggcatgtcctgggcaatgaccaatgctgatattccttatatgatcagcgacgcgttgatggggatttctgataacccactggtcatattgctgctgattaatatcgtcttattaattgtcggcatctttatggacatgacaccggctgtactaatcttcacaccaatcttcttgccgattgcacaagagctgggaatggatccggtacatttcggtattatgatggtggctaacctttgtattgggctgttaacaccgccggtgggtagtgcgctatttgttggttgttctatttcaggtgtgaagattcaacatttgatcaaaccattgctgccattttatgccgcattgttaatcgcgttgatgatgatcacttacatcccgcaaatatccttgttcattccacagctactagggctaatgtaa

SEQ ID NO: 7069 - DNA, 633 bp, Escherichia coli
atgtttgacgtttcgttgttaaatctgccatgggcaacactggtgaccctgaccagtggctatattgggtattttattgcgaatgtgggactgaaggatcaccacaagcccattgaggtgactttttcttcgctgatttttggcctgacagcaatgatggcttaccaggctgttatgtgggcaggtctgaatgcctggctggcaacaccaccagcacttctgtgtgccgttacatgtggtgcgtggtggcgcaggtacggtcgcaaatggatgtacagattactgtggaataatgatgtttcatggtctgacgataccagctcagcatggcaggcaatgtttgatcaaacaggcttcagcgttaccgaggtcagagtgattcttcgcgatggttccggtatgatgtcacggctgccagggaactttgaagagtggcctaacggtccgtttaccctggggaataaaggcgatatggttctttacgtcacgcacagcagcccttcaggcagtaacgaatgggaagagtataaaggcgtggttgataagtactggggagctctggcaacctatattccagcagatcagattgccagagtggagatcaggcgcgttcgtgcaacgaacgatgaatga

SEQ ID NO: 7070 - DNA, 162 bp, Escherichia coli
atgactactcaaaacaataagcatgatagcctggattactcagaaaagcccaaaagcaagcacatcgtgacgttcgagcgcgattccggtagaaaaggagaatcgtcttcctctgccaataaaaccactatgccggcagcccctgccccagggaaaaaataa

SEQ ID NO: 7071 - DNA, 1086 bp, Escherichia coli
atgacattactcgcttcgctgcgtgactggcttaaggcgcaacaactggatgcggtgcttctctcctcacggcagaacaaacagccgcatctggggatctccaccggatcaggctatgtgctgattagccgtgaaagtgcgcacattctggtggactcgcgctattacgcggatgtagaagcccgcacgcaaggttaccagctgcatttgcttgacgcgacgcacacgcttgcaaccatcgccaggcaaatcattgccgatgagcagttgcaaacgctcggttttgaaggccagcaggtgagttgggaaaccgcgcaccgctggcagtctgaactcaatgcgaaactggtaagcgccacgccggatgtgctgcggcaaatcaaaacgccagaggaggtggagaaaatccgcctcgcctgtgggattgccgatcgcggtgcagagcatattcgccgctttattcaggcgggaatgagcgagcgcgagatagccgctgaactggagtggtttatgcgccagcagggcgcagaaaaagcctctttcgataccattgtcgccagtggctggcgtggggtgctgccgcacggtaaagccagcgacaagattgttgcagcgggcgagtttgtcactcttgattttggtgcgctgtatcagggctactgctctgatatgacgcgcaccttgctggtgaatggcgaaggggtgagcgccgaatctcacccgctgtttgacgtctatcagattgttttgcaggcacagctcgcggcaatctccgcgattcgccccggcgtgcgctgccagcaggttgacgacgccgcgcgccgggtgattaccgaggctggatttggcgactatttcggtcataacaccggtcatgctatcggcattgaagtccatgaagatccgcgtttttcaccgcgggacaccacgacgctacagccaggcatgttactgaccgtggagccggggatttatttgccagggcaagggggcgtgcgcatcgaagatgttgtgctggtcaccccgcaaggcgcagaagtgctctacgccatgccgaaaacagtgttgctcacgggagaggcataa

SEQ ID NO: 7072 - DNA, 1248 bp, Escherichia coli
atggccattaaaaaacgcagtgcaaccgttgtgcctggcgcatccggtgcggcagcggcagttaagaatccgcaggcctctaaatccagcttctggggtgaactcccgcagcatgtgatgtcagggatttcacgcatggtgccgaccttaattatgggcggtgtgatcctcgctttcagccagctgattgcttatagctggcttaaaattcctgctgatatcggcatcatggatgctcttaatagcgggaaattctccggtttcgacctctccttactgaagtttgcctggctgtcacagtcctttggtggcgtgctgtttggctttgccataccgatgtttgccgcttttgtggcgaactccatcggtggcaaactggcgttcccggctggttttatcggcggcttgatgtctacccagccgacgcaactgctgaacttcgatcccagcactatgcaatgggcgacctcttcgccggtgccgtccaccttcattggtgccctgattatttctatcgttgctggttaccttgtgaagtggatgaaccagaaaatccagttaccggatttcctgttagcgttcaaaaccacatttttgctaccgattctttccgccatttttgtcatgctggcgatgtactacgtcatcaccccctttggtggctggatcaacggcggtatccgtaccgtgctgactgccgcaggtgagaagggcgcgctgatgtacgcgatggggatcgccgcggcgacagcaatcgaccttggtggcccgatcaacaaagcagctggtttcgttgccttcagctttaccactgaccacgtattaccggttaccgcgcgttccatcgctattgttattccgccgattggtctgggtctggcgaccattatcgaccgccgtttaaccggcaaacgtctgttcagtgctcagctttatccgcagggtaaaaccgccatgttcctggcgtttatggggatcagtgaaggtgcgattccgtttgcactggaaagtcccatcaccgccattccgtcctatatggttggcgcgattgtcggctcaaccgctgcagtctggctgggcgcagtgcaatggttcccggagtccgctatctgggcatggccactggtcactaacctgggcgtctatatggcggggatcgcgctgggagcagtcattactgcgctgatggtggtgttcctgcgtctgatgatgttccgtaaaggcaaattgttaatcgatagcctgtaa

SEQ ID NO: 7073 - DNA, 270 bp, Escherichia coli; identical to SEQ ID NO: 5175

SEQ ID NO: 7074 - DNA, 657 bp, Escherichia coli
atgaaaaaaaacacagatgatggggctaaaatttacacaccacttaccctaaagctttatgactggtgggttttgggagtatcaaatcggcttgcatggggatgtcctacaaaggaacaccttcttccacactttctggaacatttaggtaacaaccatctggatattggtgttggaactgggttttaccttactcacgtacctgagagtagtctgatatctttaatggatttgaacgaagctagcctgaacgcggcatctacaagggctggggaatcaaaaattaaacataaaattagccatgatgtttttgaaccttatcccgcgacgttacatggtcaatttgattccatttccatgttttaccttcttcactgcctgcctggaaatatatctacaaaaagctgtgtaatacgcaatgcggcgcaggccttaactgacgatggaactctatacggagccacaattcttggcgatggagttgtgcacaatagcttcggtcaaaaactgatgcgcatttacaatcagaaaggcatcttttcaaacacaaaagattccgaagaaggcttaacacatatactctcagagcatttcgagaatgttaaaaccaaggttcaaggtactgtagtaatgttttccgcttcagggaaaaaatag

SEQ ID NO: 7075 - DNA, 141 bp, Escherichia coli
atgttcggacatggcaagcgaatgaatatgccgtggtggggcggttttgatccgcgcgcgtgggatgtggcaagcctgatggattttgctgtgccggtggtggcgtgtctgctggtctggctgttggttaatcgtgggtga

SEQ ID NO: 7076 - DNA, 1830 bp, Escherichia coli
atggcagcagtaaaaatctcaggtgtgctgaaagatggtgcgggaaaaccaatacagaactgcactattcaactgaaggcaaaacgtaacagcacaacggttgtggtgaacacggtggcctcagaaaatccggatgaagctggacgttacagcatggatgttgagtatggtcagtacagcgtcaccctgctggttgaaggttttccgccttcacatgccgggaccattaccgtttatgaaggttccagaccaggtacgctgaatgattttctgactgcccccgacgaaggcgacctgaagccagatgtggtgaaacgatttgaagatttgacaagtcaggcgcgacgaagtgcagatgtggcaatatcagcgacaaaaagggcagaagcgttactgtctgaaatgcagggaatagccgatagttttcccggtttgcgctttgagaactttgacgacatcgtgagtcgttgcactactgcaatgttaaaactggaacaacccgaggttgttgatacatcaatatctttaaaaataaaagaaaatatcgattttaattatgtcggtgcagttaacggatattgcgatatttctgaaccagaaaagtataaagtcgaaatgtatgcttatacaaccggagagtattttaacggcgacgctaatttgaatagtgacggaactttctatttcagacgttgctggacgggagcaaaacagtttcgtcttattcggattgaggataatgcgtggatcacaacgctggagtttccactgctcattcgtagctactggatgccggaggacgcagaccccgaagtgatcagggtgatgaaagatcggtgttacacgtatgaccaggcgctggcagcactggcgttgatggttcagcgacatgaggctgtagaaagatacgttgcgggcttgtgtgcgcttgttgatgaaaacggtggagtaaagttttttgttaacaggctgtctgccatgtcaccgcgtacctattaccgcttgggcaatgcggcatgggtttattatgctcttgctttctatctggagaagtatccggacggtactcagactgcgcgggtcagagaaaagctattggcaggcattgcctggctggatacttttctggtgagcacaccaggcgacctgcgtgaaggcctgtataaaggggggcaggggcgttatgtggacggcaattttgatgaaactttcgtcgccgaatggtgcgcactggagcataacgttgatatctggtttttgtttgaactgatgggacggctgggatttgacggtttcagtgagcgggctgacaggctggcaaagagtatcatcagaggtctgtgggtggaagatgaaggccgatttcgacagggggttcattcaacccactatgacaacgcagcggcgctggatcagtcttcctggggcggattgtttgttgccaatattgatgctgagaaagcggctaagtgccgaaaatatatggggcgttttttatttggtacgagggaaaccacgggttacacaccgtaccaccctgattatggttatagtggtcacagccgtggcgtgtgggtggaaggaacggcaggtgtggcactttttgagcgcaagctgggtaatgagctgaatgcggtgaatcttgtggcagcaatggctccactttttaatgagtacggttatcgtgattcttgcgataacctggcatacgatgtgctgccttcctggccatcaacaacaaacactgcctggatcattctggctgtaaagccagataatttctggttagtggattcgccagaaatggatgtagggacaatccgctattga

SEQ ID NO: 7077 - DNA, 252 bp, Escherichia coli
atgcctgccacgctgccatgcttcagggaaaaagagagtgatatggctattgccgcaagttacaccatgcatctctattgtgattgtcgccagtgtacggaaggtgtatatccagtgccagacttcggtgagtatatcggtaagtcatggtctggttgtgcaaaagaggcccgtaaagacgggtggcgaataagcaaagacaaaacacgtacttttgcgcccgggcataaagttttgaggattaacacatga

SEQ ID NO: 7078 - DNA, 534 bp, Escherichia coli
atgcctaaccctcttagcatgtacgcggtcgatgctgttgccgctattgcagaggtgagaggctggaacgcctgccgcgcggctatgcttcatgccggaaactttcgggaaaacgcgaattcgtcaaccaataattttcgggaaatttcggaaacgtcaaccaactctccggtaattcctggtgaggtgttgtccgcaatcctgaaatttgccagagttcgtgctgatttcgatgattttgacggcgacaggcgaggtatcggtgattgtctggatgaggctgagcaagagcttatcgttaccattaacaaatatgccagtcagttggcagcagaaccgatagcgactaatgacgttcgagagcagcagacagccgttccgccagttcctgtaatacaggctgatgtcgcgcaagcaattgaaaatctcaggcagaagttagtggaatgcaatcgctataactactgcgcagatgcagttaagggcgtagaggatgcctgccacgctgccatgcttcagggaaaaagagagtga

SEQ ID NO: 7079 - DNA, 255 bp, Escherichia coli
atgagcacttttaccgacaaagaactgattaaagaaatcaaagagcgtatcagcagtttggatgtgcgagacaatgttgagcgccgggcttatgaaattgctctggcatcgctggaagagaatccggtggcatggctgcattcagacaatggcttaggtattccggcaataacgaggagtaaaaacattgctgacagttggttatcaaagggttggtatgttcagccgctatatatgccaagccagtgccagtag

SEQ ID NO: 7080 - DNA, 765 bp, Escherichia coli
gtgagcgaaattaactatcaggcactgcgtgaagcggcagaaaaagcaacgtgtggtgagtggtcgctcgaatatggagagagccgatttgatggtgattatgcgctaattcatcgtgaagttgctggatatattcccatttgcagaattgaaggagcgcatccagaaagcggtttcgatgaagatttccaaatggaacagcaggccaatgctgaattcatcgccgcagccaatccggctactgtgctggcactgctggatgaacgggaaagaaaccagcaatacataaaacgccgcgaccaggagaacgaggatattgctcttactgttgggaagctgagagttgagcttgaggagacaaaatcaaaactcaacgagcagcgtgagtattacgaaggtgttatctcggatgggggtaagcgtattgctgaactggagaaaagcgaagagcaactcattaacgagcgtgaccatgctgaatctgctttagcagatatgtactttgcagcaaccggggatgagccggagtggagcaactggttcggcttttcagatgctgtcgatgccgtggttgacagaattgctgatttagaagctaaacagccatcaccagtagtaccggaaggactggttaaagcagtgcgcttctatgaacaggttaagcgtgaaaatccaccagtcgaaacagaggcatggaaagacgctattgactgggtgctcaaagagtcttgtcaggctgtaaacattgataccaatggagattga

SEQ ID NO: 7081 - DNA, 222 bp, Escherichia coli
atggcggacatcattgattcagcatcagaaattgaagaattacagcgcaatacagcaataaaaatgcgtcgtctgaactaccagactatatccgccactcattgttgtgagtgtggcgatcccatagatgaacgaagacgcctggtcgttcagggttgtcggacttgtgcaagttgccaggaggatctggagcttatcagtaaacagagaggttcgaagtga

SEQ ID NO: 7082 - DNA, 282 bp, Escherichia coli
atgcatttttctggcagcgggcttcatattctgtgtgcttatgcttgccgacatggggcttgttcagtgacacctcagcaagaaaacgcccttcgcagcattgcccgtcaggctaattctgaaatcaaaaaagccagacagcagtttccggataaaaacgtcgatgacatttgccgtagcgtactaaagaagcaccgcgaaacggtaacgctgatgggattcacaccgactcatttaagcctggcgatcggcatgttaaacggcgtctttaaggaacggtga

SEQ ID NO: 7083 - DNA, 192 bp, Escherichia coli; identical to SEQ ID NO: 4131

SEQ ID NO: 7084 - DNA, 183 bp, Escherichia coli; identical to SEQ ID NO: 4130

SEQ ID NO: 7085 - DNA, 201 bp, Escherichia coli
atgactacgactattgatacaaatcaatggtgtggacaattcaaacgatgcaatggatgcaagctgcaatcggaatgcatggttaagcctgaagaaatgtttcctgtaatggaagatgggaaatatgtcgataaatgggcaatacgaacgacggcaatgattgccagagaacttggtaaacagaacaacaaagctgcctga

SEQ ID NO: 7086 - DNA, 357 bp, Escherichia coli
  misc_feature (344)..(353): n is a, c, g, or t
atgcattttttcctgcaaggaatgacacttaaacagttgattcatatgctaatcatcctgatcatattgattattgttatgccggtaagcgtaaaagaatggataaacctgcataatccagaaatccttcctcattactggatgtattacatcctgttgttttgcgttagctatgtgcttaacggcgttgttaattccgcttatcacgctgtgactgaaagaattgaggtattcgctgctcagaagcgcaaatctaaagaagaaaaatatgtgcaagatttgtttgattcgttaactcttggagaaagagcgtatttggcattcgctgtagccgctaataaccnnnnnnnnnnctaa

SEQ ID NO: 7087 - DNA, 273 bp, Escherichia coli
atgtccagaaaaacagaatttaaaggcaccgcagcttctcgccgtagagctcgtcgcgcaaatctgcaaagtcaggaggcgatcatctccgacaagctacacaggccaaccccttcacgagtggtcttgcaatgcaagctcaaaccagcaatgagagcagaagtgataactctgacaacgttgaccagaaaatatgaaggttcaacttgtcttccgaacgtagctctttacgcggcaggctaccggaaatcaaaacaactgacggcgagatga

SEQ ID NO: 7088 - DNA, 750 bp, Escherichia coli
atgtgctcaacagtgatctcacaactaggtttcgaatgccatccaataggcaagaccttgagaattatcagtccattcacttactgtgatgatggagagcatgtcggtgcctttatccgtgaagtcaatggtaggtatttagttagtgacagatgcgatgccttaatgaatatggaggcaagagggatctcgcttaccaaaaaacgacttgatgagatacgacaattactgcttaaagaaggcgcagaactcaatgctcgaggagaaatcattgcttgggcaacagaaaaggatgtcggtgcgattacatcgaacataattagagctggtatactcgcatcaactttgtcgttagactggtatcagccagttcaagctgaaaagtttgaaagtatggttattgattatctatatcacacagagcttagagacgcactttctcttcgtgaaaacgtatatggcttgagtggacatcaaattaccgtccctgtaacaataaaaaccgacatacctaaatacgtttttacatcaagcgtgaaacacggaggaagctggaatagtgcttactcattgcttgggaaactaattgatcttaaagcttcaagtgaggagtataacaacagatttgttgttatagacagcgaagcaattggtgatcaaatgcaacaactctccttactcttccatgaatcaagccaagttctaccattctccaaaagagagacttgggttaagagacttgcagcataa

SEQ ID NO: 7089 - DNA, 558 bp, Escherichia coli
ttggcaaaaatagatgattatcagccaagccaagtagaagttgataaagtactttattgtaaaaaaatagttaacttttctggcgttaaatggaaacagaaaccaagtcgctctgatatgtggctacaagcccatatcatccccttggatgaggattgtatacctatacaagggctaaagtttgaactgaaatggaaaccagatcaggattcagaacctgatgacccgatttcttaccctaaaataaatattattgctttctatcataacaagagggttttcgcggtagatacctatcactttgacaaacacacgaatagttacaaggtcgatcatccgaagtaccaagatatcatttacggtgctcactaccatgtatactatgaagaagctggatactatagtgatagaatagcgtttccaatcgaagatgacataaacccagatgacctggtagggtattggaattacttctgtaaacatctgaacataacttactctgggagaatacctttaccgcttgaagatgagtcggggcaaatggggtttggaatatga

SEQ ID NO: 7090 - DNA, 654 bp, Escherichia coli
atgaaatggtatgaactggctagatccagaatgaaagagctcggcataactcaagagaagttagccgaagagctaggtatgacgcagggtgggattggacactggttgcgcggatctcgtcatccatctcttagtgatattggtgtggtgtttaaataccttggtattgataacatatcattcaaccacgacgggacattttcacctgttggcgaatactcatcggccccagttaaaaaacaatatgagtaccctgttttttctcatgttcaggctgggatgttctctccagaactcagaacctttaccaaaggcgatgcggagagattggtaagcacaaccaaaaaagccagtgactctgcattctggcttgaggttgaaggtaactcaatgaccgcaccaacaggttccaaacccagctttcctgacgggatgttaattctggttgaccctgagcaagctgttgagcccggcgatttctgcatagccagacttggtggtgatgaatttaccttcaagaaactgatcagggatagcggtcaggtgtttctacagccactaaacccacaatacccaatgatcccatgcaatgagagttgttccgttgtggggaaagttatcgccagccaatggcctgaagagacgtttgggtga

SEQ ID NO: 7091 - DNA, 216 bp, Escherichia coli
atgagcaacctacgaaaatatcgagagtcactgaatatctctcaaacaacacttgctaaggcagttggatgcacacagggagctatcggacattgggaatctggtcgtcgcttcccagaccttaaaacatgccgtgctcttgttgcgtgcctaaacaagttaggcgcaaaagtcagtcttgatgacgtgttcccgccggaacacaaagccgcttaa

SEQ ID NO: 7092 - DNA, 297 bp, Escherichia coli
atggaaagaacaagttacagcaaactatcacagcgtgacgttgatcgcgcagaaacagatttacttatcaatctgtcagctattacccagcgcggtctggcaaagatgattggctgtcatgaatcgaagataagcagaacggactggagatttattgcttcggtcttgtgtgctttcggaatggcatcagacatcagtccgattagcagggcttttaagtatgcgcttgatggactcaccaataaaaaacgcccggcggcaaccgagcgttctgaacaaatccagatggaattctaa

SEQ ID NO: 7093 - DNA, 363 bp, Escherichia coli
gtgaatacctacagcatcacattaccctggcctccgagcaataatcgctattaccgccataatcgcgggcgcacgcacgtcagcgcagaggggcaggcataccgcgataacgtcgcccgaatcattaaaaacgcaatgctggatatcggcctggctatgcctgtgaaaatccgcattgagtgccacatgccggatcgccgtcgccgtgacctggataatctgcaaaaagccgcttttgacgcactcactaaagcaggtttctggctggatgatgctcaggtcgttgattaccgcgttgtgaagatgcctgttaccaaaggtgggaggctggaactgaccatcaccgaaatggggaatgaatga

SEQ ID NO: 7094 - DNA, 1254 bp, Escherichia coli
gtgagtcactggactacattcaaacaaacagcaacaaagttatgggtgaccctacggcacgacattctcgcgctggccgtctttttaaatggattgcttatttttaaaacaatctatggtatgtcggtcaatttgcttgatattttccatatcaaagcattttcagagctggatctctccttgctggcaaacgccccactatttatgctcggcgtatttcttgtcctgaactccattggcttactgttccgggcaaagctcgcatgggcaatcagtatcattttgttgttgatagcgctaatttacactctgcatttttatccctggctgaaatttagtattggattttgcatttttacgctggtgtttttgctgatactgcgcaaagacttctcccacagtagcgcagcagccgggacaattttcgcatttattagtttcacgacgttactgttttactccacttacggtgcgctttatttaagcgaaggttttaatccgcgaatagaaagtttgatgaccgcgttctatttttcgatagaaaccatgtcaaccgtcggctatggcgatattgtccctgtttctgaatcagcacgattgttcactatttcggtcattatttccggcattaccgtttttgccacctctatgacctcaatttttggtccgcttatccgcgggggattcaacaaacttgtaaaaggaaacaatcatacaatgcatcgtaaagatcattttattgtttgcggacattcgattctcgccatcaatacgatcctgcaactgaatcaacgcggacaaaacgttacggttatcagcaacttgcctgaagatgatatcaagcaacttgagcaacgcttaggcgataacgccgatgttatccccggtgacagtaatgacagttcagtgttaaagaaagcgggaatcgatcgttgccgggccattctggcgctgagtgataacgatgcagataacgcgtttgttgtactctcggcaaaagatatgagcagtgatgtcaaaacagttctcgccgtcagtgatagcaaaaacctgaataagattaagatggtacatccggatatcattctctcaccacaactgtttggcagcgaaattctggcgcgagttttaaatggtgaagagattaataatgatatgctcgtttcaatgttgttgaactccggtcatggcattttcagcgataacgatgaacaagaaacgaaagctgaaagtaaagaatcggcgcaaaaatag

SEQ ID NO: 7095 - DNA, 1461 bp, Escherichia coli
atgacaaccgtttatacgttggtgagttggttggccattctgggatactggttgctcattgcaggcgtaactttacgcattctaatgaaacgacgcgcagttccctccgcgatggcctggctgttgattatttacattctgccgttagtcggaattattgcctatcttgccgttggcgagctccatttaggcaaacgccgcgctgagcgcgccagagcgatgtggccttccaccgcaaaatggcttaacgaccttaaagcctgtaagcatatcttcgccgaagaaaatagcagtgtcgctgcgccattattcaagctttgcgagcgtcgtcaggggatcgcaggggtcaaagggaatcagctacaactgatgaccgagtcagatgatgtgatgcaggcgttaatccgcgacatccagctcgcgcgccataatattgagatggtgttttatatctggcagcccggcggcatggcggaccaggtggctgaatcattaatggccgctgcacggcgcggtattcattgccgattgatgctcgactccgccgggagtgtggcttttttccgcagcccgtggcccgagctaatgcgtaatgccggtattgaagtggtcgaagccttaaaggtcaatctgatgcgtgtgtttttacgccgtatggacctgcgccaacatcgcaagatgatcatgatcgataattacatcgcgtacaccggcagcatgaatatggtcgaccctcgctacttcaaacaagatgcgggcgtagggcaatggattgatctgatggcgcgtatggaaggccccatcgccaccgcgatggggattatttattcctgcgactgggagattgaaaccgggaaacgtattctgccgccgccaccagatgtcaatattatgccgtttgagcaggccagcggtcacaccattcacacaattgcttctggccccggctttccggaagatctcattcaccaggcattattgactgctgcttattcggctcgtgaatatttgatcatgacaacgccctattttgtgcccagcgatgatttacttcatgcgatttgcacggcggcgcagcgcggggtggatgtcagtattatccttccgcgaaaaaatgactcgatgctggtcggctgggccagtcgcgcattctttacggaactgctggctgctggggttaaaatttatcagtttgaaggcgggttactgcataccaagagcgtgctggtcgatggtgaactaagtctggttggcaccgttaaccttgatatgcgtagtctgtggctaaatttcgagattaccctggcaatcgacgataaaggttttggtgcagacctcgccgccgttcaggacgattatatttcgcgttctcgtctgctcgatgcccgtttatggctaaaacgtccattatggcaacgtgtcgccgagcgactgttttacttcttcagcccgttgctgtaa

SEQ ID NO: 7096 - DNA, 1005 bp, Escherichia coli
atgaatgctgtaaccgaaggaagaaaagtcctcctcgaaatcgccgatctgaaagtgcactttgaaatcaaagatggcaaacagtggttctggcaaccgccgaaaacgctcaaagccgtcgatggtgtaactcttcgcctgtatgaaggggaaacattaggtgtggtaggggaatcgggatgcggtaagtccacctttgctcgcgccatcatcggtttggtcaaggcgaccgacggtcatgttgcctggttaggtaaagagttgctgggcatgaagcccgatgaatggcgtgccgttcgcagtgatattcagatgattttccaggatccgttggcatcgctgaacccgcgtatgaccatcggcgagatcatcgctgaaccactgcgtacttatcatccgaaaatgtcacgccaggaagttcgcgagcgcgtgaaggcgatgatgctgaaagtcgggttattgcctaacctgattaaccgctatccgcatgagttctctggtgggcagtgccagcgtatcgggattgcacgtgcacttattcttgaaccgaagctgattatctgtgatgagccggtgtcggcgctggatgtgtcaattcaggcgcaggtggtcaacctgctccagcagttacaacgtgagatgggattgtcattaatttttatcgctcacgacctggccgtggtaaaacacatttccgatcgtgtgttagtgatgtatctcggccatgcggtagaactggggacctatgatgaggtctaccacaatccactacatccttacaccagggcattgatgtcggcagtccccatacctgatccggatctggagaagaacaaaaccatccagttactggaaggggaattaccgtcgccgatcaacccgccttccggttgtgttttccgtacccgttgtccgattgccggtccggagtgtgccaaaacacgtcctgtgctggaggggagtttcagacacgccgtttcttgcctgaaagtcgatccgctttaa

SEQ ID NO: 7097 - DNA, 1014 bp, Escherichia coli
atgagcgtaattgaaactgcaactgtgccgctcgcacaacaacaggctgacgcactgctgaacgtgaaagatttgcgtgtcacctttaataccccggacggcgacgtcacggcggtcaatgatctgaatttttccctacgtgccggagaaacgctgggcatcgtaggtgagtctggttcgggcaaatcgcaaaccgcatttgcgttgatgggcctgttggctgccaacggacgtattggcggatcggcaaccttcaatgggcgtgaaatcctcaatttgccagagcgtgaactcaataaactgcgagctgaacaaatctcaatgatttttcaggacccaatgacttcgttgaatccctatatgcgcgtcggtgagcagttgatggaagtgctgatgctgcataagaacatgagcaaagctgaggcgtttgaagagtcggtgcggatgctcgatgcggtaaaaatgccggaagcgcgtaaacgcatgaaaatgtacccgcacgaattttctggcggcatgcgtcagcgagtcatgattgcgatggcgttgctatgtcgacctaagctgctgattgcggatgaacccactactgcgctggacgtcaccgtacaggcgcagatcatgacgctattgaatgaactgaagcgggaatttaataccgccatcattatgatcacccacgatcttggcgtggtggcggggatctgcgacaaagtgctggtaatgtacgccgggcgcacgatggaatatggcaacgcgcgcgatgtcttttatcaacccgttcatccttattctatcggtttgctcaacgcggtgccgcgtctcgatgcggaaggtgaaacaatgttgactattccgggtaatccgccaaacctgctgcgattaccgaaaggttgcccgttccagccacgttgtccgcatgcgatggaaatttgtagtagcgcaccgccgctggaagagtttacgcctggccgtctgcgtgcttgctttaaaccggtggaggaactgttatga

SEQ ID NO: 7098 - DNA, 2841 bp, Escherichia coli
gtgtatgttctgaacaactattgttttttaagcggtaaagaaatgagacggattgatgttattcacaaggagctggagcggctgacgtatgggctggaactgtctgatttagcgaaggagaaagcatttactgctgaggcgattggttttaaccttgggctggcacgcaactcggttagtaaagatcttaatcaattatggaatgaaggcctggtggtaaaaagtcagggacgtcctgttttttttctacatcgtcacgcactagaattgctcattaatcgaaaactggatgattgcgaatgcatagttcattcagtggctagtttattgccaaagaaagaaaaatatacagatgatgatccgttttccggacttatcggatacgaccgtagtctccgtgatgcggtagaaaaaggccgcgcagcggtgctctatccccacggactacatgtgctgttaaccggggcatctggtgttggcaaaacattctttgctgagttaatgcattgcttcgcttgcaagcacaccataggttcgctacctccgttggtttactttaactgtgccgaatatgctcataatccggagttgctttcctcacatctgtttggtcaccataagggggcatttaccggggcaagtgagaataaaacgggattggtggagcaagctgacggaggctatttacttctggatgaagtgcatcgcctcccgtacgaaggacaagagaagctcttttctattctcgataaaggtgaataccgcccacttggttcaagtgggccaacatattcaatttcggtgcgccttatttgcgccactacagagtcggtcaactcggcactattgcgtaccttccagcggcgtatccaggtatgtattgacttaccgggtattcgccagcgttcggtcgaggagcagctcgaattgattgtaagcttctttcagcgtgaaagtcgtaaaattgaacgtaccataagccttgataaaacgctcttgcattggttgttaagtaaacccctggaaggcaatatcggccagcttaaaagtgatattcagttcttgtgcgcgcaggcgtgggcgtcgggaatgaccgagcgtaatgatacgctagagttagataaacgactggcggagatgtcgtttaataccacgccagagcagcgtctgctggtcgatgcgttgtttggtggtaaagatcgtctgaacgtggatgcgcgtacgttgcccgcgttaaaaaattcgttggcgaccagcgcggaaatagaagagagcgacctgttttacagtttcctgactcgtgaatatgtcaatctgcgcaacagtaacgtgccgcccgcagaaacgctggctatcctgaaaaacaaactcagttcgatttttgaatatggtctttatagccgccatagtgcggcgcatccaccgcgctatggcgatcaaattgaggagcgtgtgacgctgctgatcggttacgtggagcaggtattaggatttacattgccagaaaacctggcgaacccgttacgtaaacactttcttgcgctgattggctatgtgcggcgagggcttatacctcaactctattcatccagcctgattctggatcgctgtaaagatgagtatgacaatgcgacacttctgtgccgcaaaatcaatgagttgttgcatattcagtgcccggcgacggaggtggtctggctgtgcctgttcctgaaagagtgtcgccactaccgccagcgcatcgacaccagcccggattgcggcgtgattctaatcgctcacggtgcgaccaccgcaacgagccaggcgcaatatgtgaatcgggtgctggagcgcgatctgttctacgcaattgatatgccatttgagcagtcggtgcatgacaccctggaaaccctgacccggatgattcaggaccggtgctggcagcggctgatactgatggtggatatcggatcgctggtccattttggcagcaccatcagcaagctgttccagattgacgttctgttgttgccaaatatcactctgaccagcctgctggaggtggggctggatttaagctacgaaactggcgatctatcgcaattggctgtgcttatgcagagtaaaaatatcccttgtcggctctgcacgccgcagcaagagagcggtggcaaagtgctggttatctcatgtataaccggaatggggacggcggaaaagatcaaaaaggtgctggaggagagctttggcgagctgatgtcgcaggacacgcgtatggtgattctcgactataacgaggtgcgcagcctggagcgtattcagcaggcgcttaatgccagtgaacggctggcagggatcgtcggcaccttccagccgggactgccggatataccgtttatctcgctggaggaactgttttccgagcaagggccagagctggtgctcagcctgctgacgccggatctctcaagcagcgagcgccgactggagatggagcgcagcgccatgcgttttatcagcgcgctgaccatggagagcatcatcaaccatatttcggtgctcaacccgcagcgaattctgaaagagatcgaggacgttctgaaccacttaaccaacacgctctccctgaaaccgagccgccaggtgacactacgttttctgatccactgctgctgcatggtcgagcgtatcgtgattaaccgcaaaccgttacagatggcgctagaaaaccggcttgatctggacgctcgtgcctttagcgtcatcaaatcctcctttttgccgattgaagaggcttacgctatccgtttatcggacgcagaatatttttatatctacgaactgctctacagctga

SEQ ID NO: 7099 - DNA, 429 bp, Escherichia coli
ttgaccacaactgtacctattcatccgttacctgaaattctgctgctaactcacggcggctgggggctgcagctctgcaacagtctgcgcatggtgatgggcgaaatcgaaggcgtgacggaaatcgcgctgatgcctgtcgatacgctgggcgagttttaccagcgcgtcgaagccgtggtgaaaaccatgccagaaggttctcttatcgtgaccgattttatcggcggcaccacctctaacgtggcggcgcggctgagcgccgattatccggtggcggtgatctccgggcttaatgcctcgctgctgctggaggcgctggacaagcgcgaacatggcccactgaccgcctgcgtggccgatctggtggaagctgggcgcaacagttgcctggacgtcgtctcccatattcgtcaattacaacagtaa

SEQ ID NO: 7100 - DNA, 486 bp, Escherichia coli
atggcaaacatcgtgttatgtcgcattgacagccgtcttatccacggacaggtggtgacgaagtgggtggggcaatcccaggccaaccgtattgcggtggtcagcgacgagctggacgccgatccgtttatgaaaaatatctacctgatggccgcgccgccgaatatcaaagtggactgcttcagcaaccagagcttcgcggccgcgtggaaagagaaccagctgggcgacggcaacgtgctggtgctgttcccgtcgctggcggcgattcaggaagcggtgcagcagggctttgacgtggctgatattcaggttggcggcttaggcggcgggccaaaccgtaaagcggtgttccagaacataactctggatgaaaaagacgttggcattcttaacgatttgaaaagtcgcggcattaaggctgttttccagaccatcccggaagataagccgcagtcgctggacgatatcctgaaaaaattctga

SEQ ID NO: 7101 - DNA, 750 bp, Escherichia coli
atggataccttactttttgcaagcctgatggggctgtattactggtttgcccggttgcgccttggctataccttctccgccatgctgttacagccagtggtggtggcagtctttgtcggcctgctgctcggcaacatgcctgcggcgatgattatcggcgcggggatgcagttggtatatctgggtgtgacctcaacgccaggcggcaatgtgccgtcagacccggcgctggcggcctgtatcgccattcctatcgccgttaaggccaatatggacccgaacctggcgattgcactggcgattccatttggcgttatcggcgtattcctcgaccagttgcgtcgcacgctaaatgcggcctgggtgcatatggccgataaacacgcggaaacggccaatatatcagccattatgcgctgcgcctttctctacccggcgctgctggggctggtgctacgtttcccagtggtgttcgccgccaactacttcggccagaacgtagtggaaagtttcctcaagctgatgccgcactggctgacccactcgtttgaaatcatgggcgggattctcccggcgcagggcttcgccatcaccattatggtgattggtaaaaagagcctactgccgtggtttatcggcggattcttcgcggtgctgtacctcaaggtggacatcatggcgatggcgattttcggcacctgcgtggccttcctgattaaaggcctggcgaaaaatgaaggagcggcataa

SEQ ID NO: 7102 - DNA, 858 bp, Escherichia coli
atgagcgacgacgtaatgcagcatgaactggtggagctcgcgcgggagtccggggcgctgaccaaagcggatatcaccaaagcgtggtttatctactggcttggcgcggaagtttccagctcatatgagcgtttacagagcctgattttctgcgcctcgatgacgccgattattaaaaagctctatccgcaaaaggaggagcaggtggaggcgttaaaacgccatctgaacttcttcaactcagagcagacgtttggcgcggtgatccaagggatctccatcgccatggaagagcaaaagacccgcggcgaggcgattaacgatgcctctatcaccgggattaaaaccggcctgatggggccgctggccggaatgggcgactccatcatctgggcggccgtgatgccgctgttgattgctatttttatcccgttcgccgccaatggcagcgcgatgggcggtattttgccgctgattctctacccggcgattacgctggcaatcagctacggcatggtgcacaagggctatacgctggggcgcgattcgattatcagcctgctgcagggggggcgcatcaaggagcttatctacggcgctaatgtactggggcttatcatgatgggcgcgctatccgcgagctttgtcaagataacctcacctttaaaaattagcgcactgaaaggctctgaagtggtggtacagcagattctggactccatcgcgcccggcctgctgccgctggcggcagtgttcgccatctacttctatttggtgaaaaagggtccgcgttacaccacgattctgctgtcgattgtggcattgagcgtggtctgctcgctgctgggagtgctgtaa

SEQ ID NO: 7103 - DNA, 1110 bp, Escherichia coli
atgacgcagaatatctatcaacaactgggactgaaacaggtgattaacgcctgcggcaagatgacgattctcggcgtctccagcgtcgcgctggaggtgatgcaggccaccgcgcgcgcggcatcctctttcgtggagattgaccagctggtggacaaaaccggcgagctggtctctcgctttaccggggcggaggatagctacgttacctcctgtgcctcagcagggatcgccatcgctgtcgccgccgccattacccgcggcgacaaggcccgggtggcgctcatgccggatagctccggcatggccaatgaagtggtgatgctgcgcggccataacgtcgattacggcgcatcgatcctcagcgcgatccgcttaggtggcgggcgcgttgtggaggtgggttcaagtaacctggcggctctctggcagctggagagtgccattaccgacgcgaccgccgcgctgctgtatgtgaagtcgcatcactgcgtgcagaagggaatgttgaacatcgaggacttcgcacatgtcgcgcagatgtacaacctgccgctgattgtcgatgccgccgccgaagaggatttacgtgcctgggtggtgagtggagcggatatggtggtctacagcggcgcaaaagcctttaacgcgccgacctccgggtttatcactggtaaaaaaatctggattgcagcctgcaaagcgcagcatcacggcattgccagggcgatgaaaatcggcaaggagaacatggttgggctggtttacgcgctggagaattatcaccaggggcaggcagtcatcaccgcggaacagctccagccagtggttgaagcgatttctgcgattcacgggttaacggctgatattgagcaggatgaagccgggcgtgcaatctggcgtattcgtattcgagtaaatgcgcaggaattgggagttgacgctcgcgtcgtcgaagcgcaactgcgtggtggcgatatcgcgatttatgcacggcggtataacctccaccagggcgtttttagccttgatccgcgtacggtggcggaaggggaaatggcacttatcgtggcgcgactgaaggagattgcagatcatgcaaaagattaa

SEQ ID NO: 7104 - DNA, 744 bp, Escherichia coli
atgcaaaagattaatttctatcgtaatcgtgtggcaattaatgtgctggcgaaagatatcgccaatgcccgtgaaatctttgacgccgccgaaggccacgcagtgattggcgtgctttccgcgcagttctcctcggtggatgaggggatccaggaagttaaacgttggatggcggaaataccgtccatttcagtaggtctgggggcgggtgacccggcgcagtattacaaagctgcgatgattgcggcgcagattcatccagcacacgttaaccagacctttaccggttgtgggttcgcggcaggcgcgcttgcggctacgggcggtgagcagacccatgtcaacgcgctggttagcccgacggggacgccgggcgaagtgctgatttccaccggcgttagcagcagccagggtacgccagcccgcgtctcctgcgatacggcggtgcgaatgatgctagatatgggcgcacacgcggcgaagttctttccgatgggcggcgagaggtcgcttccggagctatacgcgctggcgaccacggcggcgcgcaatggtatgacgctgattgagccgactggcgggattgatttggataacttcagtgtgattctgaaaacttgtctggaggcgggggtgccgcgcattatgccacatgtttacagctcgattatagaccctgatacgggatatacccgaccggatgatgtagccgttttgctaaataaagtgaaatcactactctga

SEQ ID NO: 7105 - DNA, 573 bp, Escherichia coli
atgaagcgtaatattataggcggtgcattcactctggcatctctaatgctggccgggaatgcactggcagaagatggtgttgttcacttcgtcggtgaaattgtcgacacgacttgtgaagttacctccgatacagccgatcaaattgtcccactgggtaaagtcagtaaaaatgctttttcaggtgtaggtagtctggcgtcaccacagcagttcagtattaagcttgaaaagtgcccggcaacctacactcaggcagccgttcgttttgatggtacagaagcgcctggcggcgacggcgacctgaaagtgggtacgccgcttacagcgggcaaccctggcgattttaccggtacaggacaagcgattgcggcaacgggtgtcggtattcgtatttttaaccagtcagataactcgcaggttaaactttataacgattctgcctataccgctatcgacgcggaaggcaaggctgaaatgaagtttattgcacgctatgtggcaaccaatgcaaccgtaacggcgggtacggcgaacgccgattcacaatttactgtcgaatataagaaataa

SEQ ID NO: 7106 - DNA, 732 bp, Escherichia coli
atgtccagaaaaagttgtttaatcaggctctttaaaacaaccgtttcatgtaagttatttaccgcgattatactcagtgtttttttagtccaaccagcattaacctatgcaggcgttgtcattggtggtacacgggtagtttacttaagtaataacccagataaatctatttctgtatttagcaaggaagaaaaaattccttatctcatccaggcatgggtagatccgtttaataaagaggataaaagcaaagcaccgtttaccgttattcctccggtatcacgattagaacccgcgcaagaaaaagtattacgcattattcataccaaaggtgtgtcattgcctgatgatcgcgagtcagtcttctggctgaatattaaaaatattccgccctctgcgagcaacaaagcggcgaactcactggaaatcgcagttaaaacgcgtatcaagctgttctggcgaccggcaagcattcgcctgattcccgaagatgctgcaccgaaggtgaagtggcaccgggaagggcgaaacctgattgcagagaatcccaacccgattcatatcagtgtgatggatgtcatcgttgatggtcatgatgtgcccctcaacatgctccgtccttttgaaacgctcacgttacctttacctgctaattctgcgggaggccaaatgatctggcgatttattaatgattacggcgcagtcagtgacccgataaaaatgacgctgtaa

SEQ ID NO: 7107 - DNA, 2523 bp, Escherichia coli
atgatgacgaccagaataaaggttggcctcacggcagggacgtgtctgattttctcgcaaagcctgatggccgaggtcagtgtattcaatccggcgcttctggaaatcgaccatcaatccggagtcgatattcgccagtttaatcgggcaaacctgatgcccccaggtgtttatagcgttgatatttttatcaacggtaaaatgtttgaacgtcaggatgtgacctttgttcaggataatcccgatgctgatttacacgcctgctttgtcgctattaaaaaaacgctaaccacctttggcgtaaaagttgatgcgctgaaatcgctcaatgatgtagatgaaacagtctgtattgatcctgggccacgcattgaagggtcatcatggcagttcgacagcgataaactgcaactgaatatctccattccccaaatctatatggatgcgatggcttatgattacatcagcccctcgcgttgggatgaggggattaacgcgctcaccatcaactacgatttttctggttcacatactctacgttcggattatggttcacaagagacagataccagttatctcaatctgcgcaatggactgaatattgggccgtggcgattacgcaattacagcaccttaaatacgaccgatggcagtgcagaatacaactctataagcacctggatacaacgtgatatagctgcgttaagaagccagattatgataggtgatacgtggacggcgagcgatatcttcgacagtacgcaaattcgtggcgcacgcttgtataccgataacgatatgttgcctgccagccaaaacggatttgcccccgtagtgcgtgggattgcaaagtctaacgccactgtcattattcgccagaatggctacgtgatttatcagtcagccgttccacaaggtgcttttgaaattaccgacctcaacaccgccagtacaggtggtgatctggacgtaaccatcaaagaagaagacggtagcgaacaacgatttactcaaccttatgcgtcgttagccatcctcaaacgtgaaggtcaaactgatgttgatgtcagtgtgggagaattacgcgatgaagatggctttacccctgacgttattcaggctcagatccttcatggttttccctacggtttcaccttgtatggaggtatgcaggctgctgaaaagtatggttctgccgctttgggtgtcggtaaagatcttggcgcattgggcgcaatttctttcgatgtgacacatgctcgcgcgaaatttagccatgatgatacggaaaccggtcagtcttatcgcttcctgtactcgaaacgctttgacgatacggataccagcttgcgcctggttggctatcgttactccaccgaaggttattataccctcaatgaatgggcgtcccggcgtaataatcctgaagatttctgggaaaccggtaaccgccgcagccgtgtggaaggaacgttaacgcaatcactgggcagagattatggcaacttatatctgacattaagtcgccagcagtactggcataccgatgatgttgaacgattaatgcaatttggctacagcagtagctggaagcgtctctcgtggaacgtctcctggagttattccaatactgcccggcaggggacggggaacaaccatgccagtgataacaccagtgagcagatctacatgctctctttatctgttcctttatcgggttggtgggggaatagttacgccacctattctgtttcacaaaacgataattccggtagctcacatcaacttggactcagcggtacggcgctggaaagaaataacctttcctggaatttaatgcagtcctataacagccatgatgatgaggttggcggtaatatgtccctgacctatgatggcacttatggcacggtgaacggcagctataactacagccaaaattctcagaggctgaattatggtatcagagggggaattctggctcacagcgaaggcgtaacgttaagccaggagttgggtgaaaccattgctcttgttaaagcaccaggggctgccgggttagaaatagataatatgcgcggtgctgcgacggactggcgcggctatacggtcaagacacagctaaacccttatgatgaaaaccgggtagcaatcagcgataactatttctcgaagtcgaatatagaacttgataataccgtcgttacgatggttcccacgcgtggtgcagtggttaaggccgaatttgttactcgtgtaggttatcgtgtgcttttcagagtggcgggtacacaaggtaaaccagcaccttttggcgctattgctacagtacaaaatacaagctccgctgattcaggaattgtcggtgaccagggggagctttatctttcgggccttcctgaaaaagggcaggtgatgctctcctggggagaaaatgtcgccactacatgcaccttcgattattcactttcaataccagaaagtgaaagcggcttaattgaacaaggtgtgacatgtcattaa

SEQ ID NO: 7108 - DNA, 1074 bp, Escherichia coli
atgaaaaagtatattatagagtggtgttttactgtttttctcctctcctttagtggggcaacacttgcaacccctaaaggtatctgtacccctgataatggtgcttttcatagtacgcttgatttttcaggttatctgattatggcaagccaaaaccaagtcggaacgatgtttaatactacagtcacaaatggagaaagttatcctgcacactgctattgtgatacaggaaatgtgggggagtttcctcatatttactatacagcaagaataaatgaagcattaagttatgcaggagttcgttctaatgttaattactataatctaaacccaaaccttgatgtaggcatatcaatagatattcttggtgtaggatttgttaatgccccttttgagtatcatgctaacattcttcccacctccgatatttataaatgtagtcgccaagagccattaactatttctagtggtgctaaagctatgatttatttttatatcaaaaagacatttgctgggaaggtaattatcccagaaacacttgtggcgaaattgtatggaactataagtcgtgatacgccgattgattattcacaaccgatggctggtgtttatattcgtggtgatatcactgcaccgcaaagctgtgaaattaacagtttaagacccattgattttgattttaaagaaattcctgcggcagatttttcatcggttgtcgggagtacggtgacaacgcataaaataaccaaaactgtcaccgtggagtgtgtaaatttaggtattctgaataccgatgatatcagtacgtctttttatgctaccgaacccagtactgataactcgatggttgtaacatcaaatcctggtgtagggataaaaatttacgataaaaataataaggaaatcaaagtcaatggtggcgaattgccgactgatatggggacaacaaccgtttatggcgagaaagtcggtagtgtcactttttctgccgctcctgcaagtctcactggcgatcgccccgctccaggtatatttaccgcgacagcaacgataacagttgagattgttcgctaa

SEQ ID NO: 7109 - DNA, 276 bp, Escherichia coli
atgataatcttgcgtattaatatttatattaaatactctactaacaataatgtctttattttcatctacagtaaattctgtagtcgtattaaagcgccattgttgatcttgatcggcgagagatttaactctattaaacatctcaactttatcatcagttttcgtcacaaaatctacaatggcttgtttagcctccttaatatgagacatgggaaaaagatcgagtataaactcccaaagacttcgtttaagaaaagattgactatcaccagctaa

SEQ ID NO: 7110 - DNA, 180 bp, Escherichia coli
atgaaactggccctgacgctggaagccgacagcattaacgtgcaggcactgaacatgggacgcattgtcgttgacgtcgatggtgttaaaatccgaccaacagtcaacctgcacactaccaccgtttgcaacccttgccggcatacgctgcagtaccgcacatatcacggaaaaggataa

SEQ ID NO: 7111 - DNA, 198 bp, Escherichia coli
atgaaatcattaaccacggaaaccgcactggatattctgattgcgtggctacaggacaatatcgactgcgaatcgggaattatctttgacaacgatgaggatagaacggattcggcagcactgttgccctgtatcgaacaggccagagaggatgtccgtaccctgcgtcagctacagtttctgcaacagaaccggtga

SEQ ID NO: 7112 - DNA, 843 bp, Escherichia coli
atgtctgaaatcacagcctctcgtccggaagtggtcaacgggcatacggacgttatctgctcaaccagtatccgccacattctggctgtacgaaagagtacattgctgcaaatcgacacacttatccgacaactggctgaaatatcagcaatgacagaaagtattagaggtaaaacggctctggactgggccatgaaacaggattttcgctgcggttgctggctgatggagaaaccggaaaccgcaatgaaagccatcacacgcaatcttgatcgcgaactctggcgtgatctgatgcaacgttccgggatgctgagtctgatggatgcgcagacccgggacacatggtacaggtcactggaatatgataattttccggaaatcagcgaagcgaacattctgagcacatttgaacaactgcaccagaacaaagatgaagtgtttgaacggggagtgatcaacgtcttcaaagggctgagctgggattacaaaaccaactcaccctgtaaatttggcagtaaaattatcgtcaacaacctggtgaggtgggaccggtgggggtttcatcttatcaccgggcaacagactgaccgactcgtcgacctggaaagaatgctacatctgttcagcggcaaaccgatccccgacaaccgggaaaacatcactattcgtctggatggtcacatccagtccgttcagggtaaagagcgctatgaagacgagatgttcatcattaaatactttaagaagggatctgcacacatcactttcaaaaggctggaactgattgacagaattaacgatataatagccaggtactttccttctgtgctctcagcctga

SEQ ID NO: 7113 - DNA, 291 bp, Escherichia coli
atgctacgattcatttcactcttcgttctttctgagcattgcgttcaggatggtcagcaatttacgcatacagtcaaccagcgccacttttttggtttttccggctgctggcagatgcatgtaaaacgcctttatcaccggattaaaccaggttaccacaaacgctgccatgtgcagggctgctcttgcctccgtacgcgcactggcgtcgttcggccagcagatatgtgtgggataacagggatgttatgtgaactgaactgtgttttgttagcgggggatgtttattga

SEQ ID NO: 7114 - DNA, 1209 bp, Escherichia coli
atgacaccttcaaattatcagcgtactcgctggctgacactcatcggtactatcattacccagtttgctctggggtcggtttatacctggagtctgtttaacggtgcgctttctgccaagctgggggctcctgtaagccaggttgctttctctttcggcttgttaagtctggggctggcaatttcatcttctgttgcgggcaaattgcaggaacgttttggtgttaaacgcgtcactatggcttccggcattttgctgggattaggtttcttcctgacagcacattccaacaacctgatgatgctgtggttaagcgccggtgtgttggttggtctggcggatggtgcgggttacctgttgacgctctctaactgcgtgaagtggtttccggagcgtaagggacttatctctgcttttgctatcggttcttatggtctgggcagcctgggttttaaatttatcgacacgcacctgctcgaaacggtgggtctggaaaaaacctttgttatttggggcgcgattgtactggtgatgattgtctttggcgcaacgttaatgaaagatgcgccgaagcaggaagtgaaaaccagcaatggtgtggtggagaaggactacaccctggcagagtcgatgcgtaaaccgcagtactggatgttagcggttatgttcctgactgcgtgcatgagtggtctgtatgtgattggtgtagcgaaagatatcgctcaaagtctggcgcatcttgatgcaatttccgcagccaatgctgtgacggttatttccatcgccaacctttctggtcgtctggtgctgggcattctgtctgacaaaatcgcccgtatccgtgttatcaccattggtcaggtgatatcgctggtgggtatggcggccctgctgtttgcaccattgaatgcagtgacgttctttgcagcgattgcctgcgtggcatttaactttggcggcactatcacggtgttcccgtcactggtcagtgagttcttcggcctcaataacctggcgaaaaactacggtgtgatttatctcggtttcggtatcggcagcatttgtgggtcgattatcgcctcactgtttggcggcttctatgtgaccttctacgtgattttcgccctgctgattctgtcactggcgctctctacgacgattcgtcagccagagcagaaaatgttgcgtgaggcgcatggctccctttaa

SEQ ID NO: 7115 - DNA, 876 bp, Escherichia coli
atgagaaagttcatccttatttctatgataacgttagctagtgttagtctgggagcctgcagacagaatgtcaccataaagcaggatgcgccagggcagaaagctttcctgactgacgggcagatttacgatttgcacagtggcaaaattatttctagcagcgagcttttggcggatcttgctaccgctcaacatcttattattggtgaaaaacacgataatgccgagcatcatcagattgagctttggcttattcaaaatttgctcatccagcgaccacaggggagtgtgttgcttgagatgttgacgtcagagcaacagccccgagttaaccaagttaaatgttggctgaaagataatcctgtggttcgaaatagccgtgttcaggaactacttaactggcaaaaagggtggtcctgggagatgtatggcgacatcgtcatgcagctattacgtgggccttacccgctgctcaatgccaacattggccgggagcagatattggcactgtacaaaaaaaacgaatttcctaaaggaaaaaaatccactgcacctgtggtacaagaagctctgcgtgaaaccatcatatctatgcatgaaggcaaccttgaaagccagcaactgacgtcaatgctctctattcagcagcagcgggatcgctacatggcccgccagcttctgagtgccccggtaccgtcgttgttgattgcaggtggttatcacgcgtcaaaaagcatgggcgtaccgttacacatggaagatcttgccaccggcacccatccagtggtgttgatgcttgcagaaaaaggaatgaacatcacagtagatcatgctgactacgtgtggtttgtagcgccagatacaacaaaaaggtaa

SEQ ID NO: 7116 - DNA, 510 bp, Escherichia coli
ttgatttataatacaattattattggcgcaaccctggcagtctctattgaacaaaagcaggtccgcttttctcctcggatagatgtttcttttaaaggtgtgataaaactagcagatggacggtgctatccctgttctgttattgatttctccgaaggtggcctgggggttattgttgatcacatctccgatgtaaaagaaatcgaaaaaactcagcatttgtctctttatctgagtgataataaaggggaatgtgatattcctgtaaaagttgttcatgcttacaaaaataaaattggtctgaagattttgccaatgacttatgaacaaaatattaattatgtcagagtaacattttcacgtgattcattatggcaagagtggaatgataaaattaagcaagataatatactaaagagcttttttgacgtatgtatcatctctcttaaagggtattacaatatgattttttatattctgcggacactaaaaaatagtcgtgagaattag

SEQ ID NO: 7117 - DNA, 2322 bp, Escherichia coli
atgtctcttgaaatttttaaaatggaaagaaaatatttaaaatttattactgcaataatttgcttagggtttttatggttataccaggcaaatgctgcatcagctttagataccataatccataagtctccctccgggatagtattacccgctatagagaagtctaacgtctctgtttatgcgaaagattcctcttatcattttaaacttccatttacacaaatatcaccagcgcctggtaacatcgttttgaatggtgtcaacccactggggtatattgaatttggtatgcgcagtgatgagatagtttcagatgcaaaactaaagcttgaatatactccgtcaccgtcattgatccccgttcagtcgcagcttaaagtttatcttaatgatgagttgatgggagtattaccgattaccaaagaacaactgggaaaaaaaacgttggcggaaataacgcttaacccattgtatttctcggattttaatcgtttgcgttttgaattaattggccattatcagaatagctgtgaaatctcaaccagcaataacttgtggcttgatattggacgtaacagtgaacttggtctggtcgtccagaaactcaatctgcaaaatgatctttcatattttcctgtgccattctttgatccgcgagataaccgtactaatacattgccgatggtttttgctggcccaccggaggctggtttgcagcaagcatctgcaattgtcgcttcgtggtttggttcgcaatcggggtggcgtggtcatcaatttccagttttttataatcagttaccggaaagcaatgctatagtctttgccactaacaatagacggccagactttttgcgtgatcatccgttggtgaatgcacctgttattaagatgattaaccatccacaaaatcctttcgtcaaattgttggtaatttggggccgcgatgacaaagatttattacaggcagcaaaaggtctcgctcagggaaatatactgtttcgcggcgatagtgtggttgtaaatgacgtgaaaccactgctgccacgcaaaccttatgatgcgccaaactgggttcgcactgatcgtcctgtaactttcgcagagcttaaaaactatgaaggacagttacaggcaagtgccctgcagaccgcagcaattaatgtttcattcaatttgccgcctgatctctttctgttacgtaatagtggggttgatatgaagattaactatcgctataccacgccaatggtaggcggttctcgtattgatgttaatcttaataatcagtacattgaatcttttcgcctaagtccgcgctcgactactgatcgactgctattacatttaccgttattgcaagaattgtcagatagcaataataaaattaccatttcggcgctgacattgggggcacttaatcaattacgattcaattttgagtacgttaatacgataccgagtactgatgacgggagttgtattatttcccggcctctgaataaccatgcagttattgctgatgattctactatcgatttttcaaagtatcatcactttatcgccatgccagatttacgcgcctttgctagttcaggctttccttttagccgtatggccgatttatctgaaacagtcatcgttatgcctgaacatcctggtacaacgcaggttgaaatattgctaaatacccttggattgattggtgctcaaaccggatttccggcaattaatctgacagttactgatgatataagctccatccagaataaggatgcagacatcctgctgataggggcaattccgcaagaatttgcaggtcagcagcaaattaatctgctcattgatgcaaccgctagttgggtaaaaacgccaatgcggcactctgataacgcacaaattatgacagatgaaaacaaccaaaaaactgaaacacaaacaagcatgatctctccatcgccaatggccgcggtggttggtttccagtctccatatcatccccaacgtagcgtaattgcattaatgaccgagggggcacgtggtgacgagttacttaataatgcgctaattaatagtgcaaaacgtggcaatatatttggctcagttgcggttattcgtgaatcaggtgtcgatagtttacgggttggagatacctattatgtggggcatcttccctggattgagcgcgcgcaatatatgttagcgaaacatcctgttttgctggcaggaatggcaatgctgagtgtggtgcttctggcgtgggtcgtctggcgtctgctacgcatcattagccatcgtcgtctgaatcctcatcaacagtaa

SEQ ID NO: 7118 - DNA, 3108 bp, Escherichia coli
atgcacaaattcaccctaaatttactcaccatatctcttggtttggcggtaatgtcgatggcaaaagccacgccaactgcttatcaactgctgatggcacagattcgattgggagaagactctcaccgtgaagaactggtggagcagtcgctttatcgccttgaattggtggagcccaataatcctgatgtcgttgcggctcggtttcgctatctgcttcgcaagggggatattgacggagcacacaaacaacttgccagactttctctgatcgccccagattcaaaaatatataaagcatcgcgtacggtcatgcgactttcttcgcttgaggggcgccaggcattgcaaatggcgcgtttacaagctatctccgggcgatacgaggaggctattgtcagttatgacaagctatttaacggagtaccgtcagatgtcggcatggcgttggaatactggagtgcagtggcgcaaattgcatctcgtcgcaacgaggcaattagtcagttgaaaaaacttaatattgataacccaaactctggtgcaatattgggggcgctgggccaggcttattcacagaaaggcgatcgcgcgaatgcggtggcaaatctggaaaaagccctcgcgctgggcccgcacagcagcaacaacgacaaatggaacagtttgctgaaagtgaaccgttattggctggcgatccaacagggcgatgccgcactgaaagcgaacaatcctgatcaggcggaacgcctgttcctgcaggcacgcaatgtcgataacaccgacagctatgcggtgctggggctgggtgatgtggcaatggcgcgaaaagattaccccgccgccgaacgttattatcagcagaccctgcgtatggacagcggcaacactaacgccgtgcgtggactggcgaacatttatcggcagcaatcgccggaaaaagctgaagcgtttattgcgtcactttctgccagccagcggcgcagtattgatgatatcgaacgcagtctgcaaaacgatcgcttatcgcagcaggcggaggcgctggaaaatcagggtaaatgggcgcaggcggcagcacttcagcggcaacgactggcgctggaccccggcagtgtgtgggtaacttaccggctttcgcaggatctctggcaggccggacaacgtacccaggctgatacgttaatgcgtaacctggcgcaacagaagccgaacgacccggaccaggtttacgcttacggactgtatctctccggtcacgatcaggagcgggcggcgctggcgcatattaacaatctgccgcgcgcccggtggaacggcaacattcaggaactggtgaatcgcctgcaaagcgatcagattctggaaacggctaatcgcctgcgtgacagtggcaaagaacaggatgcggaggcgatgctacgccagcaaccgccttccacgcgcattgatcttacgctggctgactgggcacaacagcgacgcgattacaccgccgcccgcacggcgtatcagaatgtgctggcgcgggagtcgaataacgccgatgccattcttggcctgacggaagtggatattgccgcaggcgacaaagccgcggcgcgcagtcaactggcgaaacttcccgccaccgataacgcctcgctgaacactcagcggcgcgtggcgttggtgcaggcacagcttggcgataccgcagcggcacagcagacatttaacaggctgatcctgcaggcaaaatctcagccgccgtcgatggaaagcgcgatggtactgcgcgatggcgcaaaatttgaggcgcaggcgggtgaaccgcaacaggcgctggaaacctacaaagatgcgatgatcgcttccggcgtgacgacgacacgtccgcaggataacgacacctttacccgccttacccgtaatgatgagcaggatgactggctgaaacgtggcgtgcgcagcgatgcggcagatctttatcgtcagcaggatctcaatgtcaccctggagcacgactactggggatcaaacggcactggcggctattctgacctgaaagcacataccaccatgttgcaggtggatgcgccgtattctgacggtcggatgttctttcgcagtgatttcgtcaatatgaacgtcggcagtttctccactaatgccgatggcaaatgggatgataactggggaacctgtacgctgcaggagtgtagcggcaaccgcagtcagtcagactccggcacaagcgtggcggttggctggcgcaacgacacctggagctgggatattggcaccacaccgatgggattcaacgtggtggatgtggtcggcgctgtcagttacagcgacagtatcggcccactcggctataccgttgacgcacatcgtcggcctgtctccagctcaatgctggccttcggcgggcagaaagattctccgggcaacaccgggaaaaaatggggcggcgtgcgtgccgacggcgtggggctaagtctgagttacgataaaggtgaagcaaacggcgtctgggcatcgcttagcggtgatcagttaaccggtaaaaatgtcgaagataactggcgcgtgcgctggatgacgggctattactataaaattatcaacgagaataaccgccgcgttaccattggcctgaacaacatgatctggcattacgacaaagacctgagtgagtactcactgggtcagggcggttactacagcccgcaggaatacctgtcgtttgcggtgccggtgatgtggcgcgagcggacggaaaactggtcgtgggagctgggggcttcaggttcatggtcgcactcacggaccaaaaccatgccgcgttatccgctgatgaacctgatcccgagcgactggcaggaagaagcagcacaacaatccaacagtggtagcagcagtcagggttttggttacacggcacgggcattacttgaacgtcgcgtcacgtccaactggtttgttggtacggcgattgatatccagaaagcgaaggattatgcgccaagtcacttccagctctatgtacggtattccgccgccggatggcagggcgatatggatttaccgccacagccgctgataccttacgccgacgggtag

SEQ ID NO: 7119 - DNA, 354 bp, Escherichia coli
atgatgccacgacgcagcgatattgaaatagcctggtattcttcgatacagcaagagccgaatggccggaagaccgtcactacacagcgatttgttcaggggttgagcaaagttaactgggaattctcactcaaagatgctaatgcctggatcgaatccagcgtgagcacttttaaatatttatcaatggtagagggggaagaacgcactttcatgctctatagccttgatttatgcgatgcacatttccacaacctagtcaggacaacctcttttctaataaaatgtagatgcctaattttaggcgtctacataattaatgatgatttattacaattattttctagatactaa

SEQ ID NO: 7120 - DNA, 1794 bp, Escherichia coli
atgagtatcggtttgagcaaagtcgttacaagatataaaaacttaaagttgaaatcatatgttttcgacattgtcaacgttatgtttttattgtacttattttgttttctaaatcagtcaatagttatcataggaaatattgaaccgcctaaagagttaattggtgcaatattgaatttcatctggcgttcatcccccattttgtttatttatttgttatttagaataataaacattccaatttttctatgttcttatttatcaggcatcgcaattataacattgatgtttgtgaacagtactaaaatggcgttaaccggtgagcctttatcatttaatgacattgtttctggattcaatttgagtgtcgcagggaaatacctcaacttatcatccattacttactctgtcgctattctaattggcgcaataatctcaatcctacttagcaaaaaaacggtcacaacaagaaaaaattatatatcgttatttcttttaattatcattacgatccccttttcattctacccctatattggaaccatttttagccctaacaataggatttctgaaatcataaactccagcgcgaacaacttaaatataaaatatatttactggaattggtctcaaaatattggcgttaatggcttgccaatgcatataatacaaacaagtgtcagaaaatctgtaccacatgcaactgatgcagaacaattaagatatttagatgaaaaaagatctttagtatccactcatataaaaaataaaaccattatttatgttttatgtgaatcatgttggtatgataaaaaaaacttccgagaaaatttcaaacctgttattgatgaaggttacagtgaattacgggccatctcaccagtttacggtggaggtaccgcaaatgccgaatttgaaatgctgacaggactaccaagtaattcagataaaatatcaggaatcatctatcaagaatattcagatgcattcaaaccaaaagttgacgcattacctaatgccctgaaaaacaaaggctatattactttcgcagcacataattaccaagcagacttttggtataggaataaaatttaccctaaatttggatttgatagatttgatagcattattaatatgggagatttaccaccagagtatagcagtattaaaaaaccatggcagtggcaacctgatgactacctgctttacaatgcagcattaaaagccatccaaaatgcaggaaacaaagatatttttgtacatttgatcactatgtcaactcatggtccttatcaacacattaatgattatggtgaaggtgtttatacctatgagattaatgaggcagtcaaaagattcgttcaattttcacagcaagtagaaaaaatagttccaaatgctgtaatcgtcttttacggtgaccataaaccaccactaaataaatatttcgtcgaaaatggggtgctaccaagtaatattttcaacaaaatcggagaagaaaaagatgaagatttcgtctttaaaatgagcacaaccccactcgattttggtgatgttcctgtgcttattaaatcaaatgataaagacgccattaaaaaattcataaccgacgccaatggaaaaccttttttctgtgtatcttcattagttgataaacatttcattcaatctggattggtatcatttaatcacaacgcaaagcatgtctgtgaaaacagtgataactttaattatgataagttaattaacatgaccccgtcgtggatttattcaatgtcattatttcacgattag

SEQ ID NO: 7121 - DNA, 258 bp, Escherichia coli
atgtgcggacgcttttcacagtcaatgacgcgtgaagactatctcgcccttctcgcagatgaagtcgagcaagacattccatatgaccctgaaccgatcggacgtttcaacgttgcgccaggcaccaaagttctgcttctgagcgaacgtgacgagaaactccatcttgatccagttttctggggatacgccccggatggtgggataaacctggatttttacacataccaaagacagattagatactctactaattag

SEQ ID NO: 7122 - DNA, 1473 bp, Escherichia coli
atgtcccgaatggcagaacagcagctttatatacatggtggttatacctccgccaccagcggtcgcaccttcgagaccattaacccggccaacggtaacgtgctggcgaccgtgcaggccgccgggcgtgaggatgtcgatcgcgccgtgaagagtgcccaacaggggcaaaaaatctgggcggcgatgaccgctatggagcgctcgcgtattctgcgtcgggccgttgatattctgcgtgaacgcaatgacgaactcgcaaaactggaaaccctcgacaccggaaaagcatattcggaaacctcaaccgtcgatatcgttaccggtgcggacgtgctggagtactacgccgggctgatcccggcgctggaaggcagccagatcccattgcgtgagacgtcatttgtttatacccgccgcgaaccgctgggcgtagtggcagggattggcgcatggaactacccgatccagattgccttgtggaaatccgcaccggcgctggcggcaggcaacgcgatgattttcaaaccgagcgaagtcaccccgcttaccgcgttaaagctggccgacatttacagcgaagcgggcctgccggacggcgtatttaacgtgctgccgggcgtaggtgcggaaaccgggcagtatctgaccgagcatccgggcattgccaaagtgtcatttaccggcggtgtcgccagcggcaaaaaagtgatggctaactcggcggcctcttccctgaaagaagtgaccatggagctgggcggtaaatcaccgctgatcgtttttgacgatgcggatctcgatctcgccgccgatatcgccatgatggcgaatttcttcagctccggtcaggtgtgtaccaacggcactcgcgtcttcgttccgacgaaatgcaaagccgcatttgaacaaaagattctggcgcgcgttgagcgcattcgcgcgggcgacgttttcgatccgcaaactaacttcggcccgctggtcagcttcccgcatcgcgataacgtgctgcgctatatcgccaaaggcaaagaggaaggcgcgcgcgtactgtgcggcggcgatgtactgaagggggatagcttcgataacggcgcatgggttgcaccgaccgtgttcaccgattgcagcgacgatatgaccattgtgcgcgaagagattttcggtccggtgatgtcgcttctcacttatgaatctgaggacgaagtgattcgccgcgccaatgataccgactacggcctggcggcgggcatcgtgacggcggacctgaaccgcgcgcatcgcgtcattcatcagctggaagcgggtatttgctggatcaacacctggggcgaatcccctgctgagatgcccgttggcggctacaaacactccggcattggtcgcgagaacggcgtgatgacgctccagagttacacccaggtgaagtccatccaggttgagatggctaaattccagtccatattctaa

SEQ ID NO: 7123 - DNA, 1089 bp, Escherichia coli
atgaattcatgtgattttcgtgtttttctgcaagagttcggtacaacggttcatttgtcattgcctggtagcgtatccgagaaagaacgactgctactcaagctgctgatgcagggaatgtctgtaacagaaatatcacagtacagaaatcgcagtgcaaagaccatttcacatcaaaagaaacagctctttgagaaactggggattcagagcgatattactttctggcgggatattttctttcagtacaatccggagatcatatccgccacgggtaataatagtcacaaatatattaatgataatcactatcaccatatcgtcacgcctgaagccatcagtctggcgttggaaaaccatgaatttaaaccgtggatccaaccggttttctgcgcgcagactggggtactgacgggctgtgaggtgcttgtccgctgggaacatccacaaacgggaattatcccaccggatcagtttattcctctggcggagtcatctggtcttatcgtcataatgactcgccagttgatgaaacagactgcggatattctgatgccggtaaaacatttgctgccggacaatttccatattggcatcaacgtctcggcgggttgttttttggctgcgggatttgaaaaagagtgtctgaacctggttaagaaattagataacgataaaatcaaactggttctcgagctaacggaacgtaaccctattccggtaacgccagaagccagagcgatatttgacagccttcatcagcacaacattacctttgcgctggatgactttggtacgggttatgcgacctatcgttacttgcaggcgttcccggtcgattttattaagatcgataagtcatttgtgcaaatggcgagcgtggacgaaatatccggtcatattgtggacaatattgtcgaactggcgcgtaagcctggtttgagtatcgtggcggaaggggtagaaacccaggagcaggcggatttaatgatcggtaaaggcgttcactttttacagggctatttgtactctccgccagtaccgggtaataaatttatctctgaatgggtaatgaaagcaggtggttga

SEQ ID NO: 7124 - DNA, 1260 bp, Escherichia coli
atgccagcaaccaggcttaaaacacttaagcttaaagatggttataaagataatcaaagactcggctttaaacgtgtctattttcccgaattgtatgaagttcctgctgattttcaggggaaaattaagcagccgcatattaagctggacttatacccgaaacttgagtcgattgataccagcagaaaaggggacaatactccggttaacgtgcgcaatgaagcgaagttagattataaaatcattagtgcatttgattttgatcggctttatctcgccattcagaattataaactacaacgcggctggtcaaatttacgtgtggataaacaacgtttgatcgacttttgtaccggtaagacaaagatcggaaatagttggtatacccttttgattccagcttcagagcttgagattaagcaatatgcagatattgctaagcaggaagatattatgcttcgtctgctgactgattatactgatcgcttttacaacaccttgaaaaatgcttatgaaggtcagttttatgaagtcacgcaggtgaaagaagatgatcctggtatgatcaaaatgtaccatttcgagatcgaagaaactgatgatgggttggcttatgccagtcggctggaacaattacaacaattggtcatcgacggcgaaatcggtaaagcaaaatcctggagtgcatccgggatggttgctattacctttgataaacatctctattacccgcttctttcgattgaaaaaaatgccaatataccgctaaaaatgcgaccggcagcacttggtgcgccaagcgagattacttttgttcaggatcttcagtcttttgttgattcgacaaaagggcagaaaattattggtgataaaagtttatatctgctaagaaatgcggattctaaaaataaaggcctgggctttgctactgcgggtaatttttatccggatttcttattgtggttagtcgatgataaaagtggtaaacaatggctaagtcttattgatccaaaaggcattcgcaatcttaatcttgatgatccgaagttcggattatataaagaaattaagaatcttgaacataaattatcggatgataacttatcattaagtgcatttattgtttctgaaacttgttatgttgacttagtaaacgtacctgactcaaaagaaaatctggaagccagaaatgtgctttttattgaggatacaggccccgtttatctggagaagttattcagtaagatggttagcgagtaa

SEQ ID NO: 7125 - DNA, 303 bp, Escherichia coli
atggaattgttaaatacttatgatgataaagaaacagctgaaatattttttgaaaaaatagacggagagaaaagattagcaagtgagagagatgctacagaaacagtctataacctcttcgggcaaccaacatggaaaaacttttatcttcttgatatgtttaacctaaaagagttacaagggattatagagtgtagaaaaaatggacagccgttcgaccaggaacgacacagggaaataataaaaatgcttgaatatgcagcaaaatcgtttgacctaattattcctgcacattggcgataa

SEQ ID NO: 7126 - DNA, 981 bp, Escherichia coli
atgaacgcaataatatcgcctgattattactatgttcttaccgttgctggtcagtctaatgccatggcgtatggcgaaggactgccattaccggacagggaagatgcgcctcatcccagaattaaacaattagcgagatttgcgcatacgcatcccggaggcccgtcatgtcactttaacgacattattccactgactcactgcccacacgatgttcaggatatgcagggttatcaccatcctctggcaacgaatcatcaaacacagtacggcaccgttggccaggcactgcatattgcacggaaattactgccctttattcctgataacgcaggggttctcatcgttccgtgttgccgtggcggatcggcttttaccgcgggcagcgaagggacatattcagaacggcacggagccagccatgatgcttgtcgttggggaacggatactccgctataccaggatttagtcagcagaacgcgagccgcactgacaaaaaatccgcagaacaaattcctcggcgtatgctggatgcaaggcgaatttgacttaatgaccagtgactacgcgtcacaccctcaacactttaatcatatggttgaagcctttcgtagggatctaaaacaataccattctcagcttaataatattactgatgcgccctggttttgcggcgataccacctggtactggaaagaaaatttccctcatgcgtatgaagctatttatggcaattatcaaaataatgttttagccaatattattttcgtcgacttccagcaacaaggtgaaagaggactgacgaacgcgcctgatgaagacccggacgatttaagcacgggatattacggttcagcgtaccggtcaccggagaactggacgacggcactgcgaagcagtcatttcagcgcggcagcccgtcgagggattatttctgacaggtttgtagaagcaattttgcagttttggcgcgaaaggtga

SEQ ID NO: 7127 - DNA, 1659 bp, Escherichia coli
atgaaaatagtgattgttggtggtgttgccgggggagcatccgctgcagccagggctcgtcggttatcagaggatgtcagtattgttgtgtttgagcggggaagcgatgtttctttcgccaactgtggattgccttatcatataggcggaaaaattccgttacggcagtcgctgattctgaaaaccccggaggattttaaatcccgttttaacatagacgtccgtatccgtcatgaagtgatgtcagtagacccggttaataagatggtgacggttaaaaatctgacctccggggaggtctataccgaagaatgggatcgtctgctcctcagtaccggtgccgctccggttgttccccccttgcccggactacaggaagcgggtgtctttacactgcgaaatcttactgacatggatgctatccaggcgtggattgagcaacataatatcgctcacaccacgcttgtcggggggggatttatcgggctcgaagtgatggaggcactgagcgaaagggggatcagtgtgaccctgctggagatgggggaacaggttatggctccggttgatcctgaaatggcatcggccctgcatcaggaaatcaggagtcatggcgtggatctgcgtctcagaacggcgctcaccgaggtactgcggacagagacgggattccgcgttgcactgtctgacggtgggtttctgcagaccgacatggttattctcgccatcggggtaaaacctgagagcagccttgccacaggagccgggctcgccgtgggtaaacggggaggcataagtgtcaatgcctgtatgcagacaagtatccctgacatctatgccgtgggggatgcagttgaaacacctgaccttgtctttcaggaacccgctaatgttcctctggcagggccagccaaccgccagggacgcattgctgctgataatatgctcgatcgtcacagcctttaccatggcagtcaggggacatccatttgtaaggtattttcgctgagtattggcagtgtcggggcgaatgaaaagcagctgaaagcccatggtacccgatacgagaaggtttacgtccatgccgctgatcatgccagttactacccgggggcaacaatgatcagcctgaaactgctgttcagccccgataccggtaaaattctcggggcccaggcgtcagggaaaaaaggggttgataaacgcatcgatgtcctggctgtcgtacagcgcgcggggcttaccgttaacgatctcgagcatctggagctgacctatgctccgcctttcaacagtgcaagggacgtcgttaaccaggctggaatggtggcggcaaatgttatcaagggcgatacggtcatctgtcatgtccgcgatgtgttacaacgggaaccgggcagttattgtttacttgatattcgttcttctgcggaactgaaacaatttggtgaatatcctgacgcgctatccatccctcttgattccctgcgggagaatcttgataagttgcctgaagataaagagattattatcgggtgtcagagtggtctgcgggggcatgtggcataccgtatgcttcagtctcacggcttccggacatataatctgagtggtggctttataacttggcaggcggttacggaatcaatgagtcaataa

SEQ ID NO: 7128 - DNA, 342 bp, Escherichia coli
atgaatgaagacacaaaacgtcagactgatatgaaaaatgcagccctgggggcagcagatgtcctacggggactggccaacagcgaccggctattgttgatgtgtcagttaagccagggggaagcgaatgtgaccgagctggaagcggcggtcggtatcactcagccgaccctgtctcagcagttgggtgtcatgcgtcgcctgaagctggtcgagacccgacgggcaggtaaaatggtatattaccgtatcggggataaccgcatcatgacgttgttgaataccttatatgatctctactgcccgcagtcggaccccgacaaggtcaaaaaacaaccttaa

SEQ ID NO: 7129 - DNA, 534 bp, Escherichia coli
atggccagcacagaagaaaaattactcacgctcctgttatcggtggagcatctgcaacataccgcaatggagcaacagaaagctgttgctgattctctggctgtggcaagggaaacacttcgcggatatcgggatatttctgacggtgtggcaaaacaggtcagggatgaagtcagaaacgaggtgcagaagctggacgtagcagggctgataggtgagcgcatcagccatgattttcagcggctggaagagtcagtcgcaaacatgaaggtaaacgcggatgccctgaacagggatattgcgacaattcacagcaatatcgtgcaggaatacaacacccttaaagggtatagctggaaatggctgggtggggtgtcagtggcttttctggttatgttctgtgtgctcggatggggaatgaaaacaatactcgacaggaactacaacgccacagcggcggtgtatcagaaagttgtgacactggaagataaactggcggagaaacctgtcacgggtaagagccggaaaaactga

SEQ ID NO: 7130 - DNA, 927 bp, Escherichia coli
gtggcaacctatcacctcagcgttaaatttggtggcaaggggcaggctgcaaaccacgccgattacatcgagcgcaaagagaaataccgcgaccgtcaggatttggaatattccgcacacggaaacatgccggaatgggccagggataatccttcccatttctggcaggcggctgaccagtttgaacgtgcgaacggttcgacctatagggaacttgaaattgcattaccccgtgaactgacaccggaacagcgccttgaactggtgcaggattttgtacgtcaggaagctggcgaacggcacgcctggagttttgccattcacaatccgaaagcgagcattgacggcggcgaacagcctcatgcgcatatcatgatgagtcagcgtgtgaatgatggcattgaacgtacaccggaacagtatttccggcgctataacgccaggtatcccgaccggggaggtgcgaaaaaggattccggaaacctgacccccactcagcaaaaagagcagttgcgggaattgcgaaaacgctgggaggtgaagcacaacgaacatatgagaaagcatggctttgaaaggggcttcattgactgccggacactgaaagaacagggcattgaacgacgtcccgaagtgcatctgggttttgaagctgccggacgacttgatgatgcccagcgtcatgacatcatgcaaaaacggtctgaaccggactattaccgccatcttgaacaggcgcgaatggtcgggcatgacatcagggaatggctggatacaccggttaagcaacatgaactggtcagaaggctgcaacatgatgttgcgcgggagcatggctttgacatgagagacggagtgagcagacaggagcgaactgaacctgaacgggttaaatcaccgtcacgtggattttctatgggattctga

SEQ ID NO: 7131 - DNA, 399 bp, Escherichia coli
atgcgcatcagcaacatcgaatggctgaagaaacggatcggattcatcaggaagctcggagaacagaccgcacgacagagacagattattgacctgctcgacaacgaagccggactcacagaacaggaacgcaaacttctccgcgtactggcaacagcggaaaaaaacgacttacaggcacaggagagcgaacgaaaacaggcggtccaaaaacgaatcgagggaaaaaaacaacgacgggaacgcaatcaccggctctttctcgcggctgggctactgatcgaagcaggactggtagacacaaaaacaggcgagctatgctataaaaaagacaggatattacaagtacttaaggaacttaagtacgatctggagacatccccaaacccagacgcgtaa

SEQ ID NO: 7132 - DNA, 915 bp, Escherichia coli
atgagcgccgcgcttcaatacttcgaagaaaatttacccctccgcccctatcacacggatgatctcgctttcggccttcgtatctccggtaaagggcgcgcgcttcttgcacggtatatccagcagaaccagcctcatgcacagttctggctggtttttgacgttgaccgcgagggggctgcgattgactggagcgaccggaacgcccccgcgccgaacatcaccgttaaaaatcctgtgaacggacacgctcacctgctctacgcactcaacatcgccgtgagaaccgcgcctgatgcctcggttaaggcgctgaaatatgccgcagcggttgaacgttcgctgtgtgagaaaatttgtgctgatgtgaactacagcggcctgatttgcaaaaatccgttccacctggaatggcaggtgatggagtggcgagaggaagcctataccctcgatgaactggctgattatctcgatttgagcgcctcagcgcgtcgtagcatcgataaacattacgggatggggcgaaactgccacctgttcgaaatgacgcgcaaatgggcttacagggcgattcgtcagggatggccagcattctcacagtggcttgatgcggtgattcagcgtgtcgaaatgtacaacgcatcgcttcctgttccgctttcaccagctgaatgccgggctattggcaggagtattgcgaaatacacgcacaggaacttcacgccggaaactttcgcacagtatgtggctgatacgcacacaccagaaattcaggctgcacgcggtcgcaagggcggttctaagtctaagcgcagcacagtagctacatctgcacgcacgctgaaaccgtgggaggcattagggatcagtcgcgcctggtattaccaactgaaaaaacgaggtctcgtagagtag

SEQ ID NO: 7133 - DNA, 858 bp, Escherichia coli
gtgattgttctgattaaaattaatgccttccgcccgccgcatctgcgccggacttccggcaccgccgacataaccaccttccgcatagccccgcatcaggcggtacagattgccgacaccaatccggctggtcgcctccttcgtgaagacaaactccccgcgatgaacaatccccgcaggttcatatttaccccccgtccccgtaaatcccccggtcgcgaaatggaagttcgccgccgcagcctgaatggccgtccccgtggaggcagacgcaccaccaccgaaagcaccgccaatggcgctgccgatactcccgactatccccaccatcgcctgcttcagaaaaatctctgtcagcatggacagcacagaacgggtgaaaccacgccagttctgttcgctgccggtcagcatcgctgccatattctgtgcaataccgtcaaaggtctgcgtggccacgcttttaacctgcgaaaaactgtccgtcgcactttccgcccactcgccccagccggacttcatcccggccatccagcttccacgaagctgctcctccgcagaccaggtgttcttcagtgcagatgtggccttcgccagcgcagccggattatcaccgtacacctcacgaaggcgctgctcttccgactcccgctgcgcctgacggtcggtgagtccgcgggcttttgcgctgattgccgcctgcttcgcgctctgctgctgttcaaaccgcgccgcctgctgtgccagctcattcagccgtttctggtgttcaatcttgtcgcccagctcagccagctggcgtttgtactccagcgtctctttctcatgagccagcagggatttttcctgctcagataa

SEQ ID NO: 7134 - DNA, 354 bp, Escherichia coli
atgcgtgattttgagaattcctttgatgctgcccttgctggggtggacagaacgattgttgaagtgatggggctctgtgcgcagttcacctcgggggcacagtgtggcagcgaagttcagggggtttttgacgatccggagtcgctggggtttgccggtagcggggtccgtattgaaggaagcagcccgtcattatttgtgcggacggatacggttcgtgccgtgcggcgtggtgacacgctgaccattaatggtgagacattctgggtggatcgtgtttctccggatgacgggggtagctgttatctctggctcaaccgtgggcaaccacccgcagttaaccggcgacgataa

SEQ ID NO: 7135 - DNA, 369 bp, Escherichia coli
atggcaacaaaagaagaaaatcagaaacgtcttcgtgaactggctggtctgctggggcgcgaggcggatatgtcggggagtgctgcggatatcgcacagcgtgtggcagagtgggaagaggaggtttgcgcctcggaaaatgaaatcgcagatgttgatgataccgttcatgagcaggcatgcaggcacaccggtgaggatgacgttggtattctggaacgtatcaggcttctgaagtgtttttacctgtgcggtgttgacgataaaacaggtgagcctgttgagcatgttgatgctggcagagtaattctgatgcccccctcagtggcaaaagacatggtcaggagcggaatggccgtttatgcgtga

SEQ ID NO: 7136 - DNA, 423 bp, Escherichia coli
atgttcctgaaaaccgaatcatttgaatataacggcgtgaccgtcacgctttctgaactgtcagccctgcagcgtattgagcatctcgcctggttgaaagagcaggaaaaaaaggctgaatccagtggcaacctgcaggtgtctgtagaggatcttatcagaagcggggcgtttctggtggcgatgtctctgtggcataaccatccgcagaagacaaaactgccgtccatgaatgaagccattacgcagattgagcaggaagtgcttaccacctggcccacggaggcaattgctcaggctgaaaacgtggtgttacgtctgtccggaatgtctgagtttgtggtgaataatgcccctgaacaggcagatgacgccgggcctgcagagcctgtttctgcgggaaagtgttcgacggtgagctga

SEQ ID NO: 7137 - DNA, 507 bp, Escherichia coli
atggctgtaccgcctgacgctgatgcgccgccgccaatggcgctgcctatacttccgacaatccccaccattgcctgcttaagcagaatttctgtcatcatggacagcacggaacgggtgaagctgcgccagttctgttcactgccggtcagcatcgccgccatattctgtgcaataccatcaaaggtctgcgtggctgcactttttacctgcgacatactgtccgtggcgctctcttcccactcactccagccggacttcaggcctgccatccagctcccgcgaagctggtcttcagccgcccaggtctttttctgctctgacatgacgttattcagcgccagaggattatcgccatactgttccttcaggcgctgttccgtggcttcccgcgctgcctgccggtcagtcagcccccggttttttgcatcaatggcggcccgttttgcccgttgctgctgtgcgaatttatccgcctgctgcgccagcgcgttcaggcgctcctga

SEQ ID NO: 7138 - DNA, 312 bp, Escherichia coli
atgaacaagaaaaccaaacgtactttcacccctgagttcaggctggaatgtgcacagctgattgttgataagggctattcgtatcgacaagccagtgaggcgatgaatgtcggttctaccacgcttgagagctgggtacgtcagctcaggcgagagcgccaaggtattgcgccctctgcaacacccattacccctgaacagcaacgtattcgcgagctggaaaagcaggttcgccgactggaggaacaaaatacgatattaaaaaaggctaccgcgctcttgatgtccgactcactgaacggtttacggtag

SEQ ID NO: 7139 - DNA, 300 bp, Escherichia coli
atggattcggaaaatattgcagcttacgtcgggctggatgttcataaagaaaccttggcgattgctacacctgaatggcttggcgaagttcgttattatggtacgattaacaacgaagccttggctgtacatcgattatgtcagaaattgcagggaccttacggaaacattctttcctgctatgaaggtgctccctgtgggtttgggctatatcatcaactcacagtgatgaatataaaatgcctggttattgcccccttcccgtatacccaaatcaccggcagacaggatcaaaaatga

SEQ ID NO: 7140 - DNA, 132 bp, Escherichia coli
atgagcaatatcaccaggaatagtttagttgtagcaggcgttctggctgcgcttatggcagggaatgttgcgttggcatctgatgtgcctactgaagtgactctaatagaaaaacaaacgctgggtacgtaa

SEQ ID NO: 7141 - DNA, 1035 bp, Escherichia coli
atgcgtaaacataacgaaccttccctggaggcagaacgcgatgcgttgcgggaggaagtcgcccgactgaatcaggaaatacgccgccggcagatggagctggatattctgaaaaaggcggaggaaatcataaaaaaagacccgggcatcagtatcagtcacctgaacaacagagaaaaaacaaagatcgctgatgccctgagacaaacatatcccctgacagaattactgcatgttctgggccttacccgtagcagttatttttatcaccgggctgcactgaaagccggtgataaatacgccacgatacgtacgatgctgacagatatatttaacagtaattaccagtgttatggctatcgtcgcctgcatgcgatgctcaggcatgaggggggtcggctatcagaaaaggttgtacgcagacttatggtggaggaacagcttgtcgtcagccgtaaccgtcgtcgtcgctacagctcatattgcggagaaatcggaccggctccggataaccttatcgccagagattttaaggcggagcaacctaatcagaaatggctgacagatatcacggagttccaactccctgcaggtaaagtctggctgtcaccggtggtggactgcttcgatggaaaagttattagctggtctctcagtacacgccccgatgctgagctggtcaacactatgctggatagcgctgtcgaaacgttaaatgctggcgaacgaccggtgatacacagtgacagaggtgggcattatcgctggccaggctggctggaaagagtgaatgcagcaggtcttattcgctcaatgtcccgtaaaggatgttcacctgataatgccgcatgcgaaggttttttcggcagactgaaaacggaaatgtattatgggcgtaaatggtcgggcatcacgccagaaaagttcatgcagcatgtagatgcttacatcagatggtataacgagcggcgtataaaattatcgctgggtgcagtcagccctgaaatgtaccgccaacaatgtgggctggcataa

SEQ ID NO: 7142 - DNA, 930 bp, Escherichia coli
atgagcgccgtacttcaactcttcagggaaaaattaccgcacaaaccgtactgtacgaacgatttcacgtacggcgttcgcattctaccgaaagatatcgccatccttgcccgtttcatccagcagaaccagccacatgcgcagcactggctggcctttgacgttgaccggacgggggcagcgatcgactggagcgaccggaactgtccggccccgaacatcaccgtaaaaaatccacgtaacgggcacgcgcatctgctctacgcgctcactcttccggtgagaaccgcgccggatgcatcggcttcggcgctcaaatacgctgccgtgattgagcgtgcgctgtgtgaaaaactgggcgcggatgtgaactacagcggcctgatctgcaaaaatccgttccaccaggaatggcaggtggtggaatggcgttgggaactctataccctcgacgaactggcggattatcttgatttgagcgcctcagcgcgccgtcgcgtcgataaagattacgggatggggcgaaactggtatctgttcgaaaagggccgtaaatggtcttacagggcgattcgtcagggctggccagcattctcaccgtggcttgatgcagtgattcagcgtgtcgaaatgtacaacgcatcgcttcccgttccgctttctccggctgaatgtcgggctattggcaagagtattgcgaaatacacctaccgcaaattctctcctgaaggcttttccgcggtacaggctgctcgaggtcgtaagggcggtaatgcaaattcatcagaaaatcaggctattaaaggtcagaaatcaaagcgtgtagccgttgccacatcggcacgaactctgaagccgtgggtgacgttagggatcagtcgtgccacatactatcgaaaactaaaatgtgatccagatctcgcaaaatga

SEQ ID NO: 7143 - DNA, 447 bp, Escherichia coli
atgacaaatcgtgaagagtggttaagtgcaaaaattgcctatatcaacggactgaaatcaccgtcagagcagcaaagattacttgtgttactggcagagaaaaaaaaccgaacaacgacggatgaaaaaacgttgtccgcactgatacgggcagaaaaaaccgcagagaaagcagccgcagcaaaagccagggtaacggcaataatagcggcagaacggaaggcaaccgcaagggcggaacgaaaggcgcgggatcatgaactctacaaggccgcaggcctcatgattgtggcaggactggtggacagcaaaaccggaaaaccaaagtttagtgctgccgaactggtaggcgcactcgcaggaatcgcagagctaccgcgcaaccatccaaaatggcaggaatgggaaaaacgcgggaaagagctactcaccaaagacagtgcgtaa

SEQ ID NO: 7144 - DNA, 1086 bp, Escherichia coli
atggcaagctaccattgtacagttaaaactggagcaaaaggcgtagccttaaaacatgctgattatatttctagatccggcgaatataagaactacaaatcgcgggaggatctggaattttcgtcatccggtaacatgccatcatgggcgaagaaaaatcccgcagagctatggaaagcagcagatgaatttgaacgaaaaaacgggacggcataccgtgaaattgagatcgcattaccgcgagaactgacacgcgaacaacggatagaacttgttgaagatttcgtgcaaaaggagcttggtgatcgccatgcctatcagtacgcgatccacaatccgccaggtgcaatcgacggaaaggaacaaccacacgcacatatcatgttttgcgagcggattaatgatggtattgaacgcgatccgcagcagttttttaaacgtgccaacagcaaatcaccggagcggggaggtgcaaaaaaggcacgctttggtgagacaccacaagagcgaaaatcagccttggttgcgctacgttctcactgggctgatgtgcagaatgaacaccttgcgcggcacggccatcagtcgcgcgttgatcatcgttcactgaaagaacagggtatcaagcgcacaccggaagttcatcttggtcccgttcgtgttgctgttatgaatgctgatcaggtttgtgcaattctggcacggagaaacgcggaacgggagaagctagaagcagagcaggaacgggacagcatcattgaccttaaaacgaccttgaaggaagcgttagctgaacgggataacataccaccaagcctggatgagcttggggcagaattgaaggcgtttgttgaaagctcgtttgatgaactcaatgaggtaatgcagcttaattcattgattaacggtgcgctggactcaatgatgaagcaattccaggtggaagaggagcggaagttgcaacaggaacgactaattgaagccgaaaagcaaagagacctggagagggaaagagaaagagtgcgccagcgtgcgtattcctcaccagcaccatcacgttcacgtgattatggtatgagccgttaa

SEQ ID NO: 7145 - DNA, 717 bp, Escherichia coli
atgcaattggatgaacattcaagaaaaattgctgctcttgttgcgtataatgataaacaaataaaagaaatgaacaggctaattactctgcttaatgaaagagtgaatgacttaaatacctttacaagtactcttgaacgtgaaggtaaagttgtttctggaatttcttattcctttagggatagtgtgtctaatgttaaattttatattaataaaggaatggatgaggcatcttgtaaattacagaaatcagtctcagatacactaacgtcattactccgcgaaaaattatctttcactctcaatgatgtaaagaaagagtgggttgatttcgaggagcaaacaagtaaagagataaaggaatcattaaagcagacgaccagagaggccgaagttgcgacaggtataattagaaaaacaatggagaagtatacagtaacaaggattgtcgaaaaggtaattgtgttgattgtattatttttattgctaatgatcgctcctgttttctatgctgaatatctcaaaatgaatattagttcgctaatggaagaacagaaaaaacatgaatccatgttaaaagaatggaaagaaaaagctccattggccgagttctcgaagtgtggagattatcgtaaagcatgcgtgttagttgatgacgaaagcggatattattttaatgaacaatcaccaaataaaaaatatgccatactgaaatag

SEQ ID NO: 7146 - DNA, 573 bp, Escherichia coli
atggaatattcaacattattatcatttgctatcgtaaccttatcgcaaactatatcaatagggcctggcgttgcattggttataaacaatgccttttcacatggattaaagtcatcaataaaaacaagtatatacataagaattggcgagactatcgtcatggcaatatctcttttcgcgttatcctcaacatccagcacagaacaacattttcacattataaaaatattcggtggaggctatttaatatacataggattaatgggtttaattaataaaaaaaacaaacaaagaaaagagcaaaaaccttttttgataccattattaaaccccaaggcgtatcttttctttgctgcgttaataccaacctttatagataataatacaaatatcacattaaacttttttatattgggtgttttatttatatttatatcattcctaacagatcttatttacatagctattagcttaacgataagggataaattgacgccatcattctcaagatacataagcatatgtagttccatttttatattaggtacaggtatttattttatttttacgtga

SEQ ID NO: 7147 - DNA, 570 bp, Escherichia coli
atgacctacaaatacaaccccttctggcaacaacgcatccgtgagatggtgctgtgcgcactggatgttcatccccgcctgacggcacttcgggttgacctgcggctcccggatgtaccggcagcaacggacgcggcggtgatatcccgctttatcaatgccctgaaagcccgaatcaacgcttaccagaagcgtaagcgccgtgaaggtaaacgcgtgcatcccacgaccctgcattacgcctgggcccgggagttcggggagctaaaaggcaaaaaacactatcacctgctgctgctggtcaaccgggatacctggtgtcgtgcaggtgattaccgcgatccggggtcactggccgggatgattaaacaggcctggtgcagtgccctgggtgtggataccggagatcataccacgctggtgcattttccggtcaggccagcggtgtggctggcgcgtaatgatgacaccggctttcagcaggtgctggagcgtgctgactatctggcgaaggagagtaccaaagcttacggcaccggtgagcgcaactttggctgcagtcgtggctga

SEQ ID NO: 7148 - DNA, 384 bp, Escherichia coli
atgtacgcaaaatcttttctcgcacttgatggcaacggacgtctgaccggtgcccgtaccgcacagaccgcaccttatgcttactacacctgccacctttgcggcagtgtactcagataccacccgcagcacgacacggaacgtccctggtttgaacacactgacgacgggctgacggaacacggtcatgagtgcccttacgtacaaccggaacacagggaagtacagctgattaaacgtctgcagcaattcgtaccggatgccttacccgtggtgcgtaaagcctgctggtactgcagacaatgtcgccacgcttattatggggagcagtactgtacacactgccagaccggaggattcagtgaggaggcagtggcaggatga

SEQ ID NO: 7149 - DNA, 411 bp, Escherichia coli
atgaacggtataaaaacggggctggggatcacgccgggtgagcacattatcagtgccgacgctgcgctcagcagaaagatccggcattgtttctgcctttcctgtcgtggccgcttgattttgcagacagatgctcagggggcgtggtttgagcacgatttacatgccctgagcgagcaacagaaggcggactgtgtggtcctgaatccggaaaagtcccacccttacattgaggatatggcgatgtttttatcgccattaccagtcgtgctggagtggcattgtgtgatgtgcgacaagttttttcccgggaagaagttctgtgaggcctgtggtacggggatttattgcagagcggtatgtacaaagtatgtttacaggtaccggtcagatttgctgctggacccctga

SEQ ID NO: 7150 - DNA, 534 bp, Escherichia coli
gtgcagataaccgaagccttacttgcagagccgggagatatccggcgttttattcagcaggcggtggaccactggccgcgtctgctggcagtccacttcacactccattcggcagaaggaatcaacgggcaacagattcatgcattctgtactttcttttatgaacgtattactgagcgtaatcacacggccagtccatcctcaccggtggtgttacgctggttgcgggaacaacatggaggagcaacaatacgatgcctgttgctgctcagccagacgagcatttgccatccgcgggccagtgccacagttgatgaacaatgttcgcaagtggtggatttactgcaacagacctggggggagataagtgcaggcggacaatgccgggtggaaaggtgttatcaggttgcccgggatgatacatccggccagtacgttgcgttaaaaacagctgcgttatcatttgcgctgccggttgtgagcggaatcacgaagcacccggtgcagagtgctgctctggtttcctcccggtga

SEQ ID NO: 7151 - DNA, 525 bp, Escherichia coli
gtgggaacactgagcattgaccgtaaaccagagggaatttacaacaggtcacataaaaccgtgcagacaacaccacagccgggtaaaacagccacggaatataaagttaaacccgcatacctcacccggcagaatgataatcagaaggccgctgataaaacaccgtggcagaatatgacaaaacgccagcgtaaaaaccgcaagcgtataaatcgtcttgtggaactctggcctgagttattcagccgggaaaaaccaaaaccacttaaagtggggatattcgacgagctgatacaggatatcgccatcagagaactggcgtttggcgctggtacattacgcgcggcagtggcgtcttatgtgcagtctccgcgctattatcgtgcgttaatggcaggtggcgcccgttacgacctgaaggggcagccgtgcggggaggtgacgccacaggagcagaaagaggctgaaacccggctgatggcgctgaatgaccggcgtaaacgtccgcgtagtgcaacagaatga

SEQ ID NO: 7152 - DNA, 183 bp, Escherichia coli
atgcggcgtggacgtgtttttatcctttttccggctcacggtaacctgcctgactctcccgggttatttttcaccggaattattttactgatatcatgccccggcacaacagcacaaaatcacatgccggaacaggataccgtctccggtgagcatgagggacaataccagtgggaacactga

SEQ ID NO: 7153 - DNA, 219 bp, Escherichia coli
atgcagaaacgagaacccgtcatcatcgcgccagactataccgatgatgaactttatgagtggatgcgccagaaaattaatgcagcgcaggatctgaaatgggctaatgaagccagggctaagcaggctgaaaatctgtccgctctggagcaggatatcaccaatctggaaaaagcagcggcattaagcattgccagaatgattacatacccgcgttag

SEQ ID NO: 7154 - DNA, 129 bp, Escherichia coli
atggatttcgacacaatcatggaaaaggcttacgaagaatacttcgaaggccttgccgaaggcgaagaagctctcagcttcagtgagtttaaacaggcgctttccagttcggcaaaatctaacggctga

SEQ ID NO: 7155 - DNA, 156 bp, Escherichia coli
atggatactatcgatcttggcaacaacgaatctctggtgtacggcgtgtttccaaaccaggacggcacgttcaccgcaatgacgtataccaaaagcaaaacgtttaaaaccgaaaatggtgcccgtcgctggctggaaagaaactcaggtgagtga

SEQ ID NO: 7156 - DNA, 408 bp, Escherichia coli
atggaaacaaaaaatttaactatcggcgaacgcatcaggtatcgtcggaaaaacctcaaacacacccaaaggtctcttgctaaagccctgaaaatctcccatgtgtctgtatcacaatgggaacggggtgatagtgaacctacagggaagaacctttttgccctcagcaaagtattgcaatgctcaccaacatggattctatttggcgatgaagacaagcaaccaacaccacctgttgagaagccagttgccttatcccccaaagaactagagctccttgagctgtttaatgcactgccagaatcagaacaggatacccagctcgccgaaatgcgagctcgagtaaaaaacttcaataaactctttgaagaattactaaaagcccgtcagcggacaaataaaagataa

SEQ ID NO: 7157 - DNA, 231 bp, Escherichia coli
atgcttaaaactgacgctcttttgtatttcggttcaaaaacaaaacttgcacaagcagcaggtattcgtttggcttcgctttatagctggaaaggggatttagttcccgaaggtcgcgcgatgcgtctacaggaggcatctggcggggagcttcagtatgatcccaaagtttatgatgaatatcgtaagacgaagcgggcggggcggttgaacaatgaaaatcactcctga

SEQ ID NO: 7158 - DNA, 522 bp, Escherichia coli
atgaaaatcactcctgaacaggctcgtgaggctctggatgcctggatatgtcgaccaggaatgacacaggagcaggcgacgatattaatcactgaagcattctgggctttgaaagagcgcccgaacatcgatgttcagcgtgtcacatatgaaggtggcgcgattgatcagcgagcgcttggcgttaatcgagtgaagatatttgaacgctggaaggctatcgacaccagggataagcgtgaaaagttcacggcgctagtgcctgcaattatggaggctatccggattaatgatttcaggttgtatcgtgaaattactgacggaaaaagcatcacgtgcatgatcgccgggttaaacaaagaatatggcgatgtggtggagtccggactgctttttgctgatcctgccgtagtggatcgtgaaactgacgaacttatagaaaaagcaattgctttcaaacttgcgtatcgacagcaataccaacaaaaagctggatggaattatgagccttctttttgctga

SEQ ID NO: 7159 - DNA, 966 bp, Escherichia coli
atgagccttctttttgctgaacgcccactggttataaacacgcagctggcaatgaaaattggcttaaacgaagccattgttttgcaacaactgcactactggttgagagataccaactccggcatggaatgtgatggtgttcgctggatttataacacaacggaacaatggctggaacagttcccattctggtcagagtcaacgttaaagcgcgcgtttgcaagtctgaaaacgctggggcttttgcgttgtgaaaagctcaataaatcaaagcgcgatatgaccaatttctacacgatcaactatgggagcgagcttttagatggtggcaaattgagcgaatccatcggttcaaaatgcgccgctccatcaggtcaaaatgacacgatggaagaggtcaaaatgaaacgctccattggttcaaaacgacccaatgtcatcgggtcaaaatggcctgatgatcttacagagaatacaacagagattactacagagaataaaaacacttttcgtccggaagcttcgcaaccggacccgcagacgactgaacaggattttttaacccggaactccgacgcggttgtgtttagtgcgaaaaaacgccagtggggtagcagggaggatttggcgtgtgcgcagtggatctgggggcggatcgtgggtctctacgaacaggcagccagtgatgatggcgagatcatgcgaccaaaagagcctaactggactgcctgggccaatgacgtgcgcacaatgcggatgctggatggcagaagccacagacaaatttgcgaaatgtttggtcgggttcagcgagatccattctgggtaaaaaacatcatgagcccgtcaaagctccgcgaaaaatgggacgaactggtcatccgcctgggacgttcacctgtacagcgttgtgttaatcatatttctgaaccggatacagaaattccgcctggtttcagaggataa

SEQ ID NO: 7160 - DNA, 423 bp, Escherichia coli
gtggcaaaagtttttacacaagaagagcgggaaaaaattaaatggcaggtggtggaactcgtgcgccagagcggccgtgagacgttacggcaactggaagctaaaacaggtgcgactagatatctgatgagcgttcttgccagagagctggtagccagtggcgatgtatacaactccggctacgggttattcccctctgaacaggcgcgtaaggactggcaaaacgcccgcaaaaaactctcgagggcaaaggtgaagaaacctgctgtggttgatccggaccttatctggtcatcacctgacggagaaatacgtcgctacgacagtcgcctaaacataatctgtcgcgagtgccggaagagcgaagttatgcagcgcatactggctttctatcagggtaattttcaggacgtggcgcagtga

SEQ ID NO: 7161 - DNA, 357 bp, Escherichia coli
gtgagtgcaccggcaaccattcttgatatgtgctgtggcagccgcatgttctggttcgataagtctgacgaacgggcgatattcagcgatatcagaaaagaaggatacacattacgcaatgggagacgcttgattatcagccctgacattatcgcagattttcgtgcattatcatttgcagacgcatctttttcgatggttgtattggaccctccgcatcttgagagtgttggtgataacgcctggatgggaaagaaatatggacggctgaataaagatgcctggcgtgatgattcgcgacagagatttaaagaagcctttcgggtgttgaggccgcacggcgttctgattttttaa

SEQ ID NO: 7162 - DNA, 858 bp, Escherichia coli
atgatggcattattactggagccactgcagttcacctttatgagtcacgcactgctgatttcactggtagtttccataccctgtgcgctgctgtcggtctttctggtcctgaaaggttgggcactgatgggtgacgcgatgagtcatgcggtttttcctggaatcgtgcttgcctggattctggggttacctttggctacaggggcattcgtcgccggagtattctgcgcggtggcgacgggatacctgaaagacaacagccgaatcaagcaagatacagtgatggggattgttttttctggcatgtttgccgcaggtctgatcttgtatattgcagtcaaaccagacgtacatcttgaccatattcttttcggcgacatgctcgggataaccatcggcgatataatccagacgatgattattgccgggctggttacacttgttattagcgtaaaatggcgggattttttgctgttcagctttgattatcaacaggcgcaggtaagcggtttgcatacgagatggctgcattatgggctgctgtgcatggtctctctgaccattgtggcgacgctgaaagcggtaggtatcattctctccatttctctgctcattgcgcctggcgccattgcggtactcctgacacaacgctttcatattgcgctcctactggcgactggcatatcggtaatagtgtcaatgactggtgtctggttgtccttttttatcgacagcgcaccagctccgacgattgtcgtcttattcgcggttttgttcatcatgacgtttgccgttaccagcatcaacgcacgcaaaaagggaaactcccatacacaggatctgttatcacccaattag

SEQ ID NO: 7163 - DNA, 222 bp, Escherichia coli
atgaaaattatcacccgtggtgaagccatgcgtattcaccaacaacatccgacatcccgtctttttccgttctgtaccggtaaataccgctggcacggcagtgctgaagcgtataccggtcgtgaagtgcaggatattcccggtgtgctggccgtgtttgctgaacgccgtaaggacagttttggcccgtatgtccgactgatgagcgtcaccctgaactga

SEQ ID NO: 7164 - DNA, 249 bp, Escherichia coli
ttgcattaccttgccgaccgcgccggtatcagaggcctgtccagcgatgcagatgcgtaccccctggaccaggcctttccgctgctgatgaaacaactggaactcatgctcaccagcggtgaactgaatccccgcaatcagcataccgtcactctgtatgcgaaggggctggcctgtgaagccgataccctcagcagttgtggttacgtttatctggctgtttatccgacgcccgaaatgaaaaattaa

SEQ ID NO: 7165 - DNA, 3888 bp, Escherichia coli
atgaataaaatatactcccttaaatatagtgctgccactggcggactcattgctgtttctgaattagcgaaaagagtttctggtaaaacaaaccgaaaacttgtagcaacaatgttgtctctggctgttgccggtacagtaaatgcagcaaatattgatatatcaaatgtatgggcgagagactatcttgatcttgcacaaaataaaggtattttccagcccggagcaacagacgtaacaatcactttaaaaaacggagataaattctctttccataatctctcaattccggatttttctggtgcagcagcgagtggcgcagctaccgcaataggaggttcttatagtgttactgttgcacataacaaaaagaaccctcaggccgcagaaactcaggtttacgctcagtcttcttacaaggttgttgacagaagaaattccaatgattttgagattcagaggttaaataaatttgttgtggaaacagtaggtgccaccccggcagagaccaaccctacaacatattctgatgcattagaacgctacggtatagtcacttctgacggttcaaaaaaaatcataggttttcgtgctggctctggaggaacatcatttattaatggtgaatccaaaatctcaacaaattcagcatatagccatgatctgttaagtgctagtctatttgaggtcacccaatgggactcatacggcatgatgatttataaaaatgataaaacatttcgtaatcttgaaatattcggagacagcggctctggagcatacttatatgataacaaactagaaaaatgggtattagtcggaacaacccatggtattgccagcgttaatggtgaccaactgacatggataacaaaatacaatgataaactggttagtgagttaaaagatacctatagtcataaaataaatctgaatggcaataatgtaaccataaaaaacacagatataacattacaccaaaacaatgcagataccactggtactcaagaaaaaataactaaagacaaagatattgtgttcacaaatgggggaaatgtcctgtttaaggataatttggattttggtagcggtggtattatctttgacgaaggccatgaatataacataaacggtcagggatttacatttaaaggagcaggaattgatatcggaaaagaaagcattgtaaactggaatgcattgtattccagtgatgatgttttacacaaaataggccccggtactctgaatgttcaaaaaaaacagggggcaaatataaagataggtgaaggaaatgttattcttaatgaagaaggaacatttaacaatatataccttgcaagcggaaatggtaaggtaatactaaataaagataattcccttggcaatgatcaatatgcggggatattttttactaaacgtggtggcacgctagatttaaatggacacaatcagacttttactagaattgccgccactgacgatggaacaacaataactaactcagatacaacgaaagaagccgttctggcaatcaataacgaagactcctacatatatcatgggaacataaatggcaatataaaactaacgcacaatattaattctcaggataagaaaactaatgcaaaattaattctggatggtagtgtcaacacaaaaaatgatgttgaagtcagtaatgccagtcttaccatgcaaggccatgcaacagagcatgcaatattcagaagcacagcgaatcattgctccctggtatttctttgtggaacggactgggtcaccgttttgaaagaaacagagagttcatataataaaaagttcaattctgatcacaaaagtaataatcagcagacctcatttgatcagccagactggaaaaccggggtgtttaaatttgatacattacacctgaacaatgctgacttttcaatatcacgcaatgccaatgttgaaggaaatatatcagcaaataaatcagctatcacaatcggcgataaaaatgcttacattgataatcttgcagggaaaaatattactaataatggttttgacttcaaacaaactatcagtactaatctatccataggagaaactaaatttacaggtggcatcactgcacataacagccaaatagccataggtgatcaagctgtagttacacttaatggtgcaacctttctgaataatactcctataagtatagataaaggagcaaaagttatagcacaaaattccatgttcacaacaaaaggtattgatatctccggtgaactgactatgatgggaatccctgaacagaatagtaaaactgtaacgccgggtctccactacgctgctgatggattcaggctgagtggtggaaatgcaaatttcattgccagaaatatggcatctgtcaccggaaatatttatgctgatgatgcagcaaccattactctgggacagcctgaaactgaaacaccgactatatcgtctgcttatcaggcatgggcagagactcttttgtatggctttgataccgcctatcgaggcgcaataacagcccccaaagctacagttagcatgaataatgcgatctggcatctaaatagccagtcatcaattaatcgtctagaaacaaaagacagtatggtgcgttttactggtgataatgggaagtttacaacccttacagtggacaaccttactatagatgacagtgcatttgtgctgcgtgcaaatctggcccaagcagatcagcttgttgtcaataaatcgttgtctggtaaaaacaaccttctgttagtcgacttcattgagaaaaatggaaacagcaacggactgaatatcgatctggtcagcgcaccaaaaggaactgcagtagatgtctttaaagctacgactcggagtattggcttcagtgatgtaacaccggttatcgagcaaaagaacgatacagacaaagcaacatggactctgatcggctataaatctgtggccaacgccgatgcggctaaaaaggcaacattactgatgtcaggcggctataaagccttccttgctgaggtcaacaaccttaacaaacgtatgggtgatctgcgtgacattaacggtgagtccggtgcatgggcccgaatcatgagcggaaccgggtctgccggcggtggattcagtgacaactacacccacgttcaggtcggtgcggataacaaacatgaactcgatggccttgacctcttcaccggggtgaccatgacctataccgacagccatgcaggcagtgatgccttcagtggtgaaacgaagtctgtgggtgccggtctctatgcctctgccatgtttgagtccggagcatatatcgacctcatcggtaagttcgttcaccatgacaacgagtataccgcaactttcgccggccttggcaccagagactacagctcccactcctggtatgccggtgcggaagtcggttaccgttatcatgtaactgactctgcatggattgagccgcaggcggaacttgtttacggtgctgtatccgggaaacagttctcctggaaggaccagggaatgaacctcaccatgaaggataaggactttaatccgctgattgggcgtaccggtgttgatgtgggtaaatccttctccggtaaggactggaaagtcacagcccgcgccggccttggctaccagtttgacctgtttgccaacggtgaaaccgtactgcgtgatgcgtccggtgagaaacgtatcaaaggtgaaaaagacggtcgtatgctcatgaatgttggtctcaacgccgaaattcgcgataatcttcgcttcggtcttgagtttgagaaatcggcatttggtaaatacaacgtggataacgcgatcaacgccaacttccgttactctttctga

SEQ ID NO: 7166 - DNA, 582 bp, Escherichia coli
atgtattaccctgtgacagactatatcgctcttgctctcattattagctttctttttctgacattatttatctgcctgttatgccttaaacatgagcgaataaaaaaagaaactatcaggcaaaaaaatgcacatattctggatcatggctggaatgcaactgagttctcatggttccgatacggacagtataacgaaacgggtatttacatctcgatcgagaagaccattatcattacaatcaccgtttctggtgggggctttaaaaaagaatacagcattgtctcccacatgctggtcactgacaccataacagaggccaccctgtacgaaaacgggctgtatacgcgccacatcagactcagtcgcccagtatctgacagcaaataccccttgccacccggatctcagctcattaaaaatatgactttacgactgcgcctgcaggatcagcaggaagaaacatccgtgacattatttcagggaaaaatgagtaccgacggaaataactattccatcatcaaaggtaaagtaagctcagtacttctgttattaaaaatgctgcagattaatcatgcctga

SEQ ID NO: 7167 - DNA, 216 bp, Escherichia coli
atggtggtgctcaatgcgccgggtaaatatcaatacgatttgaggaaccatttgctggttaatctctttccgatagcattggatgcagcaatcactacatccaacgtgaataaccatgaattgcacagaaacaatatacctgcgaccctctccggaaattccggtatcactgactacgtaccgcccgggagtgattatgaatcaacaggcgtataa

SEQ ID NO: 7168 - DNA, 573 bp, Escherichia coli
atgcaaaaacttgaaaaccggtgtgatctgctgctcacccagcatcagaaatggatggcaagtgtaacccggtttattgtcgctcacggaatgggctctccgcatcttcatggttatcatcgcctgaccctggcccacttttttctgccggaaaaaggcaccatcatctcggtggcaccacagggactctatcaggtagtcaacccggcaacgccaccgttcattcctgccattcaggaagggttaatgaccagcattcagactcatgaaatcatgttacttacacattttaacctgggtggtgttttactcagtgaactacatcgtctgggagaaagccgactggcaaacaggctgaacagtctgctccggcgttttgacgatcgcgatctctaccacaccctgatatggctgtgctggtatgatctgatgtgcgcccactccatgcagccctggactgaagagttaaagcataaatcacacgcagaacttgaaagctgggctgtggcgcgcaaacgggaaaagcgcgagcttgaactgatgattgacgagtacctgttatacgcctgttga

SEQ ID NO: 7169 - DNA, 207 bp, Escherichia coli
atgaataccccagtttcgctgatggatgaccagatggtcgacatggcgtttatcactcaactgaccggcttaaccgataagtggttttacaagctcatcaaggatggtgcctttccggcccccatcaaactcggccgcagctcccgatggctgaaaagtgaagtggaagcctggttgcaggcgcgtattgcacaatcccgtccgtaa

SEQ ID NO: 7170 - DNA, 195 bp, Escherichia coli
atggtgatacgcaaaaagaagtgcagggagtgtgataacgcgattactcataatacggtgtgttgtccgtactgtggttctgtcgaccccttcggctattaccggaatacggacaggatcttcacggccctgctggcgctgctggttgtggttttgctggtgacatctgctgtcagcatgtatgtgctgtggtag

SEQ ID NO: 7171 - DNA, 2892 bp, Escherichia coli
atgattggtacaacaccttatcatgcgaaatattttgcgcatgaactttccattctccattcaaacaatggggtggaccgtctgtctcaatcgctgtttgatgcaagcgtagatctaaatcctcatcaaattgaggcggctctttttgctattgaaaatccgctaagcaaaggtgttgtgcttgccgatgaagttggtttaggtaaaaccattgaagcggggttagtgctttgccagttgtgggctgaaagaaaacgtaaactgttgatcatttgtcctgcttcactgcgtcgccaatgggcgagcgagttacaggaaaagttcaatctaccttctcaggtgttggacgcgaaaacgtatagccagcttcaaaaagaagggatccataatcccttaaataataaatcgatcactatcatgtcataccactatgctgctcggttagaagaaaaattggtggctgaaatgtgggatctggttgttatcgacgaagcccataaactgcgtaatgctcatcgagaaagtaacaaaatggggcaagcgttaaagcgtgcgcttgatgggcggaaaaaattactactgaccgcaacgcctttacagaattcgttaatggaactgtatggcatgtcgacgcttatagatgaacataccttcggcgaagttaaagcgttcagaaagcaatatatgcaggcagatagcgatattgcggagttgaaggggcgattgtcgcgttttatcaaacgaactttacgcaagaatgtgctggagtacatcaagtatacagaacgtaaagcgatcactattcctttctatccgagcgaacaggagcaggatctttatgaacgcgtacaaaaattgcttgaacgtgaggatagctatgccttaccaaaacgacaccggcatctgacggggcttattctcagaaagctactttcctcaagtacgaaagctgtattgaataacttgcagatccttaagagtcgtttagaaaggttaaagctggaaggtatcgttgaagatgatatgaacatcatccaacagatcataatggatgacgatcttgaagatgacatcgtggaagatgccgaatcagtggctttagataccgagtgcaaagttgtcgattcagacgcgcttcaggcagaaatcaatgagctggaatcactcattgtcaaagcagaacagattggcactgataccaaatcaaaagagttgctttctggcctggagcaaggttttgcacagcttgccgaaatgggggctgcaaaaaaagtcatcatcttcacggagtcaatgcgaactcaacagtatcttgcacattttctggaaaacaatggctaccaggggaaagtagtaacctttagtggcacaaacaatacaccgcaggcaaacaagatctaccagcaatggcgcgaggaatatcagggatcttctcgtattaccgggtcggcgcaaattgataaacgctcggctttgatcgaccacttcaaagatcatgctgaaatcatgatagctacagaagctgcagctgaaggggtgaacctgcaattttgttcgctactgatcaattacgatttaccctggaacccacaacgcattgaacagcgtattggacgttgtcaccgatacgggcaaaaatttgatgtggttgttattaacttcctcaatcagcgaaaccaggccgatcaacgcgttcttgaactcttaactgaaaagttcagcctgtttgatggcgtgtttggcgcatcggatagtgtgcttggcagcatagaaaatggtgtggattttgaaaaaaggatccagtcaatttatgagtcatgccgtacccccgaggagatagagctggcttttgaaaggttgcagaaagagctggaagatgaaatcaatctcaagatgcagaagacgcaagaacagttgcttgagcattttgatgaagatattcacgatatccttaaaataaggcttgatgaagctcgggagcgtctggataaagtcggtcgttggttttgggccgtgacctgtcagcagctcaaacaatatgctgattttgatcatgagcatcatcgtttcactttacgtgaatcagtaaatgaactgcctgtcgggcagtaccagctgttgcgcaaagatggtaggcaaaatagtgcgttacaaatgcaggatcaccacagttttgcatatcggatcaatcatccgctgggtgagtacgtcattgagggggctaaggtccaggagacgaaaacagctgaagtcatcttcgattacagtaaccacacaacgaaagtctcggtggctgagcagctgaaagggcaatcagggtggttaacactaaatttgcttactgttgatgcgtttaacaggcagcaatttttagtctttaccgcaaaaactgacaacggacgtgtggtagatggtgaagcttgtaaacgtctgttcaacttgtctgcaataaccaacgaaaagctggataattcggcaagttcagatgcattacctgatgacttgatcttactcaagaacaggcaaattgacgccagacttgcggaagttctggagcagaacaatgtcctttttgaagctgaaagagataagctggaaaaatgggctgaagatatgatctttgcggcggaagaagcattacgcgataccaaaatgcaaatcaagtcgttaaagcgagaagccagactggcgcaatcgatggaagaacaaaagcaaaaccaggaaaagctgaagctactggaacggcagcagaaacgccaacgtatggaaatttttgacattgaagatgagatcgctgacaagcgggatgaactcatcagtgcccttgaagagcggatgaagcaaaaaacggatatcaccgagcttttttccatccgctggaaagttatttaa

SEQ ID NO: 7172 - DNA, 159 bp, Escherichia coli
atgaacatcattgatgggaatggggcttccgaagttcttagattatcagcgttacatacaaacaaagtagtgaaaacacaggcacaaaaaaagccgcccttgagcgactcgatttgcatacgatgtggtgcgaaggccggactcaaacatgcgatttaa

SEQ ID NO: 7173 - DNA, 261 bp, Escherichia coli
atgaaaacattacccgacacgcatgtacgggaggtatcgtgctgcccgtctcccgtcaccatctggcagacactgctcacccggttactggaccagcattacagccttacgctgaatgacacaccgttcgtggatgaacgcgtgattgagcagcatattgaggcaggcatttcactgtgtgatgcagtgaactttctcgtggaaaaatacgcactggtacgaactgaccagccgggattcagcgcaggagcctcgtcgtag

SEQ ID NO: 7174 - DNA, 603 bp, Escherichia coli
atgattgaggtttgggtggatatcgaagggattccattttatcaggttagcaataaaggaaattttaggtctattacgagggaagttacagtaacatcaaccagacagaggccatataagaaaataattaatggcactagtgtaaaaccattcaagtgcaagtcgacaggatatcttcaaataaaggtatacggtaagaaatacagcgcccacaggatagttgcgaaagcattctgtacagggttctgtgatggcttggtagttaatcacaaaaatgggcgaagagatgacaatagggctgataaccttgaatgggtatcacattctgaaaactcaaaacacggatataaacaaaatggaagaatacctatatcgctaggtaaatttagtggtgaccatcctgccagtaaagctgttatttctactgacatgaaaactggggaggaggtttattatgaagcagctatggatgctgtcagagaaggatttgatagttcgtcaattagtcgttgctgtaatggcgaaagctcatatcacaaaggaagattctggcgatttgcaaatgaaaaaatgaaagcgagatggggagatcgggctgcatga

SEQ ID NO: 7175 - DNA, 417 bp, Escherichia coli
atgaaaaaactaacctttgaaattcgatctccggcacatcagcaaaacgctattcacgcagtacagcaaatccttccagacccaaccaaaccaatcgtagtaaccattcaggaacgcaaccgcagcattcggcaaaatgcacgccttcacgcgatgctatctgaaataagtaagaaggctacatatcatggaaaagcaagaaatattgagttttggaaggggttattcgtttctggttggcagattgcaaccaatcagcaccctgagattatatcagggttagaaggtgagctaataaacatcagagagagtacggcgactctatctgtaaaaaaaatatccgaaataatggactacatagaagcatattgtgccatgaactcaattcatcttagcgaatggaggaattatgattga

SEQ ID NO: 7176 - DNA, 270 bp, Escherichia coli
atgaataaaaaacaattagccattctcgaaaaggcatgggatgcacaaatatcatgcgctttgaaagaacaggcactaccaataatccagaccaaatcgaaaatagccaggcagttatgcgatgacggattcctgaacgaagttgagattacgcaccagatggtaacgttcaaagggtatgagataaatcatcatggtatagcggcgtattgctcccatcttcctgatgacgttgacattgatgaaatggaaagggagatgaagcaatga

SEQ ID NO: 7177 - DNA, 1437 bp, Escherichia coli
atgaccgataatttttatgcgccgccccatagcatcgaggcagagcaggcggtgattggtggattgcttctggatgatgacagcagtgagcgcgtccagaaagttctggcgatgctgaagcctgattcattttacagccgaccacacaaaatcattttcgaagaaataaccagaatgcaccgggagcaaaagccagtagatggcctgacgcttttcgatgaactggagcgtaaatcgttaacggcgtctgttggcggttttgcttatatcgctgagatcgcaaagaacacgccaagcgccgcaaacatcgttgcctatgcaatgcaggttcgcgaaaccgcaatggaacgctacgccatcaaccgcatgactgaagcgacggaattgctctattcccgcaacggaatgactgcaacgcagaagtacgaagctattcaggcgattttcacgcaactgacagaccatgcaaaaaccggatcgcgtcgcggccttcgctcatttggtgaggtcatggaagactgggttagcgaccttgagaagcgatttgacccgtcaggcgaacaacgaggaatgagcacagggatcccatctctggacaggatgctgtcaccgaaaggtctggtgaaaggctctctgttcgtcattggcgctcgccctaagatggggaaaacgacgctatacagccagatggcaatcaactgcgcagtgcatgagaaaaagcccgctctgatgttcagtcttgaaatgccaggtgaccagatactggaaaaactggtgggacagaagtcaggtgttaacccgaatattttttaccttccggcgacaaatgacgccgatgacggctatcagggtgattacgatggtgacttcaacagggcgatcgaaacagccaatcgcttgagtgaaatcgacatgctttacatcgacgacacgccgggattatctctggctcaaatcgtcagcgaaagccgtcgaatcaagcgagaaaaaggatgtgttggcatgattctggtcgattacctgacactaatgaccgctgagaaggccgatcgcaacgaccttgcttacggcatgatcaccaaaggactgaagaaccttgccaaagagcttgattgcgttgttgtgcttctgacacagcttaaccgcgcattggaaagccgaaccaataaacgcccattaccaagtgactcgcgcgatacagggcagattgaacaggattgcgattattgggtggggatccatcgtgaaggtgcttttgatgacagtgttccacctggtgaaaccgaactaatccttcgtctcaatcgtcatggcaataccggcacggtgtattgcattcaggcaaatggcgctatttatgacacagaccaacagtctgctgaaatgcgccgccgtgaacgcgaggaaccgcagtccaagaagaaaggaggattctga

SEQ ID NO: 7178 - DNA, 900 bp, Escherichia coli
atgagtaacatatctaatctagccgaagccagagaggccagaaggctacaacaaccgcatcaaagcagcggtaaggggtatgccttgctgcaccgtaaaattatggatgtgccgttttacaaggacgcagaagctgcgcatctgtgggttcacttaatcctcaaagcaaagcatacgcctgagtatgtaatgactgacgcaggagaaattctggtaggcagagggaagctacttggcggtagaaactctctggcgtttgaaacaggactcaaaccagatcgcgttcagtacctgcttagaaagttcaaaaaactcggcatgattgactgggtttcacacggtaaattctcagttttctcggtagagaaatatgacgattatcagtcaaattttgtaccagcagattaccagcaaattaccacctcaaagccagcaataccaatgcctgcaagcaatactgtaccagcagattaccagcaaattaccacagataaagaatataataatattatctctaatactgacgtattagagagtaccgcagcagacaaaaagtctgacaagaaaaaaccttccgttagctgtcaggatgttgtcgatgcttaccacgaaatccttcctgaagcgccaaaaatccgcgcactgaatgacaagcgtaaaaaccagatccgaacgttctggcgcaaagccggagtgataacccgccagcttgacgggcatgggttcacgatgcaggactggagaaattatttgagctacgtaggcgaaaattgccgatggatgttcgaagagcgccaaaaccatcagcgcggaaccgtctggcacaaaaagggatttgatttcctgcttaacgataatacctacctgaaagttcgtgagggtgaacacgatgaccgataa

SEQ ID NO: 7179 - DNA, 147 bp, Escherichia coli
atgacaaaacaactcagtccttaccaggacaaaattcacaaacacatactacgtgatcgcttcctgtccagcttcaagcagcctggtcgattccgggctgagttggaaaaagtgaagctgatgcagaaggagaaaggtcatgagtaa

SEQ ID NO: 7180 - DNA, 279 bp, Escherichia coli
atgcaacttacaagtactcgcaagaaagcgaatgcaattacaagcaacatcctgaatcgaattgctgtacgtggtcagcgaaaggttgccgacgcgttagggattaatgaatcgcaaatttcgcgatggaaagacagctttatcccaaagatggccatgcttctggctgtgctggaatggggtgttgaagacgaggagttggcggaactggctaagcaagtagccagaatgctgacaaaagaaaaagccccgaagaacggcgaattcttcgaggcctga

SEQ ID NO: 7181 - DNA, 201 bp, Escherichia coli
atggaacaacgcataaccctgaaagattatgcaatgcgctttgggcaaaccaagacagctaaagatctcggcgtatatcaaagcgcgatcaacaaggccattcatgcaggccgaaagatttttttaactataaacgctgatggaagcgtttatgcggaagaggtaaagcccttcccgagtaacaaaaaaacaacagcataa

SEQ ID NO: 7182 - DNA, 459 bp, Escherichia coli
atgctgaacgacgagttcaggaagctcgaagaatctgtaaacagggaactgacctcaaacgaatctttaatcaggaacgctatcaacgaccatacaacagccctgaaagaactgctggagaggtatcagaaaacgaccgtcgatacgatggacgcgcactggaaaaccgtactgaaaatgagcgtgaaacgctggctgtggctgattatcgtctcagtactgatgtttgccacgaccgggagtctgctgtggtaccagggcatgaagataaacgcgaatatgaatattctccgcgagcagaaagagagtctggagaagctgaacgcgaagacatggggcgtgcgttatcacgaggacagcaacggacgttttctggtgttgccgaaggggatgaaagccgaaacgaactggacgaaggacaacggcaaactgaacgcagtgagactggtgcaggagtga

SEQ ID NO: 7183 - DNA, 234 bp, Escherichia coli
atgacggagctggaaagacatttgctgaacgcattagagcaactgcaacaggactatatgcagcggctgaacgaatgggagaacgccttcgtggaattgcagaaaatgttttcgcttacgcaacgggacaacgcgatgctgaacgggcgagtcatgcagttgagtcagcaggtgcagcacttgagcgagcggacagaacgcttgagccagttatacagcgagaacaggagataa

SEQ ID NO: 7184 - DNA, 1053 bp, Escherichia coli
atgaatcttcaacaacgtataaataaactaccacaattatcatccagtttttcatttggaaaagatattgataatattcattcatttatctttaacgaaacttctaaagataaaattgaagatttactaagaaaatgggtgtcaggcaatcagccctgtgtatttggtaaattggcaagcaagaaaattaaagggcttgatttccatttatctattgtaaatagcccccaactatataatgatgatggtcatttgtttgattttttgcgtaatgaaagagttcgttttaaagaacgcgcaagaagaggagaggtcagtgcgcatctcatttattttattcatccacaacttgcctttgctcgtccatcagaagagttagtggacatacaaaaatatatttgttcgctgcatatgccagagtgctatccaataaaagaggatgttatttatactgaaagcgtaccatttcaggataaagatgggctaaaaatatataaggctggtgttaatgttttttactcttctgctcatagaacaagaaatcatgatagaagaataccagggggaatacttatttctgtaaatgccccggggcattttatgaggctggcgatagaaaaaggtttctataaagatcaagaacaagcgttagcggatattcgtaacatgactattcagtctgttggtaagggtgggtattcacatccggaagggatttctacaacatggcattcagaatctaatttggatcgttttggatgcccagtgcacaccggtaatagttcttattacagcggtttttatcatactgatgtattaattccaggagaattaactaaggatgaaagattgctccatgaaatagaaaatagtgatccaatgatcttcaactggaatgtattgttttatgtttcattagaagagtttcctatagatgatccttattatggagagtttattggtattcctgtagatgatgcatctatgttttttaactcctttcaaccaaggaaatttgaaaacaaacccctttatgagaaagaggatgattaa

SEQ ID NO: 7185 - DNA, 867 bp, Escherichia coli
atgattaaaggaatgctttttgcttttttagcagcgttctcatggggggcagctatcgtaatgagcaaaaaaggagttgaagaactagatgccggaggggtgtttttctggcagatttgtagtgcagtaatactatcttggatagttctttttataaaaagaaaaaaactcccattaaactcaaaagcgatacttgcttatgcgacaggcgtttttgaaccattcttagcgtatacttttacactctacggactttattttatttcagcaggaagcgcatcaattattttttcacttgaatcagtgtttatattggtgttgtctgttcttatttgctcagttaaaattaattccccgcaatattttatattgttccttataggtgcaattgttggcagtattttggtagccttgccagacatcagtaatggatcgaataatattgttggatattgtcttgttgttgccggtgtgttatcggcagcattttatgttgttatatcgtctcgccttattaaatcgtttgagcctatcacattattgagcggacagttgacattctcccttatactgtcatcgctctttatttttatatctaaatcatcaatttatcttccgttggaatccgtgattattgttttttcatctggaatattacaatattttttagctttttgtttttacttgaactccttgcgttggctcccagttcatttggcagggataatgttgtactttattccgctagttgcattatttttgtcatggttgtttttggatgaacaattcacattcttacagggggtaggatttattgtaactgtgctaagtgtatattttcttaacagaaaatactcagaggagtaa

SEQ ID NO: 7186 - DNA, 249 bp, Escherichia coli
atgataaaaactgattaccctgcagagcttaaacaaaaagtaataacagcaattaaatgctcttttatctcatgtcgtacagatgaagaacgatatgtcgttgagtgtgcaattgtcgagtttctcacagcgatggaatttaccgctgcagaatcaatagatgtattaaagcaatcagacggaaatgatattgaaacggatgatgttattgaccgactaataaaatcattcgaagaagaaatagagtag

SEQ ID NO: 7187 - DNA, 135 bp, Escherichia coli
atgatgcactttcagctcgcgggtagcggcgtcatgtccgctttctacccgcacgaatctgaattatcacgccgagttaaacaattaatcagagcagcaaagaaacaactggagacgttatgcgcaatgaaatag

SEQ ID NO: 7188 - DNA, 153 bp, Escherichia coli
atgcgcaatgaaatagccattaatcaccagatgcttcgtgcggcacaaaacaaagcagtaatagcccgatttattggtgattcaaaaatgtggcttgaagcaaataaagcgatgaaatcagatatcaaccttccgtggtatcgcaggaaatga

SEQ ID NO: 7189 - DNA, 171 bp, Escherichia coli
atgtcacttgcaaccacagtgaaggagagcaagttacagagacgcatgtacacgcagaaagctctctggtatcgccataatggcgaccgcgaaggaatgcgggtatgccttaatttgtcccgagtcgaagtattaaatcagcgttatttccttgggccatgtccattctga

SEQ ID NO: 7190 - DNA, 606 bp, Escherichia coli
atgagcaaagaattttacgcaagactggcagctattcaggagaatctgaacgcgccaaaaaatcagtacaactcattcggtaaatataaatacagaagctgcgaagacattcttgaaggcgttaagccgttactgaatggcctgtttttatcaatcagcgatgaagttgtgttgattggtgatcggtattacgtgaaagccacggcaactattaccgatggcgaaaacagtcatacggcaaccgcccttgcacgagaggaagaaagcaagaaaggaatggattctgcacaagttacgggagctacaagctcttatgcacgcaagtattgcctcaatggtttgttcggcattgatgatgcgaaagatgcagataccgacgagcataaacatcagcagaacgcagcagcaaagcaatcaaaactatcacctacacctgaacaggttctaaaagcattcactgacgcagcattgcagaaaaacaccgtggaagagcttaaacaggcgttcgccaaagcgtggaagatgctcgaaggcacaccggagcagcacaaagcgcaggacgtttacaacatcagacgagacgaattagaaggagctgctgcttaa

SEQ ID NO: 7191 - DNA, 384 bp, Escherichia coli
atggcacattcgattactgtaagactaaacaagcccgcaagagagtttcaggccggggaaaatatcggattcaacatccgtgctggcgttcagtattacgatcgccagacaaaaaagaaagaatggacaaactacagcgccgttgtatttgccaagccgggagcgcaagcggattactaccgtagtgttcttgttgaaggtggcattgttgaaattaccggagaaaacatcagggttgatatttatcaggggcaaaatggtcaatcaatcactcttgaattactgaatgcaaagattggatttgcagcttcaggaaatggcccgcagcagcaaagtagtaaccagcagaacactcctgtatacgacgattccatcccattctga

SEQ ID NO: 7192 - DNA, 294 bp, Escherichia coli
atgccagcgcctttgtatggtgcggatgacccgcgccgctgttccggcaattccgtatcggaggtgctggataaattcagaaaaaactacgatcgaataatgtctctaccgcaggaaacgaaagaggaaaaggaatttcgccactgtatatggcttgcagagaaagaagagagcgagcgaatttaccaggcatcaatccgaccattccgcaaagccacatatacccacttctctgaaattgacccgcgcctgcgtaattaccgctcacgctatggcgctatcagtaatgactga

SEQ ID NO: 7193 - DNA, 291 bp, Escherichia coli
atgaaaacaatgaagctaaacatcgacctcggcaaatacgttattaccggaacaaaacacgacctgattcttagcgaaagaggaattatcaaagaaggcgagaatgcagggaaagaaacactaagtcgtatcggttattacagcaagtttgagcatctggtcaaagagttatgcaaccgtgaaatcctgttatctcaggcgcagacgctacaggatattcagcagcatatcgagactttaggtgtatcacttagcatggctattgaccagttcgtggagagtaaatcatga

SEQ ID NO: 7194 - DNA, 165 bp, Escherichia coli
atgagaggacttgcatacaatcccggcattcttccggcagaaatgattattcgccaacgcgtaaagccaatgccatcgagagaggaattgctaaagagaaattcttttccgtcagtgaatcaaaacaaatatctgaatgcgatgtggcggagtgggaagaaatga

SEQ ID NO: 7195 - DNA, 177 bp, Escherichia coli
atgcgtgtggcatgtatcggcttgttaccgtacccgactcgtttttgggcttctgcgctaattgcaaagccgtatgtcctgatggctgacaacatcatcccggcaccaaagcgccgccataccggtattgcagcggcacgacgagcagcaaagagacgcaggagagcaaagcgatga

SEQ ID NO: 7196 - DNA, 177 bp, Escherichia coli
atgaaaaaccgtaaggcaaaacgactttttttacagcgacctgtgcgtgtggtggagctggttattagcaaccataagatagcggtactccatccatttggtcaggtggcttttgccgcaaagcgtaagcctactgcgtcacagaacaggcggaagaaagggtacgcagtaagatga

SEQ ID NO: 7197 - DNA, 210 bp, Escherichia coli
atggctatcgctgcaagttacaccatgcatctctattgtgattgcctccagtgtacagatggcaaatataagtcgccagacttcggtgagtatataggtaagtcatgggctggctgtgcaaaagaggcgcgcaaggatggctggcgaataagcaaagacaaaacgcgtgcttttgcgcccgggcataaagttttgaggattaacaaatga

SEQ ID NO: 7198 - DNA, 192 bp, Escherichia coli
gtgaccaaacaggaaaaaaccgcccttaacatggcccgctttataagaagccagacattaacgctgctggagaagctcaacgaactggacgcggatgaacaggcagatatctgtgaatcgcttcacgaccacgccgatgagctttaccgcagttgcctcgctcgcttcggggatgacggtgaaaacctctga

SEQ ID NO: 7199 - DNA, 390 bp, Escherichia coli
atgttcaaatcatcagtaaagtcaataacatcgagtactatactgaccttacttataggatgttcaagtactgaaacaaacaaaaacattgtttacaaagttggtggtgacagcatcattctgaataaatattgcatacttaaaatgtacccttcccaatcagaaaaaaacaaaggcgtcataatagaagtaaacacagatagtttatgtaagaaaaaactaaacgaaataactagtaaaaatatagggaaacccctgatttcatattttgatggaaaagtaatatcccaacctgcaatcattcattctgcactaaatccaacccattattatcaacctgtgaacgatgaaacaacagtgatggaaatcataaaagcatattcaaaataa

SEQ ID NO: 7200 - DNA, 285 bp, Escherichia coli
atgatttctcaaaatgtttgggctcctcctttcttttttggtccttgggttgaacttgaaaatcatactggtgatatcgcgtacactgtctattttgatacattgtctaatgtacccggtccatttattgcttttatctggtatgcccctaatgggccaagaacagttaacgttattggtccagcatcttatcagatctcttgcaagggcgctggtgttgataaaattaaatttaaaagtgtcagtgggacagggcagattattcatgtatacactaccttataa

SEQ ID NO: 7201 - DNA, 198 bp, Escherichia coli
atgaaagaagaaaaagtattgcttcaccgtttcttatttgtagttaggaataagaatggttgtgaactatcatgttcggcagaccttatgggaacaagggatgatgtttataagtatttctctgattctgttagtgggctagatgttgagcttatagatgtttcttgcgagagtgaatgggaagaacattcgcattga

SEQ ID NO: 7202 - DNA, 297 bp, Escherichia coli
gtgagcaaaacaaaatctggtcgccaccgactgagcaaaacagacaaacgcctgctggctgcacttatcgctgccggatacgaagagcggacagcccgtgacctcatccagaaacacgtttacacactgacacaggccgacctgcgccatctggtcagtgaaatcagtaacggtgtgggacagtcacaggcctacgatgcgatttaccaggcaagacgcattcgtctcgcccgtaaattcctgaacggaaaaaaaccggaagaagggctgaacgcctggaagggtgatttaccataa

SEQ ID NO: 7203 - DNA, 459 bp, Escherichia coli
atgctgaacgacgagttcagcaagctcgaaaaatctgtaagcaaggctgtgacatcaaacgagacgaaaatcaaagacgctatagccctgttcacagcttcgacagaggaatcactgaaaaaacaccgggaaggggtgaaagaggcgatgatgcagcacaggaaggacgtgttaaagctggcagggaatacgggcatgatgttactggggatggtcattttcctgtttaccgtgagtggcgggacgctctggtatcttggcgggatgatacaggcgaacctggaagaaatcaggaagcagaacgagaatctggagaagctgaacgcgaagacatggggcgtgcgttatcacgaggggagcaacggacgttttctggtgttgcccgaggggatgaaagccgaaacgaactggacgatggaaaacgggaaacagaatgccgtaaggctggtacaggagtaa

SEQ ID NO: 7204 - DNA, 915 bp, Escherichia coli
atgggacgcaccaaatcacccgttaacactgaactgaatgttgaggttccgctgtcagataacatcaatgtcaatttgaacgctatgacacagcatcgcatggaaattatgcagcagtttggtgatggactgccttatgaacgtgatcgcattgttcacgaagcacgtttttatatggcgcagagtgctgaatctatgctggaagcgggtaagcggctgatcatcttaaaagaaaatgagccacacggtgattttacaaacattttagaaaatgaactcggacttgcaccacaagttgctcgccgcatgatgcaagccagtatgaagtttttgggagaaggtgatgagccaacaaaacgctcaacgttgagcgttttggggaaagccaaactgtacgacctgatggttctggataatgaagaacttgatgaattggccgacggcggcacagttgccggcctgacgcttgacgacgttgatcgcatgtcagtacgtgaattgcgtcaggccctgcgcgaagcgcgcgaaaccaacgcagcacaacagcgcgtactcgctgacaaaaatgaaaaaatagactcactctccaccagactggagaagaaatcccgtattcagccgcctgagcctgatgaagaggttaagaagctgcgggcggaagtgacagcattagcggttgaggcggaatctgctatcgccgttcgactgtccagcgcttttgagacgctgtgcgcatattgtgctgaaaacatgattgatacccccagagacttcatggcaggcctggtctgtcaactggaaagcacagcgcgtagcctgcgctccacatttgacctgccggatgagccaacaggcaatgccgcgccttcatggctgactgagccgacgccacagattaacgggctggaggcataa

SEQ ID NO: 7205 - DNA, 309 bp, Escherichia coli; identical to SEQ ID NO: 5823

SEQ ID NO: 7206 - DNA, 693 bp, Escherichia coli
atgtcggacttgattgcctacaagtcgaatgctttggttgaggccagctacaagttgaccctacaggaacaacgttttctgttgctgtgtatcagtcgattgaaatctggtgctgatgctgaattgcaaaagacaatgaccattaccgctgcggaatattttgattcattccctgacatggggcggaaaaatgccgaggttcagttacaggaagcgatcgatcgtttatgggacaggtcgatcattctcaagaatgacgagaagcgtgaggagttccgctggatccagtatcgggcacagtacgctaaaggtgaggccaaggctcgaataaccttttctgacgcggtaatgccttatctgacgcaactgaaggggcaattcacgcgcgttgttataaaaaacatatcaggtttatcaagtagttacagtataagaatatacgagttcctccagcaattccgcagtacgggagagagaattattgctcttaatgactttcgttcaatgttagggattgaaaataaatacaaacaattcagagacttaaataaaatactaataaaaccctgtgttgacgaactgaacaaaaaaagcgacctggctgtaacggttgagacgatcaaaaaggggcgcacggttgtagccctgcattttcgcttcaaggaagacaaacagatcaagatgacgatctaa

SEQ ID NO: 7207 - DNA, 255 bp, Escherichia coli
atgagcagaacgctcgaacagaagattgctgatgctgaggcgagattacagcgcctgaaggcgaagagccggagcctggacacagcgcagaaggttgttgtgggtgcagcattgctggcaaaggtcagaaagccggaggaggtgcagttgcgtgcctggttactccagttcctgaaggcagaggtgacacgacaggctgatgtgacgcgcatactgccgctgattaacgagctggaggcgctgccaggacagtga

SEQ ID NO: 7208 - DNA, 1518 bp, Escherichia coli
atgttaaggacgacacgatgggtcgctgctattatttttttgtattcttttccgggttatgctgaagaaacttttgatacgcacttcatgattggcggcatgagaggagaaaaagtttccgaatatcgtttcgataataaacaaccgcttccaggaaactacgaacttgatttttatgtaaatcaccagtggcgtgggaaaaaagatatcacgatcccagagtcaccagccaaaccatgtctgcctaaggtgctgctaaccacactgggggtaaagaccgataacctcaatacagaagataattgtattttactggatgaagcggttcatggtggacaatatcagtgggatatcagtgaacaccgactaaatttaacagtaccacaggcgtatatcaatgaacttgaaagaggctacgttcccccagaaagttgggatcgcggcattgatgttttttatacctcctataatttaagtcagtatcgctcttatgacagcaataataacagtaatacagccagttatggccggtttaacagcggattaaatttatttagttggcagttacactctgatgccagttatagcaaacctgatgatatgaaaggcaaatggcaaagtaatactctttacctggaacgtggctggtcgcaaatattaagcacagttcagataggagaaaattacacatcctcactcatattcgactctctgcgatttagcggaatacgcttatttcgcgatatgcaaatgctacctgattctatgcaaagctttacacctttagtacaaggtgttgcgcaaagtaacgccttgataacggtatcgcaaaatggctataccatttaccaaaaagaggttcccccaggaccatttactatcgcagatttgcaactttcgggcagcggctctgatctcgatgtcagcattaaggaagcagatggtagtgttcgttcctttttggtgccctactcttccgtgcccaatatgctgcaacctggtgtttcaaatttcgattttatcgccggacgcagtcagatatatggtgtcaagaatcaggaggactttctcgaggcaaattatatatatggcctcaacaatcttttgacactttatggcggtacgattttatccgataactataatgctataactctgggaaatggttggaatacaccgctgggagcaatctcttttgatgctacccgatcgagtagtaagttaaataatgataccagacacgaaggtacgagctatcaggtcgcctataataaatatctattgcaaacggctactcactttagcgtggccgcctggcgttatgcttcgcaggattacaggacattcagcgaccatctttacgaaaatgataaaataaatcatcagagtgactatgacgatttttatgatattggcagaaaaaatagcctttctgccaatatcatgcaacctttatccaataatctgggaaatgttggatatcgtgaactatcgcaaagaatccaatttattgtttga

SEQ ID NO: 7209 - DNA, 333 bp, Escherichia coli
  misc_feature (321)..(330): n is a, c, g, or t
gtgagaataataacagcattactgatgtcattttttattttacctgttcatgccggtgtggtcatctatggtacgcgcattatttatccggaaaaaaacagagaagttctcgtacagttaatgaatcaaagtaaaaatgcctctttaattcaggcatggatcgatgatgggaacacaactatcgcgccagaaaaaattcaggtcccatttattctcacaccaccagtaagtcgtgtagcaggcggttctggccaacaacttaaaataagaaaaatgccaaataatttgcctcacaataaagaaatgttattttatctaaannnnnnnnnntaa

SEQ ID NO: 7210 - DNA, 534 bp, Escherichia coli
atgaaaaagtatattattcccttcgttgcgacaacgttgatgtttagcgcaacaaccttcgccaaggatgtcgatcaaggaacactaaccattagaggagaagttgttgatacaacgtgttactttgttaatggtgattcgacaacagatatcgttgtcgaagatgttgtaaccagtgcaatgaatcaacttatcaataatgaaatctacactttaaaaaccggttcaacctctcatgacttagaaattcagtgtgacggcaatacagcccccagtatcgaagtgctagcatcagagtttgatgctaataactttacgctgaataaaggaactgctgagaacattggctttgccattttcctcgatgatggaactttgaccagaatgagaccggggttaaaaacaccgctgaaagataatggctctggtcaatattttcttaatttaagtgcacaatatgcccgcacaagtggcaatcctgttacaaaaggctccgtagagtcaaccgtaacgattaaaatcagtgcagattaa

SEQ ID NO: 7211 - DNA, 306 bp, Escherichia coli
ttgcgctgtgaagatattatgcctggtcgatggaccactcaacttgtcaataagcacttaggttaccgatacaccggagtattcaaaaccctggcaagtattgatgacaaaccgtcccgtttcgaaattttgataccattgatacaaactttagttcgcgacaatgtaaagctaaataatgatgtgtataaagaacttaataattttatgctcgattacgacaaaacatcctcagaaatgagaaaataccttcagagcatcaacgagtgtatactccttatgaaaaacatagttcatcaagattaa

SEQ ID NO: 7212 - DNA, 477 bp, Escherichia coli
atggtggaaatcaataatcaacgtaaggcgttcctcgatatgctggcgtggtcagagggaactgataacggacgtcagaaaaccagaaatcatggttatgatgttattgtcggcggagagctattcactgattactccgatcaccctcgcaaacttgtcatgctaaaccccaaactcaaatcaacagcagccggacgttaccagcttctttcccgttggtgggacgcctaccgtaagcagcttggcctgaaagacttctctccgaaaagccaggacgctgtggcattgcagcagattaaagagcgtggcgctttaccgatgattgatcgcggtgatatccgtcaggctatcgaccgttgcagcaatatatgggcttcacttccgggcgctggttatggtcagttcgagcataaggctgacagcctgattgcaaaattcaaagaagctggcggaacggtaagagagattgaggcatga

SEQ ID NO: 7213 - DNA, 324 bp, Escherichia coli
atgaagatgccagaaaaacatgacctgttagccgccattctcgcggcaaaggaacaaggcatcggggcaatccttgcgtttgcaatggcgtaccttcgcggcagatataatggcggtgcgtttacaaaaacagtaatcgacgcaacgatgtgcgccattatcgcctggttcattcgtgaccttctcgacttcgccggactaagtagcaatctcgcttatataacgagcgtgtttatcggctacatcggtactgactcgattggttcgcttatcaaacgcttcgctgctaaaaaatccggagtagaagatggtggaaatcaataa

SEQ ID NO: 7214 - DNA, 615 bp, Escherichia coli
atgcggttaactccagtatacagcatggttaacttcattaatgacgcgcactttcgccgcgtatggagacatccgaagaaaaccatcaactctagccagaaagcatgggttcattacatgttacaggtatggggcaaggttaacgccggagattgctctcctggtggtgcaattaacgttatcggtcgcctgatgattcgcagtcagtggagcgatgacaaggctaagcagatagagtctgtcgtcatgcgcctgtacgaagaagatgggctgcgcggagatgagctatacaagaaagctcgcgaactggtcattcctcaatcatcgtttagccacatcatcactctcgccaaagaatcagatgatgcggctttcgttgaacgtgtgatggtcaagacttttcaccgtgaaagccccgtccgcgatgtagctattaagcgatattgcaatcgcaattgcacgcaagatatagccaggatgatttcttatataacaggtgctgatattcagtattgtcgtaagcgagtggtgtggtgtgagaaagtgctggagtcagaaatgttttatgcaatgaaacgagaattggagaaagaatttccattaatagcggcctga

SEQ ID NO: 7215 - DNA, 144 bp, Escherichia coli
atgaacaaagcattcgaacgatatatgcgccagcgttatggcaatcgctatgacctgacgcgagatgttgaaggattctactgtcgtgaaattgtgaaacgaatgtttgaagtttggtgtcattgcaaaggatgggaggtctga

SEQ ID NO: 7216 - DNA, 180 bp, Escherichia coli
atgagtgatgttaaagaaaaagatatccccggctttgagggtatatataaagtaactgaaaatggagacatcatttcatgccgtaaatcaaaaaaattatctcatggcattaaaccaggaggatatgcatttgtcggtctgtatccaggtggcgggaaaagggaggggattgatgtttag

SEQ ID NO: 7217 - DNA, 507 bp, Escherichia coli
atgagaaatataagcaacatagacgaattaagaaataaattatcatatgatgatgttttaggtgtacttagatggaaagtgtctccttctaataatgttaaggttggcagtgttgctggttacattaggagtgatggttataggatgttaactatcgatggtgtaattacttatgctcaccacgttatatggatgataaataatggtgagattccattagggtataaaattgatcatataaatggagtaaggtcagataataggctatctaatcttcgattggttacacaccaacagaatgcacagaaccaaaagagaaaaataaccaattcgtcaggagtgactggagtatatttcaataaagagagatgcaagtggattgcgaatatatgcgtagatgggcgcaccaaatatcttggaatatttgctagcatcattgacgctattgcagaaaggaagagggcagaaaaagaactgggttttcatgaaaaccatggcagaccataa

SEQ ID NO: 7218 - DNA, 303 bp, Escherichia coli
atggcaagggatagaggcgattcaaaaaatcgcatttatcccttaagtataaatacaaggaacgcgcgcgagatttgctcaaaatctgagctgattttcggacaacaaaaacaacaaccacaaaagcgttttccccgcaaaacactcacaggtttttccaccgattttgtgaaaaacaaaaaccgtcttgcaggtggttggcctcactgcgtgacaccaaccaccatccccagtgtttttttccgtgccgtcgtcaatcacaaaatcggaaccccggaggggcccccgcgattttctgtttga

SEQ ID NO: 7219 - DNA, 732 bp, Escherichia coli
atgatgtggcaagcccgtttctatcagtccctgccaaagattgtgacggaacatcccggcgcgcgctggttgtttctcacactgacagtgcgcaactgttccattgacgcgcttggtgagacgctgaccgcgatgaatgcggggtttaagcggttgaaagagcgtaaggaatttcggcatgtgttgggctgggttcgtaccacggaagtaacgcgcggcaaggatggtagcgcacatccccattttcacactctgctgatggttcccccttcgatgttgtccggccgtgagtatgtgaaacatgcccgttgggtggaactgtggcgtgattgtctgcgggtggcgtatgacccgaatgtggatatcagagtggtgaagtcacggaaaccaaaagacgatgaatctttaccttgtgttgttgcggaacagctgcgcagcgcggtggttgaaactctgaaatattccacaaagcctgctgatatgctggctgatcctgaatggttcctcgaattaacacggcaggtacacaagcgtcgttttgttgctacggggggagcgcttaagaacgttctgcaactggagcgggaaacgaacgaggatttaatcatggcggatggcatggcagagggtacagatgacggttcccgtctggcgttttcgtgggtgccggttgtcaaaaaataccagcgagatcgggcgaaagataaacgtcagctaagtggcgaggattga

SEQ ID NO: 7220 - DNA, 303 bp, Escherichia coli; identical to SEQ ID NO: 7218

SEQ ID NO: 7221 - DNA, 732 bp, Escherichia coli; identical to SEQ ID NO: 7219

SEQ ID NO: 7222 - DNA, 672 bp, Escherichia coli
atgcagtacccgattaacgagatattccagaccctgcaaggtgagggttactttaccggcgtccccgccatttttattcgtttacagggatgtccggtcggctgtgcctggtgcgacaccaaacacacctgggaaaagcttgaggatcgggaagtctcccttttcagcattctggcgaagaccaaagagagtgataagtggggggcggcgagcagtgaagatttgctggctgtcattggtcgtcagggatacaccgcgcggcatgtggtgattacgggtggtgagccttgcattcatgatttgctgccactgactgacctgctcgaaaagaacggttttagctgccagatagaaaccagcggcactcacgaagtacgttgcacaccgaatacctgggttactgtttcgccaaaactgaacatgcgcggcggctatgaagtgttgtcacaggcactggagcgcgctaacgaaattaaacatcctgttgggcgtgttcgtgacatcgaagcgctggatgagctattagcaacgctgaccgatgataaaccacgagtcattgcactgcagccgattagccaaaaggatgatgccactcgtttgtgcattgaaacctgcattgcgcgtaactggcgtttgtcgatgcaaacacataaatatctaaatattgcctga

SEQ ID NO: 7223 - DNA, 873 bp, Escherichia coli
atgcgctatttcatactaatattcacattcgtgtgttcctttgttgcagcccaaccaactattgtcccacaattacagcaacaagttacggatcttacgagtagcttaaactcacaagaaaagaaagaactgacgcggaagttagaatctattttcaataatacccaagtacaaattgctgtattaattattcccacaaccaaagacgagacaattgaacaatatgctacaagggtttttaacaattggcgtttaggagatgccaaacgcaatgatgggatactgatcattgttgcctggtcggatcgcactgtccgcatccaggtaggttatgggctggaagaaaaggtaaccgatgctctggctggagatatcatccgtagcaacatgatacccgcatttaaacaacaaaaattagctcagggattagagctagctataaacgctttgaataaccaactcacttcacaacaccaatatccggctaatccttcagaaattgaatcagcgtcttccagtgatcattattactttgctattttttgggtatttgcagtgatgttcttccctttctggttttttcatcaaggcagtaatttttgtcgcgcatgtaaaagcagtgtctgtatttcagcaatctatcttttagatttattcctgttctccgataaaacttttgccattgctgtatttttcttcttttttactttcaccaccattatgctctttacctgtttatgtgtacttcagaaaaaagcatctggtagaagttatcattcagacaacagcggttccggcggcggctcaagtggcggcggatttagcggcgggggcggttcttctggcggtggcggcgcgtccggtcgctggtaa

SEQ ID NO: 7224 - DNA, 201 bp, Escherichia coli
atggtgatacgcaaaaagaagtgcagggactgtggaaacgcgattactcataatacagtgtgttgcccgtattgtggttctgtcgaccccttcggctactaccggaatacagaccgtatcgttaccatactgctggcgctgattattgtggtcctgctgactactgtcagcgtcagtgtgtgtatactgtgtagctggtga

SEQ ID NO: 7225 - DNA, 267 bp, Escherichia coli
gtggctgagccgtaccggtataccgggtggttgttgcgaaaagatgcttccgcacgcacgcgcgataaagaggggatagttttcgtgaggacagggagagaagcaggcgttctgataattgcagagttgttttcggaggtggttacagtgagtcagcccgttcctggcgaggaggagactgatatcaccgatgggataaggctgtctgattggtattataaatataagaagtcatcagagagtaacgtaaaggatttgccagagtaa

SEQ ID NO: 7226 - DNA, 207 bp, Escherichia coli
atggctaccccagtttcactgatggatgaccagatggtcgacatggcatttatcactcaactgaccggcctgacagataagtggttttacaggctcatcagggatggggcctttccggctcccatcaagctgggccgcagctcccgctggctgaaaagtgaagtggaagcctggctacaggcgcgtattgcacagccccgcccgtaa

SEQ ID NO: 7227 - DNA, 603 bp, Escherichia coli
atgaaacaacagtatcagacccgctacgaatggctccacgaaagctaccagaaatggctgaccggcttcacccggcacgccgtatcctggggcgtgtgtcatccgaatatctactacttccataatctgacgcccggttgggtgtcattcaatggtgaaaaaccggagattgccatcgtaccccagagcctgcaccggctgatttatggccctgacaaacgggccacgccgcccctggatgatgatctgatagtgaatttatgcaccagtgaacatctgctggttcatcatccgatgctggaaggcattctcctgtctgaatgtgaacgtctgaggcagcgttctctggcaaataaactgatcagcctcttccgtcagtttggtggcacggagttgcgcctcaaactggtctggctttgctggcttgatttaatgaccggaaacagccttgaagactggaaagagaacctgaaacggaaatcagaaaaagagctggaggaatggatcatcaaccgtcagaggcagagcgcagcactgacggatctgatggatcagtacgtgctcctggcataccgcacaacggttgacgatagccgcaactga

SEQ ID NO: 7228 - DNA, 282 bp, Escherichia coli
atgaaagatttaacactcaaatttgcagacagggccgacttttcggcctttatggagagcattggctattatgatgacgagtcgatgcaggatgatattcttattgacgtgataggtaatgtgtacaaagaaaccggagaacttactgaagatggcgagccggtatgtgttaaggaggacggatattttgtaaatgtgcgcatcattaatgattcgcaaatatcgtcattattcgatgaacacgcggttgctgttgagcatcaactccgtagctggatgtga

SEQ ID NO: 7229 - DNA, 2397 bp, Escherichia coli
atggcagtaaagatttcaggtgtactgaaagacggcacaggaaaaccggtacagaactgctcaatccagctgaaagcaaaacgtaacagcaccacggtggtggtgaacacgctggcctcagaaaatccggatgaagccgggcgttacagtatggatgttgagtatggccagtacagcgttatcctgctggttgaaggttttccgccttcacatgccgggaccatcaccgtgtatgaagattctaagccggggacgctgaatgattttctcggtgccatgacggaagatgatgtcatgccggaggcattgcgtcgttttgaggaaatggtggaagaagcggcacgcaacgctgaagccgcctctcagagcgcagcggcggcaaagaaatccgaaactgcagcggcatcatcgaagaacgcggcgaaaacctcagaaacgaatgcagctaatagtgcacaggcggcagcgacctcaaagactgcatcggcaaactccgcgacagcagccaaaaaatcagaaaccaacgcgaaaaatagcgagacagccgcaaagacgagcgaaaccaacgcaaagtccagccagacggcagcgaaaaccagcgaaacgaatgccaaagccagtgaaactgcggcaaaaaacagccaggttgcagcagcccaaagcgagagcgcggcagccggttctgcgacttcagcagctggatcagcaactgctgcggctaacagccagaaagctgcgaagacgagtgaaactaacgcaaagtccagccagacggcagcgaagaccagcgaaacgaatgccaaagccagcgaaactgcggcgaaaaacagtcaggatgcagcagcccaaagcgagagtgctgcagctggttctgcaagcgcggcggctgcttctgccactgcatcagccaacagtcaaaaagcagcaaaaaccagtgaaaccaatgcaaagacaagcgagactgcagcggcgaactcggcgaaagcatcggcagcaagccagacagcagctaaagcaagtgaagacgcagccagagagtatgcaagtcaggcagcagagccgtataaatatgtcttacagccactgcctgatgtgtggataccgtttaacgattcactggatatgattacgggcttttcgccgtcatataaaaaaattgttattggtgatgatgaaataacgatgcctggcgacaaggttgttaagtttaaacgcgcatcaactgccacatatatcaataaatcaggcgtatttagtgttgctaaaattgatgagccacgatttgaaaaagaaggtttattgattgaaggacagcgcactaactattttgttaaatccaatactcccgctgaatggacgagtaccagcaatatcgataaaactaataatggtgttgatgaatttggtttttcatatgccaaaatgcgaacaaaagataatatgacaggacaatcatctgcacttagtctgcatacatgcagtgcatcccgggggattgatgttagtggcgataataagtattgcactgtttcatgcagggttaaagctcctgatggtcttcgttgtcgtttgcgttttgaaaaatacgatgggtcggtttatacatttttaggagatgcttatttaactttcggaactctgataatagaaaaaactggcggagcagccaatagaatagcagctactgcaactaaagatccggttacagggtggattttctatgaggcaactatagaagctgttgaaggtgaaaccttaattggcgcaatgattcagtatgcgccgaaaaaaggtggtataactgaagcgggagattatatttaccttgcaacaccacaatttgaaaacggcggatgtgcttcatcttttgttattacgacaactgcacccgcaacccgctccagtgatatggtgacgatcccaactgaaaataatatctataatagaccgcttacgtgtcttgtcgaggttaatagaaattggggcgatattcctcctaatgtagcaccgcgtatttttgatttttctggtgtgccacctattgagtcaattacatacgcttttaacacaactgagaaatattacggtcagctttatatgcaaacttataaagcgtcgacaagtacttacgtttctagtgtgtttgctggtcgaactgatgttcgaaaattcattggtggttttaatatttattctgatggtactaaacgagtagtttctaacggtgaggctactaaaactatgaaaacggagtggacgggcgtaaaaacacggacctttattcgaattggaggtcaagccacatcgggaactcgtcatctattcggccatttgagaaatctttgtctctggcataaagaattaactgatgcgcaaatgggggagagtattaaatga

SEQ ID NO: 7230 - DNA, 2172 bp, Escherichia coli
ttgaataactttttttctaaagttgaaaaagaggcggatgctttaaaagatgccatttatctgttacacgatgaaaatgaaataaaacgcgcagttcttcatcggatgaaaaagatagattctgttaatttagtcggaataatgctaaataatggaaagtatcttagctttattcgaactgataatggtgatgttaaatttttggggcaatcagagccaggtcatgcttttactagccctgatggtgaaattaacgataactactttgatcctgaatcccgtccctggaataaattaccaacagggacttattcaaaatggtcaccatggtataactgctatggcattgccgggaaaaaatgtttttcgttttcattacgaccagccgaagcagaaaaagattcatttgctctgaagttaattcatttagatcttgatgaaagatattttagcaatttcctggacaaattaggaggaaatgcagatattttatttatggaacagaataaaaggattatggtaggtaatgaacaatcaatgttacatcttattgttagagatgcatctggacgttataacataagtaataataacggtaattatacggacgatattatttcactccccaggcttcctgatgtcaaatttcattattttcattatcaaaaagcagaagacacaaacataaataaatattttacactgatgtttgtatgtggtttggtttgtttctgtttattatggtacctttttgaaaagataacaaaaaaggttagaaacgactctggtaaactaattgagcatctgaaaaaattagcgagatcagtataccgaaatgataaaatcgaaatcgtgcaaaatgacagtagtgagattattgagctcaaaaaaatcattaataacattagtgacaaatacaaagagcggatggaacggttacttaatcttgtttcctatgaacaaggaagttgtttctatatcaacaaatctgtcattgaaactaataataaaacctattcagcagttggtatgctttgtatctatggattagagtttgtagaggctatacatggcagtcagaaattttatgagatcattaatgatataaaatcaaagatatcagcaaagtattctaaatattgtgatattgtaaaaatttctactgaaacatatttgttgctgtgtcacactcattgtgaagagttcatagaacgattatctgttttaaactttcctgagcatattttttgcataagaaatatttatgttcataaggttgctatttgtgaaactttttcaggggaaagtttgtcgatttatgaaggtaaactgaaactggcattaacagctatgcgagaaaataaagaatctgaatttatattttatgatgatattaaggctcatgaacttgatcaaaaggtttgggttgctggaaatataaaaaaagcaattgtgagtagtgagttttatttagtatatcaaccgattgttgatatggatagtaataatgttgttggcgccgaagcgttatgccgctggttgtccgttgaaaatggtgcaataccaccatcagttttcgtgcctgttattaaagaactgggtgattttgttcttgaaacggctattggtgaatttggttcatttagtcgtgagtatgaaattacgaaagaatttcttctgcatatcaatgtttcaccttggcagttaaatgaatttgatttccatacccgcgttttgaatttaattaataaatttggcgtaaatacggaacaaatctgtctggagatcaccgagtcagcaatgaaagatataaatgatagtttttataataatataaaatttttaagaagaaatggcattaaaatttcccttgatgattttggcagtgggttagctgacttgaaaaaattatacaaagttagacctgatagcatcaaaattgattcagaatttacttctggtattttcgatgaaactaacagggttgtgtgttttatatctagtcttgcacgagaagaaaatatgccagtgatcgctgaaggtgttgaaacagaaagacaggccagagaattacaaaaattaggcttctcccatgttcagggatatttataccagaaaccattaccgttttcagagtggcatatagacagtaaaccgaaaaaaagaaaataa

SEQ ID NO: 7231 - DNA, 1596 bp, Escherichia coli
atgacaaaatcatccggagtgattttaaacgccgctggcggcggccccgaagggatgagtcccatggacgggaggaataaccttgctcccgttttgcctgatacctcggcgctggatgcccctcccgttctgttgccttaccagcagcgctgggtggcagacacctctccgcttaaggtgatagaaaagagccgtcgtaccggtattacatgggctgaggcatccgataacgtactgaccgccgcctcttctgcgccagcaggcgggatgaatgtgtattacatcgcttataaccaggacatgaccgtcgaatacattcaggcgtgtgcgatgtgggcacgggcattcaactatgcggccagtgaaattgaagaaggattctgggaagaggacgacgacgacaaacacatcaagacttacaccatcaaatttcctgactccggctttcgtattgttgcgctctccagccgcccgtctaacctgcgtggccgtcagggtattattgttatcgacgaagcggcgttccatgagcaactggacgaactgctgaaagcggcgctggcgatgcttatctgggggggaaaggtacgcgttatctccacccatgacggtgacgacaatccgttcaatacgcttatcggggatatccgtgccggacgtcagggaggcagcatacatcgcatcactttccgggaagccgtatctgaggggctgttccggcgcgtctgtctgcgcaccgggaaggaatggtcggaggcatccgagcaggcctggatggcattggtgtacaaattctacggtgccggcgcatccgaagagcttgactgtattccggccaacggtggcggtgcctggctgtcccgtgccctgatagagtcccgcatgtccgctgatacgccggtattgcgtctgacctgcaaggaaggttatgaactgctgtctgatgaggttcgcttccgcgagacgcaggactggcttgatgagtatctgaaacccttgctggaggcactccccactgatgcccgctctttcctggggcgcgactttggccgtagcggtgatttgtcggtggactatcccctgctgcaggagaagaacctggtacgacgcgtgccattcgtactggagctgcgtaacgtgccgttcagacagcaggagcaaatcacctggtatctgatggatggcctgcccggtctgctgggtgcagcgtttgatgcccgtggtaatggtgcctatctggctgaatacgccatgcagcgctacggctccagccgggttcagcaggtgatgccaaccgaaggctggtaccgggagcatatgcctccggtcaaagctgcactggaagacggtaacctggtggacttaccaaaggatgaagacacactggatgacctgcgggccgttcaggtggtgaacgatgtcccccgcgtaccggagcaacgctcaaaagcaaaggctgacggtggtaaacgccacggggattcagccatcgcactggcgctggcgtatttcgccagccgtgaaattaacaaagggccggtgaaggcaagctcacgccgtcgtcgtcaggcggcccgtatgctggagggattctga

SEQ ID NO: 7232 - DNA, 546 bp, Escherichia coli
atggccagacgcagcacaatagaaaagctgccggaagacgtgcgccgctggcttgaacgggcgctgactgaatccggcttcagcgggtataacgagctggagtccctgctgcgtgagcgggggtacgtcatcagcaaatccgctatccatcgctatggacagaagattgagcgccgctatggtgctatccgtgcggcaacagaagcggcccgcatgctgaccgaaggcgcagcagacgatcaggatgcgcgttcggaggctgtgatagcccttattcagaccgagctgttcgagagtattgtccagttgcaggaggcggaagaaggcgaagtcgatcctaaagaacgcgtggccctgctgtcgaaggtggcgaagaatgtggctacgctgtcccgcgcgtccgtcaacctcaaaaagttccagtctgaagtacgggccagagcgcagcaggcagccagcaacgccgagaaaattgcccgtaaggggggactgtcaagcgacgcagtacaggcgcttcgtcgcgagattctggggattgccacatga

SEQ ID NO: 7233 - DNA, 312 bp, Escherichia coli; identical to SEQ ID NO: 5813

SEQ ID NO: 7234 - DNA, 144 bp, Escherichia coli
atgcgatttaaagcggatttaccgctgaattatgtccgtcgagaggattatatccgtggccagacagtcattgaggccaaactggacgcgctttataacaaactggaagtggtacagcagtaccgcaataccggaggtcaataa

SEQ ID NO: 7235 - DNA, 189 bp, Escherichia coli
atgactgcagaacaagtcaaagctctcttccgccagcgcgggatcactttcacccgctgggcagaagaaaacggctacaaccgcaatgaggtataccgcgttctcaacgggcagaccaaagcccgttacggtaaatcccatgaaatcgccgtgaagttgggactgaaatcaacagctcaggcggcctaa

SEQ ID NO: 7236 - DNA, 357 bp, Escherichia coli
atgagcaaagatataggagagcgcgttatttctgtgaggaagaaagcagggttgaaccagagagaatttgcagctcgtttaggtatttctaatggtggtatcagtcagattgaaaatggaaaggcgatgcctggaggggagtttctgttaaagatgcatcaagagtttaatgttgatgtaaattggttgctcactggaatgagcacagatggtatgactagaaaccagaatcaaatttccccagaaaaacaaaaactaatagatacttttgacgacatgacaccagaccaacaacgctcatttcttgagattgggcgattctatactcagccaaaaccaggaaaaatcgcaggctga

SEQ ID NO: 7237 - DNA, 765 bp, Escherichia coli
atgaaaatgcagacattacccatcgtgccgtggattggtggcaaacgccgccttgcaaaacacattctgccgctgtttccggcgcatgaatgttatgtggagccgttttgtggggcagcagcgctctattttcttaagacacccggcaagatcgaagtcatcaatgatatcaacggtgaactggtgaatctgtaccgggtggtaaagcatcacctggaagaatttgtccgccagttcaaatgggcgctggtcagccgtcagatctacaaatggctgcagatcaccccggaagaaacactgacggatatccagcgtgcggcacggttctactaccttcagaagcaggcgtttggcggcaaggtggcagagcacagcttcggtacctccaccacatccccgccacgcttcaacctgctgcgtattgaagaagaactgtcagcggcacacctgcggctttccagaacagtcatagaacacatggactggcaacagtgcattgagcgttatgatcgtccgcacacgctgttctactgcgacccaccgtacctgggtacggaaggctatggtgtggattttcctgaagggaactactcgcggctggcagagctggcccggtgcatcagaggaaaaatgataatttcggtgaacgacatcccgcagatgcgcgaggtgttcactggactgaacatacagacagtgaatatcaactacagtctggcgggtaaatccacgccgcgccgtgaactgctaatctgcaacttctga

SEQ ID NO: 7238 - DNA, 216 bp, Escherichia coli
atgaatccccgattaacgttaacagaacatcagcgccgtgctgaagcagtgaacaatgttctggaagatattatccggttataccgcggagaactgagtgtctgtcgtgccgcttttcattttcagggaatacaaaagcagtttgatacttctgtttttgcagaaggtattacttatgccctggaccggataaggtcagaaaatcgccccggataa

SEQ ID NO: 7239 - DNA, 402 bp, Escherichia coli
atgcactccttaaatgatgatttttatgtactcaccggcaaaatattctgccgattactgaacacgcatccggcacctcaggttttgatttattctggttttttcgatatcccggaccaggttgatcacgaccagaaaaagtgccggtgttttattgatacgctgatatggcttcgggataacagctatattcgttactctcagttgctggctgtgggagcggctgatgtcgtcctcacggaaaaaacgctctgtctgctcaatgccatgccgacctttctgcagccccggcccgtaccatttaaagagtcacttctggatgcagtaaaaaccggtgaaaatgcagtcatcgctgaatgcgtatcccggattatgcgttacgtgtttaatgaacgtaagtga

SEQ ID NO: 7240 - DNA, 345 bp, Escherichia coli
atgaaggagttacgtaaactcactggtcagtcaacagaatgttgttcgtccccgaagtacggcaaacaggaacacatcccgattaaccagcctccccggttcttcgacgaataccttctgacaccggaaaataaagctgagcatgaagagatcaaagcggcgttgttccgggaaatcaggaagattgctgaaatgcagttggggggcgggctggacagagtgatggcgagaggagaatgggcatcgctgtttgaaagagtttccccggaattacttcccctcgcactggctatcgggattatgcagacagcggataaacctcacttacgttcattaaacacgtaa

SEQ ID NO: 7241 - DNA, 273 bp, Escherichia coli
atgaatctgtccggcatggctgaggtcatccaccaccgactgaaccgtggcgttatcggggatattccaggtggcaccggatgtcagggtgacattcgtggggtcaatggcaccgttcagcactgtgctgccggtcagcttcagggttgtaccgcgctgagcaatgacatccgtggtgacggtactgtcgttcagcgtcagcgtgccttcattcaggttgacggttttctgggtgagtgtggtgttgctgacagtgagtgtgccacttcctga

SEQ ID NO: 7242 - DNA, 162 bp, Escherichia coli
atggatggtcagggtatcgttattcaccgttttcccggaaagggtaagcgtggcaccgttattccgcgtggtggtgcccgccagcgagccccctctggcagtgaacagtccgccatttaccgtggtatccgtggccgtatcaccggcgttcagcgtgaatga

SEQ ID NO: 7243 - DNA, 927 bp, Escherichia coli
gtgtccgctcagcacatccagacgtccgccattttccagtacgacattatcagccttacccgccacaacggagaatgctcccaggcggtttgtgccggtgacggttgcagctgtgctggtaaccagtgcacctcccgtgttctgggtgacatcagacgctttaccgccggcattcacctgcagctttcctttctggttgatggtggtatgcgcggtagttcctccttccttaatcacctgccagcccccctcgttaattaccgtgttcagcgcaagtccgtatttgtgcacatactggtttcctccctccagccgggtgttatgtgcctcgccgtgtaccgtctggtcaccgccggcgtaaatgagggtgtcccgtgccatccccgaagaccagataacctgccggccatttttgttgatggtggtggattcagccgtccctccgaccatctgaccgctggacacattttcagactccggaccaccttctgcaccggtgttgacgatggttccggttgcctgcccgccatgtttaatggtctggtagccagactggttaatcaccgttccggatgcactgccgcctgcatgtatccattgttcaccaccgttaaggacagtaccgtaagcctgcccgcgcagattctgtcctccaccggcactgataaccgtatccgtggcactgccacctgccatgacatcctgcagaccgtttgcggtgaccgtggtgtttctggcagtgccaccccgggctatctgctgaccgccggtgttgtcatcagagtccggccccagctcaagcccggtactgacagtcacgccatcagctgttccggatacaaactggttgtcatggtttaccagtgttccgccattcactgtttcacccgggtgcacaacgatgtcagcagccagcaccgggagtga

SEQ ID NO: 7244 - DNA, 234 bp, Escherichia coli
atgacagcgcttcccgaccatgccgccagccccctgatgacccgactgcaggacgagctgcgcacggagtctgtccgctctcaggcccgtgaacagtttaccggtgcggtggaccggatatttgacacagcggagagcgtctgtgttgcctctgttgtccgtacggccctgcgcgctgttcgtgacaccgtggtctctgttgcccgcgcggtatggaactggatcttcttctga

SEQ ID NO: 7245 - DNA, 264 bp, Escherichia coli
atgaccgcaccaacaggctccaagccaagctttcctgacggaatgttaattctcgttgaccctgagcaggctgttgagccaggtgatttctgcatagccagacttgggggtgatgagtttaccttcaagaaactgatcagggatagcggtcaggtgtttttacaaccactaaacccacagtacccaatgatcccatgcaatgagagttgttccgttgtggggaaagttatcgctagtcagtggcctgaagagacgtttggctga

SEQ ID NO: 7246 - DNA, 840 bp, Escherichia coli
atgaagaatggtttttatgcgacttaccgcagcaaaaataaagggaaagataagcgctcaataaacctgtctgttttccttaattctctgctggctgataatcatcacctgcaggttggctccaattatttgtatattcataaaatcgatggaaaaacttttctctttaccaaaacaaatgacaagagtctggttcagaagataaatcgctctaaagcttcagttgaagatattaagaacagcctcgcagatgacgaatcattgggattcccatcttttttgtttgttgaaggcgacaccattggttttgccagaactgttttcgggccgaccacatccgatctgacagattttttaatcgggaaaggaatgtcattaagcagtggagagcgcgttcagatagagccactgatgaggggaaccaccaaagacgatgttatgcatatgcatttcatcggccgaacaacggtgaaggtagaagccaagctacctgtatttggcgatatattaaaggtcttaggggcaacagatattgaaggggagctttttgactcattggatatagtcattaagccaaaatttaaaagggatataaaaaaggttgccaaggatattatttttaacccgtcacctcaattttcagacattagcctgcgggcaaaagatgaggccggagatattttaacagaacattatctatcagaaaaaggccatctctcagcgcctctgaacaaggtcaccaatgctgagatagctgaagagatggcatattgctacgcaagaatgaaaagtgatatgctggaatgttttaaaaggcaggtgggcaaagttaaggattaa

SEQ ID NO: 7247 - DNA, 435 bp, Escherichia coli
atgcggaacagaatcatgcctggtgtttacatagtaataattccttacgttatcgtaagcatttgctatctccttttccgccactacattcctggtgtttctttttcagctcatagagatggtcttggggcgacattgtcatcatatgcaggaaccatgattgcaatcctgattgctgccttgacgtttctaatcggaagcagaacgcgccgactggccaagattagagagtatgggtatatgacatcggtagttattgtctatgcccttagttttgttgagcttggagctttgtttttctgcgggttattgcttctttccagcataagcggctacatgatacccactatcgccatcggcattgcctctgcatcgttcattcatatatgcatccttgttttccaactatataatttgaccagagaacaagaataa

SEQ ID NO: 7248 - DNA, 2277 bp, Escherichia coli
atggtgctgtggatgattaatcagggagtcggtctggcggataccgtctggaatacttatgcctccaacccctcagatggagcagttatcacaacatcagcgtcttatcaggaacttgaccgtatagcgaaaactgcgtttatcaataacgtctgtatgttgaaggcaagtgagttatggaagaaatcagcggcagccgatcccttcccgcacgtcacgcctgcgtttgaaatgacgccagagaaaggtgcctatttatacacatacagttatggagccagcaatgccggtaatgatatgaataaaaatttactggtatccaaggctgcatgtggaagcatcacgcttacagaccccaaggccaaagcttcttatgacgaacaggctaaagctcaggcaaccatcgctgctgggggcatgtatatggcttatatgccacaggatataaagacaaatatttcagatgttattgaggcacacaatactgcattcatcggtcttgataatagtatgaaaacgctggctgaacagtatgtggccgataataatattgatattcagaccggaataaacagcgcaacggcctcatatgtatccattattgatactgcagtacgaacagttttctccactggcgaccagtgggatgatttcaaagagaatgtccagaaagatggatggtttatggctggcgcatggagtatgaaactgatccgtgtgcaggatgcgattaatggagcagctcataatcttcctgtaggtgggcaagcgacaatggaatacggagatatatttgataacagtctgaacgcgattatggcaaaagtagctcaggatatggcgaaatcaacgacagcttcaagatatgcgaatggtattgatgcgcaaagccgaacagaagccaataccagtggtaaaagtggcgcaggtcctaaaacggatgatgccgggaaaattgtttcctctcttcagagtgaagccaataagagcatttctggtgcaatggcgggttttctcagctccagcgttatcaatggcagaaaacaagggaaaattgtttcgttttcaaccgacacaactgctgccaatttacaggcgataaacccattattagccgttaaagggcttggggatacgatcagtaccgctggctggacgttattaggaagttctgcggttgttggcgcaggtcttggtgcatggacttcatggactgcaagctgggtatcgggtgcatttggcgctatggggattgtcatgccactggttatccctttatggatagctggtgataccttagccgtcgttattcctatgttgccttacgtcatgtggtttggtgtttgcgtcggctggatgatcctgtgccttgaagcaatggtcgcagcgccattatgggtaataacacatttacatccagacggtgatggcgtagtgggtcgtggtggcgctggttatggtctggttttatcgttaaccatgcgaccagcgctaatgataacaggattaatagcagcctatacgatgctccctatccttggtgggatcgtcaatgaaacattctccggcgcgtttggcatgatgtcagccaatgccgggataggtatcatcgagtcactggctctcattgctgtttatattgcgatgatgttcacggtagtgaagaaatcactttcactgattcacatcatccctgatgaaattatgaagtggcttggtgttcatggtggtcagagcatgtcgggttacgcacagtcggcatcaaaaggtgttgaaggtgctatgtttaccaaaaccgtgttggatcaggtttctcacacctcaaatgcgatgggtaatcagctcaggaatgcgcaaatcaacaaagaccgtgaacagcaacgtgagcttcaacaacagcaacaggctaaacaggggaaagcacaggcagctaataaagccaatgatacgggatctgcattcagaactcatatgagtaatgctggcccactggatcagcaggatgaatatcagtctcttgaaagtgctaactcggcttataatgcggctgaggcagcagatgctgttggtgatacagcaggcgctgcaggttatatgaatgtagcccaaaaggctgctaacagagcggtatcgtttggtgaacataacagaccgttgctgcctataaaccttcaagcccaagcttcaccaattgaaagctttacggctccagataaagggaatggtggtggatcttccggtggtagttcatcacccactgaaagtaatgacagataa

SEQ ID NO: 7249 - DNA, 234 bp, Escherichia coli
atgacagcgcttcccgaccatgccgccagtcccctgatgacccgcctgcaggacgagctgcgcacggaatctgtccgcgctcaggcccgtgaacagtttaccggcgcggtggaccggatatttgacacggcggagagcgtctgtgttgcctctgttgcccgtacggttctgcgtgccgtccgtgacacggtggtctctgttgcccgcgctgtatggaactggattttcttctga

SEQ ID NO: 7250 - DNA, 813 bp, Escherichia coli
atggaagccgatctgaaccggcttcagaaagagagcgatacgctgactggtagggtgtatgacccggcagtacagcgtccgttgcgtcagacccgcacccgtaagccgttccctgaatcactaccccgtgacgaaaagcggctgttgcctgcggcgccgtgctgcccgaactgcggcggttcactgagctatctgggcgaggataccgccgaacagctggagttgatgcgtagcgccttccgggttatccggacggtacggggaaaacatgcctgtactcagtgcgatgccatcgtgcaggcacctgcaccttcgcggcccatcgagcggggtatcgccggaccgggtctgctggcccgcgtgctgacctcgaagtatgcagagcacaccccgctgtatcgccagtcagaaatatacggccggcaaggtgtggagctgagccgttcactgctgtcgggctgggtggatgcatgctgccggcagctgtctccgctggaagaggcgcttcatggctatgtgctgactgacggtaagctccatgctgatgacacgcctgtcccggtgctgttgccaggcaataagaaaacgaagaccgggcggttatggacctacgttcgtgacgaccgtaacgccgggtcaacgctggcgccggcggtgtggttcgcttacagcccggacagaaaaggcatccatccgcagacccatcttgcggggttcagtggtgtactgcaggcggatgctgtcacgaacggtgcaatagtgatccacacccaacgcctgaaatcagatccagggggtaatctgctctcctga

SEQ ID NO: 7251 - DNA, 549 bp, Escherichia coli
atgatggaactgcaacatcaacgactgatggtgctcgccgggcagttgcaactggaaagccttataagcgcagcgcctgcgctgtcacaacaggcagtagaccaggaatggagttatatggacttcctggagcatctgcttcatgaagaaaaactggcacgtcatcaacgtaaacaggcgatgtatacccgaatggcagccttcccggcggtgaaaacgttcgaagagtatgacttcacattcgccaccggagcaccgcagaagcaactccagtcgttacgctcactcagcttcatagaacgtaatgaaaatatcgtattactggggccatcaggtgtggggaaaacccatctggcaatagcgatgggctatgaagcagtccgtgcaggtatcaaagttcgcttcacaacagcagcagatctgttacttcagttatctacggcacaacgtcagggccgttataaaacgacgcttcagcgtggagtaatggccccccgcctgctcatcattgatgaaataggctatttgccgtttatgagacgacaataa

SEQ ID NO: 7252 - DNA, 1008 bp, Escherichia coli
atgcagcacaacacactaccgaaacacgatcagaaattgccgtttacacgctacgacttcggctgggttttattatgcataggcatggcgattggtgccggaaccgtgctgatgccagtacaaattggcttgaagggaatttgggtatttattaccgcagcgatcattgcttatcctgccacctgggtagtgcaggacatttatttaaaaaccctttctgaaagcgattcctgtaatgactacaccgatattatcagtcattacctggggaagaactggggaattttcctcggggttatctactttttgatgattatccacgggattttcatctactctctctccgtggttttcgacagcgcctcgtacctgaaaaccttcggtttaaccgatgccgatctttctcaatctctattttataaagtcgccattttcgccgtactggtggcaattgcgtctggtggtgaacgattactgtttaagatttccgggccaatggtggtggtcaaagtagggattatcgtcgtgttcggttttgcgatgatcccgcactggaatttcgccaatataaccgccttcccgcaagcctccgtctttttccgcgatgtcctgcttaccattcccttttgcttcttttctgcggtatttattcaggtacttaacccaatgaatattgcctatcgtaaacgggaagcggataaagtactggcaacccggctcgcgctgcgtacccaccgaattagttatgtcacgctcatcgcggtgatcctgttttttgccttttcgtttaccttctcaattagccacgaagaagccgtttctgcctttgaacaaaatatctcggcactggcactggccgcgcaggtgatccctgggcatatcattcatatcacctctacggtgctgaatatctttgccgtactgaccgcattctttggcatttatctcggtttccacgaggccattaaaggcattattctcaatctggtaatgactccaacttattga

SEQ ID NO: 7253 - DNA, 267 bp, Escherichia coli
atgaatattaatattgaatacctgaatggaaataagactattggtttattttttttaagaagtgaagcggtgattcctgacaggtttaaaaaccttattttgcttattgatggattaagttttggcacatttggttttcatccgcacgaaggttttgaggatgaattaattttatatattcagaaaacaaacgagagggtaaaaactctttttgtgaaaatagatttaaacggtatcaagtttggatttttaagaacgcattcttag

SEQ ID NO: 7254 - DNA, 966 bp, Escherichia coli
atgtcagaagataaattcctttcggactacagcccccgtgatgcagtttgggatacccagcgcacgcttaccgattctgtcgggggtatctaccagactgctgctgaattcgagcgctatgcactccgtatggcctcctgtagcggtttgttacgttttggttggtctaccatcatggaaaccggagaaacgcgcctacggcttcgtagtgcgcaattttgccgtgtccgtcattgccctgtctgccagtggagaagaaccctcatgtggcaagcccgtttttatcaggctctaccgaaaatcgttgtggattacccgtcttcccgatggttgtttctgacgttaactgtcaggaactgcgagataggtgaacttggaacagtccttacagcaatgaatgcggcgtttaagcgaatggaaaagcgaaaggagctatcacctgttcaggggtggatcagggctacggaggtgacgcgaggtaaggatggcagcgcacatccgcattttcactgtctgctgatggtgcaaccttcttggtttaaagggaagaactacgttaagcacgaacgttgggtagaactctggcgcgattgcttgcgggtgaactatgagccgaatatcgatattcgggcagtaaaaactaagacaggtgaggttgtggccaacgttgccgagcaactgcaaagcgcggttgctgaaacgctgaaatactccgttaaaccggaagatatggcaaacgatcctgagtggtttcttgagctgacgcggcagcttcacaagcgccgttttatctcgaccggtggggcgctaaaaaacgtcctccagttggatcgagaaaccaatgaggatcttgtcattgccgacgatgtaggggatggcactgatgacgggaagcggacggcgtttgtctgggattcaggtaaacggcgttacaaacgcgcccctgagaaggataaatcggattaa

SEQ ID NO: 7255 - DNA, 207 bp, Escherichia coli
gtgtcccgtgccatctacccggacaccacgcaactggagctgcgccgggagcttgattatctggcagatcgcaaaatggtggagctggagaagagaccgtccggtgactggtttgccgatctgagtcgccttggtgtggatattgtggaatacaccgtggaatgcggcccgggtattgcccgcccggaaaaatactggagtgagtga

SEQ ID NO: 7256 - DNA, 549 bp, Escherichia coli
atgggacgtcgcagcagcattgattctctgccgacggaggtccgccgctggctggagcgggcactgacggagaataacttcagtggatatgcccggctggaagccctgctgaaggagaagggatacgtcatcacccgctcttccctgcagcggtttggctacaaaatggagcgacaactggcccgcatccgcgccgccaccgaggccgcgcgtctgatggcacaggaagccggtgacgaggcggacgatcgttctgccgggatgatggcacttattcagaccgagatgctggatgttctgatgcgtctgcaggaaatcggggaaaatgatgaccctgcaaaacgcgcaaaactgctggccactgcttcggaaagtatagccacactggtacgtgcttcggtgacccacaagcgattccgggccgaggtgctggcaaaaattgaggcgcggatgaatgctctggaaaaacaggcgaagtccggcgacacccgcctgagtctggaaaccctgaagatggtgcgggaacagatttacggggtgatctcatga

SEQ ID NO: 7257 - DNA, 1317 bp, Escherichia coli
atgacagcagccattcagctgtatccctaccagcaggcgtggtttctggatcgtgcccgtttcaagattggcatgtttgcccgccagacgggcaagacgttcaccaccacgctggaactggttgatgactgttttgaaacagaggcatcagggggacgcactcgctgggtgatcctatcgcgtggggagcgtcaggcaaaagaagccatggtggagggggtgaaaaaacactgcagcgcctaccggatggcggcccgtgaggtggaaagttattaccgtgctgaaagcggcgaacgctacaccatgcttgaggtggagttacccggtggctcccgtatcacggccctgccggcaaatcccgacacggcacgtgggtttgcggctaacgtctttctggatgagttcgccttccatgccgacagtcgcaaaatctggaccgccctgtttccggtcatttccaacggctacagactgcgtgtgacatcgacgccgaacggcaagggaaacaagttttatgaactgatgaccagcaacgcccttgaaaatgtctggtcacgtcacatcgtggatatttaccgtgccgtgcgcgacggccttccgcgtgacattgcacagatgcgacaggcgctcaacgatgatgacgcctgggcacaggagtttgaactgaagtggctggatgaggcatcggcctggctgacgtttgaactgattgacggcgtggagcacgatgctgccggactgccggtgcactatacgggtggcccctgctttgtgggggtggatattgctgtccgtaatgacctgtttgtgatctgggtgcttgaacaggtgggggatgtctactggacccgggaaatcatcacccgtaaacgggccacctttgctgagcaggatgctttgctggatgacgtatttttccgttatcgcgtgctgcgctgctgtatggatcagacaggaatgggggaaaagcctgtggaagatgctcaggagcgccacggcaggagtcgtgtggagggggtgatatttaacagcccgaacaagctcaccctcgcgacccgtggcagggagatgtttgaggaccgccgcctgcgtattccggcgggagatgtggtactgcgcagtgatctgcataaactccgtaagatcaccggacctaccggagcgcctcgctttgtggcggaaagtgatgcagcaggtcacgccgaccgtacatgggcctgttttctggctattaacgccactgacggaccgtcagggccggtggtggcgcgttcgcgccgccgccgtgaagccgcccgcatgctggagggattctga

SEQ ID NO: 7258 - DNA, 1248 bp, Escherichia coli
ttgcatggggccattatttcccatgtaacggtaaatgcgaataaacaggcgacggctttctcctcgtcacagcaggataccgaccagtacggcatgaaactgactctgaacagccaactgatggacggctggcaaatcacctgggggctggatgctgagcatgagcgctttacctccaaccagatgttcttcgatctggctcaggcaagtgcttccggagggctgaacaaccataagatttacaccaccgggcgctatccgtcatatgacatcaccaatctggcggccttcctgcaatccagctatgacattaatgatatttttaccgttagcggtggcgtacgctatcagtatactgagaacagggtagatgatttcatcgactacacgcagcaacagaagattgctgccgggaaggcgatatctgccgacgccattcctggtggttcggtagattacgataactttctgttcaatgctggtctgctgatgcacatcaccgaacgtcagcaggcatggttcaatttttcccagggggtggcattgccggatccggggaaatattatggtcgcggcatctatggtgcagcagtgaacggccatcttcccctgacaaagagcgtgaacgtcagcgacagtaagctggaaggcgtgaaagtcgattcttatgaactgggctggcgctttatcggtgacaacctgcggactcaaatcgcggcatattactcgctttccaataagagcgtggaaaggaataaagatctgaccatcagtgtgaaggacgacaggcgccgtatttacggcgtggaaggtgcggtggactacctgatcccggatactgactggagtaccggtgtgaacttcaatgtgctgaaaaccgagtcgaaagtgaacggtcaatggcaaaaatatgacgtgaaggaatcaagtccatcgaaagcgacagcttacattaactgggcgccggaaccgtggagtctgcgtgtacagagcaccacttctttcgacgtaagcgatgcagagggtaacgatattaatggttacactaccgtcgattttatcagtagttggcagcttccggtgggaacactcagcttcagcgttgagaacctcttcgaccgtgactataccactgtctggggacagcgtgcacctctgtactacagcccgggttacggccctgcttcactgtacgactacaaaggccggggccgaacctttggtctgaactactcagtgctgttctga

SEQ ID NO: 7259 - DNA, 390 bp, Escherichia coli
atgattacgggcttttcgccatcatataaaaaaattgttattggcgacgatgaaataacaatgcctggcgacaagattgtaaagtttaaacgcgcatcgaaagcaacttacattaataaatctggtgtgctgacagaggctgccattgacgagccacgatttgaacgtgatggcctgcttattgaggggcaaagaactaacctgctaatcaattcaacaaatccgactaaatggaacaagtcgtcaaatatgatcttaagtgcatcaggtgtagatgatttcggattccagtacgcaaaatttacattaaaaccagaaatggtagggcaaatttcagcgattaacatagtaaccgtttccggcagtaaaggttttgatgtaacaggctga

SEQ ID NO: 7260 - DNA, 864 bp, Escherichia coli
gtgcaaagtggcactccaaatttaagatgccgattacgatttgaaaactatgatggttctacctacacattcttaggtgacgcttacttaaatacgacagatttatctattgataagacgggtggtgccgctaatcgcattactgcaagggctgttaaagatgaagcaagcaaatggatcttttttgaggcgacaattaaggcacttgatacagaaaatatgataggtggaatggttcagtatgccccggcaaaaggagtgggcactggcgcggatgattatatttatattgcgacccctcaagttgaaggtggggcatgcgcttcatcgtttattataacaggcgcatcccctgtaacacgcgccagcgatattgtaacggtccccatttctctaaattggtgcaatcccgctattagttcattagcagaagttaataccaattgggatgaatcgccaaacaaagaaggtagcgcacgtattcttaatatttccactacgggagatacaactgaaattgcagatgaaagttatatgtatttggggtatacatctttgggagcacgcgcaatcattacaaatggtaaaggcactaaaatagaatataaaagcgttatagaacgaccagagagaaaaagcattatcggctttagattcacagaaagtcgagaattgtgtgttgtggttaacggtaatattggtgctaaggtagtttctccttataaaaaacacaaatatacaggaggcttcattaatattggtggtcaatcatcatccggcaaccgtcacctatttggacacgttcgaaatctgcgtatttggcacaaggcattgactgatgctcagatgggggagtcaatctaa

SEQ ID NO: 7261 - DNA, 282 bp, Escherichia coli
atgaaagatttaacactcaaatttgccgacagggccgacttttcggcctttatgggaagtattggctattataatgacgagtcgatgcaggatgatattctgattgatgtgataggtaacgtgtacaaagaaaccggagagctgactgaagatggcgaaccggtatgtgttaaggaagatggatattttgtaaacgtgcgcattattaaggatacgcaaatatcgtcattattcgatgaatacgcggttgctgttgagcatcaacttcgtggctggatgtga

SEQ ID NO: 7262 - DNA, 918 bp, Escherichia coli
atggttcagaaaattttgtcggataaggttatgaatgaaagaacaaatgcgtattactcttattatcttggagagcgtaatatctccgtactgccccttaatgtttatgatcccccggaacgttttatcgcttacataaaaaaaaacagagaaaatctgaacatcacactttcagattttgaacttgaacaaatcatttctggtatgcgtctgaaggcactggcctccctggtgcccctggaaaaaatatcctggatcgcgggcagtgaacgcgcatgcttattttcctggtatctgttgatgcagtttatccagaataacaggacaaaaataagcgcagacttgcttcaaaagaataaactgtatcttaaagaagagtatttagaagggaatgccttcccgtcggactcatcgacacagttcagacaaatactcagagttctcgatattctttctgataagaatttgcgggatgagtggataatccagaccaaagacagatggatacgggcatttaaatcaaagagtcctttcagttacctcctcccggagaacgaacatgaatgcatatggacatggaattatttgaagggaaaaaatattgcactggaaaaactggccagttttcctgattctgctgatatttaccacgcaattcacctttcatttgacatatgggttacctgtccactcacctcacctgacgatataaaaaatttcagaaacagtttcaataaggccaaggcgcagcgcaagtacaaaaaaatgcaggaagataaagtcaatgtacagttttttcttgacgcagaaaccagggcgcagctcaaagaattatcgagggtcagaagactcagtaccggcgaaatgctgcatgacctgattgttgaagagtataaaaggtaccgacattccagataa

SEQ ID NO: 7263 - DNA, 129 bp, Escherichia coli
atgaaaagaggcgtgtcccgtaaatataacgaatcatcgcaggatatgcattatcaggtgataccagagggcattaaactgtcgtcacggataagaatatacaacatttctgataacaaaacatcataa

SEQ ID NO: 7264 - DNA, 309 bp, Escherichia coli
atgagtaagacgaatgtttcaagctccggcagtcgcatcctccgggtactcaaagcgctgcgcggtcatgccctgaacggtatttctaacggtgaactggcgacagcactgcacgagtcaccggcaaacatcaaccgggcactcaacaccctcattgaagaagggctggctctgaaactggagaacggacgttttgcaccgggcatccagttactgcagatcgctatggcccacagtaacgagatggcacgtgcacaggatcgtattaacgaaattaaccaacgtgtcatttcaggtagtcgtttgtaa

SEQ ID NO: 7265 - DNA, 753 bp, Escherichia coli
atgggacgtaccaaatcaccgattaacactgaactgaacgccgatgtaccgctgtcggaggatctcaacgtcagcctgaatgccatgacacagcatcgcatggagatcatgcagcagtttggtgatggactgccttatgaacgtgaacgcatcgttcacgaagcacgtttttatatggcgcagagtgctgaatctatgttggaagcgggtaagcggctgatcatcttaaaagaaaatgaaccacatggtgatttcacaaatattctggaaaacgacctcggattagcaccacaggtagctcgtcgcatgatgcaggccagcgtgaaatttctcggcaatggagatgaacagccaaaacgctcagcgctgagcgttttgggaaaaaccaagttatatgaactgatggttctggatgacgaagaactcgacgcattagctgatggtggaaccgtcgccggtgcaacgcttgatgatattgatcgcatgaccagccgcgaactgaaggccgccctgcgtgaagcgcgcgaaaccaacgcagctcagcaacaggtgcttgccggaaaggacgaaaaaatcaacgaactggccacaaaactggagaagaaatcgcgcctgcaacctccgccgccagacgaagaactgaaaaaattgcgggcggaagtgacggcattagcggttgaggccgaatcgctatcgccgtccggctgtccagtgtttttgagaccctgtgtgaatactgcaccaaaaacatga

SEQ ID NO: 7266 - DNA, 318 bp, Escherichia coli
atgaatacgaataacacacaaaataccctgatggacagcccggaggcactggggcacgcactgtgtaatctgctgccggagatggtgcagggtttccgcgtggtgaccccttccggtgaaatctgcgtacccgcacaggagacgcacccgtttgtactgacgatggaggtgatgctgatgcagcagataagacgtctgcagaatcagtcagcattacgcccggtagttgcaccgcaaccggtaaataccgtggtgaaaacctgcgatggcgaaacactgtgcgacctcgccagaaaaattgccgccagaatcggataa

SEQ ID NO: 7267 - DNA, 165 bp, Escherichia coli
atgcaggcacttgatttaagattacaaatgcttcaaatcgaaagaacagaagacacaaatattttgcttgcggctctgttaggacaacaactacaaccagttgataagcaaatgctgaataatttaaaaacaaatgcgacaagagcgactcaggcaacaaaataa

SEQ ID NO: 7268 - DNA, 279 bp, Escherichia coli
atgacaactattttgcatccaaattatgttgttgtatcaaagctaatatctaagtttgacattacacatgacagtagagatgaaaatattaatatcttgatttctgtcatttatgacttggataatggcaatacaatcgaatactacattaataatcaggaagaggctgagaaaaaatgcattgagaaaaacagattttcaagaaaatttaaaaatcgcattgataatatatcatctgaagaaacacgctcggctaaagataatcacaaacctaaataa

SEQ ID NO: 7269 - DNA, 453 bp, Escherichia coli
atgtctggaaaaaatccgttttggaattatgattataatgcggcgcaacgtaatagagaaattgtagactcttaccaacaggcaaatgaggcaaggctggattctcaacagtcgcagtttgaagcgtctatggctaatgacagggttagtagaatacagatgcagttgaataacacaatcaatagccataagaaggttgtcgctgattacgagcaacgtctggaagggtttaggcttaacttcttcaaaataatgatgcagtcgaatattttctacagaacgataaacagattgcaagaagaatggcctgaccaaaaagaccatattcttgatgaaattcaacggcatccagaatatcgcgaaaaatggtggaatgccgtatctaaaaacaatataggtgaaagtgttttggcgtttccttatccgcaacgcgagctaaaaaagaaaccataa

SEQ ID NO: 7270 - DNA, 822 bp, Escherichia coli
  misc_feature (757)..(766): n is a, c, g, or t
atggcgattcatgtagaacatgtcggtgtattagaaagagccagagaagtttctcgcttagaggacattatcacagaagataatgaagatattgaagctgaaatgcctaaaatgggggatgatcccgccggtaaagaagctcgattcttacaagctactgacgagatgtcagcagcgttaacgcagtttatgaagaaaaaaatctacgaagaacaactggccaactttctggacggagaagaatatgtcctggaagatcagccaatagaaaaaaccgataaagtcatggaggcgcttaaggcagcaactacccatgactatgaagtgtatagctttgctaaaaaattatttccagatgaaagcgatctggtggttgtattacgtgcaattttacgtaaaaaacaaatatctgaaaatgtgcggctaaacgctgaagcattacttaaaaaagttaatcaagagactactaaaaaattcattaatagcggtattaactcggcattaaaagcaaagttatttggccaggcgttgtcattaaatccaaaattactaagggcaagttatcgacaatttttaatggcagaagacgatgctgtagatacttatgtcgaatggattggtagttatggctatcaaaatagaatgctggtgacaaaatttatcaaagagacgcttttctcagatataaatgcacttgaggcgagttgttcatcattggaatttggtatgtttctcaataagttgtcacaactattgnnnnnnnnnncaactattgtctcttcagtcggcagaggctttatttctgaaaactttgatgaataa

SEQ ID NO: 7271 - DNA, 417 bp, Escherichia coli
ttgaatattgaagatggcaatgaaatcaattctgacaagaccaatgttgatgatctgcctcaggttggtagaacgcttataagtactattgcgcgcgtgcctcaagggaaaagtcttttgattggtggatatacacgagatacgaatacctatgaaagtcgcaagatcccaatattaggcagtattccatttattggtatattatttggatatgaaggaacaaatgcgaataacatcgttcgtgtctttcttattgagccaagagagatcgatgagcgcatgatgaataatgcgaatgaggctgcggttgacgccagagcaataacacagcaaatggcaaaaaataaagaaatcaacgatgaattactgcagaaatggataaaaacttacctgaatcgtgaagtcgtcggaggatag

SEQ ID NO: 7272 - DNA, 312 bp, Escherichia coli
atgtttgacggcgcattaattgaatacgcagcagcctcgcttttcgaaatgcgccgtaagcccggtaaagaagccattctgatggcgtggaatgttgaagagagagcacgattgtggctggaagcatggcgtttatcattgtcaggatggcacatttctgttcttgctgatcccattgaatcgccgcgcccggaactgttcccgacgcaaacattgattgtctggacaggcatggcaccaacgagaaggcaaaacgaacttttacaacactggggtgagcaaggttataaagtcatcttccatgccccctaa

SEQ ID NO: 7273 - DNA, 381 bp, Escherichia coli; identical to SEQ ID NO: 6156

SEQ ID NO: 7274 - DNA, 348 bp, Escherichia coli
atgatcccgttaccttccgggaccaaaatttggctggttgccggtatcaccgatatgagaaatggcttcaacggcctggctgcgaaagtacagacggcgctgaaagacgatcccatgtccggccatattttcattttccggggccgcagcggcagtcaggttaaactgctgtggtccaccggtgacggactgtgcctcctgaccaaacggctggagcgtgggcgcttcgcctggccgtcagcccgtgatggcaaagtgttccttacacaggcgcagctggcgatgctgctggaaggtatcgactggcgacagcccaagcggctgctgacctccctgaccatgctgtaa

SEQ ID NO: 7275 - DNA, 852 bp, Escherichia coli
gtgaaagtactcaacgagctaaggcagttttatcctcttgatgagcttctcagggctgcggagataccgcgcagtacgttttattaccatctaaaggctctcagcaagcctgacaagtatgcggacgttaaaaagcgtattggtgagatttatcatgagaatagaggccgatacggataccgtagggtaacgctgtctcttcatcgagaagggaaacagattaaccataaagctgttcagcgcctgatgggaatcctctcactgaaggcagcgattaaggtcaagcgataccgctcttacagaggagaggtagggcaaaccgcccccaatgttctccaaagagatttcaaggctacgcggccaaacgagaagtgggttaccgatgttactgaatttgcagtcaatgggcgcaagctgtatttgtctccagtaatagatctcttcaacaacgaagttatttcttacagcctttcggaaagaccagtgatgaacatggtcgagaatatgctcgatcaggcattcaaaaagcttaatcctcacgagcatcctgttctgcactctgaccagggatggcagtatcgtatgagaagatatcaaaatatccttaaagaacatggtattaaacaaagcatgtccagaaaaggcaattgtctggataatgctgtggtggagtgtttctttggaaccttaaagtcggagtgtttttatcttgatgagttcagtaatataagcgagctgaaggatgctgttacggaatatattgaatactacaacagcagaagaattagcctgaaattaaaaggtctgactccaattgaatatcggaatcagacctatatgcctcgtgtttaa

SEQ ID NO: 7276 - DNA, 522 bp, Escherichia coli
atgtcaaagccaaaatacccttttgaaaagcgccttgaagtcgtgaatcactacttcactactgatgatggttacaggatcatctcggcacgttttggtgtcccccgaacccaggtcaggacatgggttgccctctatgaaaaacatggagaaaaaggtttaattcccaaacctaaaggtgttagtgctgatcctgagttgcgtattaaggtcgtgaaagctgtgatcgagcagcacatgtcccttaatcaggctgctgctcactttatgcttgctggtagtggttctgtagccaggtggctgaaggtttatgaagagcgcggagaagctggtttacgcgcgctcaagattggcaccaaaagaaacattgcaatatcagttgatccagaaaaagcggcatcagcattggagctgtcaaaagaccgacgcattgaggatcttgaaaggcaagttcgatttcttgaaacgcggcttgtgtatctaaaaaagctgaaagccttagctcatcccacgaaaaagtga

SEQ ID NO: 7277 - DNA, 426 bp, Escherichia coli
atgggtaaaggcagcagtaaggggcataccccgcgcgaagcgaaggacaacctgaaatccacgcagttgctgagtgtgattgatgccatcagtgaagggccggttgaaggtccggtggatggattaaaaagcgtgctgctgaacagtacgccggtgctggacagtgaggggaataccaacatcgccggtgtcacggtggtgttcctggctggtgagcaggagcagactccgccggagggatttgaatcctccggctccgagaaggtgctgggtacggaagtgaaatacgacacgccgatcatccggaccatcacgtctgcaaacatcgaccgtctgcgttttaccttcggtgtgcaggctctggtggaaaccacctcaaaaggggaccggaatccatcggaagtccgcctgctggttcagatataa

SEQ ID NO: 7278 - DNA, 213 bp, Escherichia coli
atgctggcaccgaaagccagaactccccgtacacagacaacggataacggtaagcagaacacctatttctcctcactggataacatggttgcccagggcaatgttctgcctgttctgtacggggaaatgcgcgtggggtctcgcgtggtttctcaggagatcagcacggcagacgaaggggatggtggtcaggttgtggtgattggtcgctga

SEQ ID NO: 7279 - DNA, 216 bp, Escherichia coli
atgaaatccatggataagttaacaacgggtgtcgcctatggcacctcagcaggtagtgccggatactggtttttacagctgctagataaagtcacgccctcacagtgggcggcaattggagtgctgggtagcctggtatttggcctgctgacgtacctgacaaacctttatttcaagattaaagaagataagcgcaaggctgcgagaggtggataa

SEQ ID NO: 7280 - DNA, 498 bp, Escherichia coli
atgcctccatcattacgaaaagctgttgctgctgctattggtggcggggctattgctatagcatctgtgttaatcactggcccaagtggtaacgatggtctggaaggtgtgagacataatccttacaaagacatagttggtgtatggactgtatgttacgggcatacaggaaaagacatcattcccggtaaaacgtataccgaagcagagtgcaaagccctcctgaataaagaccttgccactgtcgccagacaaattaacccgtacatcaaagtcgatataccggaaacaacgcgcggcgctctttactcgttcgtctacaacgtgggtgctggcaatttcagaacatcgacgcttcttcgcaaaatcaaccagggcgatatcaaaggcgcatgtgaccagctacgtcgctggacatacgctggcggtaagcaatggaaagggctgatgactcgccgtgagattgagcgtgaagtctgtttgtgggggcagcaatga

SEQ ID NO: 7281 - DNA, 507 bp, Escherichia coli
atgatgctcacaaaggtagaaaacactttctggcttattcttctcccacttaagaccgaaaggcgaggcatcatcgccaaatttcagatactgctcctccccacagtgcggacagggcacataaaaacgcatgaagtgtgccgactcgttagcggctttttcgatctggcaggagcctttgattttaggcgtcgagccgcgaatggattttggccatacagagccctcaatacgtttatcccccagcagggttggcgaaccctctttttcaacatccggttcgaacgaggaaagctcgtcataacagaccacatccacggatttttcacggtagttttttgctgccgcaccacccagacaccagaaccccacaccggaggaaaaacgcttcagggtgagcgtattatcgcggtgttttcttccgaaccatggagccagctccagcaatgcaggaacatcccttatcgttggctcaacatgagatttcataaaatcttcagcagctga

SEQ ID NO: 7282 - DNA, 1026 bp, Escherichia coli
atgaaagtatcaactcttggtatcgacctggcaaagaacgtttttcagcttcatggtgtcgatcatgaaggccatactattttgcgtaaaaagctcacccgggctaagtttgttcagtttgtgattcaactggaaccttgtctgattggcatggaagcctgctcatccagtcattattttgcgcgattattcacccgctatggtcatgaggtaaaactcatacctccgcagtatgtgaagccttatgtgaaaacgaacaagacggatgcagcagatgctgaagcaatctgcgaagcggtaacccgtccgaatatgcgttttgttcagataaaaaccgaagagcagcaggccgttttagcgttacacactgaacggggaatacttatccgtgagcggattgcctgtgccaatagtttaagagccacactcgctgagtttggtattacgattgcggccggacaaaaccatttaacccgtgagctgccagccattctggaggatggcgaaaatggtttatctccctttgtcagaaccagcatctacagacagtctaaacatatccgggaacttgaagaacaagttaaacaggtagaagaagctctggcctcctggtatagaacgcaggaagcctgccagagaatggccaagatcccgggggttggcatgctaacggccacttatgtggtagcagcagtgggtaatgcccgacaattcagtaccgcaaagcagttcgcttcatggctggggctgacaccaaaggaacattccagcggcgggaaacagcaactgggagggatcagcaaacgtggagatggatatttccgatacctgctggttcacggcgcacgcgcacttaccgcctgggtcaaccgaaacggcgcggttgaggagaattcctggcttcagggactccttgagcggaagcactacaatgtagctgttgtcgccatggcggcaaaaacagcgaggatcatgtggtcaatgttgtcacacaatactgaatatcaacctcggcagctcgcctga

SEQ ID NO: 7283 - DNA, 432 bp, Escherichia coli
gtgatatcccgcttcatcaatgccctgaaagcccgaatcgacgcttaccagaaacgtaagcatcgggaaggtaaacgcgtgcatcccaccactctgcattacgtctgggcccgggagtttggggagtgcaaaggtaaaaaacactatcatctgatgctgctggtcaaccgggatacctggtgtcgtgccggtgattaccgcgctccgggatcactggccggaatgattgaacaggcctggtgcagtgccctgggggtggatgccggatgccatgccacgctggtgcattttccggcctggccggcggtgtggctggcgcgtaatgatgacaccggctttcagcaagtgctggaacgtgctgactatctggcgaaggagcataccaaagctcactgcaccggtgagcgcaactttggctgcagtcgtggctga

SEQ ID NO: 7284 - DNA, 150 bp, Escherichia coli
atgagtgtattgcgcatttgcttgtcccggccaaagggtttaatacatgaaaatgccattcattcgctcgcgctggcatctacagagagcatggtagagagcataagaaatatccacgccgaagataaaattttctccatcttgatctaa

SEQ ID NO: 7285 - DNA, 258 bp, Escherichia coli
atgagtgatcgtgttattgaatgcgcctccagagcggggcgcgacttctcagagttcatgaaaggcgagaagggcatgatggaagcattggcctcggtggatgagtttggcgagcagctgcgcctcaacggctgtgtcaatcatcactttgttagctacatgatgcggaactcgatcatgcaggcattcatggacatggcaaaagccgagaggaaagaagagcgccggcgtaagcgagcggaagcaaaagcgaagtag

SEQ ID NO: 7286 - DNA, 498 bp, Escherichia coli
atgaaatcattaaccctcttcaatcaaccaattcgtatcggtgaagatggcatgatctgcctcactgatatgtggaaagccagtggtaaaagtgaatctgaatcgccttaccactacctgcgaaacaagcagaccaaagagttcttagccgagctggagaaaaaccacgaatctgtggtttttactgagcgcggtgtacacggtggaacatatggcgggaagtttgttgcttacgattatgcggcttggttaaaccccgggttcaagtacgcggcctataaagtcctcgatgactacttcaccggagaacttcagcatcgcaacagcttaagtgcgcagctcaacatgaaatgtcatgagtttgaccagaagaaagacatggcgagcttctgcggacaagggctggcagcatggcgctatacgaagccagtgttggtcgctgagattaactccctggctaaccagctgcagattacgatccccgggcttccgggatga

SEQ ID NO: 7287 - DNA, 579 bp, Escherichia coli
atgactgagccattacaactcccgccaccgcttgagggtgatatcagtctcaggacgctgggaagactggcaggacggctggataacatcgacctgagcgtactgatggtctttctcgtcgatatcgtcgacagttccgcgctgccatggctgggcgagcagttctcactgtctggcgatggctgggagctggcggaatcggacgatgttcgccgcatgcttataaaagcagccatcgaactgcaccggtataaagggacgccgtggtcaatccgggaagttatccgccgttttggctttggtgaagtggatctgattgaaggcacaggtcgtctcagttacgacggcaatcgcagctataacggactgtttgttcatggagatgcagccgcctgggcagtttatcgcgttattctgaaacagcccattactaacgatcaggccgcgatgctgcgtcagacgctggctgcatttgcaccggcccgctgccatctggccagcctggagtatcagtctgtggccattcgctataacaatacagccatccatgatggcagttataaccacgggagcagttga

SEQ ID NO: 7288 - DNA, 1011 bp, Escherichia coli
atgacattagtagaagccgatgttccccgcgttatgtgcccggagcatggctgccagactctgcctgtaccgtgggcaggttccggcagtcggtacactctgctgttcgaatcgttcgtgctctcatggcttaaaatcagcaccgttgatgcggtcagaaaacaacttaaacttagctggaatgccgttgacggcatcatgacccgcgcggttaagcgaggcctgtcgcggattaaaaagcctttatcagtgcgtcatatgaatgtagacgaagtcgcctttaaaaaagggcataggtatataaccgtggtatctgatcgcgacgggcgggcactggcattaaccgatgatcgtggcacagagagtcttgccagctatctccgttcgcttactgacagtcagttgttggccatcaaaacactgtcgatggacatgaatgcgggctatataagagcagcgcgtatccatttacccaatgcggtcgagaaaatcgccttcgatcgcttccatgtggcgaagcaactgggcgaagtggttgataaaacccgccagaatgaacatccgcacctccctgttgaaagtcgtcgtcaggccaaaggtacccgcttcctgtggcagtacagcgacaaatggatgactgagtcccggcaggaaaagctgatgtggttgcgggaacagatgcaacagacaagccagtgctggacactgaaagagctggcaaaaaatatctgggatcgcccctggagcacagaacgcaggaatgactggttgcagtggatatcgctggcgtctgaatgtgatgtgccgatgatgaaaaacgcagcgaaaaccattaaaaaacggttatacggaatactgaatgcaatgcgtcatcgcgtctcgaatggaaatgcggaggcgctgaacagcaagatcagactgctgaggataaaggccaggggataccgaaaccgggaacgctttaaactgggagttatgttccactatgggaaactgaatatggcgtactga

SEQ ID NO: 7289 - DNA, 1011 bp, Escherichia coli
atgcaacgaatagatgcgatagactctctcattcgagatcgcaagcgagtgtatttgaatatttcattcaaaaagcatctagttcgctcaaatagttcctttaataatgttatagttgaaaatctaaatgcaattattcacagaaacatcataaaacagtacatgcaaaaatcaacaactatatatgttcattctgtttataatttattaaaggttataacgctcattgatctaaaaaaaacaattcttgatatacatggtgttgtaccggaagaacttttggcagataataaaaaattacttagtaaagtatataacatggtggaaaaaaaaggtgtccttggatgcaaaaaattaatacacgtcagtacagaaatgcaaaaacactatgaagcaaaatatggagtaaacttggctgaaaggtcaatagtgctcccgatttttgaatataaaaatataacccaatcgcaaaacaaatggacagaaaataaaatacgaagtatctatcttggaggattacaaacatggcaaaatattgataaaatgattcaaatttgtgatgacacagtgataaacaatgaagcaggtaagtatgaattcaactttttcatcccacagagtaacttggaagggtttatagataaatattcgttaaaattacataatatcaatgctaatgcatctacgctatcacgtgatgaagtaattccctttctaaaagaatgtcatattggttttgtattgcgcgatgatataatagtaaacagagttgcgtgccctacaaaattggttgaatatttagagtgtggtgtcgttccagttgtgctctccccacttataggtgatttttattcgatgggatatcaatacattactacagaggaaatggctaacagaagtataagtttgttggatcttgaaaaaatggctgcacataatttacaaattttgacttcttatcagaagagaacctacaaggcacagaaagaacttattgctcaactgtgctga

SEQ ID NO: 7290 - DNA, 222 bp, Escherichia coli
atgaaaattatcactcgtggtgaagccatgcgtattcaccaacaacatccgacatcccgtcttttcccgttctgtaccggcaaataccgctggcacggcagcactgaagcgtataccggtcgtgaagtgcaggatattcccggtgtgctggccgtgtttgctgaacgtcgtaaggacagttttggcccgtatgtccggctgatgagcgtcaccctgaactga

SEQ ID NO: 7291 - DNA, 261 bp, Escherichia coli
atgctgatggcggggattcagttcaccgccggtgagcatgagttccagttgtttcatcagcagcggaaaggcctggtccaggtggtacgcatctacgtcgctgaacctgcctctgataccggcgcggtctgcaaggtaatgcaggcggttaccctcctgtaccagtcgggccccgaaacagggcgtcacggtgcagggcagcccccaccaggggcggtcgtgattgtcgtcgggaggcgttgtcccggggagtgtgtctga

SEQ ID NO: 7292 - DNA, 570 bp, Escherichia coli
atgacctacaaatacaaccccttctggcagcaacgtattcgtgagacggtgcggcacgcactgaatgttcatccccgcctgacggcattgcgggttgacctgcgtctcccggatgtaccggcagcaacggacgcagctgtgatatcccgcttcatcaatgccctgaaagcccgaatcgacgcttaccagaaacgtaagcatcgggaaggtaaacgcgtgcatcccacaaccctgcattacgtctgggcccgggagtttggggagtgcaaaggtaaaaaacactatcacctgatgctgctggtcaaccgggatacctggtgtcgtgccggtgattaccgcgctccggagtctctggccgggatgattaaacaggcgtggtgcagtgccctgggagtggatgtcgggtgccatgccacgctggtgcattttccggcctggccggcggtgtggctggcgcgtaatgatgacaccggctttcagcaagtgctggaacgtgctgactatctggcgaaggagcataccaaagctcactgcaccggtgagcgcaattttggctgtagccggagttga

SEQ ID NO: 7293 - DNA, 201 bp, Escherichia coli; identical to SEQ ID NO: 5078

SEQ ID NO: 7294 - DNA, 654 bp, Escherichia coli
atgctggcagtgacagtactggctcccgccgtatggctggtgacagagatctccaccgtaccgtcctgccctgtgatgacagtcggggcaaccgttgcgccgttgcctgccaacacgctgaccgtctgcccggcaagcgcattaccgaatgcatcggttaccctcgcccgcagcgtgttcgccgtcgcaccgtctgcctctgaaccgtccttaatgaccaccagatccgcgatctgcgccgtcctgacatcggcgataaacatcacgctctggctcaggctatggttgttgatggttgctgtgactgtactgatccccgccgtctggctggtgactgagatatccaccgtaccgtccggctctgtgatgaccgccggagcaaccgttgcgctgttgtctgccaacacgctgaccgtctgtccggcaagcgcattcccgaacgcgtcggtgaccctcgcctgcagcgtattcgccgtcgcaccgtcagccactgagccgtccttaatgaccaccagatcagcaatcttcgccgtcctgacatcggcgacaaacgtcacgttccggctctggctgctgctgttgatgctggcggtgactgcactggctcccgccgtctggctggtgacagggatctccaccgtgccatccggctga

SEQ ID NO: 7295 - DNA, 555 bp, Escherichia coli
gtggcgctggtccacagccaccccggtggtctgccctggctgagtgaggccgaccggcggctgcaggtgcagagtgatttgccgtggtggctggtctgccgggggacgattcataagttccgctgtgtgccgcatcttaccgggcggcgctttgagcacggtgtgacggactgttacacgctgttccgggatgcttatcatctggcggggattgagatgccggacttttatcgtgaggatgactggtggcgtaacggtcagaatctctatctggataatctggaggccacagggctgtatcaggtgccgttgtcatcagcacaaccgggcgatgtgctgctgtgctgttttggttcatcggtgccgaatcatgccgccatttactgcggcgacggcgagctgctgcaccatattcctgaacaactgagcaaacgagagaggtacaccgacaaatggcagcgacgcacacactccctctggcgtcaccgggcatggcgcgcatctgcctttacggggatttacaacgatttggtcgccgcatcgaccttcgtgtga

SEQ ID NO: 7296 - DNA, 348 bp, Escherichia coli
ttgatcccattaccatcagggacaaagatctggctggtcgctggcatcaccgatatgagaaacggcttcaacggcctggcggcaaaggtgcagacgacgctgaaagacgatccgatgtcaggtcacgtttttatcttccgtgggcgtaatggcagtcaggtaaagctcctctggtctaccggcgatggactgtgtctgctgaccaaacggctggagcacggccgcttcgcctggccgtcagcccgggattgcaaagtgttcctcacaccggcacagctggcgatgctccttgaaggtatcgactggcggcagcctaaaagactgcttacgtccctgactatgttgtaa

SEQ ID NO: 7297 - DNA, 441 bp, Escherichia coli; identical to SEQ ID NO: 6963

SEQ ID NO: 7298 - DNA, 168 bp, Escherichia coli
atgggtaaaggcagcagtaaggggcataccccgcgcgaagcaaaggacaacctgaagtccacgcagttgctgagtgtgatcgatgccatcagcgaagggccgatagaaggtccggtggatggattaaaatgtagtggtcaagtaatattggccacggttttacagtaa

SEQ ID NO: 7299 - DNA, 213 bp, Escherichia coli
atgctggcaccgaaagccagaactccccgtacacagacaacggataacggcaaacagaacacctatttttcctcactggataacatggttgctcagggcaatgttttgcctgttctgtacggtgaaatgcgtgtggggtcgcgggtggtttctcaggagatcagcacggcagacgaaggggacggtggtcaggttgtggtgattggtcgctga

SEQ ID NO: 7300 - DNA, 417 bp, Escherichia coli
atggagttagttaagaaaaattttgttaaaattctacagttaatcacaggtagaacagcaataataagaccaaccataagtgtgaaatgtttctttaaaaatgagcgtctgtattttaatagattgctacctgcttttgataatattcaaaaaatagagcatgtttatgctgagattaattttcaaccaatcaaccaatcaaccaatcaaccaatcaaccaatcaaccaatgtttcgttaaataaacattatgatagagtcttgcgggtgtattggaaatatggatttgatatattacgtcatttgacgtgtggtgagtatagaattagtttgcatgtgtattataattacaatgagttcatatacccgttggataaaaagatcatcgtgtcttcaggtaatgttgtcgtgatttga

SEQ ID NO: 7301 - DNA, 618 bp, Escherichia coli
atgctggcagtgacagtactggctcccgccgtatggctggtgacagagatctccaccgtaccgtcctgccctgtgatgacagtcggggcaaccgttgcgccgttgcctgccaacacgctgaccgtctgcccggcaagcgtattaccgaatgcatcggttaccctcgcccgcagcgtgttcgccgtcgcaccgtctgcctctgaaccgtccttaatgaccaccagatccgcgatctgcgccgtcctgacatcggcgataaacatcacgctctggctcaggctatggttgttgatggttgctgtgactgtactgatccccgccgtctggctggtgactgagatatccaccgtaccgtccggctctgtgatgaccgccggagcaaccgttgcgctgttgtctgccaacacgctgaccgtctgtccggcaagcgcattcccgaacgcgtcggtgaccctcgcctgcagcgtattcgccgtcgcaccgtcagccactgagccgtccttaatgaccaccagatcagcaatcttcgccgtcctgacatcggcgacaaacgtcacgttccggctctggctgctgctgttgatgctggcggtgactgcactggctcccgccgtctga

SEQ ID NO: 7302 - DNA, 312 bp, Escherichia coli; identical to SEQ ID NO: 6076

SEQ ID NO: 7303 - DNA, 330 bp, Escherichia coli
atgaagaccttccgctggaaagtgaaacccggtatggatgtggcttcggccccttccgtaagaaaggtgcgctttggtgatggctattctcagcgagcgcctgccgggctgaatgccgacctgaaaacgtacagcgtgacgctttctgttccccgttgggaggccacggcgcttgagtcgtttctggctgagcacgggggctggaaatcctttctgtggacgccgccttatgagtggcggcagataaaggtgacctgcgcaaaatggtcgtcgcgggtcagtatgctgcgtgttgagttcagcgcagagtttgaacaggtggtgaactga

SEQ ID NO: 7304 - DNA, 369 bp, Escherichia coli
atgaaatcaactggtaacgctgtagcgcctggagcatgggttccgaattcagatggccgcctgaaagatggagtgtccagaattggagacccgctcagtaagatggaaatgctaaaaggttgttcctggacgcgaaaagataccggacaatgggggattgggtttatcgcgcaggatgttaagaaaatcttcccccaggcagtaactgagggaggtgatcgtcaacttcctgatggaactatggtggaaggagtactctctccagatacttacggcgttgcggcagcgttgcatcatgaagcgattctggtactaatgaacgaactcagtgaattacgagaagaagtgaatgcgctgaaaagtgagtaa

SEQ ID NO: 7305 - DNA, 228 bp, Escherichia coli
atgttcgtggaactcgtttatggcaaaaggaattttgatggactgcccggtgcaaaagatatcattctgggcgagttgaccaagagggttcaccggattttccccggcgctgatgtccgggttaaaccgatgatgacattgccggcgatcaacactgacgccaacaagcatgagaatgaacagataagccgtactgttcaggaaatgtttgaagagactgatatgtag

SEQ ID NO: 7306 - DNA, 411 bp, Escherichia coli
atggctcaggttgccatttttaaacaaatattcgataaagtgcgaaataatttaaactatcactggttttattctgaactaaaacgtcacaatgtctcacattacatttactatttagccacagagaatattcatcttgttcttgaaaacgataatacggttttaataaaaggacagggtaaggttgtaaatgtaagattttcaaaaaataaatgccttatagaagcctccttaaaaggattcaaatcaggagagttatcattttacgaatacaggaaaaatcttgctacagcaggggttttcagatggattacaaatatccacgaaaacaaaaggtattactatacctttgataattcattactctttactgagaacattcagaacactacacaaatatttccgcactaa

SEQ ID NO: 7307 - DNA, 150 bp, Escherichia coli
atgaataataaatacaggcttattattccagtcttttttattacgttggttgattcaaatggctcggttagtaaaatgcaccattcactcggaaaactcaacatgttgcactcttatacgccgtctggaaaaggcgtaggagtggtataa

SEQ ID NO: 7308 - DNA, 714 bp, Escherichia coli
ttgagcagtgccatcaacagcacgtctgaaatactggccgccacaccgaaagcggtcaaggctgcatacgatctggcaaacggaaaacaaccggcagatgccacgctcactgctctggcaggacttgccactgcagcagatcggttgccttattttaccggagcagaccgcgcagcgctggcaacccttacagctattggtcgcgctattatcgctaagggcagtataaaagatgtcctcaattaccttggtttgggggaaggctctgcattgcctgttggtgtaccggttccgtggcccaccgccacaccgccagcaggctggttacagtgcaacggacgcgccttcaccaaagaacaatatcctgttctggccagagtctacccgaccctccgtcttcccgatttgcgcggtgagtttatccgtggatgggacggtggtcgcaaggttgataccgggcgtgcgctactttcatttcaggaagggactatcgtatccggttttgatgataatgataccggagatatcagttcgctcggctctacacaatacggatttggtgacgctttaacctctaatcaactgggggtcataaatggcaaaaagtggatatttgatgcatcctctaaaggtgcacaaagatatgactggtgggcttatgtatcagctcgcccccgcaatatcgcatttaactatatcgtgagggcggcgtga

SEQ ID NO: 7309 - DNA, 312 bp, Escherichia coli
atgagagttgagcagaataatttcagggacatgttctccgtttatctctccggcccgccgcagacgcagcatgtgttttgtgtatccccggcggcccgggtcgcgcacacgggtctggcaggcgaagaacggctgaaagccttcccgctgcagactttccagcacggtgatggtggggatatacgtatagcgttcactgcgggaggtatgccggtcttccccaaaaataccgggtacatagtgcatcagttcttcgtgtgtcagcggacggtcacggcgtatctggttcgcataaccaaaacgactggctag

SEQ ID NO: 7310 - DNA, 276 bp, Escherichia coli
gtggcttctgtttctatcagctgtccctcctgttcagctactgacggggtggtgcgtaacggcaaaagcaccgccggacatcagcgctatctctgctctcactgccgtaaaacatggcaactgcagttcacttacactgcttctcaacccggtacgcaccagaaaatcattgatatggccatgaatggcgttggatgccgggcaactgcccgcattatgggcgttggcctcaacacgattttacgtcacttaaaaaactcaggccgcagtcggtaa

SEQ ID NO: 7311 - DNA, 174 bp, Escherichia coli
atggcgtccgtcgatcttatcaacctcaaactgcgtgctggtcgcagtctgaaaccagaagaaacggcaaaactgaacgccgtgctggattatatcgacgagctgaacgcactggatatcagcaaggcacctgaaatcagctggccggaagcgccactggcacttgccagttga

SEQ ID NO: 7312 - DNA, 303 bp, Escherichia coli
atggtggggccgtctgtgcgcgtgaatgaatggttcagcgcgtatgcgatggcgggtatggcttacagccgtgtttcgactttctccggagattatatccgcgtaactgacaacaaggggaaaacgcacgatgtgctgaccggaagtgatgacggtcgccacagcgacacgtctctggcatggggggctggcgtgcagtttaacccgaccgaatccgtggccattgatattgcttatgaaggttccggcagtggcgactggcgcactgacggtttcatcgttggtgtcggttataaattctga

SEQ ID NO: 7313 - DNA, 510 bp, Escherichia coli
atggtcgggaagcgctgtcatgagcgcactgaccagcgtatccagttcccagccggtgcgggccgatacggcaacaaccggatgtacgggccggaacagacggaataccgcctccgttttctcacgaatgttctgttcctgtgcgggagaaggctgaataccggccatatcccattcatggcagggctccgttttatcggcctgcgtcaccacaaacagcacctgctgatgtccccggtgcagaatgtgtcgccagaaatactcatccacagacagggcccggtcatcggctttaatcagccacagcaccaggtccagttcaggcagaatgtcacggtacagggcttcatactctgcatccctgtcccggctctcgcccaccccgggcaggtcagtgataaccatgctgtgaccatggccactcagacggaagcgctgcacttcccgggtgccggcgtgaacatcactgaccggggtgacctccccctgaaacagtgcattacagagtga

SEQ ID NO: 7314 - DNA, 369 bp, Escherichia coli
gtgcgtgccggcttccgtctgggcagccacaacgatatgacctttggtgaaggcacctcatcccgtgacaccctgcgcgacagtacaaaacacggtgtgagtgaactgccggtgaactggtgggtacagccttctgttatccgcactttcagctcccggggtgacatgagcatgggtacagccgccgccggcagtaacatgacgttctcaccgtcccggaatggcacgtcactggatctgcaggccggactggaagcccgtgtccgggaaaatatcaccctgggcgttcaggccggttatgcccacagcgtcagcggcagcagcgctgaaggttataacggtcaggccacgctgaatgtgactttctga

SEQ ID NO: 7315 - DNA, 159 bp, Escherichia coli; identical to SEQ ID NO: 6188

SEQ ID NO: 7316 - DNA, 306 bp, Escherichia coli
atggaccgtctgtgtgaagactactgcggtggtatctggaatctgtacaccctgaacaacggcggggcatttatggcacccgaaccggatgacgatgatgacgaaacatgggtactgttcaatgccatgaacggcaaccgcgctgaaatgagcccggaagccgccggcattgctgcctgtctgatgacgtacagtcatcacgcctgtcgtacggagtgttatgccatgacggtccattattaccggctgcgggattacgccctgcagcatccggaatgcagcgccattatgcgcatcatcgactga

SEQ ID NO: 7317 - DNA, 390 bp, Escherichia coli
atggacattgagttttcgcagattcatgaaatggtctatatgcatgatattgtaaattcggactcgaaaaagaaaccaaggattccgttaaaaaaattccttaatgctgagaaggttctcacgcaaacaacatcatgggtactaaattcaagatatgtgaatgttaattctgtcagtaaagtcaacgtaaagagtaaagttaaaaacagttatatctcacgatctgtcaatgatgagtttagtttaacagatgatgatagacttgcagaacttattcctgatttttatgtctttccagaaaaaagtgtaagctataatatactaaagcaaggtaagcatgcttttattttgagtattggtaacagagcaataatgcattgtgcaaggtaa

SEQ ID NO: 7318 - DNA, 348 bp, Escherichia coli
atggtgacgaaaaccatcactgaacagcgtgcggaagtacgtatttttgccggtaatgatccggctcataccgccacaggcagcagcgggatttcctcgccaacaccggcactgacgcccctgatgctggatgaagccaccgggaaactggtggtctgggacggacagaaagccggtagtgcggttggcatactggtactgccgcttgaaggcacagagacggcgctgacgtattacaagtcgggaacctttgcgacggaggcaatccactggcctgaaagtgtggatgaacacaaaaaggccaacgcctttgccggcagtgccctgagtcacgcggcgctgccgtaa

SEQ ID NO: 7319 - DNA, 519 bp, Escherichia coli; identical to SEQ ID NO: 5755

SEQ ID NO: 7320 - DNA, 261 bp, Escherichia coli; identical to SEQ ID NO: 7291

SEQ ID NO: 7321 - DNA, 432 bp, Escherichia coli
atgacggcggagcagcgccttgccgaacgtcagttgaaaacgaaaccgctgctgaaatccctggaaagctggctgcgtgaaaagatgaaaaccctgtcgcgacactcagaactggcgaaagcgttcgcatacgccctgaaccagtggccggcgctgacgtactatgcagatgatggctgggctgaggcggacaataacatcgctgaaaatgcgttgcggatggtcagtctgggccgcaaaaactacctgttcttcggttcggatcatggaggagagcggggagcgctgctgtacagcctgatcgggacgtgcaaactgaacggagtggagccagaaagctacctccgctatgtccttgacgtcatagccgactggccgataaaccgggtcggcgaactgctcccctggcgcgtagcactgccgactgaataa

SEQ ID NO: 7322 - DNA, 402 bp, Escherichia coli
atgcttcggcttgcagcaaaaggtgttaaaactactgttcgaccatcaggacataatattaatgaatcttttgataaaacccataatggagggtctatcccacctaattttattgatgatgaaacaccgtctgatgtattgaaaatgggtaataatgcagctaatgacgtttatacaaaaaaatgtaaagctaatggtatcaaaattcatcctgcgcgtttccctatgcagcttcctgaattcttcattaaaatgcttacagatgaaggggatttagttcttgatccatttggtgggtcgatgactgccggtgctgtagctgagagtttgaaccgaagatggatcggtatagatactgttgaagaatatcttgatggcgcgttatatagatttgaggaatga

SEQ ID NO: 7323 - DNA, 198 bp, Escherichia coli
atgctggccaacacctgcacctggacctatcgcggtgatgagtgcggttatcacggtccggcggtcgcggatgaatatgaccagccgacgtccgatatcacgaaggataaatgcagcaaatgcctgagtggctgtaagtttcgcaataatgtcggcaactttggcggcttcctttccattaacaaactttcgcagtaa

SEQ ID NO: 7324 - DNA, 249 bp, Escherichia coli
atggaagaacaacccgaaagcacagttgtcaatggcggcggcaatagcacacttaaagataaaaacaggtccattgaagcagttatacaagaagttaataaccaagatgacatagatttgttaatcgcaagattgcagtctaaaaagtctcaagggttagtgaagagtcaaagtataaatgatatcccttctgtagagaacacaagtcttgtgccaccagaagaaccgttagattgggataatatttag

SEQ ID NO: 7325 - DNA, 141 bp, Escherichia coli
atgctgaaaggcgggatttccggccgcagtgcaaaaggaaaacgtatccacacccgtgccattcacagcatcgacaccgatattaagctcaaccgcgcattgtgggtgatggcagaaacgctgctggagagcctgcgctga

SEQ ID NO: 7326 - DNA, 342 bp, Escherichia coli
atggaaatcttcgaaaaagatcaaaaaatcgcttttgttgactcgttcagcgatgctgttttgtcttacgaatacgaacaggcgggcttcaccattaatttaatgcaacgctcggttcttctctttaaccataatataaagaaaaacgtaatgtcttcgacattgcgtaaaaatatgatcagcacatttatatatccatatagcaacatcagggaaatcaactactcgctgcctgattgcagatccgatgatgccgagatctgtattatgactgatgatgtattaaatccagtctggacgttcagggttccatctcacgcacattatatttgcgagcaatga

SEQ ID NO: 7327 - DNA, 156 bp, Escherichia coli
atggggtatatggtttctggttataatccatatcagattgctgaagttctggatatggatatccgtagcatctacgcgtacaagcaacgaatcgaaaagagaatgggtggtaaaatcaacgagttatttattcgttcacattcggtccaacattga

SEQ ID NO: 7328 - DNA, 141 bp, Escherichia coli
atgctgaaaggcggaatttcaggtcgcagcgctaaaggaaaacgtatccatacccgtgccattcacagcattgacactgacattaagctcaaccgcgcattgtgggtgatggcggaaaccctgctggagagcctgcgctga

SEQ ID NO: 7329 - DNA, 216 bp, Escherichia coli
atgacggctgaatctgttgtatgtgccctgttctggtattgttttgtcggttggtgtactgctgaactgcaccgccgttcagggttttattcacgttacagtggtgccggctactggattagctggtcggtgatgttcctgtgctggcctgtggcgcttcctttatatgtcgattatatcggtggcgcaggtaaaaggagcaacgatgatgactaa

SEQ ID NO: 7330 - DNA, 234 bp, Escherichia coli; identical to SEQ ID NO: 4495

SEQ ID NO: 7331 - DNA, 198 bp, Escherichia coli
atgctggccaacacctgcacctggacctatcgcggtgacgagtgcggttatagcggtcctgctgtcgcggatgaatatgaccagccaacgtccgatatcacgaaggataaatgcagcaaatgcctgagcggttgtaagttccgcaataacgtcggcaactttggcggcttcctttccattaacaaactttcgcagtaa

SEQ ID NO: 7332 - DNA, 144 bp, Escherichia coli
atgcgatttaaagcggatttaccgctgaattatgtccgtcgcgaggattatatccgtggccagacagtcatcgaggccaaactggacgcactttacaacaaactggaagtggtacagcagtaccgcaataccggaggtcaataa

SEQ ID NO: 7333 - DNA, 1359 bp, Escherichia coli
atgtcgcataacgttactccaaacacctctcgcgtggaattgcgtaaaacgcttacgttagttccggttgtaatgatgggtctagcctatatgcagccgatgacgctgtttgatacatttggtatcgtttcaggcctcacggatggtcatgtgccgacagcctatgcgttcgcattgattgcgatcctgtttacggctctgagctacgggaagctggttcgccgctatccttctgctggctctgcatacacttacgcccagaaatccattagcccgactgtcggctttatggtgggttggtcttctctgctcgactatctgttcgcgccgatgatcaacattctgctggcgaaaatctattttgaagctctggtgccttccattccatcgtggatgtttgtggtggctctggtggcctttatgaccgcctttaacctgcgtagtctgaaatccgtagcgaacttcaacactgtaatcgtcgtgttgcagatagtgctgatcgcggtgattctgggcatggttgtttatggcgtatttgaaggtgaaggcgctggtacgctggcgagcactcgtccgttctggtctggcgatgcgcatgttatcccgatgattaccggggcgacaatcctgtgcttctcctttaccggttttgacggcatcagcaacctgtcggaagaaaccaaagatgcagagcgcgtgatcccgcgtgcgattttcctgaccgcgctgatcggcggcatgatcttcatctttgcaacttacttcctgcagctgtacttcccggatatctctcgttttaaagatccggatgcgtcacagcctgaaatcatgctgtacgttgcgggtaaagcgttccaggttggcgcgctgatcttctccaccattaccgtactggcgtccggtatggcggcgcacgcaggcgttgcgcgtctgatgtacgtaatgggtcgtgacggcgtgttcccgaaaagcttcttcggttatgtacacccgaaatggcgtactccggcgatgaatatcatcctggttggcgcgattgccctgctggcaatcaacttcgacctggtaatggctacggcgctgattaactttggtgcgttggtggcgttcaccttcgttaacctgtcggtcatctcgcagttctggatccgtgagaagcgtaacaaaacgctgaaagatcacttccagtatctgttcctgccgatgtgtggtgcgctgaccgttggtgcgctgtgggttaacctggaagaaagctcaatggttctgggtctgatctgggctgctatcggtctgatttacctggcttgcgtaaccaagagtttccgtaacccggttccgcagtacgaagacgtagcgtaa

SEQ ID NO: 7334 - DNA, 792 bp, Escherichia coli
gtggtttatattataatcgtttcacatggccatgatgactatatagaaaatcttttattaaatttaaagttgccctctggaagatttaaaataatagttcgtgataacaaaagttcaatggttttaaaaaaaacatgcgaaaaaaattgcgtaacctatttgcatggagggcaatatggatttggacataataataacatagcagtgtcatatataattaataacttcatgattatgaataatgattattttctctttcttaaccccgatgtattcataaccagtgaaagtttgattaattatgttgattatataattagtaatgattataagtttagcacattatgtctttatcgagattttactaaaagcaaacatgattattcaatacggagttttccaactttatatgattttctttgttcttttttattgggggtgaataaaagtaaaattaagaaggaaaatatactttctgatactgtagttgattggtgtgctggctcatttatgcttattcatgctttaagtttcttaaatgtgaatggttttgatcaaaaatattttatgtattgtgaagatattgacctttgtatgcgtttaaaattaagtggagtagatctttactatactccccattttgatgctattcattatgcgcagcatgaaaatagaagaatatttactaaagcatttcgatggcatataaggagtattacgcgctacatattacggaaaccaattctttcttataaaaactatagaaaaattacatccgaactggtaaagtga

SEQ ID NO: 7335 - DNA, 1101 bp, Escherichia coli
atgggaaagaatatagttgtaatatcggctgttaattttacaaccggaggcccctttaccgtactaaaaaatgtgcttacagcaactaaagatagagccgaatgtaaatttattgcactggttcatagctctgctgaactaatggaattatttccgtgggttgaatttatagagtatccagaagtcaagtcttcgtgggttaaaagattatatttcgaatatataacttgcaatagattatctaaggtgattaaggcaactcattgggtatgcttacatgatattacagcaaatgttagtgtaccctatagatttgtttattgccacaatcctgcaccgttctataaatatttaagctatcgagatattataggagaacctaaattttatcttttttatcttttttatgggcttttatacaatatcaatataaaaaagaacacagcagtttttgttcagcagcagtggctaaaaaaagaattcgaaaaaaaatataagttaaagaatgttgttgttagtcgccctgaagatatttgcccttttgaaagtgatggtttggtaagaaataataataaaaaggatgtgaggatattttacccagcagtgccccgtatatttaaaaactttgaagttatcatacgtgctgcacaaatattacaagataaaaatattcatttttatcttacttttgatggtactgaaaataagtatgcaaaaagaatatataaattagcttccgaactgaaaaatgtacatttcctcggttaccttaatgcaaccgagatggttaacttttatcaagattcagatattatttgtttcccatcgaaactagaaacgtggggattaccattatcagaagctaaaacatacaaaaaatggatatttgcggcagacttaccttatgctcatgaagttttatataactattcaaaaactagatattttccatttgacgatgagaaaatacttgttcgctacatattagagtacacaagtaaaaatatgcatgaagatataaaaaatagtagggtgaattttaataatgatgcattgactggttttgaacagtttattgaatatatcctcaaggggaactga

SEQ ID NO: 7336 - DNA, 606 bp, Escherichia coli
atgtgcattaaaaaaaaacttaagttaattaaacgatatggcctttatggtggtcttaggcttcttaaagatatattcttaacaaaatttttattttgttcaaatgttaggattattagatttccatgttatattagaaaagatggaagtgttagttttggaaaaggttttacatcaggtgtaggattacgagttgatgcatttatggatgccgtagtttccattggagaaaatgttcaaattaatgactatgttcacatcgcggctattaataatgtcattattggtagagatacattaatagcaagtaaagtatttattagtgatcataatcatggtattttttctaaatccgatatccatagttcaccaactattattccttcgtctaggccccttgaatctgcacctgtgtatattggagagcgtgtgtggattggcgaaaatgtgacaatattaccaggtgcgtgtataggtaatggtgtagttattggcgcaaacagtgttgttcgtggtgagattcctaataatgtgatcattgctggtgttccagctaaaattgttaaaaaatataactatgagcgtatgcaatgggaaagaatatag

SEQ ID NO: 7337 - DNA, 1218 bp, Escherichia coli
atgagcataagaatagaagaatcaaatagcacaaaaagaattatatgtttatttatactttttcttgttttccctgattttttgttttatacattaggggttgataattttagcatttcaacgataatctcaattacattgctttttgtttttttaagagctaaaaatatttgcaaagataattttctaataatagtagcgttattcatattgttgtgttttaactgtttgttaagtatgctatttaatattgaacaggctttaacatttaaagttgtactttcaatatatagcatcttaataatggcatacgtctcctcttgttatgcacagacgttgtggttatgttctgaagaaatacttaagagatccgtcttttatttgttcgcatttctttgccttattggcattataagtattcttttacagaagactgagattatacatgataaaagtatgattctttttcctgaaccatcagcatttgcattggtttttatacctatcttttcattttgtttatactatacaagagggggggggctactattgctctatatattatctttgggtattgcgttaggtatccagaatttaacaatgttggtaggcattgtgattagtgtttttgtgatgaaaaaaataactataaggcaaactattgttatacttttgggggcatggattttttccatgatattaagtgatttagacatttcttactatacatcgcggcttgattttaaaaatactacgaacctatcagtgcttgtatatctttcaggaattgaaagagctttcttgaattttattacaagttatggtcttggtattggttttcaacaaatgggagtgaatggggagataggaatatatcaacaaattttagctgaacttgatgcccctatgttaaatatatacgatggctcatttatttcttctaagttaatatctgagtttggggttattggtgcattaatgtgtattttctattttttttatttttcccgattttatctgcgtttcaaaaaaagtaagagatattcaccgcagtatattttagcatatagcttctacatgtgtttcttcatccctctttttatacgtggtgctggttatataaacccctatgtgtttatgttattttcatcaatatttttgtgcaaatatcacgctaaaaatatcttgatgaaatctaatgtccagatagctatataa

SEQ ID NO: 7338 - DNA, 1149 bp, Escherichia coli
atgaaagtggcttttttatctgcttatgatccactatctacatccagttggtctggcacaccttattatatgctaaaggcattatcgaagagaaatatttccattgaaatattaggaccggtaaatagctatatgatatacatgttaaaagtatataaattaatattaaggtgtttcggaaaagaatatgattatagtcattcgaagttgctttccaggtattacggtagaatattcggtaggaaattaaaaaaaattgatggtttggattttattatcgcacctgcaggttcctcacaaattgcttttttaaaaacaaccataccaataatatatctatcggatacaacatatgatcaattaaaaagctattatccgaatttaaataaaaaaacaattataaatgatgaggatgcaagtttaatcgaacgcaaggctattgaaaaagcaacagtagtatctttcccatctaaatgggcaatggatttttgcaggaattattacagattagattttgataaattagttgaaataccatggggggctaatttatttgatgatattcactttgctaataaaaatataattcaaaagaatagttatacttgtcttttcttgggagttgattgggaaagaaaaggtgggaaaacagccttgaaagcaattgaatatgtaaggcagttatatgggatcgatgttagactaaaaatttgtggatgtactccgaatcaaaagattttacctacttgggttgaattaattgataaagtagataaaaataacgttgacgaatatcagaaattcatcgatgtgttatctaacgctgatatacttcttttaccaaccattgctgaatgttatggaatggtattttgtgaagctgctgcttttggattgcctgttgtcgctacagatacaggtggagtcagttctatagttatcaacgaaaggacggggatattaattaaagacccgttagactataagcactttggaaatgcaattcataaaataattagttccgtagagacttatcaaaactactcccaaaacgcaagaattagatataataatatattgcattgggacaattgggctaaaaagataattgagattatgtatgagcataagaatagaagaatcaaatag

SEQ ID NO: 7339 - DNA, 966 bp, Escherichia coli
atgatatatattgtggtattaaattggaatggggctatagataccattaattgtgttaaaagtttaatggatttaaatgttagcgattataaaattatcattgttgataactgttctatggataactcatatgatactataaaagaaaatcttaattcattatatattgctgataaaagtatcattgaggtgaagtatgaggatagaaataaatataaaaccttagaaaacgataaaatcatattaatacaatctccgcaaaataatgggtacgcaagtggtaataatattggcatagagttcgctcttaatcaggagaatatgaaatacgtctgggttctgaataatgatactgaagtggataaagaggctttaactcatttaattagtaaatgtgattcagataaaagtatagggatttgcggttctcgtttagtctattttgccgacagagagatgcagcaaggactaggtggggtgcataacaaatggttatgcactacaaaaaattatgaaatgggaagattagtttccaaaaaatatgatgatgaagtcattagtaatgatatagattatataattggcgcatcgatgtttttctctagagaatgtttggaaacagttggattgatgaatgaagaatattttttatactatgaagagttagatatttgcctcagagcaaaagcaaagaactttaaattaggtatttgctcagaaagtttggtttatcataaaataggtgcaagtactgatgggggaaagagcatgatggctgatctttgctcaataaaaaataggctggtcattacagaaaggttttatccccaatattattggacggtatggttgtcactttttgttgtagcatttaaccgtgctagaagaggtgagtttaataagatgaaaagatgtttgaatgttatgtttaacttcaaacgaaacaaaggtagcaaatgccattag

SEQ ID NO: 7340 - DNA, 1260 bp, Escherichia coli
atgtctctcttaaaacatagtatatggaatgttgcgggctactttataccaacattaattgcaattcccgcctttggattaattgcgaggaaaattggtgtagaactatttggtttgtatacgttagcaatgatttttatagggtatgcaagtatatttgatgctgggttaacaagagctgttgtgcgtgaaatagcattactaaaaaacagagtggacgattgtaatacgataatagtaacttctattatcgctgtgatatttttagggtttatcggaggcgggggagtgtttctgcttaaaggcgatattattgaactgttaaatatctcaccaatatattacgccgattcgataaagtctctagtattattatcatctctgatacctgtattcttagtcacgcaaatactattagcagagcttgagggtcgggaatattttgggattctaaatatacaaaaaagtgtagggaattctttaattgcagggttacctgcattatttgttttaattaatcaaacgcttttttctgcaattattggtgtagcgattgcaagagttatatgcttgtggttaagctacattatgagcagggaaagaataactatcgatatctcatttttttcaataactgttttaaagcggttatttagatatggcgggtgggtaactataagtaacataatatctcctatattagcgagtatggatagatttattctatcccatatccagggagcatcaaaaatatcattctatacagtccctaatgagctggtaactaggcttggaatagttccaggctctcttgggaaagctgtttttccaaaattaagtcatgcaaggaattttacagcgtcatatgcagagcaaaaaaaagcttatatattaatgactgtcattgtaatgcctttggttttatttgtatattattacgcaaagtttattttaacattgtggatgggggctgagtatgcagggatttcggtcgaaatattacggattatgcttatagggtatatttttaactgttattcacaaatctcttttgccaacatacaggcctttggaaaagcaaaatacactgcatacatccatatgatggaatttattccttatttgataatgttatatataatttcaaaggaatatggggttattggtgttgcgtggttatggacaattcgagtaataattgattttttgatgcttttatatatgagttatcgttgtaataatcttatgaaaaaagggtag

SEQ ID NO: 7341 - DNA, 147 bp, Escherichia coli
atgactaagagcaccacgatgatgatccacttcatcatgaccctttccttatttatggccccttcctcgggaggggctttcccgtttcagcgtcccgctgaaatcgtcggcttatctcctttcgccatgcaagcagtctatcgctaa

SEQ ID NO: 7342 - DNA, 666 bp, Escherichia coli
atggggctgattatcggcatcctcgcgggttacgatgtcaaaggtgtattgcagctggcggtaaaaacggcggcagttatgctgctgatgccacgggtgattaaacccatcatggatggtttaacgcccatcgctaagcaggcccgtagtcgtttacaggcgaagttcggcggtcaggagttcctgattggccttgatccggcgttgctgctgggacatacggcggtggtatcggcaagcctgatttttattccactcaccattttaattgctgtttgtgtgccgggtaatcaggtgctgccgtttggcgaccttgccaccatcggcttctttgtggcgatggcggtcgcggtgcatcgtggaaatctgttccgcaccttaatctcgggtgtcatcattatgagcatcaccctgtggatcgcgacgcaaactattggtttgcacacccaactggcggctaatgcgggcgcgttaaaagccgggggtatggtggcttcaatggatcagggcggttctcccattacctggttactgattcaggttttctccccgcaaaatattcccggtttcattgttatcggcgcaatttatcttaccggtattttcatgacctggcgtagagcgcgtggttttattaaacaagagaaagccgttctcgcagaataa

SEQ ID NO: 7343 - DNA, 690 bp, Escherichia coli
atgttttcagaagtcatgcgttatattctcgacctcggccctacggtgatgctgccgattgtcatcattattttttctaaaatattaggcatgaaggcaggcgattgctttaaagcgggtctgcatatcgggattggctttgttggcattggccttgtgattggcttaatgctggattccattggcccggcggcgaaagcgatggcggaaaatttcgacctgaatctgcatgtggtcgatgtcggctggccgggctcttcacccatgacctgggcgtcgcaaattgcgctggtggcgattccgattgcgattctggttaacgtggcgatgttactgacccgtatgacgcgggtggtaaatgttgatatctggaatatctggcatatgaccttcaccggcgcgttgctgcatctggcaaccggttcatggatgatagggatggcgggtgtggtaattcacgcggcgtttgtttataagctcggcgactggtttgcccgcgatacccgtgatttctttgagctggaaggcattgctattccgcacggtacgtcggcgtatatggggccaattgctgtgctggtcgatgctatcatcgagaaatcccaggcgttaaccgaattaaatttagcgccgatgatattcagcgcaaatttggcccttttggcgaaccggtcaccgtgggttttgtga

SEQ ID NO: 7344 - DNA, 1263 bp, Escherichia coli
atgaaaacgttaattgcccggcataaagctggtgaacatattggcatatgttcagtctgttctgcacatccgttggttatcgaagcggcgctggcatttgatcgcaacagcacgcgtaaagtgctgattgaagcaacgtcaaaccaggtcaatcaatttggcggttataccggaatgacaccggcagactttcgcgaatttgtttttgctattgccgataaagtcggatttgctcgtgagcgtattattctcggcggcgaccatctgggaccaaactgctggcagcaagaaaatgcggatgcggcgatggaaaaatccgtcgagctggtaaaggcatatgttcgtgccggcttcagtaaaattcatcttgatgcgtcaatgtcctgcgctgacgattccataccgttagcgccagaaacggttgctgaacgtgccgctgtgctttgtctggcggcggaaagtgtggcgactgattgccagcgtgagcaactgaactatgtcattggcactgaagttccggtcccgggcggtgaggccagcgccattcagtcagtacacatcacccaggttgaagatgccgccaatactttacgcacgcatcaaaaagcgtttattgcccgcggtctggcagaggcgttaacacgcgtgattgccatcgtggtgcagcctggtgtggaatttgaccatagcaatattattcattatcaggcgcaagaagctcaggcgttggcgcaatggatagaaaaaaccaaaatggtttatgaagcgcattccaccgattaccagactcaggcggcctatcgggaattagttcgcgatcattttgcaattttgaaagtcggtccggcattaacctttgcgttacgcgaggcgatatttgcgctggcgcaaattgagcaggaacttatcgcccccgaaaatagcagtggttgcctggcggtaattgaagaagtgatgctcgacgaaccgcagtactggaagaaatattatcgcacgggttttaacgattcattactggatattcgttacagcctgtcggatcgtattcgttattactggccgcatagccggattaaaaatagcgtcgaaacgatgatggtgaatctggaaggcgtagacatcccactgggcatgattagtcagtatcttccgaaacaatttgaacgcattcagtccggggaattatcagcaataccgcatcagcttattatggataaaatttatgatgttttgcgcgcctatcgctacggctgtgcggaataa

SEQ ID NO: 7345 - DNA, 855 bp, Escherichia coli
atgtacgtggtatcgacaaagcagatgctgaacaacgcgcagcgcggcggttatgcggttccggcattcaatattcacaatctcgaaacgatgcaagtggtggtggaaaccgctgccagcatgcatgcgccggtcatcatcgccggaacgcccggcacatttactcatgccggtacagaaaatctgatggcgctggtcagcgcgatggcgaagcaatatcaccatccactggcgattcatctcgaccatcacacaaaatttgacgatatcgctcagaaggttcgttctggcgtgcgctcagtcatgattgacgcctcgcatttgccttttgcgcaaaatatttcacgggtcaaagaggtggtggatttttgccatcgctttgatgtcagcgtcgaagcggagctggggcaacttggcggccaggaagatgatgtgcaagtcaatgaagcagatgcgttgtacaccaaccccgttcaggcgcgtgaatttgccgaggcaaccgggattgattccctggcggtcgccatcggcacggctcacggtatgtatgccagagcaccggcgcttgatttttctcgactggagaacattcgccagtgggtgaatttaccgctggtgctgcatggcgcgtcaggattatcgactaaggatattcagcaaaccatcaaactggggatatgcaaaatcaacgttgcaacggagctgaaaaatgccttctcgcaggcgttaaaaaattacctgaccgagcaccccgaagcgaccgatccccgtgattatttgcagtcggctaaatctgcaatgcgcgatgtggtgagcaaagtgattgccgattgtggctgcgagggcagggcataa

SEQ ID NO: 7346 - DNA, 591 bp, Escherichia coli
atgattgtgccactgactcagcacctgtttgagttgattgcccgcgatgccgcagaattagaaaaagtactgccggtaggcgtcaaatttggcattaacattgcgccggcccacttgcacagcgaaagctttaaagcggatatccagaaactgctcacttccctgcccgcacaccatttccagattgtgctggaaattaccgagcgcgatatgctgaaagagcgagaagccacacaactcttcgcctggctgcattcggtcggcgtagaaatcgctattgatgacttcggcaccgggcacagcgcgcttatctatcttgagcgttttacgctcgattatctgaaaattgatcgtggatttatcaacgccatcggtacggaaacgatcacttcacccgtacttgacgcggtgctgacgctggcgaaacgtctcaatatgctgacagttgctgaaggggtcgaaacgccagaacaggcacgatggctaagcgaacgcggcgttaatttcatgcaaggctactggattagtcgcccgttaccgctggacgattttgttcgctggctgaagaaaccgtatacgccgcagtggtaa

SEQ ID NO: 7347 - DNA, 1026 bp, Escherichia coli
atgtcgcgactcagccccgtcaatcaggcccgttgggcgcgttttcgccataaccgtcgcggctactggtcgttatggattttcctcctcttgtttggtttgagtttgtgttctgaacttatcgccaacgataaaccgttgctggtgcgttatgacggcagttggtatttcccgttgttgaaaaactacagcgaaagcgattttggcggcccgctggcaagtcaggctgattatcaggacccgtggctgaaacaacgactggaaaataacggctgggtactgtgggcaccgattcgctttggtgctaccagtatcaactttgctaccgataagcccttcccttctccaccctcccggcaaaactggctgggaacggatgccaatggcggcgatgtgctggcgcgcattctctatggcacgcggatctcagttctgtttggcctgatgctgaccctctgctccagcgtgatgggtgtgctggcgggggcgctacaaggctattacggtggtaaagtcgatctctgggggcaacgttttattgaagtatggtcggggatgccgacgctgtttttgattattttactttccagcgtcgtacagcctaacttctggtggctgctggcaattactgtcttgtttggctggatgagtctggtcggcgtggtgcgggcggagtttttacgtacccgtaatttcgactacatccgcgcggcgcaggcgcttggcgtcagcgatcgcagtatcatcctgcgtcatatgttgccaaatgccatggtcgctaccctcacttttttaccgtttattttatgtagttcgataaccaccctgacctcactcgatttcctcggcttcggtctgccgctcggttcaccgtcactcggcgaactcctgttacaagggaaaaataaccttcaggccccgtggcttgggatcaccgccttcttatcggtggcgatattgttgtctttgctgatctttattggtgaagccgtccgcgacgcatttgatcctaataaggcggtgtag

SEQ ID NO: 7348 - DNA, 1176 bp, Escherichia coli
atgctgctatctgacatccaaataaaaagagcaaaaccgaaggacaaaccctatacgcttaacgatggtatggggctatcactcctgatcgacacagcgggcagtaaaggctggcgttttcgctatcgctttgcaggtaagcctaagatgatttcctttggcgtatatggcgatgtgtcgttggcacaggcacgtaccaaacgtgatgaagcgcgttcgatgttagccaacgggataaacccaagtgaagccagaaaagcagataagattgctttgcagttcgcgcatgagaacagctttgagtctgtggccagagaatggcactcatcgaaaaaagccacctggtcagagggttatgcaaaagaggttctcaattgtatggaaaaggatatttttccttttatcggccagcgcccaattgagcagattgaaccattagaactgctaaccgtcctgcaaaaaatagagaaaagaggtgcgctagagcaaaccagtaagatccgccgccgctgtggtgaagtgcttcgttatgctgttgccactggtagagcaaagtataattttgcacccgatttagctatcgcactcaacaaacctaaaacccaacacttcccgttcctgactgaaagcgagttgcccgagttcgttaatgctctggataactatcagggcagtttagttaccaaatacgccacgcagctgttgatgctaacaggcgtgcgaacaattgaactacgtgcagcggaatgggctgagtttgatttagataatgccttatgggagatccccaaagaacggatgaagaaacgccgcccccatctggttccgttatcaactcaggcgatcaatatcctgaaaaagctgcaagaaataacagggaattacagcctcgttttccctggccggaatgacgtcagtaaaccaatgagcgaagccagcatcaacaaagtgataaaactactgggttatcacggtcggttaacgggtcacggtttcaggcataccatgagcaccatcttgcatgagcatgggtttgaaagtgcctggattgaaatgcagcttgcgcatgttgataagaactctattcgaggtacttacaatcatgcgcaatatattaaagatcgacaagtaatgatggaatggtacgctagcttattaaatacgacctgctattaa

SEQ ID NO: 7349 - DNA, 951 bp, Escherichia coli
atgtatagcccatatttgtatgcgagaagtacagagttattatgccttagggacctcgttgcgaagggagttagcctaaatggtctgctaccaattttagaaccaattaacgtcaatacgagaaatttattaacatgtttaaatgtttggaattctgacataattgttatccttaatccttatcaggaagatttttcttcacacaataacgtcttaactttaaatcaaaatttatcaagtgtattaacaaataaaaataatatcatctctggatatcttattcagcccaatacaacgattaatgatattaataattggttgaatgctaacttaaatagacgagttgcacttctatatgataatccatcattatccaactctgatattcagttgttggcgacaaatcaattgattagttatcatgttgttttaaataataaaatgcttcctaatcagtgcgctcttcttcctttgtcgaagttaattattattagcgataactttagaaagttagcaaaaaatgctgattataatgggccggaacttttcacgcacgcacatcaattcgtgggacaaaattacttaggatttggcgattatacaattactggccaggtactagatcttggaggtggtcaaccttctgctgttgccgcacatttggtgttcaagaatttacaagcgaatacagtttggattcgtcattttgtatcaagcaacacgcaacgaggaagttcaaatgttactgcaaaatttttagatgtttcagatcaaattacaaatcttgttccccaacatccaacccagtttggcagcaacattggtcttaactattattattacaatagtcaaccaactgtaaggcatttccctgggttgccaaaaaacaaacagtatcaaattactcaccatatttgtttcatgctggatttaatagcaggtcgtatttaa

SEQ ID NO: 7350 - DNA, 882 bp, Escherichia coli
atgagtcataataaaaaggaatatgctaaatttttccgtcgccccattttttcatccttagcaaaaggtaaggatatttcggatttatttgggagttttgattcttactgctatgaaacactgttttcaaacaatgataataatgaacatgagatttcactaagggatttatttacatcattatatgattttttgcgtctgaattatagaaatgaatatgtttataagacagcacttgtcaataaaataatattcggtaagcacagcccaaaaacaagttcgtcgtccatagagttaccaattaaaaactctatagtggatgttgcggtgtttaatggtacgtctacagcttacgagattaagacagagtatgattcaccaaaaaggttgattactcaagcccctgattatttggatgtttttgataaagtgtatatagttacacatccagagtatgcaagtaaatattgtgctttaaatctccccagagtgggagttatggttttgaataaaaaagatcaattgagtgtcattaaggaggcagattcaaatattgattatattaaaagtgacagcttgttttcagttcttagaaaggaagagttcttagctataatagaagattacacttcaactaaaataaatatgcctaacggattggtttatgaatattgtaaagagatattcatgcagatgccattaaacatagcaaataaatactttatctctgctatgaaaaaaagatgtaacgataaagtttttttggattatatttattctcttccagcatgtttacgtgttttaggttatgcaacaccattatcaagaaagcaaaaagaattcatcatgaatttgatggatgtaaaaattaaaatttgttga

SEQ ID NO: 7351 - DNA, 273 bp, Escherichia coli
atgaagatgatgagaatgtactgccccacatgtcaggcagtagcacggataggtaaaacaaacaggaaacacccacaactgtacgatgtgtactgctattgctctaatgtggagtgcggtcactcgtttgtgatgaatgttgctttctcccattccgttagtccaagcgcgctgaacgggcagggaagggttaaagagctgattgatgcaattccacccgaggaacgggaaaaggctttaaagttgctgctggctgcgcaaaagaatgggtaa

SEQ ID NO: 7352 - DNA, 2688 bp, Escherichia coli
gtgaaaacaccgtctgtatccacgatttccggagctgcaattgggcgctggccttatatcctgtcagcattaggtattaaagtaccgtccgcaggacatcatggggcttgccctgcctgtggtggaaaagatcgttttcgactggacgataaagcggggcgagggacgtggttttgtaatcagtgcggtcatggcgatggtcttgatctggttcgtctggtgacaggaagaaagataaaagaagtcgccgggatggtatctgaggcgcttgcattaccagaaatacaggagaagcccgcattgccagccaggaaaaaggccgcaggaaaagaagcgggcgcggagcgatataccagactcagacagcagtcctgcaatggtgagccggtctatctgacaaataagagcttacacgggtattcacttcccttgctgtcacagcctttgaatctggccggaataacattttccaccggttcattactgctgcctttgacggatatttccgggaatattactggtggccagcttatcaatcctgacggggataaaagtctgctgcccggtagccagctgtctggcgcattcattgccctgaccgatatacccgctgaaacacctgaacaggtgattatcactgagggttttgccacggcgcttaccgtcagtctgctgactgaaggatggatcgtggcggctgtcgctgccaccaatttactgaaggtgacggagcagatccgaaaacgctggccggaaacccggatcattctggccggagataatgatctggctgacggcaaagaaaacaccgggcgtattcaggcagagaaagccgccaaagcggtggatggctgggtaacgctccctccggtacgccataaggctgactgggatgattatcggcaggaagtggggaaagaacgggcgagagatgcctttcgtgaagaaatgacgctgcatggcaaagggcagacccgtttaccagaagggttccggctgacaaaagaatatttgtggtacgacaagctggttaataagtctgatggtgatacagagatacgtaatatcaaaatttgcagtccgttgcgggtgacggcaatcaccagtgatgctgatggaagtaattacgggcgtttgctggaatgggaagataccaacggaaacagccgtaaatgggcaatgccgatggagatgctgggcggtagcggggaagaactgcgccgcgttctgctggttaacgggctttcttacatcaacattaacggcatggccagagcattcctgatggaatatatctcgctgtgtaaaccggacagaaaagtaacctgtgtgaataaaactggctggcacggcggggtttacgttctccaggatgaagtgatagggcgcgaagcccagtcagtcatcttacaaacatcgagtgtgcaggggcgtgattttcgtgtcagcggcacatcagagggctggcgtgaaaatataggccgttattgcataaagaatgcccgtcttgcctttgcggtgagtctggcatttgctgccccccttctgaaactggttggtatcggcggtggaggttatcacctcaaaggggaatccacagacggtaaaaccacgacgatgaaagtggctgcatcagtatgtggtggaacagatttctggcatacgtggcgggcgacggggaatgccttagaaggaacggcgagccgccgcaatgatgccacgctgatgctggatgaaatccgggaggttgacggcagggaggcgggaaatatcgcttatatgctggctaacgggcagggcaaagccagagccagaacagatggttcggtaagggaaaccaaccgctggaatctgttgtttctgtctaccggggaactgtcactggtagagcatgcggcaagcgccggggaacgtacgtatgccggggttgaggtcagaatgatccagatcccaagcgattcgggcaagtatggcgtgtttgaagaacttcatggcttcagtagcgggaaaaccctggctgagcatcttgagcagcacgtagcgcattatcatggtgcaccattccgcgactggctgtattgcctgaccgctgatctgccggaactgaccagtcaggcgaaagccttattgaaagagtatacccgaaggctgacgccggaaaatgccgggaatcaggttggccgggctgttacccgttttgctctggttgcgatggccggggagctggccacaaaagcgggcatcacaggatggccggagggagaggcctttcgtgccgctcaaagctgtctggctgcatggatggctgaccggggccatacagctaatcaggaagataaagcggcacttgaacaggttcgggacttcatgacgcgtaatcagttcagtcggtttgctgactggaatgacgacaggaaccggcctgtttcaatgatgggattcagaaaagtcgataaaggagacaacgtgacagagccggttgtgacgttctacgttctcccgtcaggctggaaggagatctgtaagggatttgactcgcgtaaggtggccaggttgtgtgtggacgcgggctggctgaaacccggtgaagatggccggacgcaaaacagcattcgcctgccagaaatagggcttaaacgtgtgtaccagttcaatacacaggtactgggaagcgctgaacctgagtga

SEQ ID NO: 7353 - DNA, 411 bp, Escherichia coli
atgaataataatcaaaatttaaaggcgcatgctttacgaacagcagtcttacgctactacattgctgatgcattcatttccttaatggtgcgtgttcataatgaacctgtttatattgaagatggcgaacgaatagaactctcccacgaaaaagtggtgagtaatattatttaccatattgaaatgccgtgggtgaatgagtttggggctgatgctggttgcatactggccgcagagaaactggaaaaaatgcttaaaccaggctttatgtcagaaaatattcgcctgtcagtttttggtgtcacagagatgcgtgaggtttaccgggatattattttcggagcacctgatggcgaactacccgaaggttttgaatttgtgaagccggaaggtcaggaggtgctgctgtga

SEQ ID NO: 7354 - DNA, 237 bp, Escherichia coli
atgaaatccatgaattttaagcaaggctgcatattgagtgaacagggggagagtcgtctgttacgggcggcactggccagtgagtttcttgcagaggtcttgtccgtgcccacagtgaatggagcgagaactgtttcagcggaaggcgctgcggctttagtggcctgtattgccgaacaactggatggcgttgttaaggaaaccagcacaattaagggagtgatgcgcgatgaataa

SEQ ID NO: 7355 - DNA, 591 bp, Escherichia coli
atgccagcgttaattaatccaggcaatgatcagttttcggttataaatttcttgcctcaccaggaatgcgcgggatatagtttaaaggttgccgcaaaatcggcagccgggcgtaggaacccgtgttatctgaaggcgatactacacgcgctaggcgtgtttttttgtgtcgcagctttgactcacctaaaatttatggtgtggtggctgattgtatttttttattttttacgccacatcatcagaattatggtagtccaggcggggcagctttcgggctggccggtatccttcagagccggtattcctacccccgtctgggctaccacccatgagcgtaggaactccggtggtagcgttacccgctatctgaaggaggttgccattatggctacagtccctgctttatctcaccctgaatttacctttgtctttctggctgtccgccgtacagaccgtgatgcccgtccacgccctgtgcgtgtaatcgcagaatgcgagcatgctgcacgccttaaacttgccactgaatttatcctgagctttgctgcccgtatccctgtgaaaagagccggggaggtggttgcatga

SEQ ID NO: 7356 - DNA, 1005 bp, Escherichia coli
atgtatgccttcaaaactgaaaggccggacgcagcacgtcgttatcataataaattcgtcactggcactaactatcaggaagaatcaaacagacgctttgcattaagcgaacctactgaaaatatactgcgtacctcaattctggaatccgggtggcttattaaaaatattaccctacgtgatgttaacgccgtgtcaggtaatgccgtcaatattggtgccagtgaactgtataccggacgtgtggatggtggccgtttccacaaaaaaatggcaatcaatggtacggagttctttctgacagagacggatacctgcgcccggatcagctattccgatatgtctcatatttaccataccggcgtgccggatgagtttgagaaaacggttgagagcttttttgcccaggcatatgcgctggacatgctgcgggtcggtttcaacggtgtgtcgattgcaaatactacaaacccggaaatcaataaaaaaggcgaggatgtcaatattggctggcatgcactggcgaaagcctacgggaacggaaagcaaatcatctctgagcctgtcactctgggagagactggcacctggaaaaatattgatgctctggccaaccatctgattacagagcttattgctgagcagtttcgtgaagatcctcgtctggttgtactggttggggcagagctggcagcacatcaacgcctgaagttatttaatgccgcagaccgcccgtctgatgtgaatgcggcacagatggctacaagttctgttgctggccgctttgcgtttattcccccgtttatgccgggtaagcgtctggcagtaacgacgctggataatctgcatatttacactcaggcgataacacgctggtttcgtgctgagtttgatgatgaaagcagtgaatacgtgcattcctacctgcgcaatgaaggttatgcactcggtgaacctgaactgtacgcggctgttgatgagtgcaccctgacgtttgcggattga

SEQ ID NO: 7357 - DNA, 861 bp, Escherichia coli
atggttgacaatgtttttaagaagaaattggcatcaattaagaacgaacatgtgtcggtgttagatagttacaaagtaagatcatttaaagagactcatagcgacacggcctgtattgtgcgtattattgaaatatattcactgaataagctgcgagctaaaggtgaaaagctgtattcacttacggggttaacagtacctgatacggaaactgtggcgaatgagatcaacctgctcctgagccgttatgcccagttgtgtcgtcaggaagaggaagagttatctttccggcagcgtgaagtgacaaatgcggaagttgcatggaaaagcacattctcaaaaaacggcgtcagtagcattgctgaagccaaaacgaataaaatggggcatgctgaacgagcggatgctgaacggtattaccatctggctgtttcccggttgaatgaacaacatagtcgattgagcacgatcaagcttttgccgggagtactggccgatgaaggaaactacattgggaagggaatcgataagcgtttactgaatatatttcctcaatccggccagatccctgctgattttatttctgtatttaatgacagtgacgttgtccgtgatattaaatttattactgatgcactcaagtctttatctgattccgtgagtgaaattattagtcgttgtagcgttccaactgatcgttatgtattaaataacggtggaatggcaagagctatggcttacagggagtactatcgagcagataattatgtattacgttcagtcgtaagtgaccgggattatgttgagcatgtaatgaaatacaatctggttactgagtacaaaaataaaatcttttcttaa

SEQ ID NO: 7358 - DNA, 228 bp, Escherichia coli
atgagcttattgcctcgggaaaacgcaccccaaaaaagatatagacttctgagaatatcagaagtgattaatttgactggcttacccaagtcaacaatttatctaaagataaagaatgatgaatttccgaaccaagtttctatcggttctcgttctgttgcatgggtggagcatgaagttaatgaatggatagagaagaatattctcaatagaaaattaaactcctaa

SEQ ID NO: 7359 - DNA, 1341 bp, Escherichia coli
gtgagtgatttttctgctttcgataacgccctgcgctcgctggagtcgatcccgctggcccgcgtcgccgggcggctggtgcgcctgaacggcattctgctggagagcgtcggctgcccgctaatgaccgggcaactgtgccgcatcgaaagcgccaatcacacactgatcgacgcgcaggcagtgggctttaatcgcgacatcacctacttaatgccgtttaaacagccggtcggcctgatggcaggcgcacgcgtcttcccggaagaaaaagcccacgacatcctgattggcgaaagctggttaggccgcgtggttaacggtctcggcgaaccgctggatggcaaaggccgcctgaacggcaacgaccttctgccgccgctgccaccctcggtcaatcccttaacccgccgttcagtggacgaaccgctggacgtgggcgtgaaagcgattaacggcctgctgaccatcggcaaaggccagcgtgtcgggctgatggcgggcagcggcgtcgggaaaagcgtgctgctggggatgatcacccgccagactaaagccgacatcgtggtggtcgggttgattggtgaacgcgggcgcgaagtgaaagagtttatcgaccactcgctgggcgcagacgggctagcaaagtctatcgtcgttgtcgcgcctgccgatgaatcgccgctgatgcgcctgaaagccaccgaactgtgccactccatcgccgcctggtttcgtgaccgcgggcatcacgttttactgctggtggattccctgacccgctacgccatggcgcagcgtgaaattgctctctcactcggtgaaccacccgccaccaaaggctatccaccatcggcattcggcatgatccccaaactggtcgagagcgcaggcaacagcgaaagctcaggatcgatgaccgccatctacacggtgctggcggaaggcgacgaccagcaagatccaatagtcgactgcgcccgcgcagtgctggacggacatatcgtattaacccgcaaactggcggaagcggggcactatccggctattgatatcggccagtcgatcagccgctgcatgaaccaggtcacccgcctggaacatcagcaatccgcccgcgcgttaaagcaaaactacgccgcctatatggagatcaaaccgctgatcccgctcggcggctacgtggcaggcgcggacgccagcgtcgacaaagcggtgaaaatgttcccggctatcgagcgatttttgcgccaggagatgcgcgaacccgcctccctcgaactggtgcaaagccgcctgcaaatcctctttcccatcgccaaaaaggcagaagggcaataa

SEQ ID NO: 7360 - DNA, 348 bp, Escherichia coli
atgaaaaaagtttattttgttcatcgtgataagaatgcaattgaacgtcaaagtgacggtgtagaattttgtttcatccctgagttcaatgacggaagaatttatttctattgtcatgaatatgatatattttggcgttcaatcaaggatgctggtgactatgcctggtgctgtaatttccatctaaagggaattatacgtccggcaactcttattgagatatcaaattccgatttaatatcttatattgactctattaaagaatatgaaatagagaacagtaaactcataaacattaactatattcatttgaattatgattttttaaatattcatcaaaatacctaa

SEQ ID NO: 7361 - DNA, 549 bp, Escherichia coli
atgaaaacttatcatctaagttcagcaaacagaagtgcagaacattatataatgttctcatatggtgtatcattacgactatctaattacctttttaacagtaaaccggttgcaagagatttttttaaacatttaaaaggaactacgcagcgaggtttaacagataagcatttagacaatttagattacttcaagggcttaggagcttatcacattgtatctaaacgcttcgtcgaagcaatgaaatcatatttaaaggaagatgtaacttttcatgcaatgcaagtctcaggaaggaatacttctcacgacttataccttttacaagtcaataaaactttgccaataattaaagaaacatctttcgatttaaacaatgatcgtgtattttcgccacccattttcaaaaaaaatcatgacatatcatttctaatagccagagaagagaatgtcttaatgaatcatattgtcatcgtcagcgatgaatttgtttctttgtgtgcacgacatcaattaaaaataaacttccgacaaacacttacggaataa

SEQ ID NO: 7362 - DNA, 402 bp, Escherichia coli
atgcttcagaagattggatacatggaagaagataatattatagagaaaaaaccatggcgtgggatcccacctgaatacacggatagatggagggaaatttataacaacgctgctcccgaagaagggatgcatttatcagatgcttgtccagtatgtggtgatacggaattatatcgctattattctctgttaaaaacgcaaccacgcttattaggagggattatgtataaaggacctggaagttattgggaatggtgtgggtcttgtcgttcctatgaacatatgtcaggctatgtaccaatatcgtgggttgtggagttatcaggaatagatcattcaaaattaacggccattccagatatgattgatattgcaagacataaaaatcattacttctcttaa

SEQ ID NO: 7363 - DNA, 1056 bp, Escherichia coli
atgcgtaaaatcattcatgtggatatggactgctttttcgcagcggtggagatgcgcgacaatcccgccctgcgcgatatccctattgctattggcggcagccgcgaacgacggggggtgatcagcaccgccaattatcccgcgcgtaaatttggcgtacgtagcgctatgccgacagggatggcgctcaaattatgcccgcatctcaccttgcttccagggcgctttgacgcctacaaagaagcctcaaatcatatccgcgaaattttctcgcgctatacctcgcgcattgaaccgttatcactggatgaagcctatctcgatgtcaccgatagcgtccattgccacggttctgcgaccctcatcgcccaggaaatccgccagacgatcttcaacgagctgcaactgacggcgtctgcgggcgtggcaccagtaaagtttctcgccaaaatcgcctccgacatgaataaacccaacggccagtttgtgattacgccggcagaagttccgacatttttacaaaccttaccgctggcaaaaattcccggcgtcggcaaagtctcggcggcaaaactggaagcgatggggctgcggacctgcggtgatgtgcaaaagtgtgatctggtgatgctgcttaaacgctttggcaaatttggccgcattttgtgggagcgtagtcagggcattgacgaacgcgacgttaacagcgaaaggttgcgaaaatccgtcggtgtagaacgtacgatggcggaagatattcatcactggtctgaatgtgaagcgatcatcgagcggctttaccctgaactggagcgtcgtttggcaaaggtaaaacctgatttgctgattgcccgccagggggtgaaattaaagttcgacgattttcagcaaaccacccaggaacacgtctggccgcggctgaataaatctgatctaatcgccaccgcgcgtaaaacctgggatgaacgccgcggcgggcgcggtgtgcgactggtggggctgcatgtgacgttgcttgacccgcaaatggaaagacaactggtgctgggattatga

SEQ ID NO: 7364 - DNA, 486 bp, Escherichia coli
atgattgcacgttggttctggcgcgaatggcgctcgccgtcgctattaattgtctggctggcgcttagcctggcggtggcctgcgtgctggcgctgggcaatatcagcgatcgcatggagaagggcttaagccagcaaagccgtgagtttatggcgggcgatcgggcgttgcgcagttcgcgcgaagtgccgcaagcatggctggaggaagcgcaaaagcgcggcctgaaagttggcaagcagctgactttcgccaccatgacctttgcaggcgacacgccgcaactggcgaacgtcaaagcggtggatgatatctacccgatgtatggcgatctgcaaactaatccccctggcctgaaaccgcaggcgggcagcgtattgctggccccacgcctgatggcactgcttaacctgaaaacgggcgataccatttgccaccttgcggattgccggagaagtgattcaggaaccggattccggttttaa

SEQ ID NO: 7365 - DNA, 483 bp, Escherichia coli
atgaaacttcaggtattaccgttaagtcagaaagcctttagtgcttatggcgacgtaatcgaaacgcagaaacgggattttttccatattaacaatggactggtggagcgttaccacgatttggcgctggttgagattcttgagcaagaccgtacgcttatcagcattaaccgcgcgcaaccggcgaatctgccgctgaccattcacgaactcgaacgtcatccgctgggtacacaggcgtttatcccgatgaaaggtgaagtgtttgtggtggtggtggcgttaggtgacgacaaaccagacctgtcaaccctgcgggcgtttattaccaatggcgaacagggagtgaattaccatcgtaacgtctggcatcacccacttttcgcctggcagcgcgtcaccgattttctgaccatcgatcgcggcggcagtgacaactgtgatgttgaaagtattcctgaacaggaactctgttttgcgtga

SEQ ID NO: 7366 - DNA, 1029 bp, Escherichia coli
atggctaccgccaaaaaaataaccattcatgatgttgcgctggctgcgggcgtgtcggtaagtaccgtttcgctggtgcttagtggcaaagggcgaatctctaccgccacaggagaacgcgttaacgccgccattgaagagctgggatttgtgcgcaatcggcaggcgtcggcgctgcgcggcgggcaaagtggcgtcattggtttgatcgtccgtgatttatctgcgccgttttacgccgaattgacggccggattgacggaagctctggaagcgcagggacggatggtttttttgcttcacggcggtaaagacggcgagcagctggcacagcggttttcactattactgaatcagggtgtcgatggtgtggtaattgccggggctgcaggaagcagcgatgacctgcgacggatagcagaagaaaaagctatcccggtgattttcgcttcccgtgccagttatcttgatgacgttgatacggttcgcccggacaacatgcaggctgcacagttgttgacggagcatctcattcgcaatgggcatcagcgtatcgcctggctgggagggcaaagttcctcattaacccgggcagaacgggtggggggctattgtgcgactctactaaaatttggcctgccgtttcacagcgattgggtgctggagtgcacttccagccagaagcaagccgcggaagctatcacggcgcttttacgtcataacccgaccatcagcgccgtggtttgctataacgaaactattgcgatgggggcatggtttggtttgctgaaagcaggaaggcaaagcggggaaagcggagtcgatcgttactttgagcaacaggtttcgctggcggcatttaccgatgcaacgcctaccacacttgatgatatacccgttatctgggccagcacgccagcgcgggaacttggtaccacacttgcggatcgcatgatgcaaaaaatcacccatgaagagacgcattcacgcaatcttattattcccgcccggctcattgcggcgaaataa

SEQ ID NO: 7367 - DNA, 768 bp, Escherichia coli
gtgtttaattctgacaacctgagactcgacggaaaatgcgccatcattacaggtgcgggtgcaggtattggtaaagaaatcgccattacattcgcgacagctggcgcatctgtggtggtcagtgatattaacgccgatgcagctaatcatgttgtagatgaaattcaacaactgggtggtcaggcatttgcctgccgctgcgatattacttccgaacaggaactctctgcactggcagactttgccgtcagtaagttgggtaaagttgatatcctggttaacaacgccggtggcggtgggcctaaaccgtttgatatgccaatggcagattttcgccgcgcttatgaactgaatgtattttcttttttccatctgtcacaacttattgcgccagaaatggaaaaaaatggcggtggcgttattctgaccattacttctatggcggcagaaaataaaaatataaacatgacctcctatgcatcatctaaagctgcggccagtcatctggtcagaaatatggcgtttgacctgggtgaaaaaaatattcgggtgaatggcattgcgccgggggcaatattaaccaatgccctgaaatccgttattaccccagaaattgaacagaaaatgttgcaacacacaccaatcagacgtctgggccaaccgcaagatattgctaacgcggcgctgttcctttgttcgcctgcagccagctgggtaagcggacaaattctcaccgtctccggtgatggggtacaggaactcaattaa

SEQ ID NO: 7368 - DNA, 1812 bp, Escherichia coli
atgttacgtcctgtagaaaccccaacccgtgaaatcaaaaaactcgacggcctgtgggcattcagtctggatcgcgaaaactgtggaattgatcagcattggtgggaaagcgcgttacaagaaagccgggcaattgctgtgccgggcagttttaacgatcagttcgccgatgcagatattcgtaattatgtgggcaacgtctggtatcagcgcgaagtttttataccgaaaggttgggcgggccagcgtattgtactgcgtttcgatgcggtcactcattacggcaaagtgtgggtaaataatcaggaagtgatggagcatcagggcggctatacgccatttgaagccgatgtcacaccgtatgttattgccgggaaaagtgtacgtatcactgtttgtgtgaacaacgaactgaactggcagactatcccgccgggaatggtgattaccgacgaaaacggcaagaaaaagcagtcttactttcatgatttctttaactacgccgggatccatcgcagcgtaatgctctacaccacgccgaacacctgggtggacgatatcaccgtggtgacgcatgtcgcgcaagactgtaaccacgcatctgttgactggcaggtggtggcaaatggtgatgtcagcgttgaactgcgtgatgcggatcaacaggtggttgcaactggacaaggcaccagcgggactttgcaagtagtgaatccgcacctctggcaaccgggtgaaggttatctctatgaactgtgcgtcacagccaaaagccagacagagtgtgatatctacctgctgcgcgtcggtatccggtcagtggcagtgaagggcgaacagttcctgatcaaccacaaaccgttctactttactggctttggtcgtcatgaagatgcggatttgcgcggcaaaggattcgataacgtgctgatggtgcacgatcacgcactaatggactggattggggccaactcctaccgtacctcgcattacccttacgctgaagagatgctcgactgggcagatgaacatggaatcgtggtgattgatgaaactgcagctgtcggctttaacctctctttaggcattggtttcgaagcgggcaacaagccgaaagaactgtacagcgaagaggcagtcaacggggaaacccagcaggcgcacttacaggcgattaaagagctgattgcgcgtgacaaaaaccacccaagcgtggtgatgtggagtattgccaacgaaccggatacccgtccgcaaggtgcacgggaatattttgcgccactggcggaagcaacgcgtaaactcgacccgacgcgtccgatcacctgtgtcaatgtaatgttctgcgacgctcacaccgataccatcagcgatctctttgatgtgctgtgcctgaaccgttattacggttggtatgtccaaagcggcgatttggaaacggcagagaaggtactggaaaaagaacttctggcctggcaggagaaactgcatcagccgattatcatcaccgaatacggtgtggatacgttagccggcctgcactcaatgtacaccgacatgtggagtgaagagtatcagtgtgcatggctggatatgtatcaccgcgtctttgatcgcgtcagcgctgtcgtcggtgagcaggtatggaatttcgccgattttgcgacctcgcaaggcatattgcgcgttggcggtaacaagaaagggatcttcactcgcgaccgcaaaccgaagtcggcggcttttctgctgcaaaaacgctggaccggcatgaacttcggtgaaaaaccgcagcagggaggcaaacaatga

SEQ ID NO: 7369 - DNA, 906 bp, Escherichia coli
ttgacctttgtctgcctggcatttctgataggaccgagcattaagaattccagcccggaagagatggtgtcggtatatcatttctggacaattgtgctggcgattgccggaatggtgctttacttcatctgcttcaaatcgacgcgtgagaatgtggtacgtatcgtggcgcagccgtcattgaagatcagtctgcaaaccctgaaacggaatcgcccgctgtttatgttgtgcatcggtgcgctgtgtgtgctgatttcgaccttcgcggtcagcgcctcgtcgttgttctacgtgcgctatgtgttaaatgataccgggctgttcactgtgctggtactggtgcaaaacctggtcggtactgtggcatcggcaccgctggtgccggggatggtcgcgaggatcggtaaaaagaataccttcctgattggcgctttgctgggaacctgcggttatctgctgttcttctgggtttccgtctggtcactgccggtggcgttggttgcgttggccatcgcatcaattggccagggcgttaccatgaccgtgatgtgggcactggaagctgataccgtagaatacggtgaatacctgaccggcgtgcgaattgaagggctcacctattcactattctcatttacccgtaaatgcggtcaggcaatcggaggttcaattcctgcctttattttgggattaagcggatatatcgccaatcaggcgcaaacgccggaagttattacgggcatccgcacatcaattgccttagtaccttgcggatttatgctactggcattcgtcattatctggttttatccgctcacggataaaaaattcaaagaaatcgttgttgaaattgataatcgtaaaaaagtgcagcagcaattaatcaacgatatcactagttaa

SEQ ID NO: 7370 - DNA, 1065 bp, Escherichia coli
gtggttattattccaataattattggcgttgaaggcggggcgtattatgtttataaattaggtgctcgtgctgatatgagtacccggtggtatcttgatggtgataaaagttttggctttgccctgggggcagtaaaaataaaacccagtgaaaatagcctgctaaaattaggtcgcttcgggacggattatagttatggtagcttaccttatcgtattccgttaatggctggcagttcgcaacgtacattaccgactgtttctgaaggagcattaggttattgggctttaacgccaaatattgatctgtggggaatgtggcgttcacgagtatttttatggaccgattcaacaaccggtattcgtgatgaaggtgtttataacagccagacgggaaaatacgataaacatcgcgcacgttcttttttagccgccagttggcatgatgataccagtcgctattctctgggggcatcggtacagaaagatgtttccaatcagatacaaagtattctcgagaaaagcataccgcttgacccgaattatacgttgaaaggggagttgctcggcttttacgcgcaacttgaaggtttaagtcgtaataccagccagcccaatgaaacggcgttggttagtggacaattgacctggaatgcgccgtggggaagcgtatttggcagtggtggttatttgcgccatgcaatgaatggtgccgtggtggataccgacattggctatcccttttcattaagtcttgatcgtaaccgtgaaggaatgcagtcctggcaattgggcgtcaactatcgtttaactccgcaatttacgctgacatttgcaccgattgtgacccgcggctatgaatccagtaaacgagatgtgcggattgaaggagcgggtatcttagggggtatgaactatcgggtcagcgaagggccgttacaagggatgaatttctttcttgctgccgataaaggacgggaaaagcgcgatggcagtacgctgggcgatcgcctgaattactgggatgtgaaaatgagtattcagtatgactttatgctgaagtaa

SEQ ID NO: 7371 - DNA, 702 bp, Escherichia coli
atgaaaaacatcgccgcacagatgattaactttgaccgtgagcagatgcgtcggatcgccaacaacatgccggaacagtacgacgaaaagccgcaggtacagcaggtagcgcagataatcaacggtgtattcagccagttactggcaactttcccggcgagcctggctaatcgtgaccagaacgaactgaacgaaatccgccgccagtgggttctggctttccgggaaaacgggatcaccacgatggagcaggtgagcgacggaatgcgtgttgcccgtcggcagaatagaccatttctgccatcacccgggcagtttgttgcatggtgccgggaagaagcatccgttaccgccgggctgccaaacgtcagcgagctggttgatatggtttacgagtattgccggaagcgtggtctgtatccggatgcagagtcttatccgtggaaatcaaacgcgcactactggctggttaccaacctgtatcagaacatgcgggccaatgcgttgactgacgcggaattacggcgcaaggctgccgatgaactggcctgtatgaccgcgcgaattaaccgtggtgaggctatacctgaaccagtaaaacaacttcctgtcatgggcggtaggcctctaaatcgtgcacaggctctggcgaagatcgcagaaatcaaagctaagttcgggctgaaaggagcgatgaaatag

SEQ ID NO: 7372 - DNA, 1005 bp, Escherichia coli
atggcgaaagccggtctgctggaacagaaccgactttcaggtgcaaatcgtaacacactcattgcgggaggaattatggcaaacactgctgagatattcaattttccagtgccggatgcggcacaaaaggagccgcgcgtggcagatctcgatgatggttatacgcgcattgcaaatgagttgctggaagctgtgatgctggccggattaacacagcaccagcttctggtctttctggctgtcatgcgcaaaacatatggctttaataaaaaactggattgggttagcaacgagcaactttccgaattaaccgggatattgccgcacaagtgttctgctgcaaaaagtgttctggtaaagcgtgggatttttattcagagcgggcggaataccggcattaataatgtggtcagtgaatggtcaacattacccgaatcaggtaagaaaaataaagtttacctgaaagaggtaaatttacctgaatcaggtaaaaaaagtttacccaaatcaggtaaaggcgtttacccgaatcaggtaaacacaaaagacaaactaacaaaagacaatataaaacctttttcgtccgagaattctggcgaatcctctgaccaaccagaaaacgatcttcctgtggtgaaaccggatgctgcaattcagagcggcagcaagtgggggacagcagaagacctgaccgccgcagagtggatgtttgacatggtgaagaccatcgcgccatcagccagaaaaccgaattttgcagggtgggctaacgatatccgcctgatgcgtgaacgtgacggacgtaaccaccgcgacatgtgcgtgctgttccgctgggcatgccaggacaacttctggtccggtaacgtgctaagtccggccaaactccgcgacaagtggacccaactcgaaatcaaccgtaacaagcaacaggcaggcgtgacagctagcaaaccaaaactcgacctgacaaacacagactggatttacggggtggatctatga

SEQ ID NO: 7373 - DNA, 540 bp, Escherichia coli
atgcaaccacttacataccaacagactagcggatttagcccgactgcggtgataaatcgttctcaaacaaaacaggtgccaggccacgaaaaaatccgtgatgccgtccgcgcctggtcggctgtagataatcaggatgtcgttgccacactcattgtgaatgagtatctggagcagggcggcggcaccatcgatttccctgatgatgtcagccgtgcacgccagaagctgttccgcttcctcgataacaaattcgattctgaaaaataccgaaataacgtgcgtgaactgaccccggcaattctggcggtactaccgctggaatatcgcggttacctggttgagcaggatagcttcatggctaggttggctgaaatggaaaaggaactcagtgaggcaaaacaggctgtcattctcaacgcaccacgccaccagaaactgaaggaaattagtgaaggtattgtgtcgatgtttcgtgtggacccagatctggctggtccattgatggcgatggttactaccatgctgggggcgatatga

SEQ ID NO: 7374 - DNA, 231 bp, Escherichia coli
atgaacccagctatcaaaacagcgatcaatatcgttggttcacaaaagaaactgggcgctgcttgcgaagtttcacagcaggccgtctataagtggcttcacaacaaagcaaaggtatcccctgaacatgtcggcagcattgttacggctactggtggagtagtgaaggcataccagattcgcccggatcttccgaagttgtttccacacaccgaaaagaacgcagcttaa

SEQ ID NO: 7375 - DNA, 756 bp, Escherichia coli
atggttgtttttagtcaacaaccattttcgtttgatggaataaaaccttggttgtacatttggactatgaaaacaacactctcagaaagacttaaagaagccagattagcgcgaggccttacacaaaaggcgcttggggatttggtcggggttagccaggctgctattcagaaaatcgaaacagggaaagctaatcaaacaactaaaatcgtggagatcgcgaacgctttgggtgtgcgcgcagaatggttatcttctggcgttggaaatatgtcagacagtacagtgcaaccaatacaatcaactgtcagccattccaaatacttcaagattgacgttcttgatatagaagtcagtgctgggccgggagtcatcaaccgtgagtttgtagaagttctacgctcggttgagtactcgtttgacgatgctcgtcacatgttcgatggtaggaaggcggaaaatatccgcatcattaacgtgcgtggtgacagcatgtcaggaacgatcgaaccaggtgatctgctgttcgttgatatcacagttaaatctttcgacggtgatggtatctatgcgtttctgtacgacgacacagcccatgtaaagcgcctgcaaatgatgaaggataagctgctggtcatctctgataacaaaagctactcaccgtgggacccgatcgagaaagacgagatgaaccgggtgttcatcttcggtaaggttattgggagcatgccgcagacatataggaagcatgggtag

SEQ ID NO: 7376 - DNA, 681 bp, Escherichia coli
atgacaccggacattatcctgcagcgtaccgggatcgacgtgagagctgtcgaacagggggatgatgcatggcacaaattacggctcggcgtcatcaccgcttcagaagttcacaacgtgatagcaaagccccgctcaggaaagaagtggcctgacatgaaaatgtcctacttccacaccctgctggctgaggtttgcaccggtgtggctccggaagttaatgctaaggcgctggcgtggggaaaacagtacgagaacgacgccagaaccctgtttgaattcacttccggcgtgaatgttactgaatccccgatcatctatcgcgacgaaagtatgcgcaccgcctgctctcccgatggtttatgcagtgacggcaatggccttgagctgaaatgcccgtttacctcccgggatttcatgaagttccggctcggtggtttcgaggccataaagtcggcttacatggcccaggtgcagtacagcatgtgggtgacacgaaaagatgcctggtactttgccaactatgacccacgaatgaagcgtgaaggcctgcattatgtcgtggttgagcgggatgaaaagtacatggcgagttttgacgagatggtgccggagttcatcgaaaaaatggacgaagcactggctgaaattggttttgtatttggagagcaatggcgatga

SEQ ID NO: 7377 - DNA, 309 bp, Escherichia coli
atgagtaagacgaatgtttcaagctccggcagtcgcatcctccgggtactcaaagcgctgcgcggtcatgccctgaacggtatttctaacggtgaactggcgacagcactgcacgagtcaccggcaaacatcaaccgggcactcaacaccctcattgaagaagggctggctctgaaactggagaacggacgttttgcaccgggcatccagttactgcagatcgccatggcccacagtaacgagatggcacgtgcacaggatcgtattaacgaaattaaccaacgtgtcatttcaggtagtcgtttgtaa

SEQ ID NO: 7378 - DNA, 1248 bp, Escherichia coli
atgggaaacctgaatgaaacagaaaagtgggaagaaaatatctatcaactggagacatcagatccggttctgggtggtgcagacgggatatcaaatcgagccccccggcaactggcaaacaggacgaaatggctgaagaagaaaacggaggaagccgcacagtcactggctgaacacgtacgttcccgtaaccacccggacgcgacactgacagctaaggggttcacccaactgagcagtgccaccaacagcacctctgaaacgctggccgccacaccaaaagcggtcaaggctgcatacgacctggcagccggcaaggcgcctgccagccacactcacccgtggagtcagataacgggagtgcctgcggcttcactgacggcaaaaggcaccgtacaactgagcagcgccacggacagtcaatcagaaactgaggctgccacgccgaaggcggtcaaggctgcatacgaccttgcagccggcaaggcgcccgtcagccacactcacccgtggagtcagataacgggagtgcctgctgcctcgctgacggcaaaaggcaccgtacaattgagcagtgccatcaacagcacgtctgaaatactggccgccacaccgaaagcggtcaaggctgcatacgatctggcaaacggaaaacaaccggcagatgccacgctcactgctctggcaggacttgccactgcagcagatcggttgccttattttaccggagcagaccgcgcagagctggcaacccttacagctattggtcgcgctattatcgctaagggcagtataaaagatgtcctcaattaccttggtttgggggaaggctcggcgctgcccgttggtgtacctgttccgtggcccactgccacaccgccagcaggctggttaaagtgcgacgggcgcgcctttacaaaagaacaatatcctgttctggccagagtctacccgaccctccgtcttcccgatttacgcggtgagtttatccgtggatgggacgacgggcgcaaagtggatacagggcgcgatctgctttcacggcaggatggtacaagtttttctcattacgcaggtaattttgacattgggtctggtcattcaatcaataactatgaccaaatcgttgacaaccaacctggattctcccgtttttcatttgcaggtccttcgcgaggcgatggggttaattatgtgaccattcgtccccgtaacattgcgtttaattacatcgtaagggcggcatag

SEQ ID NO: 7379 - DNA, 573 bp, Escherichia coli
atgctgattggctacatacgtgtgtcaacaaatgaccaaaacacagatttgcaacgcaatgcattaatgtgcgcaggatgtgaacagatttttgaggacaaaatgagcggaaccaagtcggaacgaccaggcctgaaacgcgctttaaagtgccttaaaagaggggatacattggtggtctggaagctggatcggttgggtagaagaatgaaacacctcattgctctcacagaagagctacgcgcaaaaggtgtcaattttcgcagtctgacggattcaatcgataccagcactccgatgggaaggttcttttttcatatgatgggtgcactggcagaaatggagcgtgaactgatagttgagcgcacgctggctggactggctgctgcgcgagcacaaggaagagttggaggacgtcgcccgaaactgacgaaggagcagcatgagcagatcgcaagattgctccagaaagggtatgacagaaagcggctggcaattatctatgatattggactgtcaacgatctaccgctatcaccctgttgggactgtcataacgcaacctgaaatgtaa

SEQ ID NO: 7380 - DNA, 627 bp, Escherichia coli
atgaccaaaccgtatgttcgtcttgataaaaatgatgctgccgttttgcttgttgatcaccaggctggtttactttcccttgtacgggatatcgaacccgataagtttaaaaataacgtgctggcgctgggtgacctggctaagtatttcaacttaccaactattcttaccaccagttttgaaaccggtcctaacggcccattagttccagaactgaaagcacaattccccgatgcaccttacattgctcgcccgggaaatattaacgcctgggataacgaagattttgtaaaagctgtcaaagcgacaggtaaaaaacagttaattattgccggtgtggtaaccgaagtttgcgtggcattcccggcgctttcagccattgaagaagggtttgacgtctttgtcgtgactgacgcgtcagggacctttaatgaaattacccggcattcggcatgggatcgcatgtcgcaagctggtgcgcaattgatgacatggttcggcgtggcgtgcgagctgcatcgcgactggcgtaatgatattgaaggactggcgacgttgttctctaaccacattcctgattatcgtaacttgatgaccagttatgacacgttaacgaagcagaaataa

SEQ ID NO: 7381 - DNA, 2445 bp, Escherichia coli
atgaaaacgaaaatccctgatgcggtattggctgctgaggtgagtcgccgtggtttggtaaaaacgacagcgatcggcggcctggcaatggccagcagcgcattaacattaccttttagtcggattgcgcacgctgtcgatagcgccattccaacaaaatcagacgaaaaggttatctggagcgcctgtacagttaactgtggtagtcgctgcccgctacgtatgcacgtcgtggacggtgaaatcaaatatgttgaaacggataatactggcgatgacaactatgacggcctgcaccaggtgcgcgcctgtctgcgtggtcgttccatgcgtcgccgcgtttacaatcccgaccgcctgaaatatccgatgaaacgagtcggggcgcgcggtgaaggcaaattcgagcgcattagctgggaagaagcctacgacatcatcgcgaccaatatgcagcgcctgatcaaagagtacggcaacgaatccatctatctgaactatggcaccggtacgctgggtggcaccatgacccgctcctggccgccgggaaataccctggtcgcgcgcctgatgaactgctgcggcggttatctgaaccattacggtgactactcttccgcgcaaattgcggaaggtttgaactatacctacggcggctgggcagatggtaacagcccgtcggatatcgaaaacagtaaactggtagtgctgtttggtaataaccctggcgaaacgcgaatgagtggcggtggggtgacttactatcttgaacaggcgcgccagaaatctaatgctcgcatgatcatcatcgatccgcgctataccgacaccggtgccgggcgcgaagatgagtggatccctattcgtccgggaacagatgccgcactggttaacggtctggcgtatgtcatgatcaccgaaaacctggtggatcaggcattcctcgataaatattgcgttggctacgacgagaaaacactgccagccagtgcgccgaaaaatggtcactataaagcttatattctgggtgaagggccagatggcgtggctaaaacgccggaatgggcctcgcaaatcactggtgttccggcagacaaaatcatcaaattggctcgtgaaatcggtagtaccaaaccggcgtttatcagccagggatggggcccgcagcgtcacgctaacggtgaaatcgcaacccgtgctatctcgatgctggcgattctgaccggtaacgttggtattaacggaggcaacagcggcgcgcgtgaaggttcatacagcttaccgtttgtccgtatgccgaccctcgaaaacccgatccagaccagcatttcgatgtttatgtggaccgatgccattgaacgtggcccggaaatgacagcgctgcgtgatggtgtgcgcgggaaagataagctggatgtgccgatcaaaatgatctggaactatgccggtaactgcctgattaaccagcattctgaaatcaaccgtacccatgaaatccttcaggatgataagaagtgcgagctgattgtggttatcgactgccacatgacctcatcggcgaaatatgctgacatcctgctgcctgactgcaccgcttcagaacagatggactttgcactggatgcatcctgcgggaatatgtcttacgtgattttcaacgatcaggtgattaaaccgcgctttgaatgtaagaccatctatgaaatgaccagcgaactggcaaaacgtcttggcgttgagcaacagtttactgagggccgtacccaggaagagtggatgcggcatctgtatgcccagtcgcgggaagcgattcctgaactgccaacgtttgaagagttccgtaagcaggggatttttaaaaagcgcgacccacaagggcatcacgttgcttataaagctttccgtgaagatccgcaggcaaatccactgaccacgccatcggggaaaattgagatttattcgcaggcgctggctgacattgccgctacctgggaattgccagaaggtgatgtgatcgatccactgccgatctatacgccgggttttgaaagttatcaggatccgctgaacaaacagtatccgctgcagcttacgggtttccactataaatctcgcgttcactcaacttacggcaacgttgatgtgctgaaagcagcttgccgtcaggaaatgtggatcaacccgcttgatgcgcaaaaacgcggtatcaacaacggcgataaagtcaggatctttaacgatcgtggtgaggttcatattgaggcgaaagtgacgccacgaatgatgccgggtgtggtcgcactgggtgaaggtgcctggtatgacccggatacaaaacgtgtcgataagggcggttgtattaacgtactgaccactcaacgtccgtctcctctcgctaaggggaatccgtcacatacaaaccttgttcaggttgaaaaggtgtaa

SEQ ID NO: 7382 - DNA, 993 bp, Escherichia coli
atgtcgattaagcaactcaaagacggacgttatcaggtcgatgtcagaccgcagggggcggaaggaaagcggattcgaaaaatctttgccctgaaatcaaaggctcaggagtttgagaagtatgtgttacagaactttcatgacaagccatggcaggctaagccagctgatcagcggcgattatcagagctgcttgatgcgtggtggatgcttgatgggcgtaatcaggcttacggggatagctacagggttaggctagggaaggttgttcgtgaaatgggagatcctcgcgccagtcagatgacgcgaaaatttatgcttgaatatcggtcagagaaattacaggccggattaatgccgtccagtattaatcgtgacttatgcgtactgtctaccatgttcacggtgctgattgaagctgaggtctttcacaacgcgaaccctgtacgcggtatacgaaaactgaaagttcagaacacagagatggcctttctttctgatgatgagattgaacggcttcttgagcgactggagggtgatgtgcgtcgtgttgccattctgtgtctttctactggtgcccgatggagtgaagcatcggaactacgtggagagcatatcgttggcaaccgggtgacgttctttaacaccaaaaacggaaaatcccgttcggttcctgtggcggattcggtcgtgcctctgattaaaacccgtcgaacggggttattgtatcaggttgattatctgaagttccgggagattcttcaggaggtgaaaccggatttgccgaaggggcaggctacgcatgtcatgcgtcatacatttgccacacactttatgatgaatggcggaaatattgttacgttgcaacgaatcctggggcacgcaacgattcagcaaacaatgacgtacgctcatttttcgccggactttttactggacgcgatcaactttaatccgctggctgaaagtgtccataaactgtccatcgattag

SEQ ID NO: 7383 - DNA, 342 bp, Escherichia coli
atggttatcttgtcaatagactacgcaaaaaagttacgtcagatacgtaaggcggaagggttaacacaaaagcagtttgcggatattactgggttgtctttggcaaccataaggaattacgaatcggggcaaaagaacgctagagcaaaaatcgttgaggcggttctgcaagtcgatcgctttgaaaaatacatgctgtggctaataaaagataagacgctacctgtcgccgggcagattgctccggctctctctcttgatggatctattcagtcggagggcgatcaggtttcaatcggtattacccaaaaatcaccccgatcaggccgcaatgttggctga

SEQ ID NO: 7384 - DNA, 522 bp, Escherichia coli
atgcgggacttcattgccgataaagagttatctgaccaccaaccacttcaggaaagtgacgcactcagcggatccattgatgccgccaacgacgacgagcacgaagaaaacaagaaaaagcgttcctacaaaaaaggagcgactttgcggctggatggtccgatcgccgggctttgctctctggaaaaaggcgcggcatatattgggctaacaaaatctgcactgcgcgtagccattcatcgcggtcaaatgccgggacacaagacgcgcacaaacccggaagatgaaaactcagacggagtatggtggtttaacgccaaagagtgggacaagttggctgatgagctaccagagcacgagcccccagaatggcacaactggaaaagttactggacgtatgaccgccagaaaaggaagttctctccagctaataaagaagactgccagaccattaacggtaagcgagtttatacaggcagaagctcaaaactggaccaactcagaaacaacagaggcaactaa

SEQ ID NO: 7385 - DNA, 423 bp, Escherichia coli
atgaaaacaaacacgtcagatttcacaataactatttcaaaaaatgaccaagcattaattgataacctgaaataccttgcggaaaaacataataacggacgaattgcaattaatttacgacacatcacaggagtaacaattgtaaccagttactggcatctatatctaatcgctaaatcagtacttgaaaacaaagattctgttgtcaatggaagagatatagatactcttcctgcacaaatcaaaccgatagcctatcaattgcgtaatcgttttaaaaatgaaggtgggattatatttgactttcccgcagctgtagccgtgagcttctctcggggggatatacttcactcatttcgttttgctctatcaggtgacgagacattatggcagctagaagatgccgggagcagcccggcataa

SEQ ID NO: 7386 - DNA, 192 bp, Escherichia coli
atgtcagaagataaaaaagttgttaatttgttgagtgaacttagtgctgctctggataacattaaccctcccagggtaaaaacgacgggtgataaagacgcattaaacacagagattcatatattactggcgttagtaactgacaaaattcagcgtaaatacccacctgtcacacaactggttgatttttaa

SEQ ID NO: 7387 - DNA, 351 bp, Escherichia coli
atgaaactacagcgcaattcttcacagcagcgcttccgcaacggtgcggaacgccatgctaaccgtttcgctaccagtgcatcacgtagcaactctcgctacagcctgagcgaaacacacgcaacgccggatggctacccagtaaaacaaattggtgaacacacttggctgattgaaaaagcaggaatcgtggttcacagatgccagcgcaacccatttaccggaaaccgcatttttgcactgagcaacggcgacaatcagttcgggcaggatttcacattatacgaagcacttcgcacggttgatcgtctgcttcacgggcaaagttttattaaacaggctgatttataa

SEQ ID NO: 7388 - DNA, 279 bp, Escherichia coli
atgaccaaagagcatgcacaaggtgtatttatccgttttattgattttcgcggtgaactgttattacgcgcatcagccattgacggagttgttccatccgaaaaaaatgcagctacttacgtttatctgaacggcacgcgcctgaccgtagaacttccgtaccagactgtacacgaaatcattagcgaagcggaaaaagcacgtaagactaatggcgatgaaccctatatcgaaattatttgtatggattcagaagcagaaattcagaaagcagattaa

SEQ ID NO: 7389 - DNA, 243 bp, Escherichia coli
atgggcaaagaatataaaactctcattaacaaagcacttgagcgtttttattttcgcttaagtgcatcaggcgctcatgctgaacgtgcagcccgtgactcattgaccagggcaatccggagtctgtatgacgtggctttttacgctgatgatctggatgcacttaacgaactttccgagctgatctgtgccgcagaatgcggggaacatattgaaccgtataagctggggaatatcgcatga

SEQ ID NO: 7390 - DNA, 411 bp, Escherichia coli
atgcacgcaaaagaagaaggtatcatcagagcactgaaagaaatttcaaagacagaaaacgaagtagcgaaaaaagccatagcaaataatcatatggacgtcgcaacccacacactgatagtcgcaagagtcacggcagaagcagccgaaattatcgcaaaacaggatgctgaactggcggttctcagaacacaaccagtcaccggactggatttgtctaacaccggacgccttatttacacaattggctcggagctacagcgatacaccattatcgccgggttacaggataaatacctgatcactcctcaccccataagggaatcagaaattctgacaaatctccgcctgatagagcgctctcaagtcgcattcattgatgacgcacagtgcaccgtatttaacgcatag

SEQ ID NO: 7391 - DNA, 204 bp, Escherichia coli
atggcaattaagcattttcccgtcgttcgctttacctccagagggcgcgaatacgaggtcgacgaacgcctgattaccactatcgacaaacatcgttcggaaaaggatgcacaccacatctacctcactgacggcacttacttctgcgccactaatgtggcgcgggtaaaccttatccgacaggtacaggagccacgcagatga

SEQ ID NO: 7392 - DNA, 267 bp, Escherichia coli
atgaccattctggactacatcgctactcatccggggtgtagcggcggagagatcgccgcagcactgaatactccaaccacagccattaatgctgagttacgccaactttggcgcggcggcttagtcatcagaacaaaccgcagcacaggtggtcgcgctcgcaaaactggaggccaggcttcttaccacgtaaacccgatgccgttcgggtgtagcaatccacttactcacatgtttaaccagctactgaaggaagccagaacatga

SEQ ID NO: 7393 - DNA, 300 bp, Escherichia coli
atgagcaccatcaaccaccagaagctacgcgaactggcatttgccctgcaacgaatggcaacacctcaaaaattactggcatttcgcgcaatgctctcgccgtctgctgcgctggcattgctggatgagctggagcacgccagaaccacggctcctgccattcgcctgacgctccatcatgaaatcgctgatttctgcgcgacattggaggtgccaggcgaaccggaaacgccggaagcaatacagcaagagctgctgcaacgtattgacaaggtttttgatttttttctgaaccagtaa

SEQ ID NO: 7394 - DNA, 2823 bp, Escherichia coli
atgacggcagagtacctcagggactggcaacaaccgcgccacgcagtggggcgtgaaggaacggggatccccgctcctgaatccgcgctttcctcctggctggatgcctaccgggcagagaacgagcgccgccaggaaatggctgatgcggcgttctcagccacgccgctgggcaacctgattaataaaagcctggacgcacaggaaaaacaggacaaaaccatcacactggcaggagacgccagaaaacaggcacgtggcgcggtggatgaagccatggcctcgctgcgcctgctgccgtcctatctgcgcgatccgcttattcgccacctctccttcctgcgcaaaaaacaggaagccgatcgccggaaaggcaaaaagagctggcaggcggaacgctatgcacgcggaaccctgcgcaaaatattcgaacgtctggatagcactgacggacgctggctgacaccgggttatcgctcccttgccggacgcgaacgcctggacgatttgctttacctgccgcagctcaacaaacaccagatacagacgctggccaccatgacggcggcgatgttcagcagcaccttcgaaaaactctgcgatggctttggcgcgaccgatggcgagctgaccatggatgtaaccctgaaggcgtatcagatgctggcccgcatggcgttacacctgcacgccatgcctccacattatgacgcactgacaacagacaaagaccggaggaacgaaccggacacggagctgctgccgggcgcaatccttcgcctgacctgtgcggaatggtggaaacgcaaactgtggctgttacgttgcgagtggagagaagaacaactccgcgccgcctgtctggtttccagaaaaacatcaccctatctgagccaggacgcgttaagcgagtttcgcgcacagcgcgagaaaacacgcgatttcctgaaaagtttcatgctggaaaatgaagacgggttcacgattgatctcgagacagtgtattacgcgggagtaagtaacccggttcaccgtaaggcagaaatgatggccaccatgaagggactggaacttctggccgaagcccgtggcgacaaagcggtgtttctgactgtcacctgcccgtcaaaataccacgccacaacggagaacggtcatccgaatcccaaatggaacggggccacaatgcgcgactccagcgattacctggttaacacgttttttgcggcggtccgcaaaaaactgaaccgcgacggcctgcgctggtatggcatccgcacggtggagcctcatcatgacggcaccgtgcactggcatatgatggtctttgcacatccggaagaaatcgacaccattgtgtcccatacccgcgatattgccattcaggaagaccgccacgagctgggcaatgatattactccgcgctttaaggtggagtatgtcgacggctcaaaaggcacgccaaccagctacatcgccacctacatcggaaagaacctggacagccgcgccgtggatggcatcgacccgaaaacgggcaagccacgcgtggaccacgaaaccggaaaatcaatggccgagagcgtggagcgcgccatcggctgggcgcgccttcaccgggtccgtcagttccagttctttggcatcccctcccgtcaggtgtggcgtgaactgcgccgccttgccagccagatggcacgcaatccggaaggcccgcaacggctgaaagatgatgcaatggatgcggtactcgctgccgccgatgccgggtgttttgccacctacattgaaaaacagggtggcgtgcttgttccacgcaaggactacctgattcgcaccgcctacgacctcgcagatgagctgaacgattacggcgaacagagcgtacagatttacgggatctggtcaccactcatcggggaatcctcccgtgtgtgcacgcatccggataactggaagctggtaagacgtaaaccggaagcggaagacagcgcccgcgaaaatggttttgaccttcagggcggccctgccgccccttggactcgtggcaataactgtccccgtgtacaggaaacggacaacaacgggacagaacagccggaagaacggccagcaccgtggccgcagctccctgacggcgttgaagtgaacgaatggatgcgctcactgaaacgacacgaacgccgggcgctgatgcgttcgcttcgtgacaaacaggcaaaaaacagcagcgatgaaatgcagagctggacacagagccgcaaacagcagcggcctttgcctgataaccacgaattactcgctaaagaatggcgggagtctgctgaatctctcggcctgcatatcggtgaacaacagatgcagcacctgttacggggcggcagtctgtacgttgacggcagcatcattgcaccgcagggatttgaaattgtacgcaaaccggatacccgcccggacagccgaatcacgcagctctggcagcgcctgagccgtaatcatggcgtaagcagcacggagatccgccataacccggtcgccagctatctggcacagctgggggcatcagaccctgaagccgccgcacgcctggcatccacacttcagcagggccagaacaccatgaaaacacccgttaccgtgctttctgacatgctgcgcgccatccgcgacgcagagcacgcacagagaatcagtgaaaccactgaacgcgccagccgcaaagcagacctgctgcggggtggcctgaccagtggaaacaaaaaacagacagaaacgggacttacgaatcccgtaaatgagcaaaaaacgcgcagcgatatatga

SEQ ID NO: 7395 - DNA, 315 bp, Escherichia coli
atgacgacaccaaccagacggataagtttctatctgaagcccgccgccgtcaagagtgaacaggaggcgtgcaattacctcgatagcctgccagcctccgaacgcagccgcgcgcaacgcgcggcctttctggctgggctagcgctcataaagcgcaacccagcatttgcctactggatggccgaatggccagaggacaacctccccttcaataccgttagcatcaaggaaacataccaggataatcagcctagcggagttgaatgcaatttttataaaataaaaaagaatattcagaccttattcccagaataa

SEQ ID NO: 7396 - DNA, 843 bp, Escherichia coli
gtgacacagaatccgttttcattttatgactttttgggctatctaattccaggtgggttattcctgtttatcctttttttgttttctattgaaattaaccctgtttatatagaaggtattcttaaccatatcctgaaatataaagaaataataagtgtatttatatatgtggtattaatcgttctatcatatatttcaggtcacttcatatctattctatcatcctgtttaattgaaaaatacatgaacagtaaacttgggtatccttcaatttatctgttttctaaaagaagctccctgaaaataaaacgacataatactaagttcagtatagttaattttattcgtggagtttttttatttcctgtatcagcttttgataaagcagaacatcataaaaccacactgcattctatacttattaaagtcttttggccgcaaatacgagatggttatataaatgttttttctgtatctacgctatatcgacgtaagggcttgaggggcgatctttttcgccttgcttatcattatgtgtatgaacattctaaaaatcatcaggtgaaaatgcaaaactatgttgctttgtatggtttttgtagaaacattacatttgtttttctcgcttcagtctggttgcttatgttcctgctccttctatcctttttaatagatataaatatcagactgttacctttttgttttcttctcttgttttgtattgctgcatcccgagtattttattatggttttgttaagtattatcgccgctattctcttgaggttttaatggcatttgcggtacttcagcacgataaaaaaacttcggcaatttcatcatga

SEQ ID NO: 7397 - DNA, 498 bp, Escherichia coli
atgaacccaataacactacaaatcatcagcaatgctattgttctgcttggcgttttggttgccattggaaccattatctacaatgtgcgtaccgcaaaaaaaactcaaacggccaactttctttttgagagtcggcaagatatgcaatatatagagtcattgcataccctgaaacaagtgcatcgttcaggcaaatcatttcgttcttatgtttttccttgtgatggttgcataataacagatgaagaaatggccgagcgtcgaaaatttcaatatattttaaatttttacgagcgagttgctgtaagtattcgtgaaggtatttatgatgaaaaaatgataaaaagaacatcttacacaacagttgtagagacatatgatattgccgagccattaattaaagcaatcagagaaagcattaattcggatactacatatcaagaattcgaatggttagtaagaagatggaaagctaatcctttacggaaaaacaaataa

SEQ ID NO: 7398 - DNA, 525 bp, Escherichia coli
atggtcattaattacaagcagttaagagaaaaacgggagcaggtaaaggagagctttcgccgcaatgaagatctgaccccgcttgtacgccttgcccagggcattgttgatgcttatgaaatctcgctggagctgccatcacagacctggacagatagcgacggtaatcgccagcattacgtttcatgcggactggaagcagccgaaggatttcgcagaatgcctttatcccagatccctgccgctacccccaaagcacggggcagcaatgatgagcgaaaactgacttttagtattgaaacggtggttgacgacacacctggcgaagtcgcgttcgtgcacactcctgtttcgatcgcaatgtataacgatgaaatacaggttcgcgttaataataatatcgtgccacttaaagaaggtaattcaccctacaccaccgtttgtgaagccattcaatattacgttctctctgaaattgataatctcaagcctgacggcacccagaaaatggttcaactctggtaa

SEQ ID NO: 7399 - DNA, 645 bp, Escherichia coli
atggctcgcacaaaactgaaattccggctgcatcgggcagtgattgtcctgttctgtcttgccttgttagtggcgctgatgcagggggcgtcatggtttagtcaaaaccaccagcgacagcgtaatccgcaactggaagaactggcccgcaccctggcgcggcaggtgacgctaaacgttgcaccgctgatgcgtaccgactcaccggatgaaaaacgcattcaggcgatcctcgatcagttaacggatgaaagccgcattctcgacgcaggcgtatatgatgaacaaggcgatcttatcgcccgttctggcgaaagcgtcgacgtgcgcgaccggctggcgctcgacggcaaaaaagcgggcggctattttaatcagcagattgtcgaacccattgcgggtaaaaacggaccgctcggctatctgcgcctgacgctcgacacccatacgctcgccaccgaagcccaacaggtggataacaccactaacattttacgcctgatgttgctgctctcgctggcaatcggcgtagtgctgacccgcacgctgctacagggtaaacgcacccgctggcagcaatcgcccttcctgttaaccgccagcaaaccggtgccggaagaggaagaaagcgagaaaaaagagtga

SEQ ID NO: 7400 - DNA, 1017 bp, Escherichia coli
atgtccacattacgcctgctcatctctgactcttacgacccgtggtttaacctggcggtagaggagtgtatttttcgccagatgcccgccacgcagcgcgttctgtttctctggcgcaatgccgacacggtagtgattggtcgtgcgcagaacccgtggaaagagtgtaatacccggcggatggaagaagataacgtccgcctggcgcggcgcagtagcggtggcggcgcggtgttccacgatctcggcaatacctgttttacctttatggctggcaagccggagtacgataaaactatctccacgtcgattgtgctcaatgcgctgaacgcgcttggcgtcagcgccgaagcttccgggcgtaacgatctggtggtgaaaaccgccgaaggcgaccgcaaagtctcaggctcggcctatcgcgaaaccaaagatcgtggcttccaccacggcactttgctgctcaatgccgaccttagccgcctggcaaactatctcaatccggataaaaagaaactggcggcgaaaggcattacctcagtgcgttcccgcgtgaccaatctgaccgaattgctaccggggatcacccatgagcaggtttgcgaggccataaccgaggcctttttcgcccattatggcgagcgcgtggaagcggaaatcatctccccggacaaaacgccagacttgccaaacttcgccgaaacctttgcccgccagagtagctgggaatggaacttcggtcaggctccggcattctcgcatctgctggatgaacgctttacctggggcggcgtggaactgcatttcgacgttgaaaaaggccatatcacccgcgcccaggtgtttaccgacagtctcaaccccgcgccgctggaagccctcgccgggcgactgcaaggctgtctgtaccgcgcggatatgctgcaacaggagtgcgaagcgctgctggttgacttccaggaacaggaaaaagagctacgggagttgtcggcatggatggcaggggcggtgcggtag

SEQ ID NO: 7401 - DNA, 525 bp, Escherichia coli
atgttttctaagaataaaatcaccatcgcagctatttcggctctgcttatttctggtaccgcaatggcccagacaagcagtggttctgtctccgctactggttcttttaatgccgcgacttgcagtgttaccctgcctaatgcaacagcatcttttggcacagtaacgaatcaagaggtaaatgctgcaaaagcgtaccagaaaataaaaagtgtaaccgcagatcaggggattagtgttaccgattgtaccactcctgcatcactaacggtagcaactactaatttccagtctaatggctatgtttatcctgctctaaacgaggctaccggtaatcaacaaaaggattttgcgctttggatgaaagtcggtgataaaggtgtatcttcttataatgcaccaatcgaacttgctaatggtacatatccaatcgagttgcaaatgattaaaatatcaaataactacaataaaaatcatactggtgcatggagtgcgcaatacactttgactgcaacttataactaa

SEQ ID NO: 7402 - DNA, 3930 bp, Escherichia coli
gtgaacagaatatattcacttaagtattgtcaccttactcaagggcttatagctgtatcagaattagcatcccgagtatcctctaaaaccggtcgaaaacttctcgctatatttatagtttctgccttgtcttatggtgcggctgaatatgcctgtgcagcacagatggacacccgaaatttctggatccgtgattatcttgatctggcacagaataaaggtgcatttcagcccggagcatacggggtaaaaacgccattaaaaaatgggggagaattcagttttcctgaagtaacaatccctgatttttctcctgtatccgctaaaggtgcaacaactgctattggtaatgcctacagtgttacagcaagtcataatggcactattcaccatgccattaaaactcagacatggggacagtcagattatcattatgttgatcgtgtgaccaaaggtgactttgcggtccagcgtctggataagtttgttgttgaaacagcgggtgcaacagagcatgctgatttcaacttatcagcagcagaagcactagagcgttatggtattgaattcaatggaaagaaacaaataatcggtttccgcgttggagctggtgcaaccggtgttacatcttatggggtgggacagacatacaatccattattacgtagtgcctccatgtttcagttaaactggaacaatatgtatgcaagtaataataccggtgggttttataatgaagtgacaggaggtgacagcggttccggattttacttgtatgataatcagaaaaaaaaatgggtcattttggggacactgacaggtaaagtattctccagtaaggatacctgggccttttttgctcgatatgatcagaacactgtcgatatcctgaaaaatacttttacccaagaggtgaacctcaatggtcagaaaatgacagttaataataaaaatattgccattaacgataaaataactgctattgaactgaccaagagtaataaaaataaagatttgaaattccatggtggcgggagcattgagctcaccgataacctgaactcaggaaccggaggattgatttttgatgagggacaacattattcggttattgggaaagataaagcctataaaggggcgggtgttgagatcggaaaagatacggttgtcgactggtcggtaaaaggggaggcaaacgataacctgcacaaaacaggggccgggacactgaatgtcaatgtggcccaggggaataacctgaaaacaggtgacggtaccgtttttcttaatgcagaaaaggctttcaatgctatctatgttgccagtggccgtggaacggtcaaactggggcaggccgatgcgctggataaaaatagtgattacagaggtatttattttactagtcgtggggggactctggatttaaacgggttcagccagtcgttcaagaagatcgcggcaactgatgttggtaccattatcaccaatacttctgataaaacagcgaccctttccctacaaaacccctcccgctatgtctatcacggtagtatcacgggaaatacgaatatcgaacacactgggacacagaaaagtgctgacagcagtctgattattgatggaaacattaatacacgcaatgacattactgtgcggaattcccagctcagacttcaggggcatgccacatcacatgcaatattccgcgaggggcctcggcactgctatgtccccggagttctttgtgacaaagattatgttactgattttgccagactggaaagtgaggcaaataagaaaaataacagtgcctataaaacaaataatcaggtggcttcttttgaccaacctgactgggaaacccggcatttccgatttaagactctgaatctggaaaactcagaattcacaactgcacgtaactcagttgttgagggtgatattgtcgcatcgaattcaacgctgaaactggggggcgacgttccggtgttcattgatatgtatgatggcatcaatatcaccggtaatggttttggcttccgccaggacgttcgtgaaggacgctcagcagatgatggcagtagcagctatacaggcaaaattacactgcaaaaaggctccacgctggacatcaacaaccggttcattggcggtattgaagcccatgacagtaaggtaaacgtcacctcaccggatgccctgctgcagaacagtggtgttttcgtgaattccaccctttctgtccgtgacggcggtcatctgacggcacaaaaagggctctacagtaacggccgggttcagattggaaagaaaggtacgctttccctgagcggcacgccggaaaatggcgctgataatacctggatgcccgtactgacatacatgacagaaggctatgatttaaccggtgataacgctacgctgaacatcagccagcaggcgcatgtttccggggatgttcatgcaaccagttcatccagcattcgtattggctccgaaaaccctggctcagtttcctcttctgtctcccctgttctggctgccgggttgttcagcggatataacgcggcgtactacggtgccatcaccggcggtaaggggaacgtcagtatgaataatggcctgtggcagctgaccggagattccgacatcaacagtctgacgacccgtaacagccgggtacagtctgaagaaaacggtgccttccgtaccctgacggttaagacacttgatgccacgggcagtgattttgtcctgcgcactgatctgaaggacgctgataaaatcagtattacggagaaagccagcggttcagacaacaccctgaatgtcagctttatgaagaacccgtctccgggacagtccctgaatatcccgctggtcagtgcaccggccggaacatcaggggatatctttaaggccggcacccgggtgacaggcttcagtcgtgtgacgccgacgctgcgtgttgacaccactggcggcagtacgaagtggattctggatggtttcaggacggaagctgataaagcggctgcagcgaaggcgaacagtttcatgaatgccggctacaaaagctttatgacggaagtaaacaatctgaacaaacgtatgggggagctgcgtgacacgaacggtgatgccggtgcctgggcccgtattatgaacggcgccggttcagccgatggcggatacagtgataactacacccacgttcaggtcggttttgacaaaaaacatgcgctggacggtgttgacctgttcaccggtgtcacgatgacctataccgacagcagtgcagacagtgatgcgttcagcgggaagacaaaatccgtggggggaggtctgtatgcttcagcactgtttaactccggtgcctacattgatttgattggtaaatatattcaccatgacaatgactacacaggtaactttgccggtctggggacgaagcactacggaacccactcctggtatgccggagcggaaacgggttaccgttatcacctgacggaagacacatttattgagcctcaggccgaactggtttacggcgcagtgtccgggaaaacattccgctggaaagacggtgagatggacctgagtatgaagaacaaggatttcagcccgttgattggcagaacagggattgagctgggcaaaaccttcaggggtaaggactggagtgtgacagcccgtgccggaaccagctggcagtttgacctgctgaataatggcgagacagttcttcgtgatgcatccggagagaaacggatcaaaggggagaaagacagcaggatgttgttcaatgttggcatgaacgcacagataaaggacaacatgcgctttggtctggagtttgagaaatccgcctttggtaaatacaacgtggataacgcaataaacgcgaatttccggtatatgttctga

SEQ ID NO: 7403 - DNA, 360 bp, Escherichia coli
atgattaatccaaatccaaagcgttctgatgaaccggtattctggggcctcttcggggccggtggtatgtggagcgccatcattgcgccggtgatgatcctactggttggtattctgctaccgctagggctgtttccaggtgatgcgctgagctacgagcgcgttctggcgttcgcgcagagcttcattggtcgcgtattcctgttcctgatgatcgttctgccgctgtggtgtggtttacaccgaatgcaccacgcgatgcacgatctgaaaatccacgtacctgcgggtaaatgggttttctacggtctggctgctatcctgacagttgtcacactgattggtgtcgttacaatctaa

SEQ ID NO: 7404 - DNA, 303 bp, Escherichia coli; identical to SEQ ID NO: 6057

SEQ ID NO: 7405 - DNA, 783 bp, Escherichia coli
atggtgctgaccaagctgctggtggtcgcggcgctgggcgtgtcgatggtgggaatgtggcatctgtataacgtcggttcgctaccgccgctggggctgctgatgaaaaacgccattattacgctgccgtttaccctgacgtcgattctatttatccagacgttaagcccgatggtgatctcttatcgctcgcgggaaaaatcaattgaagtggcgcggcataaagcattgcgggcaatgaatatcgcgtttggcattttgtttgtcaccgtctttttctacgccgtgtcgttcacgctggcgatgggacatgacgaagcggtaaaagcctacgagcagaatatttccgcgctggcgattgccgcacagtttattagcggtgacggcgcagcgtgggtgaaagtggtcagcgtcattctcaatatctttgctgtaatgactgcattctttggcgtctatttaggctttcgcgaagcaacgcaagggatcgtaatgaacatcctgcgtcgcaagatacctgccgagaagattaacgaaaatctcgttcagcgcggcatcatgattttcgccattttgctggcctggagcgccatcgtactgaacgccccggtgttgagcttcacctctatctgtagcccgattttcggcatggtagggtgcctgatcccggcgtggctggtttacaaagtaccggcattgcacaaatacaaagggatgtctttgtacctgattatcgtcactggtttgttgctttgtgtttctccgttcctggcattttcttga

SEQ ID NO: 7406 - DNA, 1311 bp, Escherichia coli
atgtttgattcgactttaaatccgttatggcagcgttacatcctcgccgttcaggaggaagtaaaaccggcgctggggtgtactgaaccgatttcactggcgctggcggcggcggttgctgcggctgaactggaaggtccggttgaacgtgtagaagcctgggtttcgccaaatctgatgaagaacggtctgggtgtcaccgttcccggtacaggaatggtggggctgccaattgcggcggcgctgggagcgttaggtggaaatgctaacgccgggctggaagtgctgaaagacgcaactgcgcaggcaatttccgatgccaaagcactgctggcggcggggaaagtctcagttaagatccaggaaccttgcgatgaaatcctcttctcacgcgccaaagtctggaacggtgagaaatgggcgtgtgtcaccatcgtcggcgggcataccaacattgtgcatattgagacgcacaatggtgtggtgtttacccagcaggcgtgtgtggcagagggcgagcaagagtcgccgctgacggtgctttccaggacgacgctggctgagatcctgaagttcgtcaatgaagtcccgtttgcggcgatccgctttattctcgattctgcgaagttaaattgtgcgttatcgcaggaaggtttgagcggtaactgggggctgcatattggtgcgacgctggaaaaacagtgcgcgcgcggtttgctggcgaaagatctctcttcatccattgtgattcgtaccagcgcggcatccgatgcgcgtatgggcggcgctacgcttccggcaatgagtaactccggctcgggtaaccaggggatcaccgcaacaatgcccgtggtggtggtagctgaacacttcggagcggatgatgaacggctggcgcgtgcgctgatgctttcgcatttgagcgcgatttacatccataaccagttaccgcgtttgtctgcgctgtgtgccgcaacgaccgcagcaatgggggccgctgccgggatggcatggctggtggatgggcgttatgaaaccatctcgatggcgatcagcagtatgatcggcgatgtcagcggcatgatttgcgatggtgcatcgaacagctgcgcgatgaaggtttcgaccagtgcttcggctgcgtggaaagcggtgttaatggcgctggatgataccgccgtgaccggcaatgaagggattgtggcgcatgatgttgagcagtcgattgccaacctgtgtgcgttagcaagccattcgatgcagcaaacggatcggcagattatcgagattatggcgagcaaggccagataa

SEQ ID NO: 7407 - DNA, 171 bp, Escherichia coli
atgaatatattagttacaggtggagcaggctatattggctcgcatactagtttatgtcttctgaataaaggttacaatgttgtaataattgacaacttaagtaattcatcttgcgagagcattcgaaggattgaattactagctaaaaaaaagttgttttctatgaattaa

SEQ ID NO: 7408 - DNA, 2262 bp, Escherichia coli
atgttgacaataattacaccggtacattgcacttcacgaaatgattatttatatcagagaacgaaatattttatagaaaatgcttatatagactcaaatatagaaaggattatagttgattttggaagtttagattctataatggaggagtttaagactctctcaaaaaataaaggaattgaattttatagtttagggttaaaaggggagtccttttctgctggtttgtgcaggaattatggtgtaactaaagctaaaaaagaatttattaccttccaggatgtggatctttatgccccacaatcaatatataaatcaattttgctgagattatccagtagtaaagagtataattatatcgaatctgttccatgcctttatttaagtgaggattacacagaggaatacaaaaaaagagaatcttgggatgacgcacataatgatgcttatcaaaattatcaattaaaaacaccaagtatccagatgtatgcccctgttacgtcaatgatcttaactaggcggcgatactttatggaatgtggaggtaacaataatgaatttcatggacatggatatgaagattttgaggcattgaacagattagccaatagagctaataagtttgttcgttctcgagattattataatcatgattttaaatatgattcaccacatttctgtgggtatagaccattttttagtttgtttggtcgccaattaatgaatgagagagtgttttttgtccatttttggcatcctcataatattgcgccatcttatgctaaacgaaacaaagataataaaataatatttgagaggttaataagaaggtttgataaagaaaactatatgcctccagctctaagtggtgattcacattactatgatggtaagtctttaatactatcaccatttaatggaaaaactgcgaattcattaagagttgctataccttttcttggtgaatgtgtatatgctaaagacacggaattcaaagatgaaaatgtgtttttggattttattaaaaaaaatatggtaaggagggtgttgtttttcaattcatacggcaatgatcacagattaaatctttaccacgtttgtcaattaaataaaataaaaacaattaattttgatagggggggattgcctcatacatggttctttgatccacatggtttcaattactctagtcattcatataaccctaataattgggatctgcaaattacaaaagatgaaagggaaagcgttcaggaatatattatcaacgttctttcatcaaacgatacgttagagaaaaatggtaccagaataggtgctcataatttcaaaacaaaatataatatactaaataaaaaaattctttttgttcctttgcaaagaccaaatgattctgtcatacgtcatttttcggatgaaattagaagtgtgcagaattttttaaataatatagttactcttgctaagagcataaaggataaaggttgggttgttattgtaaaacaacatcctttggaagagtctaccgaaatagaagaaaaagaaaacctaattgtgctgaagccaaccgatcatttctatgatgcaattaattcttcagatgcagtaatgcttataaattctggagttggtctttattctctgatggcaggaaagcctacttataatgttggtaatgcatactattgccatgcaggtttatcaataaaaataaaaaatcctgaagactttaaaaaatgtatgaatgatttatcttatccatcaaaagataaagttgagaaatttatacattatctaattacgagattttattcttttggtaagactaattatattgagatcgtagatccgaagacaaaatcaaaaacaactaatgcgacatatgttgatttcgagaatattaaaataccattagataatggtattatgcatgaaattaatatttctcgtagaaaagaaccatttaaaataaactcagtctattttgattattatcgttctggaattagtcttagggatgaaattgagaaatataaaaagaatatctctgatttaaattcattaattaataagctaaaaacaaacaggacaaccaagataattgaagaagatacttattccaataaagatacacacacgactaacatagtcagaacaggtgcgatgcaagcaaagttaaagaaactaaataaacatccctatctcttttttaaagatgcaatcaaaaaatattggggtaaaaacaaagaagataataattaa

SEQ ID NO: 7409 - DNA, 630 bp, Escherichia coli
atgaaagaattttcagaaatagcaaaaagtactcatatatcaaatgatgccatcgttgagtatccaatacattgtggcccaaactctcaaatacatggaggatgtaatgtcggccaattcacatttataaatatatcaagtgtcttatatccgaatgttaaaataggtcgtttctgctctattgcaagaaactgtgaaattggtgttgcccgtcatccagtcaattttttgtctacacatagtttccagtatcactttgcacagtttcccaaacatcctttttataaaaatggtataaacaggacatcctggagagcacatcccgatactattattggtagtgatgtttggattggtgctcaatcgattgttaaagccggtgttaatatcggtcatggtgcaataatcgcagcaaattcggtggttactaaaaatattgcaccgtattcaatagtcggaggaagtcctgcaaaggtaataaggatgcgttttaatgcagagcaaatttctaaactcttagaactacgttggtgggagttatcattagaagagatttcggatctggagtttggaaatattgattcttgtattgaatcattgttaaaaataaggcgtattgagcatttgtaa

SEQ ID NO: 7410 - DNA, 378 bp, Escherichia coli
atgaaaacattacccgacacacacgtacgggcggcatcgcgctgcccgtctcccgtcaccatctggcagacactgctcacccgactgctggaccagcactatggcctcacgctgaatgacacaccgttcgctgatgaacgtgtgattgagcagcatattgaggcagggatttcactgtgtgacgcggtgaactttctcgttgaaaaatacgcgcaggtacgtaccgaccagccgggattcagcgcaggagccccgtcgcagttaatcaacagcattgatattctccgggctcgcagggcgaccggcctgatgacccggaacaattacagaatggtaaataacattacccagggcaagcatccggaggcaaaacgatga

SEQ ID NO: 7411 - DNA, 216 bp, Escherichia coli
atgaaatccatggataagttaacaacgggtgtcgcctatggcacctcagcaggtagtgccgggtactggtttttacagttgctcgataaagtcacgccctcacagtgggcggcaataggtgtgctgggtagtctggtatttggcttgctgacgtatctgacaaacctttatttcaagattaaagaagacaagcgtaaggctgcacggggagagtaa

SEQ ID NO: 7412 - DNA, 417 bp, Escherichia coli
atgaaaaaggtattaatagcagcgataggtttttgtttagttggttgtgcaggtatgaaattacctgagtattcgcaagttaaagcaagtccgtattatacagattgccgtgcgtttgccatggatgtttataaaaatgatggatacagcaaaattgcgaaaactactatccttagcatggatgatgtgaaggctagatatattgtgacagggtgtgtagttgctatggggaaaaacactgtagaggaaatcaaagctgatctctctgctaaagggagttcttttgggcttatcagtggagcttgttctagtgcggcatgtcgggttgatgtagagcagcaaatgaacgcttatgtacttggtagttattatgctgcaaataaaaaattcccggataaaatgaaagcagagttttaa

SEQ ID NO: 7413 - DNA, 753 bp, Escherichia coli
atgaaccttgaagccttaccaaaatattactccccaaaatctccaaaattgagcgatgacgcaccggcgacaggctcaggtggtttaacgattacggatgtgatggctgcgcaggggatggtgcagtcgaaagcaccgcttgggtttgccttattcctggcaaaagttggtgttcaggatcctcaatttgcgattgaaggtctgctcaattacgcgatggcactggataacccgacattgaacaaattgagtgaagaaacccggttacagatcatcccttaccttgtgaattttgcctttgctgattattccaggtctgcggcaagtaaggctcgctgtgagcattgtgctggtactggatttcataatgtattgcgcgaagtggtgaaacactccagaagcggggaatctgttatcaaggaagagtgggtgaaggaactatgtcagcattgtcatggtaagggagaagtcagcacagcgtgcagagggtgtaagggtaaaggtattgtcctggatgaaaaaaggacccggcttcatggcacacctgtttataagatttgtgggcgttgcaatggaaaccggtttagccgtttaccaaccacactggcgcggcatcatgtccagaagctggtaccagacctgacggattatcagtggtacaaaggatatgcagatgtcattgataaactggttacaaagtgctggcaggaagaagcatatgcagagatacaattgagaaaggtgacaagataa

SEQ ID NO: 7414 - DNA, 537 bp, Escherichia coli
atgtcatttattaaaactttttccgggaagcatttttattatgacaggataaataaagccgacatcgttattaacgatatcgcggtttccctttcaaatatctgtcgctttgcaggacatctttcacacttctacagcgtcgcccaacatgcggttctttgcagccaactggtaccgcaggaatttgcttttgaagcgttaatgcatgatgcaacagaagcgtattgccaggacatccccgctccactgaaacgccttcttcctgactataaacagatggaagaaaaaatagacgccgtaatccgtgagaaatacgggttacccccagttatgagtacgcccgtgaaatatgccgatctcatcatgctggcaaccgaacgccgcgatctcgggcttgatgatggctctttctggcctgtactggaaggcatcccggcaacagagatgttcaacgtgattccactggcaccgggccacgcctacgggatgtttatggaacgttttaacgagttatcggagttacgcaaatgcgcatga

SEQ ID NO: 7415 - DNA, 363 bp, Escherichia coli
atgcgcatgaatgttttcgaaatggaagggtttcttcgcgggaaatgtgtaccgcgagatctgaaagtgaacgaaacaaatgctgagtacctggtacgtaaattcgacgcgcttgaagctaaatgtgcggcactggaaaacaaaataataccagtgtcagctgaactgccaccagcaaatgaaagtgttctgttatttgatgctaacggagaaggctggctgattggctggcgttctctctggtacacctgggaacaaaaagaaaccggagaatggcagtggacatttcaggtcggggaccttgaaaacgtcaatatcactcactgggcagtaatgccgaaagcaccagagactaagaaatga

SEQ ID NO: 7416 - DNA, 216 bp, Escherichia coli
atgagcgtgataaaaactcatacaggaattgttatcacccgagacggtgaaaagcggatgaaattacattccactgaaacgtcctgggttgccggacgttgtgaatcctacgacaaaaagactggttaccgttggggtgcaccaaacatgcgtcgccgtctgcttctggacagcatcaggccaataaaacaggtagcaaccagggaacaaaattaa

SEQ ID NO: 7417 - DNA, 207 bp, Escherichia coli
atgctgaacctcgattgcgttccaatctcaacttattgcaaagaaactggcgaaactcctgaagcaataaacaaacgtgtacagcgcggtgtttggcgtgaaggtgttcaggttttaaaggttgaaggcgttaaggagaggtggattgatcttagtgaggttgcaaaatgggccagacaaaactgctcaaactaccgcgcggcgtaa

SEQ ID NO: 7418 - DNA, 1167 bp, Escherichia coli
atgggccagacaaaactgctcaaactaccgcgcggcgtaacaatcaggaaacaccgccagggcgaaacgatcaatataactttcacctacaaaggagttaaatgtcgtgagcctctttccaatctggaagtaacaccaaagaacattaaatacgccgagcgcacactcggcgaaattcataataagatcgaaaggggaacatttatttatgcggaatattttccccgttctgctcgtttgaaaatttttggtaatgctgctgcaggcaaaacggtaaaaatgtacctggacgaataccttgaaatctgcgaaacgagaaaactttcaccctctacgattggtggttataaaaaatgccgtagtgcgttagcctcactccacatttgccctgcaagtgaattaacaccagcaatcctgaaagcgtggattcaaagccagaaaacgaccttaaaaacaattcgcaaccagttatctttcctgcggtcagcacttgatgaagccgtaaccgatggggtacttcaaattaaccccgtatcgttggtaactgcttcgcgctaccaaagtgataagtcagaagcagaaagcagctacgtggttgatccgctatcaccagcagaagttgatgcattactaacagcagccggaaacaaacaatgggagaatctgttccggttcgctatacatacaggcctgcgtagttctgaattatgtgcccttcgatggcgtgatatcgactttgttggaaaaactgcccatgtccagagcgcaagtgttgtcggtgttatcaaaggaacaaagacaaaagccggtactcgtaaagttgaactgacagaagatgcaatgttggcgctgataaatcagaagccatttacattcatgaaggatgctactgtctttgaagatccaaagaccaataagccctgggcaagtgctgatgcaatcaggaaaaaagcatgggtgccaacattgcgaaaagcaggtattcgttacagaaatccatatcaaaccaggcatacattcgccacccgccatatcagccggggagcaaacctgttttggcttgcagctcaaatggggcataaagggccggagatgcttttcaggcactatggctcatatctgaaggaatatgatggacaaacaagcttgaagaagataacaatataa

SEQ ID NO: 7419 - DNA, 1734 bp, Escherichia coli
atggcaaatcaaattaccaaactaaaaaatataaatgttgtgaagtttcgcggactgaaaaatataaacatcgagtttggttctcgcctaactgttatttgtggtaaaaatggcacatctaaatccacaattcttggcattatcgcccaaatatttagctttacaaaggactttaccaaaaaccctgagactgatttaacacaatataaaacattaacaaatggcagcttcaagtcagctttcagcgaacattttaggctttcagaacaatttgatgttcctggttcaatggacgtcaaaattagtgtctatgatggtgcatcgaacaaacatcttgaaaaactaacattaggtttatacagctacagtgacagagataaatctaggcctgtagtcaggggaaatgattcaataccggaaaaaaaccaaagtagaaacgttactcatcctgttatttttttaagcttagcacgacttcttcctattacattaaggactgattactcaacacgggatgttcagtacatcaatgaaaattctgatgaaatcagaatgatgagtaaccaactcttactaaaaaacaatggaagctcagtaacagcaacaaaaggtactatcgattcaatggttgtccatggtgacaattatgatcaccaatcagtatctgttggtgaagataatgttggacaattaatccaggcaattttttcatttaaaagactgaaggaaacttattctgattatcatggcggaatattgttaattgatgaagccgatgcaggtcttttccctgcggcacagttagagctaattaatattctaactaaagcagcaaaacaatacgatctgcaaataatcatgacctcgcactctccattaataatagaggatatctataatcgttcaaaacaagatagtgatagctttaaaacaatatatcttacagacacatatggagatattaaaacaaagaataatctttcatggacagatatccacgctgatttacatgttgaaactgtaaaaattaatgatgacatttgtcttccaaaggcaaatgtatattttgaagacaaagaaggtttcgactttttcaaacaattgataacagatcgaaaaataaataaaatattaaatccattaggaaatataaatattagctgctctgccatgcttgacttaatggcaagaaaaataccagaatttacagctaaaagcttgatcgtcttagacggtgatgttgttcacgacaacagtgctaatgcaaaaaaagccaaaaaagaaaaaaacttatgtttgcttccaagcaccttacctccagaccaaatgatttttgagtttttatataatttaccacctgatgatgcatattgggaaaataaaaataaatttacaaaagctgtttttatgaaaacagctaaagacataattgcaacgctaaagattggtaacgctccgattgatttaaaaatccttatagataattataaaaaagttaacaaaaaccatggagggagagttagaaaactgtttaaagattttgcacatacgactcaatttcaggcccaagtcaaaggaagagttaaagataacccatatcgatattgggtcgagaaaaatcctgttcaatcggatagcttcaagaatgaactaataaagagtcttaaagttattatgataagtggacatggtgtcgattctgctaccatctcatcatatctgtcagataactaa

SEQ ID NO: 7420 - DNA, 900 bp, Escherichia coli
atgcgttttaacaccccacttcgctatcctggcggtaaaggcaagcttgcaaatttcatgcttcggattattgaagaaaataatctttcgcctatacattatgccgaaccatatgctgggggtgctggtttagcattgaaactgttacatctaaatgcagctgaaaaaatcatccttaatgatattaatatttctgtttatgctttttggcacagtgtattaaatcatgcagatcaattatgttctttaattgaaagaacagaagttacaatggatgaatggtttaggcagaaagatataattaataatcctaaagaccatgatcttttaacaattggtttctcaaccttttttctcaatagaacaaatcgttctggaatattaaaaggtggagtaattggcggtaaaaatcaagaagggaaatggaagcttgacgctcgctataataagagtgatttgatttctcgaatccataaaatatcagaaaatcgtcacagaatagatttatataacatggatgcaattgatttcattaaaaaaatagttattcaattgccacaaaactcattaacatatttggatccaccttattacataaaaggtaaaggtttatatatcaaccattatgatcatgatgatcatgttagggttgcaaaagtcgtacagaataatattaaaacaccttggattgtttcttacgataacactcctgagatccaagctatgtataagacatcatcattagtatatggaataaactacagtgctcaagatcggtacaaaggatctgaggtaatgttcttcagtgaacgattgaaaatctttaaaacagatgatccaactaaggtaaaagcgcctgtatttaaaagaggatgtgttgacgaccacatccagacataa

SEQ ID NO: 7421 - DNA, 978 bp, Escherichia coli
atgaatgcactgaccgccgtacaaaataacgctgtcgattcaggccaggactatcgcggattcactctcatcccgtcggcgcaatccccgcgtctgctggaactcaccttcaccgaacagacgaccaaacagtttctcgaacaggttgccgaatggcccgtgcaggcgctggagtacaaatcgtttctgcgttttcaggtaggcaaaattctcgacgatctgtgtgcgaatcagctgcaaccgctgctgttgaagaccctgttaaaccgcgctgaaggtgcgctgttgatcaatgcggtgggtatcgatgatgtcgcgcaggcggatgagatggtgaagctggcgacggcggtggcgcatctgattggccgttccaatttcgatgccatgagcggtcagtattacgcgcgtttcgtggtgaaaaatgttgataactcagacagctatcttcgtcagccgcaccgcgtaatggagctgcacaacgacggcacttacgtcgaagagatcactgattacgtgctgatgatgaaaatcgacgagcaaaacatacagggcggtaactcgctgctgctgcatctcgatgactgggaacatctggacctctttttccgccatccgctggcgcgccgtccgatgcgctttgccgcgccgccgagcaaaaacgtcagcaaagatgtcttccatccggtgttcgatgtcgatcagcagggccgcccagtgatgcgctatatcgaccagtttgtccagccgaaagacttcgaagaaggcgtgtggttgagcgagctttcggacgccattgaaaccagtaaaggcactctttctgtacccgttcccgttggcaaattcctgttgattaacaacctgttctggctgcacggtcgcgaccgctttactccgcacccggatctgcgccgtgaactgatgcgtcagcgtggctatttcgcttacgccactcaccactaccagacgcatcagtaa

SEQ ID NO: 7422 - DNA, 1290 bp, Escherichia coli
atggatagttatatcgcgcttacactgtttggctgtttttttgtgctggtctttattggtgtgcccatttcgttctcaatcggtattgccactgtagcttcaatgctgttgatgtttccctgggatatcgcggcaatcactgtttcgcagcgactggctaatggactggataactttgccctattggcaatcccctttttcatctttgccggaacgctgatgaacagcggcggtattgcgatacgtttgattaacctcgcccaggtaatggttggccgcgttcctggttcgcttggtcatgtgaacgtcctggcgaatatgatgtttggttccatttctggttcagctgttgcggcagctgctgccgttggtggcacactgaatcccattcagaccaaagaaggttatgatccggcattttctaccgctgtaaacgtctcatcttgtattactggattactgataccgccctcaaacgtgttaattgtgttttccctgacagctggcggcgtttctgtagcatcgctatttatggcgggatatttgccagggatcttaatgggtctcgcggtaatgatagtctgcggcattattgctaaacgccgtggctacccactttcagaaagagcaacctttgctcaggcatgtaaagcgtttctggatgccttaccaagtttgcttctggtgttcattgtaatgggcggcatttttaccgcaactgaagcgtcagcaattgccgttgtctacacatttattctctcggtgctgatttaccgggaagtaaaatggcgcgatttacccaaactgattctggaatcggttgttaccacttcgattgtattactgttgatcggtttttccgtgggcatgtcctgggcaatgaccaatgctgatattccttatatgatcagcgacgcgttgatggggatttctgataacccactggtcatattgctgctgattaatatcgtcttattaattgtcggcatctttatggacatgacaccggctgtactaatcttcacaccaatcttcttgccgattgcacaagagctgggaatggatccggtacatttcggtattatgatggtggccaacctttgtattgggctgttaacaccgccggtgggtagtgcgctatttgttggttgttctatttcaggtgtgaagattcaacatttgatcaaaccattgctgccattttatgccgcattgttaatcacgttgatgatgatcacttacatcccgcaaatatccttgttcattccacagctactagggctaatgtaa

SEQ ID NO: 7423 - DNA, 987 bp, Escherichia coli
atgaaaatgaggtcatttacccgctcattagtctgcgcatccttgctggctctggttagcactggcgtaaacgccgcagaaaaagtgacgttaaagttagcacacaacctggaaagaagtcatgttgtacatcagagttttgaagagctggcgaaagaggtaaaacagctgtcaaaaggtaatatggtgatccgtatttatcccagcagccagatgggtaatgcgcgagaaactatggagttgttgcaaaatggtgcactggatatgaccaaaggttccgccagtgatctggagtcttttgataatatttatgctatctataatttgccgttcttatttaaagatcaggcgcacttcaacaaagtggtttttggtgaagttggtgaagaaattatggattcaacaaaagataaaggcttttttgctttatcagcttatgtagcgggtacacgcagtttctatgcgaaaaaaccgattactaagccagaagatcttaaagggctgaaaattcgtgttcagccaagcccgaccaccatcaaaatgattgaactgatgggtggctcacccactccaatttcatttggcgaagtttatactgcgatgcagcaaggtgtagtagatggcgcagaaaataacgtgccttcctgggtgcagactagacatatcgaaattgccaaagtcttttctgaagatgaacatgcctcaattcctgactttttggttatctccaccaaaacatggaataaattaaccccagaacagcaacaaatcctcgaaacagcggcgaagaaatccgaagctgatcaacaaaaattgtgggaaaaaattgacgctgacacacgtgctcaggcgaaagctatgggtggtgaaatcgttaaggttgataaagccccattccgtgccgcagttcaacctctgtttgacgacttcaaaaaagatccaaaacaagctgctttgttagagaaattcgacaacgctgctcaataa

SEQ ID NO: 7424 - DNA, 597 bp, Escherichia coli
atgaataacacggatcttatccatctcattaaacattttatgcgtaacgaacataaagcagttgaagaagttattgattcccctctttcggaggtcgcaaatttaattaaagtattacaatcttgtcagggaaaagttgtttttattggtgttggtaagtccggtattattgccaggaaactcgccgcaacatttgccagcaccggaactccctcgttttttgttcacggtacggaagctgtacacggcgaccttggaatggtggcgaaagacgatgttgttattcttatttcaaacagtggtgagacggcggaaatcctggcgacactgcctagtctgaaaaaaatgggtaattatttgatctcttttacccgcagtcaccactcatcgcttgcgataagttgtgatttatctgttgaaatccccgtcaaaagtgaggcggataatttaggtttagcaccgtcatgctcgtcgactgttgttctggttgttggtgatgcggtggcgcttgcactctctgaattgaaaaaatttactcgtgctgatttcggcttatatcatccaggaggtgcactcggcattaaagcaaattcataa

SEQ ID NO: 7425 - DNA, 426 bp, Escherichia coli; identical to SEQ ID NO: 6184

SEQ ID NO: 7426 - DNA, 2808 bp, Escherichia coli
atgaagactcttgacatccgggtcgctttcagcgccgttgacaggctgacccggcctgccgaaaacgcccgccgcctgatggggcagtttggtgactccattcagcgaacgcagggggcgatcaaaaatctcgagcgtcaggcgcgttcatttgagcgcgcccgcgacgctgtcagtaaagcggatgcgggtatcgtgaaagcacgacgccagcttaacgcccttaatcagttacaacgcacgggtacagtgctcagcgaaaaacaacaaaagctgatgcagcagttaagcacccggcttgaacgcctgaatgaatcgcgcacacgggaaattcagaaaatgcgggagcttggcggagaactgaaacgccacggcatttccctgacaggcagcgataacaccatccagcaggccatcagacgcaccgaacaatacaacaaccagcttgaacgcgaacggcaggcgcttgcgcgtgtaacgcaggctcgtgagcggtattcgcgcgcgcaggaaaccgcgggaaaactgaaaacaggtggtgcgctggcaattggtgcggcagcggcgggcggctatgctgccgggcgttttttgcagcccgcgatcgggttcggcaaagagatgtcccgcgttcaggcgctgacgcgaatcgacaaaaacagcccgcagtttaaggcgctgcgtgagcaggcgttaaaacttggctctgaaacacagtttactgcgagtgatgccgccagtgggcagagctttctggcaatggctggttttactccgcaggccattcaggccgcattgcccggtgttcttaatatggcgctggcaggtggcgtcgaactcggcgagacggctgatataggctccaatatcctcacacagttcaacctgacagccgatcaaatggaccgggttggcgatacgctgacagcggcattcacccggaccaatactgatttacgcgcgctgggcgaaaccatgaagtataccggtccggttgccgcaaaacttggtatcagtcttgaagaagcggcagccatggccgggatgcttgccaataatggtcttcgtggaagcgatgctggtacggccatgcgcgcaagtctgtcccgccttgcatcaccgccaaaagctgcggctgatgcgctgaaagagctgggggtgtcagttgctgacgccagaggcaaaatgcgcccgatggaggatgtgctgcttgatctctataaggcgacacaaaaatacggacaggtggaccaggtttccttcttcaaggacatcgccggagaagaggcgttcgttggtttgcagacgcttgttgcggcggctggttcaggagagctgcaaaaactgaccagagaattgcagggggcaaggggagaggccgatcgcgttgcaaaagtaatggccgataatcttgatggggacctgaaaaatctcgacagcgcatgggaaggtcttcgtattcgcatcagtgatctggttgacggtccgctgcgttctgtcacgcagtggctcacgcgggtgcttgaaaaaatcacctcgctggcgcaggcccatccggtactgacgcgccagctactgatagcaggcggtgcgttgctggcaatgactgcaacggttggctcgttgtcgctggctattggtgtgcttgctggcccgctggcaaaactgcgtcttggcttttccctcctgaccggttcaatgaatgctgtcagactcctgccagcactatggggaatggtgacgggttccgtttcgttactggggggcgctatcggggcgttgttcagtccggtcggccttatcgtggctgcgcttgccggagctgccgttctcatctggaaatactgggatcccatcagggcattttttgccggggtgttcagcgggattatggaaaggctgaccccgttgcgcgaaacctttgaacggtttggtcctgtttttgacgcaatcgggagtgggatcagccaggtgtttaactggtttaaatcgctgctgtctccgatggagtccagcaaggaaactctggataaatgtaccagtgctggcgagatattcggtaacgttcttggcggtgcgttacaacttgttctgacacctgcaaaaatgttgctggatacgctggcgtggatacttgaaaagcttggtgtgcttccggatgaagcggaaagggcgcgcaagaaaatcgaagacgcacagcgtgcggccattcttcaggacaaggttgccttgcttcagggggacctggcgaaaatcaatccgccgaagcctgtggaaaatggcaatggcaccggaggtgataaccccaaagacaataaaccgctcacagacagcaataccggtacgctgcgcagactcagcaaaattgctgataacacaggtaagctggttgaggagacgaaaaaacgcattggccccggcgatattgtctttaaaaacctgccccgagcacttgctgttcgtggggagtggcaggagcggaagattgcgcaggtcagtaagcctgcccccgcaattaatatcacacccgtggtcccggctccgctgcctccggcgctggtccctgttgttgcggccagctcccgcccggtggcggaggctatacgatctccagtggcatcagttcctgtaacttcccgtaaccgggagcctgttgcctccggatttggtggtgaaattcatgttcatctgcataacgttgttacgcagaatccccgcgaactggcgaaactggtcggtgaaatggtcagggcagaaatggaacggcgcgcccgtgccgggcgtggcagtttttacgataaagattga

SEQ ID NO: 7427 - DNA, 489 bp, Escherichia coli
atgatgatgatctacggcatgtttgtttttgagctgcgcacgctgccgcatcagcagttacagcaaaacaaaagctggcggcatgtgaaaaatgaacgcgttaaccgttcagcaagctggcagtatatcggtgcaggtgatgatcgcatcgttctttctggtgtgctttatcctgaaattacaggtggcgaagtgtcgctgtcgctgctgaccacgcaggcgtatacaggacgaccctggcctttgattgatggcgtcgggcagatttacggcatgtatgtcctgactgaaacgaatacgacccgctccgagtttgatcgctacggtaaggcgaaaaagatagaattttcactgactcttgaacgctgtgatgaggatttgcgggagcgcctgcaatcctcatcgttcagtgatatgctgtccggcttcaaagataaggtgacatcatctcttaacagcgcggccagttcagttaaagggctgttctga

SEQ ID NO: 7428 - DNA, 600 bp, Escherichia coli
gtgctgattggctatgtaagggtatcaacaaatgaccagaatacagacctgcaacgaaacgctcttgtttgtgcaggatgtgaacaaatatttgaagataaattaagcgggacaaagacagaccgaccgggattaaaacgcgctttaaagcgccttcaaaaaggtgacacgctggttgtctggaaactggatcgcctcgggcgaagcatgaaacatctgatttctctcgtcggggaactacgggagcgagggattaattttcgcagtctgaccgacagcatagacacatcttctccaatggggcgttttttcttccacgtgatgggtgccctggctgaaatggaacgtgaattaattgttgaacgtacactggccgggctggcggcagcgcgcgcaagggggcgcacaggcggacgtcgaccgaagctgacaaaagaacagcatgagcaaatagcaaggctaatcaaaaacgggcacgacagaaaacaactggcaataatttacggcattggcacatcgacgatttatcgttatcaccctgtaggcgatatacagactgaagaaacaaccgggcagactcaggaaaatgaaaaccgctaa

SEQ ID NO: 7429 - DNA, 2295 bp, Escherichia coli
atgaaggtagatattgataccagcgataagctgtacgccgacgcatggcttggctttaaaggtacggactggaaaaacgaaattaatgtccgcgattttattcaacataactatacaccttatgaaggcgatgaatcttttctcgccgaagcgacgcctgccaccacggaattgtgggaaaaagtcatggaaggcatccgtatcgaaaatgcgactcacgcgccattggatttcgataccaatattgccaccacaattaccgctcatgacgcgggatatattaaccagccgctggaaaaaatagtgggtctgcaaacggatgcgccattaaagcgtgcgctgcatccgttcggcggcattaatatgattagaagttcattccacgcgtatggtcgtgaaatggatagcgaatttgaatacatctttaccgatctgcgtaaaacccataatcagggcgtatttgatacttactcaccggatatgctgcgctgccgtaaatctggtgtactgaccggtttaccagatggttatggtcgtgggcgtatcatcggtgactatcgccgtgtggcactgtacggcatcagttatctggtacgtgaacgcgaactgcagtttgccgatctccagtcccgtctggaaaaaggcgaagatctcgaagccaccattcgtctgcgtgaggaactggcagaacatcgccgtgcgctgttacagattcaggaaatggcggcgaaatatggctttgatatctctcgtccagcgcagaatgcacaagaagccgtgcagtggctctacttcgcttacctggcggcagtgaaatcgcaaaatggcggcgcgatgtcgctggggcgcacggcatcgttcctcgatatctacattgagcgcgactttaaagcaggcgtactcaatgagcagcaggcacaggaactgatcgaccacttcatcatgaagatccgtatggtgcgcttcttgcgtacgccggaatttgattcgctgttctccggcgacccgatctgggcgacggaagtgatcggcgggatggggttggacggtcgaaccctggtgaccaaaaactccttccgctatttacacaccctgcacactatggggcctgcaccggaacctaacctgactattctgtggtcggaagccttgccgattgccttcaaaaaatatgccgcgcaggtgtctatcgtcacatcctctttgcagtatgaaaacgacgatctgatgcgtactgacttcaatagcgacgattacgcgattgcctgttgcgtcagcccaatggtgattggtaagcagatgcagttcttcggtgcgcgcgctaacctggcgaaaacgctactgtacgcaatcaacggcggaatggacgagaagctgaagattcaggttggcccgaaaacggctccgttgatggatgacgtgctggactacgacaaagtgatggatagcctcgaccacttcatggactggctggcggtacagtacatcagcgcgctgaatatcattcactacatgcacgacaagtacagctacgaagcttcgctgatggcgctacatgatcgtgatgtctatcgcaccatggcgtgcggcatcgcgggcctgtcggtggcaacggactccctgtctgccatcaaatatgctcgtgtgaaaccaatccgtgatgaaaacggcctggcggtggatttcgagattgacggcgaatatccgcagtatggcaacaacgacgagcgcgtagacagcattgcctgcgatctggttgaacgctttatgaagaaaattaaagctttgccaacctatcgcaatgctgtgccgacccaatcgattctgactatcacctctaacgtggtgtacggtcagaaaaccgggaacacgccggacggtcgccgcgccggaacaccgttcgcgccgggcgctaacccgatgcacggtcgtgatcgcaaaggtgccgtggcctcattgacgtcggtggcgaaactgccgttcacctacgccaaagatgggatctcgtacaccttctccatcgtccctgcggcgctgggcaaagaagatccagtacgtaaaaccaaccttgtcggcctgctggatgggtatttccaccacgaagcggatgtcgaaggcggtcaacacctcaacgtcaacgtaatgaatcgggaaatgctgctggatgccatcgagcacccggaaaaatatcctaacctgacaatccgtgtctctggctacgccgtgcgcttcaacgcactgacccgtgaacagcaacaggatgttatttcacgtacctttacccaggcgctctga

SEQ ID NO: 7430 - DNA, 1206 bp, Escherichia coli
atgctcattggacaggcccttgatttggtatcccgttacgattctctgcgtaacccactgacttctctgggggattacctcgaccccgaactcatctctcgttgccttgccgaatcaggtactgtaacgctacgcaagcgccgtcttcccctcgaaatgatggtctggtgtattgttggcatggcgcttgagcgtaaagaacctcttcaccagattgtgaatcgcctggatatcatgctgccgggcaatcgccccttcgttgcccccagtgccgttattcagacccgccagcgtctgggaattgaggctgtccgccgcgtgttcacgaaaacagcgcagctctggcataacaccacgccgcatccgcactggtgcggcctgaccctgctggccatcgatggtgtgttctggcgcacaccggatacaccagagaacgatgcagccttcccccgccagacacatgccgggaacccggcgctctacctgcaggtcaaaatggtctgccagatggaactgaccagccatctgctgacggctgcagccttcggcacgatgaagaacagcgaaaatgagcttgctgagcaacttatagaacaaaccggcgataacaccctgacgttaatggataaaggttattactcactgggactgttaaatacctggagcctggcgggagaacaccgccactggatgatccctctcagaaagggagcgcaatatgaagagatcagaaaactgggtaaaggcgatcatctggtgaagctgaacaccagcccgcaggcacgaaaaaagtggccgggactgggaaatgaggtgacagtccgcctgctgaccgtgacgcgcaaaggaaaagtctgccatctgctgacgtcgatgacggacgccatgcgcttccccgggacgtataccggagctgatgcgcgatcttgcaagtatgggacaactagtgaaattaccgacaagaagagaaagggccttcccgagagtgataaaggagaggccctggaaatactccacagccccgaaaaagagccagtcagttgcttaactgactggcattaccccttctggggccgttttttattttcccaaagcaacttttccataaaccggcagcattgtccttcatcatatttgcgacgatgtataacgcctacacacagcgatattgtactttacaggttacaagtcaatgtcggtgtataa

SEQ ID NO: 7431 - DNA, 1089 bp, Escherichia coli
atgagaaacgttgttagtgacgataaaatcagtgattttcgagacttagttaactcaaactctagctttgtgtatcaaatatacaaagataaaggtggtaagaatctttttaacctcgtttgctctgctatggattggatctctgtctctgttcgccacttagaaaatgcgcctgagtttgacaagaacatagatagtagatgtatgcaggtctactctctgatctcttcaatagaccttattttcgagtcaataaaacaactccatcgagtgtttataactgataagaaagatccgttttatggtgaaaagaaatgtttcaaagatcgcctcttcgctaatgaagatgataataattattttaaaactatcagggcgtgtttcggtgctcaccccgtaaatctgaatcaagaaaactcaaagcgtttcgcaagttggccatttcaaagtcatttcaacactggcgatttgagtgttcatttgtacagtcgagatgtgggtaaagaagacctaacgttaaacctcaatatcaatgagctgttggaatttctcagaattcgatatgagtatcttgatgttattgctgataggattgaaacgctgtttgttgagtatcaacacaaactttcaaaagaaaaaattgagactaaattagatcctttagaacaactctatgttcttcgtactgagtcagaaaaacgattagataacgattactataacggggagattgacgacctgattatgatttttgaagcggaagtaactgacgctgaccttgtaccattggctgataagtataaagaatccctcctacctctgattgaagagattaagacgaaccttcaagaaatgaacatcgttgacctagcaaacgatagtgagctgagaataagatctgaacttgataaagagttacgttatgaacttggtaagttctacacttgggttcacggtggcaggtacgatccgctacttgaatactattttgaaaggtttaacgcttctactgacggtaagttcaagttcaccaaaactgatgacatcaaacttacgtttcttaaagcaaagctcatgctaactgaatag

SEQ ID NO: 7432 - DNA, 1182 bp, Escherichia coli
atgctattagttggttatccacttaattgttttatcaatttatttgatgacaatttacaccatgtgttcaaggtattgattatggaattacagacaaggctagtttttatcgatacaagcgcttttgaaaagaaaaactatcaatttgggcaacacgctcttggtcgtcttcaagaactaattgaggatgagaaaatctacttgctcattactgatgtgacaaggaaagagatcgactcccatctcaaacacaaatctgaagaagcagcttctatgataaagaagatgcaaagagatgcgatgttcctaagaaacacccccgaccttgattgtcatggcatcttcaccaagattaaaggtgatgatatttatgctattatcagtgaaaaatttgatgatttcgtcgaaaacggctacgtcgaaacaattgatgtaagcactgttaaccctcaagttgtatttgatgcttactttaacaaccttcctccttttggcaaagaatcaaaaaagcacgagtttcctgatgcatttgcgctagaagctattaaacaggtgagcttggctagaggatattcagcctatatcgttagtgacgacggcgatatgaaatcattctgtgagaaagaagataacttcattcatcttgaaaatgtcgatgacctaattgacttgattgttcgaagcgacaaagcgtacgaagaaccagccaaatttgctgatgaaatattcgaacaactcctagaacaaatcaaagcggatgccctgcaagctctcgaagatggcgagttcaactatgaaaacgcagatcctttcgatgagactatcaattctatagaaatcaactcggtgaatgttgggaagaaaaacttacagaatgtcgatgccgagtgggctgaatacgaagtagaatttgaggtggttgttacggcagattatcgattctcagattatgaccgttcaccttgggaccctgaagacaagcaatatgtattcgtcttgagtaatgagtcaacagtaaaacacaaagaaacatacactgcccacataacacttgcctataccgatggattaaaagctaacgcatacattgaagagttttacttccaagatacatattttgagctgactgataatgactccgaagtcattagcttcaaagaactagatatcaacggtgaatga

SEQ ID NO: 7433 - DNA, 960 bp, Escherichia coli
atgaagctatatgtaataggtaatggctttgatgttcatcatggccttgacactaggtatacatcttttgggctttatctcaaaaataactactgggaaacttatgagctattgctcgactattacgggtttgctgacttagacccagattttccaacaacaatgtcagaccctttatggtctgaatttgaaacgagtatgtcactgcttgataaagattcagttttggaagcaaacatggatgcaatgccaaactattcttcagatgactttcgagacagagaccgatacacgcttgaaattgagatggagcgaatacttggccttctaaccactgaactgtataaagcattcaaagagttcattttggctgtacagtttcctcagtttgatcacagccgatcagtaaacattgatagagacgctgtttacctcacattcaactacacagatacgctttctcaatactacgcaatccccgataagaacgtgctattcattcacgggaaagccgatgaacatattgatgagttaattctcggtcatggtgttgatcctgaaagtttcaaagagaaacctgccgaaccaccatcaggattgagtgatgaagatttagaacgttggatggaatatcaatctgatcaatatgactactcattcgagcgtggtaaggatgcggtcaatcagtatttctcagcaactttcaagggaacagaccagatcataaaaaacaatgaagacttctttgcaaagctcggcaatattgatgaagtatatgttctcggtcactcattagctgacgtagatttaccctacttcaagaagttggagcaatcagtcagacctgatgctaaatgggttgtaactttttatgaccctgatgatgagaaagtacacggtgaaactctaacaggacttggaatagccaacgttgcagttgtcagaatggaacagatctaa

SEQ ID NO: 7434 - DNA, 441 bp, Escherichia coli
atgagaaaatcaggaaaagcattagcgagattgcgagcagctttagaacgcctaatttcgggcaagccacaaaatgtttcaccttcaggtaaattaacccttaataaaataaataacgaagctggacttggtaacagttacatacacaaatttaaagattttattgaaaatgaagcaaacccagccattgagtcgtttaacgctaattacgatcccgtcaaagcgaaactattacaaaacaagcagaatctaactgagaaagaaaagcataaagccagaatgaagaaagaagtcaaacttaaagagcaataccgccaagagcgagatgatctaaaaactataaacaaagaattagaaacacaaattagttctttgatgttcaggctgtatgaattacaagaacaacttaatgtacaaaatgttgtgaagatctctcaataa

SEQ ID NO: 7435 - DNA, 1992 bp, Escherichia coli
atgatctcagtattaaaacataatttagcttcagtaccagattatgacgaaaacataccagtaagtagttacagtgatggcagtgttgaaagctacatttttgataaaaaatggaagtttagcggcgctattcaagtaggcgttggtggtctaacagatatctctttttcacggattgacatgaaataccgcaagtacattcagtccacactcgcatacatcatggatgaatataaacaaaagaacaaaacgcatccaactatcggacaacttcaacactggaagaatgggctgaaatatattgttcaaagccttggcgagtgtaactggaaccttctatcagacgacagaatattcaagcaattcaagaaatctttcagtgagctagcaattaaaaggagcctttctcaaacactaatcaacaatgtagtaaccacttttggtctgctaaatagcctgaacctgtgccataggattgtaacgataaaaagcttaaacatacaaagtataaagccaaccaagcaatacattgcaattccaacgaatatctaccaacaaatacttaatgatgctatctcaacagtagagtcactgcacccccatcgtcatgaaatatcggctcttatgaaccgaattcagactatatacgacgaagaaaaaaatcgaaaagacagatcgtcttctctaggccagataaacgacaggactcgtaatagaattcggaagataggtcataacattcctgattttaagcttactcgtgacggcacaaacatttctaatattctgactccctgtgcgatagttttactggcatttagcggtgtaagagttggagagttaaatagctttactaaagatagttacgaagaaagggaaggagaacacggcgataacatatgctttttgaaaggtgaaactactaaaacagtcaatggtattcctaaaaaagaagtatggcaaacacaccgcatatctaaagatgcacttgagttagcctatgactgcacagcatatcttcgcacaacctacatagatgatgtgaacaagcaatacactgaacaaaagatcaatttagatgagtacaaaaaaaccttacgggtgctagagtctgtatttctgccagtaacactaggaggctctaaaaagaccaactacagctcaacggctgcacgctcaaaaaacctcaagtcttatttggaacaactaaatattaaagcaacaaaagaagatgttgattcattcaatacccttaacccttcatggcacggagaactcaaagaaggtcaattcttacctaagatcagtgctcatgactttagacgaacattcgcagtattctttaagcgttatggatttggaacaacgtcaacaatcaagtttcaatataaacacagaaatataaacatgtccgaatattacggcaaaaacgcccaacttcagtacttcgaagatgtcttgttagactctgacttaatccaactattgcatgaagaaggggttaacattgcagtcgatatgtttgatgaaatatacaacgattcagaaacgctaagtgggctaggtggagaacgaatagccaaggataagtttgaaaaactacgctctggagacaaggtatatatgacgcggactgaaattgagtccctagttcgcaatggcacgctttctattgtcaagctacctacaggcggatactgcactaattcgtcttgcagtagagtgtgtggtattggcgagttctccgctgaaattaaaccatgcgaacatcagataatcacagacaaggaggccaaaagaactcaacgtcaaaataagcggctaataaatacatttcgagatttgaataatggcgaccctatgatgaaaagtatacttatcggagttaagcaaaagataaaaataaatgagtcattgattatcaaccatggaattaaagtcacagcctttgaggataatatcaaaggcataatcgcaaccagtagaggttaa

SEQ ID NO: 7436 - DNA, 1851 bp, Escherichia coli
atgccaaaacataataccagaaagagaaaatatctacttccaggtaaaaacttaataaaaggcaaggccgaagttaaaaccttacatttagccgatatggttatatgtgtaaacggcagtattcttcgttttgaaaggtttgcttttaaatcctgtccagtattgtttcgaggtttcagaaaggttgaaactagtcagttcactgacatgaaacgaagcagttttgtgcgtcaaatatactctttgctaagtgagaacgtcacctctaccacagcctctagatatgaaacgctaataaaatacgttaggtgggtggatgatagtaacgacactgaattaatcgataaagacatgtttcactgggaactaattgatggattcatgacatggtgtgggaggcaaaacagtaagggattactttctcgacctgtctgggggaggcacagaacaaatatttcatggcttttaaagcaattaaataggacgcaggataccaaaagacttcctaaaatatcaaatgtttcaggacacacgacaccccacaaaagtcttgatattgagagagaattaaaaccgatcacaaaaaggttttttaactcgtactttaagcttttagaacactataatgctggcacaatgcctgaaaaacatccgctttatgataaagaattgctagaactaatagcccaaaaaaaagggataaaaggcagtgacagagttgcccattttgctgcgttttcaagagcagtacaacccagctcagggcataaaaacaaccccatcacaaaaatagcaatgatgctgtgctatttgtttacgggaatgaatacaacgcctttagctaagatgaaaatttcagacgttaatttcaaagaggtgcagggtggaaagtacattctggattccgtgaaaggtagagctcaacaccaagagcaagataacgcacttggtttcagtaaacacgcaaaggacttcattgaaagctggttaaatgtagctaaaagcatggcaaatggtgatagcaacagccctctcttcccctactatagtaaagatggtcagataaagctttactctgaaataggtagttccccccatgcaagcatcaacaaactattgaccagactggacttccctaaaataaccccttcaatactcagaaaaaccaaaatggacactctgtttcaagcaacagagtctgtttatcttgttgcaatgtcggcaaacaacagcattaaagttgtttcatcacagtatttatatgggacatctggagagcacgaaaaaaaattaaatgcggcaatggatgctaaattttccaacgctaaaggcgttgatatcaacaccgcagttgaagaggctaaatacaaacattcaaacattcttgatcattatgagtatgaagcactgagagagggctctaacaggtctcatgaagcaagaacccctacagggatacgttgtaatgataataaacaaggtgctgtaaaaaccataaataaaatgctagagcgtatcggagttgaaatgaattctgatgaagaagcttgcaccagctttcttgattgctttgagtgtgagcaccattcattggtctctgatgtaacagatatatggctaatgatgtcattcaaggaaacattacaagagcttgaagtaacacctgcaattaactcaatgccacctaagaaaatgaatacactattaaacaccattgaaactattctaggaggatttagagataaatctccagaaaattataagcaagcctatgagctacaaaaacaaacatcacaccccttgtattcgaatatctacagtctaaatgatctgcatgaggtgttttcatga

SEQ ID NO: 7437 - DNA, 1530 bp, Escherichia coli
atggcaatcgtatacgagatcaaaacaacagaaataaaaccattcacgtatagaacccctctaattacgcctgatgaaaatggtgaactatctattaaatactctcgacaacaacctaagcatattaaaaaggttgttttgttgaatttggttggtagaaacactaatggcgatatagtctcatacgaaccaatggaacaagttaatcgctttttactagcacaccacctaaatgacaataagcaagagtcagaacaatacagtaaaggcttagttcactacttttcattcttattagaattacagcgcttgtgggactctgaatacgacgaagacctttacgaagaatttattgatctgcctagacctagctgggataaattcccatttagaaaaagtgataaagctacgtaccaataccgagaggctctaataaaggctgtacttgagcctgacaccccaaaccatgcgatagccagaactacagcaattgcatatatgggtgctgtagttaagttttactctttccacatcagaaatggctacaagtttaacaatcctccctttgagcacgaggttgtttctatacaatatcagggaggcagtacaagcatcggtgcctacttgagtaaagatatacacacaacagatctgcggttgaatttaggaaaatctaaacgtaatgacggtggcgcactatcatcagctagacgagatttaaaacccctaacaaataaagaatggcttgccgtagaggatattctcaccaatacacgtcgagttatcaaaaaagttgctggtgaaacaactacttccaacttatcaattgaatattgcctgttctttcttgtcgcacgatacacagggcttagaaaggaagaagtggctagccttcacaaaggtcaagtggcaaagcctggtgaagataagaaagcaatgaagcttggtgttggcggtcaatacggctcattaacaaaaaccgctggatcaggtaataaatctaggcaaacaatcatccccacccgaattatgcaccttttgtacgaatacactagaagtgatagatataagaagcgtatctcgaaattcaaagaacattgtgaacttaagcgtcaaaaaggcgaactaggatactttgatggggaggatggagtagatgatacaaaagagtatttattcattagccaaactggtgtcccacttttcactaaacttcccgaggccaacgccagatggaatgaaattagagccactgtaaatatattgtctgggtttaacctaacagcaactatacacaatcttagagctacatttgcggtatcactttttaggctccttttgaggcgtgtaactcctgacaaagcacttgctttagtgagtgagtgccttgggcacggtgaagagtccgtaacgttaatataccttaaaatcgctcaagacgaacctacaggcgatgaaatttatgaagatatccttgaatttataggtgcatttgaagatgctgatataagtggtatggagagccaataa

SEQ ID NO: 7438 - DNA, 759 bp, Escherichia coli; identical to SEQ ID NO: 4798

SEQ ID NO: 7439 - DNA, 294 bp, Escherichia coli
atggatataagccccttacttcatgcactttgtgctgtggctgcgcagatactggttggtctttttaccggaaactgggcttacggagcgatagccggttgtacgttcttcattgcgcgtgaacatacccaggcagaatatcgctggattgaaatgttcgggcatggcaagcgaatgaatatgccgtggtggggcggttttgatccgcgagcttgggatgtggcaagcctgatggattttgctgtgccggtggtggcgtgtctgctggtctggctgttggttaatcgtgggtga

SEQ ID NO: 7440 - DNA, 852 bp, Escherichia coli; identical to SEQ ID NO: 5519

SEQ ID NO: 7441 - DNA, 132 bp, Escherichia coli
atgaattttgacgatgagtttttagagaaatctatcaacactgctccaggtatttggggccgtgaagtgaattggcctgatgatatgaataagaaatcaatgttgtcttcaatggacgaatatatactctga

SEQ ID NO: 7442 - DNA, 420 bp, Escherichia coli
atggtcgttaaaaatggtcttgcctgtgggattatgcttgctcttgtcggttgtgctacaaaacctgtctcaaatgaacaagccactcctgttcctgaaaaacaaattatcagtaccgcgttactcgaaaaacgagacggtacgggagaggtgatcatcaagcgtgactcgggtttctttggaagcgcgtgtttttcccgtgtttatgttgatggtaaagaggtggcagatttaggtacagctcagaaagtcgttgtatacccaacgattggtgatcatgtcttcagcgcgtggccaaaaggagtatgtggtggtggcatgagcgaacaagcgggcaaggtgacaacagatcgtactttgatgtatcgcatagggtatggatcaaacggtgaatatggaattcacccaaccgcgttttaa

SEQ ID NO: 7443 - DNA, 165 bp, Escherichia coli
atgacgtacacgacgccagcgacgctcgatttagtgtcgctgacagcagaatgcaaagtcacaactcaaggtttcgggaccgaggaggaccgggactggactatcaacacactgagtctgacgctcgctgaaaacggtttttcggttcggctgtctctggagtaa

SEQ ID NO: 7444 - DNA, 774 bp, Escherichia coli
atgagtgattacgtaaatactggcgtggaggcgtggaaacctaatttttatatatctgctgataataaaaacatcacggataaaataagaaaaggtttgatcaatatcacgctgacagattacggcggctccagtaaacagacagacgaactccgcgtagcaatagtttctgaaactctgaaaattccggcccgcggagtaaaaatcagtattgggctcggtttcggtaatcagataattgataaagggatatacatcgttgacggtgctagcagtggcggtgaaccccgggtagttgatttcacagcaaaagcggctccgatgaacgcagcaaaaggatctccgacagttcagagcaaaaagactcgttcctggagcgacgtcactgtcagcgatatcgttgcgacaatagcgagcgataatgggctaaaaccacgcgtatcaaagcggtttgcagacaatgttatcacgcaactcgatcaggtcggcgagtcagatatgcacctgatgtcgcggctcgcaacgagattcgatgcggtgagtaaacccgcgggcgggtactggatattcctgccgcgcggcgcgggcgaatctgttagcggtgctccgctccagcactacacgctaactcgtcgtgataactccagctggggctattcgagaaatggacaaagtggcgatagtggtagcggtggcgaaaatccggaaccgacgtatctgattaaatatcacgacacagcaactgggcagatcaaagaattgcggacaaggtag

SEQ ID NO: 7445 - DNA, 225 bp, Escherichia coli
atggggccccaaatgattacatacactacacgggacggtgaccgtctcgatcagatctgccttgcggtctacgggagagcgtcaaaaacgacagagactgttttatatcaggtttcgaattacggcgtaacggatatgtgtgccgtgtttcgtgctggagaaaaaattgttttaccagatatcgaaccagagccggttaaaaaagaaacgcaattatgggattga

SEQ ID NO: 7446 - DNA, 390 bp, Escherichia coli
atgctcggcctgggtgatttcatttttgctatatcaacagtagcgtacaacaaactgcaacgtagtgacgcctggcgctgggctcagcaaacacgattcgggaaaaacgacgcgttgcagataaccggacgaccgaaccccacaattactatcgatggaaagataaacgctttatttcttgacgggtgcggcgtcggcctgttgacagatttgcgagcgctcgggaacacgggagaaccccagcagctagtgctggggaccggggaggtgaaagggtactgggtgctgcgagaactaactgaaacgcaaaacagctttttgatgggcggaacacctaaatcgcaggacttttcactcacgctcgaatattatggagcttcgctagattaa

SEQ ID NO: 7447 - DNA, 1641 bp, Escherichia coli
atggctatttctcaaaactttaaaacgcaggttgtattcggtgggcgaatagacccgtcgtttcgtcgcggtacaacagaactcaatgatgcgattcggcagacgtcgtctactgtcgggaaattaacgaaaagtcaggataaattaaaagacaaaatcgcagcaatgaaactggcaggtaaagacgtttctgatttatctgctcagtatcaaaagctggaccgtcgaataaaagcgacaacgcaggaccaggaggcgctgaatactcaacttgctaaaaaacagcggctggagaagtggacgggtcgcgcaaaaggagctgcaaaatggggcggacgagccgccgcaggtgcggtgagggctacggggcggggtatcaaatgggggacacttggcgcggcagggctcattggcggtgctgcagctggtgcgctggcaatgaatgcagagacgtcagaaaaactcggtctggcgaagtcctacggcgttggcgtcgaaaaatacgctgcgtgggaaaatattggtaaagccgcgggcctgaacggcgaaaatatcggggatttgtctgaagaacttacaaataaaatcggcgaaatcggaaacgaaaaaagcctgaatcccatgttatttcaaattggcctgacgaaaaaacgaatggctggctgggatcgggaaaaacagtttaatgaggttatgcgtcgcatctctgaaatgaaagatgagaagcaagcggcgagcctcgctgaccagctcatggggggcgaggctaataagatcatgacgtatatgaaggcgacgggtaaaagctgggaacagacaatgtctgacgcgcaaaagtcgaatttgttaacaaaagagggtgcggaaggggcggcgcgtgcgcatgtatcagtgacaaatctgtggggctctattacgtcgggacttgcagatacactcggtaaaatcgggggggaactcgcgccgacgtttgactcagtacgtgaaacatttacatcctggtttaaggataatcagggtggttttgtcagcacaattactgagtgggtaaaaccagaaaatatgaaaaaaatgtgggatggcatcgtcaattttggagaaggttgcgtcaaattcgggaagattatatgggctgtcgtaaagaaactggagtggcttattccggatgaaaaatcagatgaagaacagaaaacttataatgacgaatataatcgggcatatcaagagtttatggattcgggaggtaaatattcaccgaacgctggattgactgctgataatattgcgaaggcaaaagccgaagaggctgtcgaaaatatgcggcatccagaacggcaagaacaggcaaaatctcaggcagaatcaatgctcgcgtttgttaatccattatccgggatggtaaataaaaataccgcgcctgcagcactggattcgtcgacgttaaatattgatacgttgaagcaggcagtctcgacacctgcgccggagcaaaacaataaaatcgaaatcaatattgtcggtgcgacagatccgcagtcaatacaacaatctgcagcgtcgggggtgctcgatggactgagacaggctgcgagttcgtacaatcgtggcgcgatgtttgataaaccagctgcggcggggtga

SEQ ID NO: 7448 - DNA, 282 bp, Escherichia coli
atggaatcattattagacagtatgactattacgctctctcgcccgtttattattaagggggagagccgcgatacaattactattcgcgaaccaaaattacgcgaccgcattatgttcagtaacgataaaagtggtcttgaagagcggacagcgacaatgctggcgcgcctggcaaatctggagcgtgaggatttatatgcactgcctgcgtgcgattacgatcaaatggaggccgcatttaacgaactggtaaagcctccgaaagaccgacatcagatatag

SEQ ID NO: 7449 - DNA, 513 bp, Escherichia coli
atggcagatagtaacacctatcgtgcatttgcgttgttcgtccagggagaacgagttttaaattgcactgaatacactcccgtcgatatgaaaataatcgaagatgattttaagacgggcgctatggatacagctatcactctggacgggggaatggagaaaatgtcagccagttttaaagtctctggctccgattctggtgtgatggggtatttgggattaataccaggtgctaaaacaaggttcgaaattcgaagtgcatatactgacaattacggtgtcaattttgaacgtattgatacatatgaggggcttattacggcgattactgatgacgcgcaggggactgattcaaaatcagcagttgggcaatcagtaacgattgcgccgagctattataaacgagttcaaaatggaaaaattatttacgagattcatcctgcaaaaatgaaacgagtaattaatggtgttgacgttcttgcgggcgttgctcgtattctccatgtatattaa

SEQ ID NO: 7450 - DNA, 1503 bp, Escherichia coli
atgagcgtaactaattttttacacggtattcgcacgctcgaatacgacgacggcacaaaagagatcaacacagtagatatttccgtgattgggattgttggtactgctcccgattccagctacccaacttgtgcatcactattatggggatcagagctcgcagacaatcttgttgagttttcgactgtcatgccaggggccgacggaaacaactggattgttgaaattgttgatttgggaattaacgggaatgtagcaactccaggatacagcacactgcccgacggttcgagaaaattaacaatgatcacggacggtgccatgaccccgtcaaaaatgtacgatcagaaccagcagtataaagaaggactccagattggagaatatattaacgtcacattcggtggtgatcacgcaggaacggggactgtattcgcgctccccccaacaaatttatccggtggtaaagacgaatcgttcaaatataatgttccgacgttaattgcaggcagtcaaaaaaaagctggattgctcggtgggtctggaacccttcctcccgctgtatctgaaatactaaatcaggaggatgccattattgttgttgtccgcgtcgaagaggacagcgacgaaacaaaaatgcggcagaacgtcgttaacgggattaacgcattgttgacgtctgcgcaaataaatcaagtaacgccgagaattttaatcgctccagattatagtgctaacgattatattgcagaacaacttgaagtggtgacaaataaattacgaggcgttggatatatcgattcaccgcgaggcgctacgcctgctgacgttgtaaatcgtcgtcagaggtacggcggcagaatggaaattctgcgccctcgtgtttattctacgagtgatgttagtggtttatctcgtccgtattcagctatcgctgctggtttacgagccagaattgataacgaaaaagggttttggtggagcaaatcgaatcaaaatatctacggaattacaggactcgaacaagtcgatgattttataatcggtgaaacgaactgcacagcaaatctgctgaacgccagccaggtcagcacaattattcgctatgatggattcagacactggggtaactatctgtgtagcctcagtccccaatggtcctttgaatgcgttcgtcggacagctgacgtaattgaggattcaatagcccgggcaatgatgaccgattttattgatcgcccgatagacctgcacctcggaacagacgttgtagagtcgataaacgcgtatctgcataaattagaggagcagggcgcgattaacggaggacgggcgtggttagatgaagagttaaatacaaaagaaagtctggccgctggtaatctttatattaatgttgactttggaccgaaatccccggcacaaacaattacgttaatgtaccgcattaataatgattacacagttgaagctctggcctctctttttaaagaaacagtctaa

SEQ ID NO: 7451 - DNA, 390 bp, Escherichia coli
atgataagcgttgattcatttagaaaaataacaaaccctgtttttaatgacgagcatgggttatctataaatattatttgcgatattgacgggattggaaacgacattccattcaccgcaatgaaaaatgattgcgaggaacacggtagggttttatatgaaagagcgctgagcggggattatgggagcatttctaaatttgtaaaaaaagagcagacgcaaaaactccagactacattacggactgttggcgatctgtcaattgaggcattctcaattcagtgtgcagtagatgccggaaccgcatctgacgcgcaaatcgaaaatttggccgagcttaaagaagcaatagcgacgcgaattggtgaaaatagagaaggaataaaatga

SEQ ID NO: 7452 - DNA, 1185 bp, Escherichia coli
atggctgaaaataaaatttacgcagtactgacagaccgtggcgcacaacttgaagccgctgcgctggcatcgggtgtacccgtggtgctgaataaattcgttattggcgacgcaaacggaaacgacgacgtaacaccggacccggcacgaactgcattaattcacgagacgtatcgtggggatattaaatccgcagaaaatagcggtaaccaggttatctttacactttacgtaccgccagacactgggggctatactatccgtgaggtggggatattaacagataaaggcgagctgtactctgtggcgcgctcgccggacattttaaaacctacggacagcaacggtgcgctgatttcaatcacgtataaatacacactcgcggtgtccagcacatctacggttaatgttgtagtatatgacaactacgtaactcccgaggaagctgacaaaaaatatttgcagataagtaaaaacttatctgaaattcccgcaaatggtgaaactgctcagcaggctgcgcggaaaaatattggtatagatggggacgttgcatatagagataagggtaatgcatttactcatccaaatacttttaaagatgatgtgatttttgaagacgttttatcctctaaaaaacaaataaatataaacaaaccgggcactgatttgacgttgttttcatttgctggtttatcagatgtgtcgggcgattatttagatttttcgacccgtggagaaaacaatcagaaggttttttatagattacgcggagttcactatgatggcctggtgttactgtgcggcgggcagacgtataaatactggaatgaggctaatcttaaaccggttaaaacgattaacggggagtcgccggatgaaaatggcaacatagatataagtctttcaccggacccatcaccggaaataggtgttgttggcgcggttggtacttatgcgcttgtcgctattaatcatgcaccacaaatactcccgggctccatatgggctggaggggatttatattacgctagtataaataataccggttcatataacacggatattgccacaaaaccattttatgacacaccacttattggctcatggcgagccatggcgtattcacccggtggagtcggtgatattgggactgcctgttttttagctattaggattgcgtaa

SEQ ID NO: 7453 - DNA, 627 bp, Escherichia coli
atgacaagtcaaagcgtactgcctccgaacgcaataacccctgagagggcgcttgaggttgttttatctcacgtcggcgatctgcctggcgatattcgaattattaaaaatcccgatttgtgccctgcaaatctgttgccgtggctggcgtgggagtacgcggtcacctactggaaccccgactggagtgagcagcaaaaacgcgaaattattaaagcagctgcgtggcagaataagcaccgcggaacgcgtggagctgttgaacgagcgttattaactgttggctttgagagcaaaatgagagagtggtttgaagccacgcccagggacgacccgtatacattcgcaattaaaatatatctgctaaaaagcatggggttagatttagaactattgaatacatttattgcacaaatatttgatgcaaaaaattgtcgttccttattaaaagaaataaatttcgaaacgggtgtcgatggtgagttttttatagccggtacaccttacgcgaaaataggcgtaaacgtcccagcagacggcgacggcggtgtaaaaattaacggcgggctatatatatcgggctcaccaattgttagtttaaatgtggagatagggccaaatggctga

SEQ ID NO: 7454 - DNA, 921 bp, Escherichia coli
ttgataacatcaacagttcagaattcgatagtgaaaactattgatatgagtctgctgccgccgccagcattcgttaaaaccccgttattttcagatgttaaatctaatctactgtcagagctgcagatattatatccacaatttaacgcactcctggagtcagacccggccgttaaactgctggaaatagttgcatacagagaaatcattattacagctcgggtaaatcaggggatgctcgctgtattgctcgcgtttgcaaaggggagtgacctcgaccagattggcgctaattttgactgcctgcggctgttgataacgccagctaatcccgatgtaattcccccgactgaggctgtttacgagagtgacgacgagtatcgacaccgaatacagctatcatggtatgcgcggaatactgccggcagtacgaacgcctataactatttcgcgctgtcgagtgatcccgacgttctgtcagctcaggcgtacggcccgccggtgacccagcctggatacgtcgatatgtatgtcttgtcgcgaaccggcgacggcactccgcctcaatcactactgaatacagtgaatgcggccctgtctcctgacgatactcgaccgctgactgatttcgtgactgtaaaacctgcgtcgaacctgaattaccgggttgaggccgttatcgtagccgggctcggacccgaccagaacgttttgcttaacggtgctcagagcgatttggcgatatatgtggatacgcaacataaaatcggagcgacggcagctctgtcaggaatttacgacgcgatacatcgtgacggcactgaacgtgtgattctgatatcgccaacagaggatgtgatcgctggcgtcgggcaggctccgtactgcacagaaatcaaactcagcgtgcaaatggggtag

SEQ ID NO: 7455 - DNA, 390 bp, Escherichia coli
atgtccggacggggaaactcaacaaccgaaccaaccaatggcgtaaagatgcttggaatggaccgtaacaccggtaaacttttatcggggactgatcacattcgtcagtctatcgttgatattttaacgaccccgctggggacgcgtgtaatgctgccggaatatggcagcaaattatttgatcttgttgataatcccacagatccgtcgcttgctatgcgaataatcatggaaagcgctggcgcaatagcacgatgggaaccacgcgtcagaattgacagaataaatgtgttagcagtggatatcgggaaaataacaatattaattatcgcaacagatatcgaaacacaacagcgattagagtttaataatatggagctgatattttga

SEQ ID NO: 7456 - DNA, 903 bp, Escherichia coli
atggcccaatcggacgatgaatatgctgcagcggagaacgcgcgcaggctgcgtgacgcagttaaacgcggcacgatagctgcagttaaaatgaatcctccacgctgccgagtctcatttggtggcgaacaccagtcaggctggctgcagtggtttactcacgccacctcagaacgcgtcgactggagcgcaccatcagtgggcgatcccgttactgttgtttctgagggtggggatacgcggaacggtgtagttatgctcgggctgcacattgacgacaaagctccgccaagcaatgacccccatgatcatgtcactgcatactgtgacggggctacgatgacgtataacacaaaaaatcacactctgacatggcagggcgtaccggacggcgtggtaaaaatactcggtgagtctgaaatagaaatatttggacgcgcagatgttactattaatagcgaaaatgtagttaatatccatggtgggaaattaattaacgcagacgctgatattattaatgtcacagcgacagatacaattaacgcacatgctgatttagtgaacgttatagcaacgagttctgttagtgttactgctgcgaacagaatatcgctgacagctcaaacaatcagcgcgtgggctccgggtggtataacactagctggtccaacgcatattaccgagacattagtagtagataaattagcgacattccgtaacgatatttctgtcactggagataacggtggaacaggtaatatcacaactcgcggtagtgtgttagcagggcaagaggtgcaggaccgacaaggcacaataactgaagtccgcacaacgtataacggacacactcatatatgtccggacggggaaactcaacaaccgaaccaaccaatggcgtaa

SEQ ID NO: 7457 - DNA, 537 bp, Escherichia coli
atgagcggactggatgcatttgacgaatatcttgatcgcgttaaaggcgcggttttacaaataccgttcatcaaaacattcggaatttatccggaaattccggctggatttgaaacgccagctctgttcctggaaatcagcaactggtcacagagtgacgaatcggttccaggctcaattcagtcagtcgagctgtcgtgtaatttgtatttgctgcgtgaatttgcagctgatcagtacggactgaaatcgcagaatgcagcgctctatatgacgagctggatcaatgggcgaatgttcggtcccggaactaaaccggcaaaattcagcgacgcggaaccgtgcgactggattaaaaacgggcagtcagtcggttcgcattcagttcagtgcgtgtcgttcacgcaggttgtaggcgttggtccagatattttcgattatccctcacaggggaccctgaaaaatatatacgtcggaatagcaccagatatcggcgcagaacatgagggcgactattatggcccaatcggacgatga

SEQ ID NO: 7458 - DNA, 681 bp, Escherichia coli
gtggccgatttacgtagtaacgcgcagatgttcgatatcgatgtttcggcgctggagcagctcagagtcgaaatcagcgcgacgcaacatcaaatgttaatggtatacaacagggcgctgaaccgaactgcaaaacatatgcaccgaatttcagcaggaatgattttgactgcactggcagctaaaaatcataaggccgtagataaacgaatcaagccgttcattaagcgccgtaattttacaaaagaaggggcaggagacctgagcagcgccaagctctggtacggtctgaatgatttccgggtatctgagctaaaggggcgattacaaaatccacggaggcaaaaacagcctcgcgatcttgagaccggcctgtttttgaaaaccaaaaaaggcgctagaggggcaacttttacacccaaaagtgcagggctggcgatgatgagttggcccgattcattcgtagcgaaacgctacggtgcgaaaagtgtctggattcgactggatcgcggaggaatcgaagaggctcgcgtacctgtgcacgacgcgctggaggatgctatcgatgattatatttttgaaaacattggccctgtttttatgggcttttttgagaaagatttgcgcggtcgcgtgaaaggtaatgtccacgtagacccaaaaacaggtaaacgattatga

SEQ ID NO: 7459 - DNA, 381 bp, Escherichia coli
atgagctactacgatgacctccgggccggcgacgaggagatgatccgtgagtggggacggcccgttaaattacgcggtaaaaccgaccccattatcgctattttcaacgagccttacgcgcgcgttgacgttcctcacgctggttttattaccggtacagtaacgagcctgacggcgctctcggacgacgtcgctggcgttgttgcgcgtgacgtcgtccaggttccaaagcagcgcagcatcgaacctgacggctctgttacctggtctggctggaccgattacgtggttaaagagcctcaacctgatggcacagggctcacgaatatttttttagagcctcacacgtccagcgaaaacagcgagtattcaaaatactaa

SEQ ID NO: 7460 - DNA, 420 bp, Escherichia coli
atgagcacaaaaacagaattgctggcgcgtattgacgatctgagcgctcagctcggtcgcgaattaccgcgcagcgggactattgcggaactggaatcaatcgttgccggcgctgagtcagagctcgatattctgaacgagcaatccggtgacgcgggaggcatcgagattacagtgaatactgcgtccgggaccgataatgaactcgctcaatcaatcgcgagcgctatcgtttcacagtcacaagagcaggagctcgcaccggctacgcgccgcgtcaagttgcgtaacacgctggacgtttatcactacgtgaacgggcgtcgcgttcgcgagattgttgccgcaggccgtgaaattgttgttgattcaccggaggtcgcagaccttatcgcagctgatcacgtttacgctctatga

SEQ ID NO: 7461 - DNA, 1035 bp, Escherichia coli
atgagcgattcgtttactacgtcagaactgattaccgcgacacagcaggtatttaagttcaatccgttgtttttaaagctgtttttccgtgagacctacacgtttacgagcgaagaggtttttctggataaaatcccgggaaaagtgaacatggccgtgtactgcgcgccgatgatcaccggcaaagttgaccgcactcgcggctattcaacgaaccatttcaaaccgggttacacgaaacccaagcacacgatcaatccgaatatgagcatcaagcgcgcagccggtgagcagattggccagccggaaacgccggtcgaacgtcgtgcaaaaatcatcatgcagaacctgcttgatgaggaactgagcatcagccagctcgaagagttccaggcggtacaggctgttctgtacggtaaatacactgtttccggcagcaatatcgagacctatgagatcgacatgagccgcagcgcgacgaataacgtcactcagtccggttcgacagcctggtcgactcaggacgcggaaacgtatgacccgagcgacgatattgaatcctacgcggacctcgcctccggtgcggttaacgtgatcatcatggatggtaaagcctggaagcagttgaagcgttttaaaaaattctggacggcactggatacgcgccgtggctcaaacagccagctcgaggtcgcgctgaaaaacctgggcgacgttgtcagctttaaaggctactacggcgacactgcgctgtttgtctacaaagggcaatacctcgacccggtaacagacactgaaacgcgttatatgccggataacacgatgatccttggcaacacaaaaaaccgcgggctccgcacttatggcgcaattcaggacgaagacgcgctgaaagagggtatttccgaagcgacgcgctatccaaaagtctggaccactaccggtgatccggcagtgacgcaaacaatgacgcaatccgcgccagcaatggtcctcacggacgccgacgcgttcgttgtcgtaaaaatcgcgtaa

SEQ ID NO: 7462 - DNA, 330 bp, Escherichia coli
atgactacagaaacgtatagcccggacgattttattcttgggcctgaccttgttgtcacgaccgtcggtcattttcagggcgggatcaacgtaccccggctgacaccgattatgctcgacgctactgtcgggacgtttaaggtttgggacggctcagtcggtaaagctattggcctcactgccaccgcagttaatactggctccagttctgcagactgctcgtactataaatcaggctcgttccgttacacggcgattaactggggtacggttaccgacgtagctaaacgcaaatcagcatttgcgggtacgccgatcagcgtcggctga

SEQ ID NO: 7463 - DNA, 1308 bp, Escherichia coli
atgccgtggaacaattttccgcacctcgccgccagggcgttcaatcaaccgcttttgctggagcccacctacgcgcgggtatttttttcggcgctgagcgaccggttcggtaccgggcgactgattgatacagcgtctggagaggtaatgaacagcgacgaaatgaacgcgctcgcgatggggtgggacagcagcgagcgaacacgccagaaatcgtatcgcgtggagcgtggtatagccgttctgccggttaccgggacgctggttcataaattgggttatatcaacccagttagcgggatgagcggttacaacggaatcgcaaaacgcctgcagcaggcgatttctgatcccgatgtaagaggggtcctgcttgatattgactcccctggcggtgaagtcgccggcgcgtttgatactgctgatttaatcgcccgggcgcgagagcaaaaacctgtgtgggcgctggccagcgatacggcctgcagcgctgcctatttgctggcgtcagcgtgttcgcgccggctgataacgcagacaggcacagttggttcaatcggtgtcctgatggctcaccgctgcgtcgaaaaagcgctggagattgctggcgtcgacgtgacgctgatttacgccggcgcgcacaaagttgacgggaacccgtattcccagctgccaggcgacgttcgcgacgaattccagctgagtattaacagcacgcgcgagcagttcgcgcaaaaagtctcggattataccgggctgaaaaaatccagggtgctggccacggaagctgcagtatttatcggcgcggacgcgattaaatctggtctcgctgatcaactcgttaattacgcggacgctatcgcagtgatggccgacgcactgaaaccaaaaatggagcgctttatgtctggtacagaaaccacggcggagaccacgaccacagaacaaaccgcgaccacgactactgtcgcgcaggttgagtttaacacggagcagattcgcgcggacgccgcatcaagcgaactggcgcgtgtgatggccatcatcaattgtcccgaagctgttgggcgcgaggcgcaggcaaaagcgctcgctggcgtccccgggatgacggtcgggcaggcgcaggtagtcctcgctgcagcacctaaaacggcgcaggcgcggacagaaacggcgctcgatacactaatgagcactgaatcaccagcgactattcaggatgctggcagtactacggcaacaggaacaaccgcaaacgtctcgatgctggttgctgcagggcgttcaattttaggggatgaataa

SEQ ID NO: 7464 - DNA, 1575 bp, Escherichia coli
atgactgctccgcagcagctgctcgggcctgacggtaaaacgccactacgccgttacgcggggtataacggcggcggtcccggtttcggtggccagctgattgactggaacgcaccacagcagagcgccgacgcagcactgttgccgaatttttatcgcggtaacgcgcgagcagacgatctcgttcgcaataacggcgtcgcgtcgaacgccgtgcagctgcaccaggatcatatcgtcggcaatctgtttaagttgagttatcgccctaactggcgttacctcggcatatctcgcgaggacgccagggcgctggcgcgtgacgtcgaggtagcgtggactgaatacgccgaggaccctcactgcacgattgatatcgagcggaaacggacgttcacaatgatgatccgcgagggcgtggctactcacgctttcaacggtgaaacctgcgtacaaccagtctgggagagtagtgccggcagcgtttttcggacgcgattcaaaatggtctcaccgaaacggattcgaaatccgggttacgcagctgacactcaatttcgccgcgccggtgttgatatcgataaaaacggggccgcggtcgggtactggatagccgaggatacttaccctctcggcggagtcggtaaatgccggcgtatcccagcacagctcagcagcggcagacacgcattcatccacatattcgagccgctcgaggacggacagacccgcggggacaatattttttacagcgtcatggagcgcctgaaaatgctcgacacactgcagcaaacacaactgcagagcgccattgtgaaggcgatgtatgccgcgacaatcgaatcagagctcgacagccagcaggcgtttgaatatatcgccggcgcgggtactgatatcgactcgaacccgctgaattcgtttattcagagttacgtgacgtactacaacggcgcaaatatcaagctcggtggtgtgaaagttccccacctgcatcccggcgacaaactcagtttacagaccgctcagaatgctgatgctggttttagttcactggaaaaatcactcctgcgttacgttgcagctggcgttggcgcgtcatacgaagaacttagccgggactacagccaggtcagttactccagcgcccgggccagtgctaacgtcagctggcgatttttcatggggcgtcgacgttttatcgccgcgcgacaggcgtcgctgatgttctgctgctggtttgaagaggcgctggcacgcggaattatcaccctgccacgctcagctgtccggtcgttttatgaggcgcggaactcctggacgaacgcgctctggatcggcgctggtcgcatggcgattgatgggctgaaagaggttcaggagagcgccatgcgcatcacaactggcctcagcacgtatcagaacgaactggcgctgcagggacaggattacgaggaggttatggagcagcaggaatacgaaattcagcgccggcgtgaaatggggctgagcgaaccgtcatggtctgtatctcacccctcaaataccaacgataacggctggggaggtaactga

SEQ ID NO: 7465 - DNA, 234 bp, Escherichia coli
atgacgtcgcgcgaggttttaacagaacgactgctggaagcggaaatcgctctgcacaaattattaacgggtaaatcgaccgtgtcgctgtctcacggcgattcagcaggaaataaccggagctatcaatactcgcaggcgagtattgagcagctccgaacgtacattatcgagctgaaatcacagctcggtctgagtacgggacgccgtcggcccgtgggagttcgattatga

SEQ ID NO: 7466 - DNA, 1881 bp, Escherichia coli
ttgcgcgtgacgataccgatgacgggtgttgagtgggctgataaatatttttatctccctgagggctccagccacatcgctgggcactggacgactcagccggtccaggtagtgatgctcaatatgatgacgaacgacgcgataaaaatcgtgtctgttcgcaaatcagctcgtctcggttatacaaaaatactcgtcgcggcgctgctctatttcgctgagcacaaaaaacgtagtgccgtggtctatcagcctatcgatgacgaatcggatggatttgtcgccgacgaggttgaccccgctatcgccgaaatgccagtgattcagaaaattttccccgactgggataaaagcaacgagcgtaacaatctccagcgtaaagaaatgagcggcgcgattcttgattttcgcggcgcgagtgcaccaggaaatttccggcgactaacgaaacaggttgtcgagggtgacgaagttgacggctggccgctggaagttgccaaaaaaggcaaaggcgagggctcgcccatcgaactggcgctcgttcgaattaaaggggcagcgtacccgaaggcgatttttggttcgacgccgaccgttaccggcaaaagtcatatcgaaatgctcgaagacgctgccgatctgacgtttcgtttttacctgacatgtccgcattgtggcgaggagcaggtcctggtatttggtttcgacggtatcgaatacggcctcaaatgggataacagcctgcagaccaatgaggcgaaatcgtcgtccgcgtattaccagtgctgccactgcccggaacatttttactatcgcgatctcgaaaaaatggagttcggggggcgctggatagccgaggactgcacctggacccgagacggcattcatttttttgatcatgacggtggcgtcgttcgcgcgccgaaacacgctgcgatcgtgataaacgccctgtattcactaaacctcgatggatggggcgagattgtcagcgagtggctgaaagcgaaaggcgacccgctcaaggaaaagacgtttcataacacgacgctcggcgaactctggagcgacgtggccagcgagcagctggagcacgatattctggttaatcgccgggaaaaatacgccagccaggttcctgacggtgttgtttatataaccggcggcatcgactctcagacgtccgggcgctacgagtgttatgtgtggggctggggagccgaggaggagtgctggctgattgataaaacaatcgtcctcggtcgctacgacgaggaggacacgctgcagcgcgtcgacggagtgattcgcaaacaataccggcgcagcgacgggaccacaatcggcgtcagtcgctgggcgtgggataccggtggtatagatgcgcaggtcgtttataaccgctcgctgaaactcggtccgctgtgggtcattccaatcaagggcgcgagctcatacggccagccggtcgtaaatatgcctcgtacccgtaacgcgaataaagtgtatttgtcgttgattgggacagatacagcgaaagacctgctcgcaatgcgcctgcagctggaacccgactccaaatcggcgacaccaggtgcgattcattttcccaacgacgacgaaatattcagcacgacagaggcaaaacagctcgtctccgaggttctgatcccgaaactcattaacggtcgcgtcgtttatcgttgggacaaccagggccggcgaaatgaggcgctcgactgctgggtgtacggactggcagcgctgcgtatcagtaaaattcgtttccagctcaatctcgagacgctcgctgagcaacggaaaaaatcacaaaacaaactgtctctcgaggagatggccagaatgctcggagggagctaa

SEQ ID NO: 7467 - DNA, 567 bp, Escherichia coli
atggcaagtcaggctgaggttgcagcacatttactgctatctgatcgtcgtctgcgcgatctcgcaaaacttccgggagcaccagtcccacaaggacgtggtgattgggagctagacgcatggcgccatttttatattcgttatctccggagcaatagacgcgacacaactagtaatgacgaaccggaagcgggggacaattctcccgaaaaaaatcgcgagcagtggctgaaaaatgaggaacgacaggagcgaatcctgatggcacgagtaaaacgccgcattctcgctaaacgctacgcgccaattgaattaattagcgtcgctgtatctcgcgtcgccgttgaattacgtacccgcgtcgagtcgtggccaccacgcctgaaaaaggtctggccggagatgccgcaagaggcgagcagtgtattacgagaggagctggcgatagccttaaatgagttgtcagacatacgaatcgacttcagcgattacgatgtcagcgatatcgaacgcgatctcgacagggttgaatcccttgcgcgtgacgataccgatgacgggtgttga

SEQ ID NO: 7468 - DNA, 246 bp, Escherichia coli
atgaacagagaaaaaattgaagccttaatgagcgtaatattaaaagaagctgacccaaaaaagtttcctgagaagttatcagaggacgccatcgtatctttttatcgtgcgaactcctcttatctaaattgttcaactttaagagaatggctaagcggcgaagcagagccttcagatgagatacttcagaagattatggttcagaacaactggcgcgcaacaaaatggtcaaatcagttaccttaa

SEQ ID NO: 7469 - DNA, 480 bp, Escherichia coli
atgacggatcctaaatggctaatcgaggctcgaaaaaacctcggcattcgggaaatgaaagggaagcaacatgctgcagaaattgtgcagtactggaaagatatcaaacgcggcggcattaaggatgacgaaacaccgtggtgcgctgctttcaccggggcaatgctggaacgtgcgggtattcgctcaacgcgttttgagtctgcgaattcttatctcgattggggtaatgaactgaaggaacccgcctatggatgcattgctattctgtctcggtctggcggtggtcacgtcggctttgttgtcgggaaaaatgccgccggggatttaatgattttggggggcaaccaggcagatgaagtaaatatcaaagcttttcctcgttcccgcgtaacaggctaccgctggccagcaggtcaaacggatgttccacaatcacttccattggtgaatgctgagaaatctatctcagaagcgtag

SEQ ID NO: 7470 - DNA, 273 bp, Escherichia coli
atgaccctgcactctgtcctcatcaatgccaatgcaattatttgtctgatgttggcactacggttgatgttttttcaaaaaacaggccgctatcgttttttcatctcactaactgcttacctcgcgattctgtctgctgcgtggatagccctacgaattttttacgggaaatatacgcaggttgatcccgcagagttctttctcaacctcaccatctgtattgctgtctggcgggcacgagggaatatttcaaaaataacaggagacaggtaa

SEQ ID NO: 7471 - DNA, 384 bp, Escherichia coli
atgtctgaacctctaaccgctggcgttgctgctggctcggcgggggtgacgtttgctgcgttatttcctgaggcaacacctgcagtgatgatctgtgcgctggcaggcgcagctctctatgtgttgtcgtccgggcagcatcgattctggaagcaggttattttcgcactcatttcgtttgttggcggtgtgtattgcgctgagacagcgtcagccatcattaccggtattctgaacgcggtgctgagtcacctgaaccctcccgtaacagtaaaagtctctcccgccattggtgcactggttgcatcagtaatcagcgttacatcactgttgcggatcatgtcacaagctcgtttatggaaatcagataaggggatgaaataa

SEQ ID NO: 7472 - DNA, 672 bp, Escherichia coli
atgagtaacgagtatttattggaatatacccgcataaaactgcgcgctgcattgcgggatttgtctggtggttctaaggggcaactggaagcattgtgtgagcacccaccggcagacaaaaacgcatacccacgcaaacatattcaccgtgtgcagctggaggaccggaccgttgatgctctggttacgccagtttacgctctggaaagtttcagcagacgtcgccccgcgccgccgatgagtgattttgaatttgctgattcatcctggcggcgttctgtgaactcgctggatgcaagtcagcaagcgtggttgcgttattgctacggtggtaacctggcattcaaacaccaaacagctatttgtgaggctgtctggagtcgctataaaggaaacatccccgcgtcaactcagagaaaagtagttaagcgcctgctttcgttggtgtggttgtccgtgcaggcggtcgcagcagcaaataaacgcgaggattttaaggagatggccggatctaccctagcaggaatgctgtcggtttctcgttccacctggtgcgaaacatactccctgcactgggtaggaatgaaagaggcggtgagagcacttgatgaagtggcacttcttgcaactttgcatcattatcagaaccatttagacgacgtttgcgtataa

SEQ ID NO: 7473 - DNA, 294 bp, Escherichia coli
atgaaaaaaatcgacctgagaaaagctgcacgcagtcgcgcttgtactgtgcgtatccccggtgtgtgcaatcacaatcctgaaaccagcgtactggctcattatcgtctcgccggaacgtgcggcacagccatcaaacctcacgatatgcagggcgctatcgcctgcagtgcgtgtcacgatgccatcgacggacgtacaaaaacggattacgagcacgactcattgttgttgatgcacgctgagggagttttcagaacactggctatctggcgcgatgaggagtttatctga

SEQ ID NO: 7474 - DNA, 597 bp, Escherichia coli
atggcgcagcattcatttatcagggtatccggcggttcgctaatacccgcgacaccagacacgcaacgctggttgactgaacgagtcaaaccaggtgctgttgtgtatgcagatttcaaacaggcgcgtaatcccgcgtttcatcgtaaatttttctcacttctcaacctgggctttgattactggcatccgtccggaggggctatttctcctgcggagcgcgaactggttcacggctacgttaagttactggcgtattacggtggacacggtgatgtcatggcagagctggctgatcagtatcttctcgatgagtcggaaaagcgcgcggggagtatcagtgcggtgaagtcgttcgaggcgtttcgcgcatgggcgattatggaagctgggttttatgacgttcatcagatgccagacggcagtttgatgcgcgtacctcgttcaatctcgtttgcagcgatggacgatcttgagttcggtcaactgtattcagccgttttagatgtgctgtggaattatattttgttccgcacatttgcctctcaggaggccgctgaaaatgccgccgcgcagctgctggattacacatcatga

SEQ ID NO: 7475 - DNA, 180 bp, Escherichia coli
atgaatattcaagaatctataggcgaactaccggaaacatgccgggctgttatcaagcgtaaggacggacacatcgttggtgtgcgtgttctgaccgatgatgagcggattgccagcctgatggcgtttctcgagttggcagaaatagctggatatactattacaccccctgacgcgtaa

SEQ ID NO: 7476 - DNA, 642 bp, Escherichia coli
atgaaaaccttctatgaggactggcctgaaactttcgttagccggttagatatgttacgggcgttggatgatcgcggttcgacccggaggctctatcttgaacggaccggggcaatatttgacgctctggcagaagagatacgtacagtcgttgccgggcatcctgaaatcgacgtgagtgaacttgatatcgggccgctgtatcgctattacaaacgtggagaaaaggggaatccgctggctgacttacttattgagttggctccaccaacttgtgaacgggttcgtatatctcctgaagtgtacataatcccgtatctgttttttgcactgttgatagcgcaaggcgctgacaacgatgcccgcgattttttcaatatgatgatgcgaccgttaatcatcgcctaccgtttcaaacaactggcgcgatacctgggaacaaagggcggaggacgaccacagcacagattaaaaagcgaagccattgaactggctgatcgtttttttactgaaaacccgacagcgccattatcgcgtggcgtgcaatacatatccggtatttttgtggcgaaatactctgacccacctgcagcgtcgacgattagaaaatggttaattccaatttacaggagtgataaataa

SEQ ID NO: 7477 - DNA, 234 bp, Escherichia coli
atgggtacgttaggcaaccagccgtgcagaagtcgttatgagttcgatgattttaatttagccaatcgagctgcggctcttactaagttagcaaaagaaactggtgtatcggtggataccttaatcaaacttgaaattgctatgcaactgaatcggctcaactccatccttatcgaaaacggtgacaagatggacgagaatctggcaggtattggcgagatactgcagaagtga

SEQ ID NO: 7478 - DNA, 489 bp, Escherichia coli
atggctaccaacccaagagagcacgcccggcgagtgctggacacgttctggtgcgggcgtggtttccctgttgatccagcgaaaattgctcacgacatgggattagatgtttttattaccgatcttcctgggaaagtttctggcgcactgattaaacaaaaagatcaagatccagcgatctttctaaacagtgatgacaacaaagttcgtcaacgtttttcatgtgggcatgagttggggcattacatcgcccggcaagcatcgcatagcgatgaatatgagtacgttgatttacgtggcgaaaccgcaagcgccggaacgcatcctgatgaaatttttgcaaacaagttcgcagcagaacttctgatgccggtagatgaggtcagaaaactgcacgctgacggtcaaccaagttatataatggcgcattattttggcgtatctgacgatgcgatgacttatcgtttaaagaacttgaggttggggtaa

SEQ ID NO: 7479 - DNA, 606 bp, Escherichia coli
atgccatcggatgacgattttaacagccgtttcaaacaggaagtagcacgcagactgaaggattccctcaacctacaccgtcagttagcagaagaggttgagccggaggacgatgaaactccggttcagtctcctgacgaagcttcacctcagccaaaggtttcgcacgcccccaaaaaaacggctgtccgtattcgcggaatagccagaaaaagagctgccgaagctcgcaaaatggctgtagctgcgtctagcaaaagaattccaactgctacaccctctcaacaagtcacccgtactgagagtaaaatcttgaccgagttcacatctgtgaaacaggtgaattcacttgataccgagcatgagcgcaaacaactcaacaacaaagattttgaagcagaaatcgctctaaaaaaacgatacgggaaatggttcctgattatccttgctttccaacttctgataatgaatggtgtatttattgccgacggcgcaggtaagctggaatttgaggatttaacactacagttgtacatgggcggtactttgacagaggtattcggcctcgtgctggtcgtgacaaaatacctttttaaacgcaagtaa

SEQ ID NO: 7480 - DNA, 699 bp, Escherichia coli
atgggtacggcattaatttcaagctttattagtggtgcaatagctataatctctattgctatatctacttataatcagaatagaataaacaagctcaatgaatcactggatgtaaggagaaaacatcagtactatattgaaccgttaattcgctcagcttcagacttacaaagccgtatttataatatattagaattggggttcattgaagagttttatcataatgggaataagcgccaacaagattatgttatcaacaatactgtttttcttttttcccagttttttgcatggacagaagctgcccgcatagacattcaataccttagcctagaaaaaaataaaaaaatgagggagtttattagattacagaacaatattaactcattaatccaaacagacgtctttggtcagtattttatgtttttcataggagagcagagagctattgcagaaaagatgctgatatcaacagatactggatttgattgcataggttacggcagtttcacaaaggaaaattgctttatcaatgagccattttttttagatttaaacaatgaagtgataaatatgacaagagatatcggaatttataaagaaaggctaatcagaatacagcacgcgttaatcgatttaattaattttcttgatcctggcatgattcgatttgacggaaaaaaatatggaaaaatataa

SEQ ID NO: 7481 - DNA, 924 bp, Escherichia coli
atgagattaaaatactcagtactcttactcgccattgcccttacaggctgtgataacaaaaaagatgagatcggttgttcttcggaaataacccagtcagctctcatggatttattaaaaaaatctgcttatgaaggactctctgaacaggtcgataaataccctgatgtcactaatcagaccaaacgaagcacactggacaagatcaaactagccatctctgagatctccacaacatcaagtgacacgggcagcacaatgaaaacttgtgaagggaccgtgacgatgactctatctgcgaacgagtacgtccagctttcagatgcttacagaaagaattttaatcgtaatctcgataagcaaatggaaagcctgtttttggagaacaacgcaaacgccttttcaaaacgtatcacctacaccgtgcaggcgaccgacgatcagaaaaacgtttttgtaaaaacctctactgataatccgatatcagtgggcgccgctttactgacatcgctttccattatcaccccgatcgttgagcagcagaaaatccagcaggctaaggatgcccaacagagtcaaattgaagcggaacaacaggtgcaactcagggcgcaagaacaggctaagtatgaggcggagaagcaaatagagagacaggcacaacttcagccgcaaaaagctgacaaccttgatcagtcccgaatggcatttgcgaatgccgactctgatttgagtaccgtctggagcaagttaaccccggcgaagaaaaaagatttgctgccttctcagcgtcagtggatcaaaactaaggatgctatgtgcggtaaagtttcaatgcagggaacagatgctgaagtcaagaaaatggtcgactgccagacgcaaatgaccctttcaagaatcgctttcctcagaaaccaataa

SEQ ID NO: 7482 - DNA, 789 bp, Escherichia coli
atgacagtccaaatatctgcggaatccctttctccgctacatcataaccaacttcccgtcatcactactgaattgcttgccagtttgtatggcacggaagtaaatggtatccagcaaaacttcaagcgcaacatcgccagatttgtcgtaggaaagcatttttttaagctggaaggtaatgaattacgcgacttcaaaaacagactgacagatagtcagtcagttgctaaacatacccgatccctcattctctggacagaacgcggcgcagctcgccatgccaaaatgctggaaacagaacaggcctgggaagttttcgaaaagctggaagattgttattttagccagcgtccagagaggcggagtacaactaccgatgaccgtactcccttgcgtgatgccgttaatatactggtcggcaagaaaggcatgatgtatcccgatgcctacaccatgattcatcaacgcttcgccgtctctcacatagaacaactgtcacagacgcaaatgttagaggcgattgaatacatccactgcctgctactcgatgaaaatcacccaaccattccagatttttcttttatcaccactatcaaaaatggaaaagtgaccgggatgcgccatgttgccaaaggcgaacatctgatgacctttgacgctttcaaagagatcgctgagcgggcagggtatctggtgatccacagcgacaatctgcgaagtatgacactggataaattgatggtaatggggaaaaagtcggctatatccgttgctaattcagcattttga

SEQ ID NO: 7483 - DNA, 222 bp, Escherichia coli
atgtttggcgataaactggagttaccacggaacgggcggatagtgctctatatttcagattacaaagtaacccgggctgaggtgttggaaccggaaaaacatctggtcacgttaccggacattattgagttgtataagcgggtcggatatgtggacttgcatcgcgatgatgttcccgttgagtgtatggaatgtgaacaccggaggtttgaagttgattga

SEQ ID NO: 7484 - DNA, 225 bp, Escherichia coli
atgaaagaactttttcttgcatttgtgccccggtttattaatgaccagatcgcactgactgataatggtgaacaatatgaaattgcctgcagcatggtggatgtgaatcctggcgaacggtatgacgcgatgtgtgacctgaaaatatttacctggctgggttgggctattccgtgtggagaaccaaccaatattcgtccgtttgagagcagggaggctgtatga

SEQ ID NO: 7485 - DNA, 312 bp, Escherichia coli
atgaaatacaaacggtgggtgcgtgcggaagtcgtaatcatcaaacaatgtgcgggcagcatgacagttgaacgtatagggcagcttattggcagaaccggtgcagcggtacgcacaaaagcgcgcgagctgaaaatctgtatgtatctgcggggtaattatcaccagtcagtgaaatacctccaggaagatatcgagctggcaagggaattacatcagtcgggtattaatcgccaggatatcgcagaaaaactcgaaatgccgatcggagcggtgaatcagtttgtttattttgagcggagaatttcatga

SEQ ID NO: 7486 - DNA, 237 bp, Escherichia coli
atggccgggcaatcagattacctgccgcccggcttaccacacaaccgcgccaaatggccccaggaataccagcttaaagagcactacgacatgcgagcggcggcgctgatccgccaactctttgagaaacgtattccgaggggaagcgtgattgagcaaatcggaatgacgccagatacgtaccgggaatttttcagagagcgtctgaactactggagaggggtgatggaacaatga

SEQ ID NO: 7487 - DNA, 411 bp, Escherichia coli
atgaccaccactccaggcaaattagagtacccgtcggacaaaggacacatagacgacggtaaaaactatctcgacgtcattttgtggaatatgaacgtcgggccacgtgcgcgcactcgcgcggtttttgtgccaagacctaaagcaggcaatttttcaacccctgctaagcctgcccgtcaggcatccgtagccgcagcgccagcagtgaaacgtaagggcaaaacgcacaccgggatcgcgattcgcagaaatggtgagcggcaagtgaaactccacgaaacagcgacaacctggtgtgcctcaccgcatgaaacttacgacaagataaccgggcagcgcattggcgcgcctggtcgctgccgcctgctgctgagttccatcactccgatagcaaagaaaggggcgtga

SEQ ID NO: 7488 - DNA, 1416 bp, Escherichia coli
atgataaataacgcgattgcactgtacagcgttgacgcagaacaggctgttctgggctgtctgatgctgaataccgaccacgacagaaccaatgcggtatttgcgttactgaaaccggaaacgttttatatcaatgcgcatcaggttatctaccgggagatcaaaggattatttcaagctgataaaccaactgacctgataacactgaccgaactgatggaatcgaaggggctgtatgagcgcgtggggggattcgcatacctggctgaaatgagtaaggcggcgattccggcctcaatggtcaactacgcgaaaattgtacgtgaaaaagccattcttcgttatgccgtggaaaagttgaattcttgtctggagattatgatccagcctgcagatatgactgctactgacaggatcaccgccgttcagcaagtgattgggcaggtggccgaacattcccgtaccgggcataagggcggtttgcgtccggcaagtgaagtcgtcgatgactggatagatgaccttgagcgccgtttcaatgatccagcacatgcagccggactaacgctcggaatcgaaagccttgatcgcttaatggcaccaaagcaggcgttaagaggttcattggtcgttattggtgcccggccaaaaatgggcaagacagccgcgtttaataaaattgcggtgcattttgctctgaatcatcgtttgccgacgctggtatttagcctggaaatgactgacagaagtctcattgaacgcatggttgcgcaggaagcaaaggtcaattcggagattttttatcttggccctaacgatgaatctgaattgagtctcgcaatagcaaaggcgggggagattgccgaatccaacatgatgattgacagcacggcaggtgtaacccttgcgcatattgtcgctgaatgtcgaaaagttaaacggatgcgtggctcggttggcctggtggcaattgactatttgacgctgatgaagaccgaatcggcagagcgtagggatattgcgtatggcgatatcacaaccggtttgaagaacctggcaaaagagctggattgtgttgtggtcctgctgacgcaactcaaccgaaagcttgaagaacgtgccgataagcggcctaacccgagcgacagtaaagataccgggcagatcgaacaagattgcgatgtctggattggcctctatcgtgatgctgtttataacgaaaatgccgacccaaatctcatggaaatgttgctacgtctgaaccgcgaaggaccatcgggaacagcctatgccctgatgaaaaatggctcagttattgatatcagcgatgaggaggtttatcgccttaccaacgaccgctcagaaaaaaataaacgttattcccgtagcgataattctcgcacaaatgaattttaa

SEQ ID NO: 7489 - DNA, 756 bp, Escherichia coli
atgaacatcctcccgttacttgatagacccatagccttccagagaagttttatccgtcttgaaatgggcgtgactgccgcattgtttctgtcgcagttgacgtactggacaaacagaacaactgacgacggctgggtatataaaacccaggatgagtgggaagaggaaacagggctttcacgatacgagcaggagggcgcgcgcaaaaaactacgtggtctcggcgtcttgctggaacgtaaacagggcttgcctgccaggctgtactacaaaatcgataatgatgtgttgtgccagctacttacgtccgcatacaaggatgcggaaaaaccacatacaggtgaggggaaaaccaccaggcctgtacgtggaaaaccaacaaacattcttacagagaatactacagagattattactgatggtgaatcggctgacgccgacacccaacaacctgccgaccagagaataaattatcaggtgatactcgatacctatcacgagattttgccagagatgccaccagtgaaaatcctcactgacggcagaaaaaaacaccttcgcactttctggaaaaaattcaatttcaatgagtcccgttggcgggcctatctggaatttatcggtggcaattgtcgctggatgctggaggacaggccaaatggcaggggaggattctggcggcgtaaaaatcttgattatctgattaccgaacgctgctatgtttcggtcaaggaagaacgcgcaaatgataaataa

SEQ ID NO: 7490 - DNA, 225 bp, Escherichia coli
atgttaagacatattgaccgcattacctggcgtaacggctggcacctgaatggacgcccggcacatgttgcagagatccgccccatattcgatggccgcgtcgcagctgcacgttctgtatgggaaaagtacgaagaagaaaaagcgaaactgcgtgagcaaaatctctctggcgctgcctatgaggctggctgtcgcgttctctcagaggctttgggcatatga

SEQ ID NO: 7491 - DNA, 477 bp, Escherichia coli
atggaaaaccaagaggaattacaaaaagagattttgacctgggcggcaagggcagggcaggaactcgtcacgattgaaatctgccgggcctggttcagtcagggacgcaatgatgagttgagactacatgaatttgaggacgcggacggcaacgtggactggagagccatcaacaacaatcggcagaaaatctttcgctggttacgtggcgagacaacggcggcgcgccgaaaaactcaggtgctggccagtgtgatgaaagccgtgctacccgcagaacggcgggcacgtctggagtcgccgggcgatcccgttttgctggcaacgctggcggcaaaagaaggggtggaagcgattaacgctgtacatctccacttcgcgccagagttaactattcaggaaattgacgaagcaatagcggcgctggtagcgacgcgaggagcagtgatacgcactgcgcaagaccaccatgcatga

SEQ ID NO: 7492 - DNA, 231 bp, Escherichia coli
atggataaacaactgcaagacaaaattctttccgtaatgagtcaatccgagttagggcggcgattagggaaaaaaccacaaacggtaagcctctggttcaaaggacgggttcccggtgaagaggttttgcgcacatctgaagctcttgaatggcgcgtgacccctcatgatcttagaccggatctttacccaaacccagatgacagcttgcctaaaacggaagcagcttaa

SEQ ID NO: 7493 - DNA, 414 bp, Escherichia coli
atgaacacaaaaacgaaaaacatggcttttgctagccgactacaacggattctaaaagacttaggctggtctcaatctgagttagctcgccatattggggttacggctcaatcagttcaggcatggtgtaatggggtaactccaagaaaagataaattagacaagctagcaaaagtgaccggataccctgttcattttttcttcatgaatgaaggggaatatttggatgaatccacactacacccgggtaattacaatcaagaactaaccccgcaagaacaggctctactgcaactattcagaggactgcctgagagcgaaaaaaataaattaatcaatgagctaaaagaaaaaagagagcacttcgatctactgctaaaagaactacttgaagccaaaaaccagacaaaatag

SEQ ID NO: 7494 - DNA, 321 bp, Escherichia coli
atggaagcgcgcaccatcccagtaacactctttattcattatgcaacttcaactttcagccacgaaaagctgcttgttgcgactgttgatatgtcaaaaaattttccagacaggtacatccttctggaaagccgcgaaattgaaattaccgttaaccagcccgagccaatcgacatcatcggtttacaggtcgagcaactgcgtgaacaaaaacagaaaacagtcgccgacgcccaacagcgtattgctgctatcgatgacaaaatccagcagttactttgcatcgaatacacgccagataccgatgagctcccctactaa

SEQ ID NO: 7495 - DNA, 2217 bp, Escherichia coli
atgaccatttttaacggcttgttagaagcgaaaaaaggcgcgctcaaaaacggcgcgatcccggcgctggccatcgccatcgccgcccctaacaaaaaagttgccgagaacatcatcatcggcaaattgtgggaagcctaccctgaccacggcgacaactatttcaaacctaaaatctgggaagatgccccgggccaaccgcgcccaggcgtcggtgagtttgatgagacgtttgccacagaacacagttttgatggcgaaaaatgggtagttaacactcctgttgattcagattgcagttcagcagatatctcacaggttagcgacctgatgaaactgccggctcgtgaacgattcgccgccgttctgctgttcagccacgacgccaacgaagtcgacagtgaattgcttgtgcagacgcgtgaatacctggagatgctcgataacagtgatactgacagtgaggatgaggttgacgcgtttaaccgcatcgttcttgatgccatggtggcgtgtaagcccatcgagtacatgcatattgctggattgaataatctggtacatgcaattttggcaagttgcgatacccaggaacaaaacccgaccagttggactatctccaaatttataaaaaaatgggtagagaatcccggtaaacgagatgaaatgctgccggaggtaaaaccagaaacagcatccgcacgtccttacaaacagactcacgccactctggatcgtgaaattgcctgcgccctgttacctgttgccccggaaaaaatcacccccagcatcctgaaagcggcagacgaaataatcagtcaggacagggaagattttaaacgctggtcaatggccttgcgcacaacggatcagatccttgcctatgaccgcgcatcagtattcggtgttattcagagcgcccccgcaaaagacacgtaccacttcccacaatccctgcgcagtcacatcgacaactggctgcaagctaacgggcagcgtgatgcaaatgctgttgaagagaagccaaaggaagcagcacccaaggatgatgtaaaagtcaccaaccacggcggcggacgattctcaattgatgggatgatgtcagaaacaccctcaaatcagggcgaaaaaagcgaagctgcaaatgctggagaacgtagtttgcagcagttgcgtgagcagtttgtcacgcctcgccatgtgtatgacgtacctgaaaataacgccgtatcacagagggaacctgcagctattaccctggcagaagagactcctccacaagaacaacttagcgagcaggtaaaggatctggtgcagaacgttgacgcgctggttgagcggatccatgccgaagagcacaagcggcagaatgcaatctcagctatcgaaacggagttaaaggactcagatgacacggataacctggcattgtggaagaacgtattcaaaaccgatgagcgcttcaccagtgctttctctcagaatggcggcggcacatccatcaacggcacttatatagcgatgaaagcgactcgcgaatttgggccatttggtattggctggggggtagaggtgctggaggagcgctttgataaaggcgcaccaatagttcgcaaaaaacaggttggtgaaaaaatagaatgggatctgattcaagacggtgttggcgggtacctatgtgaaatgcaccacaccatgaaagtgagagtctggtacatattgaatggggtacgcggtgagtccgaggcttacggatgcacaccttatatctacgacactaaatacggaccaacaagcgacggcgaagcaccgaagaaatcctggacggatgctgttaagaaagcgctatcccctctcggattcagcgccgatattttcatgggcctgtacgacaatccggaataccgccagaggaataaagctgagtttgatatcaagaatgccagcgagaatgcggaagatgctacccgtctgcgtaaggaactggatgagaagcttatcaacgttgccaatacgctggccgccgcggtaaccgccaacgaagtaaacaaggtatttggcctcatcgcccgcgaagtggatgtacacaggaaagcagcggaaaccaaaggcgataaagaatattcatcgtatctgggatcacgtctgcgccgtatcaccgacattaaaactgaacgcctcgccgcccttaccgctgcacaggagcaaacagcatga

SEQ ID NO: 7496 - DNA, 570 bp, Escherichia coli
atgagcactgctatcgctattgcaaaagaatatgccagtctgattgacctgttagaaaccgccgatgaactgacgccagagatgatcgccgacacgcttgaaggcatggaaggagaactgggagacaaactggacgccatgatggtcatctgccgtaatttacagggcaatgccaatacctgcgctgaagaaatgtctcgcctggcaacccgtaagacgtcctttgaaggcaaggaaaaagcaattcgaaagcatatgctcacctgcctgcaagctgctggcctggataaactgaaaaccgcaaaaaacacatttactgatgcacagggggctatccgggtaattatcgatagcaaagataagatcccggatgagtatgagggcgtgtcacttgttgatgtagaaacggttattacaccaaacaagcgagccattaaagaagtgattgaatctgcggaggcggttgccgccgaaatactggcgcgtggagaaacaccaccagccgagttattaaacccggtaccaggcgcacatctggaacgcggcgaacggtcactgaggatacgctaa

SEQ ID NO: 7497 - DNA, 183 bp, Escherichia coli
atgcttaaactcacattaaagcgtggtgacgcggttcacctggtacttgccgatggtaccaatggcattattgaagcacggagccgctgcgaacttgggctacacctgccagaaaacattaaggtcactcgggagaaatcggcattcaccccacaagaactgattacgcctaatcagaaataa

SEQ ID NO: 7498 - DNA, 264 bp, Escherichia coli
atgaaaagcgatcacgacataatcaccagagaagaaatggtcgagctgacgggaagcccacttaaatcaaagcaatgtgaggctcttcgccgggctggaattttcttcatggaaagggctgacggacacccaaaaacaacctggggccatttcatgaacccaataaaatttcgcaatttacaggaggtgacgacgcgaaaagatgatgaacctgattttggagcaatatttaatggccggaaagagaaagaacccagcagataa

SEQ ID NO: 7499 - DNA, 1017 bp, Escherichia coli
atggccggaaagagaaagaacccagcagataactggatgccgcctcgtgtttaccagggcaaagcggcctacgaattcaggaataaagataacaaagcgatacgcctgtgcgcattggatgcaccacgatcagccgtatggctggcatatgaaaaagcggtcggtgacgaaaaagaaagaaatacttttcaggcgctcacggaacaattcatgacctcccctgattttatggatttggcagtcgaaacccggaaagactacacaaaatattccggaaaagttctgcctgtcttcgggaagatcgacccggataaaatcaaacctgaacatattcggcgctatatggatcaacgcggtttatcaagccgaactcaggcaaacagggaaaaaagctttatgtcccgggtattccgttggggttatgaacgaggttatgttcagaggaatccttgtcagggagttaaacagtttaaagagaaagctcgcgaacgttatattacggatgaagaatatcaggccgtttatgaagtgtctcctgatgttgttcgcgtagcaatggagattgcctacttatgcgtggccagacagagtgatgtactttcattgcagaaagaccagctgttcgattccgggatctacattcgtcagggaaaaaccggcgttaagcaaatcaaagcctggtcgcctcgtctgcagaaagcgatagctctggctcgttctctgccattaaaaacgggaatcagtagcctgtttgtgattcatcaaactaccggtggcaagtatacccgtgatggttttaactctcgttggcgtgatgtcaaagcggcagcacaggaaaaatatcctcatctgcaaatagacttcacatttcatgatctgaaagcaaaaggtatctctgatctggaaggcagcctggaagagaagcaagcaatttccgggcataagaacccgcgacagacagcagcatatgaccggaaagttaaagtagtgcccgtagttggtggccagagaaaatga

SEQ ID NO: 7500 - DNA, 723 bp, Escherichia coli
atgcaggatacggattttttcagctggcttcgcacgatgctgttgcgttttcagaggatggaggccgcagaagaggtctaccatgaaatagagcttcaggctcagcagctggagtacgattactattcgttatgtgttcgccacccggtaccattcacgcgacctaaagtggctttctacaccaattaccctgagtcgtgggttagttattatcaggcaaaaaattttctcgcaattgatccggtgctgaaccctgaaaactttagtcagggccatttaatgtggaatgatgacttattcagcgaagcacagccgttatgggaagctgcgcgcgcacatggtttacgccgcggtgtcactcagtatttaatgctgccaaatcgggcgttgggctttttgtccttttcccgttgcagcacgcgcgaaatacccattcttagtgatgaactgcaattaaaaatgcagctactggtgcgcgaaagtctgatggctctgatgcgtttaaatgatgaaatagtgatgacgccagagatgaatttcagcaagcgcgaaaaagaaattctgaaatggacggcggaaggtaagacatcagcagagatagcgatgattttgtcaatctctgagaatacggtcaatttccatcagaaaaacatgcagaaaaaaatcaatgcaccgaataagacgcaggttgcctgttacgcggccgctactggcttaatttga

SEQ ID NO: 7501 - DNA, 552 bp, Escherichia coli
atgatggtgcagcacctgaaaagacggccattaagccgctatcttaaagactttaaacacagccagacccattgcgcgcattgccgtaaattactcgatcgcattaccctcgttcgcgacggcaaaatagtgaataaaatcgagatttcccgcctggacacgctgcttgatgaaaatggctggcaagtggaacaacaatcatgggcggcattgtgccgattttgcggtgatttacattgcaaaacgcagagtgattttttcgatattatcggctttaagcaatttctttttgagcaaactgaaatgagccctggtacggtgcgtgaatatgtcgttcgtctgcgccgtttggggaatcatctacacgagcaaaatatttccctcgatcagctgcaggacggtttcctcgatgaaatcctcgccccgtggctgccctccaccagcaccaacaattaccgcatcgcgttacggaagtatcaacactatcagcgtcaaacgtgtaccggacttgtgcagaaatcctccagcctgcctgcttctgatatatattaa

SEQ ID NO: 7502 - DNA, 1344 bp, Escherichia coli
atgttaaacagtattttagtcatactctgcttgatcgctgtaagtgcgttcttctcgatgtctgagatctcacttgccgcctcacgcaaaatcaaacttaaactgctggctgatgaaggcaatataaatgcccaacgcgttctgaatatgcaggaaaatcccggcatgttctttacggtggtccaaatcggtctgaacgcagttgcgattctcggcggtatcgtcggtgatgcggcattttctccagcttttcacagcctgttctcccgctatatgtcggcagaactctctgagcaactgagctttattctctctttctcgttagtgactggcatgtttatcctgtttgcggatttaaccccgaaacgcatcggtatgattgcgccagaagcggtggctttgcgtatcatcaacccgatgcgcttctgcctgtacgtttgcaccccgctggtgtggttcttcaacggcctggcgaacatgatcttccgtattttcaaactgccaatggtacgtaaagatgacatcacttctgatgacatctacgcggtagtggaagccggtgcgctggcgggcgtgttacgtaaacaggaacacgagctgattgaaaacgtctttgagctggaatcccgtaccgttccgtcttcaatgacaccgcgtgaaaacgtgatttggtttgatctccacgaagatgagcaaagcctgaagaataaggtggcggaacatccgcactctaagttcctcgtctgtaatgaagatattgaccacatcatcggttatgtcgattctaaagacctgctgaaccgcgtgctggctaaccaaagcctggcactgaacagcggcgtacaaattcgcaacacgctgattgtgccggatacgttaaccctttcagaggcgttggaaagttttaaaaccgcaggtgaagacttcgcggtgatcatgaacgagtacgcgctggtggtggggatcatcaccctcaacgacgtgatgaccacgctgatgggcgatctggtcggtcaggggctggaagagcagattgtcgcccgtgatgagaactcatggctgattgacggcggcaccccaattgacgacgtcatgcgcgtgctggatattgacgagttcccgcagtcgggcaactacgaaaccatcggaggctttatgatgtttatgctgcgtaagatcccgaaacgcaccgattcggtgaaattcgccggctacaaatttgaagtggtggatatcgataactaccgcatcgaccagctgctggtgacccggatcgacagcaaggccaccgccctttcgccaaaactgcctgacgctaaagataaagaagaaagcgtcgcgtaa

SEQ ID NO: 7503 - DNA, 252 bp, Escherichia coli
atgcgtattaccataaaaagatgggggaacagtgcaggtatggtcattcccaatatcgtaatgaaagaacttaacttacagccggggcagagcgtggaggcgcaagtgagcaacaatcaactgattctgacacccatctccaggcgctactcgcttgatgaactgctggcacagtgtgacatgaacgccgcggaacttagcgagcaggatgtctggggtaaatccacccctgcgggtgacgaaatatggtaa

SEQ ID NO: 7504 - DNA, 315 bp, Escherichia coli
gtgctggttggctttgatccagcaagcggccatgaacagcaaggtgctggtcgacctgcgcttgtgctctccgttcaagcctttaatcaactgggaatgacgctggtggcccccattacgcagggcggaaattttgcccgttatgccggatttagcgttcctttacattgcgaagaaggcgatgtgcacggcgtggtgctggtgaatcaggtgcggatgatggatctacgcgcccggctggcaaagcgtattggtctggctgcggatgaggtggtggaagaggcgttattacgcttgcaggcggtggtggaataa

SEQ ID NO: 7505 - DNA, 957 bp, Escherichia coli
atgtggaaacgcttacttgtagtctctgcagtctcggcagccatgtcgtctatggcgttggccgctccattaaccgtaggattttcgcaggtcggatcggaatccggctggcgcgctgcagaaaccaatgtggcgaaaagtgaggccgaaaaacgcggaattacgttgaaaattgccgatggtcagcaaaagcaggaaaaccagattaaagcggtacgttccttcgttgcacaaggggtggatgcgatctttatcgctccagtggttgcgacgggttgggaaccggtattaaaagaggcgaaagatgccgaaatcccggtcttcttgcttgaccgttccatcgatgtgaaagacaaatctctctatatgaccaccgtcactgccgacaacatcctcgaaggcaagttgattggtgactggctggtaaaagaagtgaatggcaaaccatgcaacgtggtggaactgcagggcaccgttggggccagcgtcgccattgaccgtaagaaaggctttgccgaagccattaagaatgcgccaaatatcaaaatcatccgctcgcagtcaggtgacttcacccgcagtaaaggcaaagaagttatggagagctttatcaaagcggaaaacaacggcaaaaacatctgcatggtttacgcccataacgatgacatggtgattggcgcaattcaggcaattaaagaagcgggcctgaaaccgggcaaagatatcctcacgggttccattgacggtgtacccgatatctacaaagcgatgattgatggcgaagcgaacgccagtgttgaactgacgccgaatatggcaggtcccgccttcgacgcgctggagaaatacaaaaaagacggcaccatgcctgaaaagctgacgctgaccaaatccaccctttatctgcctgataccgcaaaagaagagttagagaagaagaaaaatatggggtattga

SEQ ID NO: 7506 - DNA, 1503 bp, Escherichia coli
atgacgaccgaccaacaccaggagatcctccgcaccgaaggattaagtaaatttttccccggcgtcaaagcgttagacaacgttgatttcagcctgcgccgtggcgaaatcatggcgctgcttggtgaaaacggggcgggaaaatcaacgctaatcaaagcattaactggtgtataccacgccgatcgcggcaccatctggctggaaggccaggctatctcaccgaaaaataccgcccatgcacaacaactcggtatcggcaccgtctatcaggaagtcaacctgctacccaatatgtcggttgctgataatctatttataggccgcgaacccaaacgtttcggccttctacgccgtaaagagatggaaaagcgcgccaccgaactgatggcatcttacggtttctccctcgacgtgcgcgaaccgcttaaccgtttttcggtggcgatgcagcaaatcgtcgccatttgccgggctatcgatctctccgccaaagtgctgatcctcgatgaacccaccgccagcctcgacacccaggaagtggagctattatttggcctgatgcgtcagttgcgcgatcgcggcgtcagcctgatctttgtcactcactttctcgatcaggtctatcaggtcagcgatcggatcaccgtcttacgcaacggcagtttcgtaggctgtcgggaaacgcgcgagctaccgcagatcgaactggtaaaaatgatgctggggcgcgagctggatacccacgcgctacagcgtgccgggcgaacattgttgagcgacaaacccgttgccgcgttcaaaaattacggcaaaaaaggaacgatagcaccgtttgatctcgaagtgcgccccggcgagatcgtcggtctggctggcttgctgggatccggacgtaccgaaaccgccgaagtgatcttcggtatcaaacctgctgacagcggcacggcgttgatcaaaggcaaaccgcaaaccctgcgatcgccacatcaggcttcagtactgggcatcggattctgcccggaagacaggaaaaccgatggcatcatcgctgccgcctcggtgcgggaaaatatcatcctcgctctccaggcccagcgcggctggctacgacccatttcccgcaaagagcagcaagagattgccgaacgctttatccgccagcttggcattcgcacaccttcaactgaacaaccgattgaatttctctctggcggcaatcagcaaaaagtgttgctttcacgttggctactgacccgaccgcaatttctgatcctcgacgagccaacccgcggcattgatgttggtgcccacgccgagatcatccgcctgattgaaacgctgtgtgctgacggtctggcgctgttggtgatctcctccgaactggaagagctggtgggctatgccgatcgggtgattatcatgcgcgatcgcaaacaggtggcggagatcccgctggcagagctttccgttccggcgatcatgaacgccattgcggcgtaa

SEQ ID NO: 7507 - DNA, 1023 bp, Escherichia coli
atgcctcaatctctcccggacactacgccgccgaaaaggcgctttcgctggccaacgggaatgccgcagctggcggcgctattgctggtgctgctggtcgatagcctggtagccccgcatttctggcaggtggtgcttcaggatgggcgtttgttcggtagccctatcgacattcttaaccgtgcagctcccgttgcgttactggcgattggtatgacgctggtgatcgccaccggtgggattgatctctccgtaggggcggtgatggctatcgccggagccacaacggctgcgatgacggtcgcgggattcagcctgccgattgttttgttaagcgccctgggcaccggcatcctggcgggattgtggaacggcatactggtagcgatcctcaaaattcagccgtttgtcgccaccctgatcctgatggtcgccgggcgcggcgtggcgcaactgatcaccgccgggcagatcgtcacgtttaactcgccggatctctcatggtttggcagcggatcgctgttgttcctgccaacgccggtcattatcgcggtgctgacgcttctcctgttctggctgttgacccgcaaaacggcgctggggatgtttatcgaagccgttggtatcaacattcgggcggcaaaaaatgccggggtaaacacgcggatcatcgtcatgctcacctacgtgttgagcgggctgtgtgcggcgattgcgggcattatcgtggcggcggatattcgcggtgccgatgccaataacgccgggttatggctggagctggacgccattcttgcggtggtgattggcggcggatcgctgatgggcgggcgctttaacctgctgctctcagtcgtgggggcgctgattattcaggggatgaacaccggaattttactttctggctttccgccggagatgaaccaggtcgtaaaagcggtggtggtgctttgtgtgctgattgttcagtcgcaacgctttatcagtctgattaaaggagtacgtagccatgataaaacgtaa

SEQ ID NO: 7508 - DNA, 1272 bp, Escherichia coli
atggcaaaaatatcagatttgaattgttatcaacacatggcatcagccgacaatgttaaaccaaaaaatgaagtcttaaatacctggtgtgtgggaatgaatgattttgctcgtaatgccgaggggcaggatagcagaaggaatattctatctcctggagcatttttggagtttttggcaaaaatatttaccctgggttatgtggattttagcaaatgctccaacgaagcgggtagaaatatgatggctcatattgagtcctcatcttatatcaaaaataatgatggcagtgaaataatgaattttgttatgaataatcctgaaggtgagcgtgcggattcatctaaggtgattatagaaatttcactttctactaccactactatggggactcgtcaaggacatacagccattatatttccacaatctgattttttgagttttcgttatgaaggtaagtcttttgaaagaaaagatgatagttcattacacctgattactaacaaggttctggcgtgttaccaacgtgaagctaacaagaatatggcgcttctattaaataatcatcagttgaactggaaggacgcaattgattataacgagttattagaaaagccattagccagtacattagaaaaaataaagaaagaacatctgctattaatgcctcatgtatgtgatgacacgattccatacttactaggcgaaggtggtatacttgaagaaataaatgatctgaaaacgttacatgataccagaattgctagtggtacagaaggtaatgatgaaattaataacatcaaaattaacctgtctaatattcttattgattccttagatgatgcaaaagttaatctcgaaaaggtcatcgattcgatgttgaagacttttttaaaattgccatatattaatgatgtaaaaattctggagtggtgttttaatcaaagtatgcaatattctgatgatactacaaagataaagcatgcccgctccgtgatcgatcatattgattttaactgcgatcagtctaaaatagctgagacattatttttcaacctcaataaagaaccctataaaaacagccctgagttacaggaattgatttgggagaagttggttgtatatgtcaatgattttaatttaagtaatcaagaaaaatcgcgcttaatactaaggctatttgatgatgttaaattggtttttgataaagtgcctctcagtattttagtgaatgatattttttttgaaggattttttcatgaagcaacctga

SEQ ID NO: 7509 - DNA, 339 bp, Escherichia coli
atgaagcaacctgattttgctaagtggtacttctatcaattacttaagagttatgagggagaacagatgtatcttaatgagttaggatatgtttatggtgatgaagaaaaaacaaaagaaattgtaaataaacttccgggttatgtcgttaagatttttgaagaaaagatcgataatgaattaaaaattagaacaagaaagatggaaaccctgcgggatgggaaaatcaatatatatgattatattaatgaaaaacagttagaaaaattaaatccaccgcaagatttacgttctgcaatagaaaaaattgggtggaagaatagacctatcactgcataa

SEQ ID NO: 7510 - DNA, 1020 bp, Escherichia coli
atgtcgatgataaaaagctatgccgcaaaagaagcaggcggcgaactggaagtttatgagtacgatcccggtgaactgaagccacaagatgttgaagtgcaggtggattactgcgggatctgccattccgatctgtcgatgatcgataacgaatggggattttcacaatatccgctggttgccgggcatgaggtgattggtcgcgtggtggcgctcgggagcgccgcgcaggataaaggtttgcaggtcggtcagcgtgtcgggattggctggacggcgcgtagctgcgggcattgcgatgcctgtattagcggtaatcagatcaactgtgagcaaggtgcggtgccgacgattatgaatcgcggtggctttgccgagaagttgcgtgcggactggcaatgggtgattccactgccagaaaatattgatatcgagtccgccgggccgctgttgtgcggtggtatcacggtcttcaaaccactgttaatgcaccatatcactgccaccagccgcgttggggtaattggtattggcgggctggggcatatcgctataaaacttctgcacgcaatgggatgcgaggtgacagcctttagttcgaatccggcgaaagagcaggaagtactggcgatgggtgccgataaagtggtgaatagccgcgatccgcaggcactgaaagcactggcggggcagtttgatctcattatcaacaccgtcaacgtcagcctcgactggcagccttattttgaagcgctgacgtacggcggtaatttccatacggtcggtgcggttctcacgccgctgtctgttccggcctttacgttaattgcgggcgaccgcagcgtctctggttctgctaccggcacgccttatgagttgcgtaagctgatgcgctttgccgcccgcagcaaggttgcgccgactaccgaattgttcccgatgtcgaaaattaacgacgccattcagcatgtacgcgatggtaaagcgcgctaccgagtgatcctgaaagccgacttctga

SEQ ID NO: 7511 - DNA, 276 bp, Escherichia coli
atgtctttagattcgctggcctgcgggcatgacaatgtcaaacagtcaaagattgtggcgttgacggtcagtctgggtcgtaaaaacttcctgttcttcggctctgaccatggtggtgagcggggagcgctactgtacagcctgatcgggacgtgcaaactgaatgacgtggatccagaaagctaccttcgccatgtgcttggcgtcatagcagactggccggtcaaccgggtcagcgaactgcttccgtggcgtatagcactgccagctgaataa

SEQ ID NO: 7512 - DNA, 216 bp, Escherichia coli
atggtactttctgattgttattcatgggataacgagcagtttggacatgcccgtctcggtgatccgcgtcgtacacgacgccttgtgtcactggcctcttctctcgctcagcatgcaggtctttctattgtgaaatcatcccactccactgctcaggttgaaagtgcgtaccgcctgatacgtaacccgtctgtgtccccggaagccattgcctaa

SEQ ID NO: 7513 - DNA, 765 bp, Escherichia coli
atgaataatcaaaccatcagaacatcggtaccagcactcgataaaactgtcagagtctgcaattacctttttagctctccaggcgccaccttcagccagatccagcaggatctggatctgccaaaaagcagcacatcatctttactgaatgcccttgtcgaacatcatctgttacgtcaggaaagagggcgtttttttcttgggctgaaattgtatgaatgggggaatcgatctctggagcagtttgacatcagtaaggtagcgaggccggttctagaaaaactgagagacagtactgatcttatctgccatctgggcattctcgatgaagtcgctccaatctatattttgaaactcgagagtacacaaccaattggcatcagaacgtgggtaggcaagaagttgccactccatagttctggagttggtaaggctttatgtgcgtggttacctcaagacgtcattgacacattgttgcctgaggaaacgttgccacgatttacgcaaacaactatcactcgtaaatctgatctaatacaggaatttgcacgtattcgtgaacgtggatgggcttttgataacgcagaggattcaccgggaatttattgtattgctgctccggtatttaatcagactcgtgaagtaattgcagctatcagcattagtggcgtggaaattcagatacctaaagaaaaaattgaatattattcaactttggttcttgatgcgtgtcaagaactatcggaaaaattaaaatatatctga

SEQ ID NO: 7514 - DNA, 900 bp, Escherichia coli
atgttgacagcgtttagaggtattttcccgccagttcctacaattgttgacgcacaagggaaactagataaggctggcatggccaggatgatcgaccatgttttagaaaatggtgcaaacgggatgttgatccttggcagtgggggagaattctcacaattttcttcccagcaacgaaaagagatagctgcattttgcttaagtcatgtagatggcaaagtgcctgttctggtggggatcgcctgcgcgggaactgcagaaactattgatttaggacatcatgcacaggagcacggagctgatggtgtgatggtggtgaatccgtattatgcaaaactcagcgatgatgcccggtttatgcattacaaatctattgccgattcacttaaaattccagtgtttctctataactttcctgatctgaccggtcaggatattgggcttgaggtcattacccggctggcccgggaagttccaaatatcgtgggtatcaaggataccatcgataatatcagccatacccgggaagtcatcaaccgtgtacatgcttttcgtccggatttcattatattcagcggatatgacgaatatatgctggataccctgttactgggcggccatggtggtattccggcgacattcaattttgctccaaatatcacacgtggtatttatcaggccgttatggaaaatgatcttgataaagcgcgttattttcagcaacaactggcaaaactgtctccgttatacacactggagcagcctttctttggcgtgataaaaactgccatcaaactgagtggactggacatatctactgcagttatggcaccggctcttccgctcagtgatgacaaggtcgccagggtgaaagccattctggaacacattcaccagtga

SEQ ID NO: 7515 - DNA, 1518 bp, Escherichia coli
atgaataagactccgatactcaaattaaataactcggatgatgtcgttattgccaggacagaacttcctgccggaagctggctggaatctgaaagtatggaaacacgtgaccttattccggcagggcacaaaattgctcttcgggatattccggccggcagtgccgttaaacgctatggacagataatcggttttgcgacccgtgacatccgacagggcgaacatattcatgtgcataatctcggtatggggagttttgagcgtgattatgcctgggggatagacagtcatcttccggaaaaggatgttcatcaggatacctttatggggatccgcagaaaagacggacgggtggcaacccgtaattatattggtgtactgagttctgtaaactgtagtgcaaccgtagtaagggcaattgaagatcatttccgtacccgtggtctcagtgattaccctaatgtggatggtattgttgccctcccacaaagttttggttgtgcctttggctctgacagcgaaatgatgaaagtcatgcggaggacaatggcaggctatgccacgcacgcgaactttgccgggatcgtgatcgtgggactgggatgtgaatcattccagattaaggacatgatgaatgcccacggattacatgaaagtcctgtattccatacaatgactattcaggaaagcggcggaacacgtaacgctatagaaaaaggtatttccttcattctcgacatgctcccggaagccaacaatgtcaaacgagaaccagttccggtatcagaaatcattctggctcttgagtgtggcggctctgatagctattcaggaatttccgctaatccggctctcgggtacgcagttgatcgcctggttcgccagggaggaacggctattctgtcggaaacatcggaaatttatggagcagaacaccttctgacacgccgtgccattagtcgcgaagttggcgagaaactaatccgcagaattaagtggtgggaagagtactgtaaacgtacagggagtgaaatgaataacaacccttctgcaggtaataaagcggggggactgaccactgttctggagaaatcgctgggagggatagcaaaagctggtacaaccagcttaatggatgtgtatgaatatgctgaaccggtgacagcaaaagggcttgtctttatggatacccccggatatgacccgatggcagtaaccggacaaatcgccggaggagccaacctgctgtgttttaccacgggcaggggatctgcctttggcgcaaaacccactccttgtctgaaactgtcaaccaataacgcactatggcaacggcagcgcgacgacatggatttaaactgtggcacgattgttgatggcgaagaaacaatagaacaggttggagaacgtatttatcagagaattattgagctggcttcaggtcatcgtagtcgaagtgaagagctgggttatgggagccaggaattcgttccttggataatgaactcaatcatgtaa

SEQ ID NO: 7516 - DNA, 1014 bp, Escherichia coli
atggaacgtaaaccagtactgggcatttttttaggtgaagctgccggcattggacctgaactggttgccaaagtcgtagctgatggtactgtctataaatattgcagacctgttctgattggcgatgcccgggtacttgctcttggacaaaagattgctggtgtgcattttcagtggaatgtcatcagtgatcccactgaagctgactggactacgggaaatgtaccattacttgatttgaaaaattttaatcccgaaaaactaactatgggcaccattgataccgactcaggttatgcaacaggagaatcactggtaacctgtatgtcattacttaaatcaggtaaaattgacggttttgtcttcgctccactcaataaagaagctttcaagaaggggggctgggatattgaggacgaacattatctctttgctgagcagttaggatatttggataaacctcgtggcctgttgaatgtccttggtgacctctgggtttttcgcgtgacgggacatattccattcaaagatattgccagccatattacaccagaaaatgtcagtcgttcgattcagttatgctatgacacattacgtatggcggccgttgaaaatccacgaatagcggttgcagcacttaatcctcatgccggtgatggaggaacctgtggtaaggaagaaattgatgttctcattccggtcattgaaggcttccgcgagaaagggatggatatgtatggcccagtaccgggtgatactgtttttattcatgcatttaatcatgaatatgatgctgtcgttaccctgttccatgaccagggacagattgccaccaagcttcattcctttgatgtgggcataactgtagccgcagggcttccatttgctattacaacaccggaacatggcactgcatttgatattgcaggcaagggaatagcaaaaactctggccacagagcgggctattgcagttgcagctagaatggcatctacagtgcataaagataattga

SEQ ID NO: 7517 - DNA, 1245 bp, Escherichia coli
atgttacaaataaaagccagaaccaagatacttgcgctattttgcgcaatgtcattcctaatgtatgtggaccgagtaaacttatcagctactgcggggttgattaaagatgaactcggactgagtaatacagaactcggcgttattttttctgcttttgcttatacctatgcagtttttcaaatcatcggtggctggttcgttgatcgacttggctcacgccgcatgatcattttttgtggcattatttgggttatagcaaccatggcgactggtttcgtcggtggctttatatcactattcctcgccagattgctattaggtgtaggggaaggtgcggcgctgccttctcaggcgcgagcgatcacctactggttcaagccgcagcagcgtggctttgttcagggcgttacgcactcattctctcgtttgggaaatgcgattactccccccattattgttgcattagtggcattttggtcttggcgtggcgcatttatcagtttggctattgtcacatttatctggttaatatcttggatcatatcgtataaagatgacccacgagaccacagcggtatgaccgaagaagaactagaaggcgtaccaattttcgagaaaaaagatctaaaagttaaagctgagcctactccatggagagccctgataaaacgaatgggaccgacaatgggagtttatttctgttacggatggacaagttggttgttttttacttggttaccaactttctttatgcatggtcgcggcatggatcttaagtcatcggcgctctttactgccggcgtatttctgtccggtgtagtaggtaatacggttggtggcgtaatcagcgacaaagtgctgaagatgactggcaatctagtagcagcccggcgtaacgtcattcttttcagctttatctccgtactatttctgctcgtcccggttataaatactgactcgttgctcattatgactatatgtctgagtgtggcgttcttctgtcttgagttgaccatagggcctatctgggccgtcccgatggatattacgccgaagtatgtgggaattgccagcggattgatgaacgccggttccgctgtcgccggcattatttcacctatcgtctttggcatcattatcgacaaaacaggcaactggagtttaccattctacggttccgtcgcattgcttattattggtatatttctgacgttcttcatgcgtccagataagtcattgtaa

SEQ ID NO: 7518 - DNA, 177 bp, Escherichia coli
atgaaaagaagaaatttcagtcctgaattcaaacgtgaatccgctcagttggttgtcgatcaaaattacactgtttctgacgctgctaaggctatggatgttggtctttccacgatgacggaatggttcaaacaactgcgtgatgagcgtcagggtaaacgccaaaagcctccctga

SEQ ID NO: 7519 - DNA, 558 bp, Escherichia coli
atgaatacagctataactttttctaacgagtcaccaaaagtctttttcaaagatggtcgcctggttaccacctctcaagctgttgccgactacttcgataaacaacataaacacgttttagctaagattgacacactcgactgctctcccgaatttacatcagccaacttttcggccgatgttcagactgtcgaaattggcaacggcgcagaacgtgaatcacgatgctacctgatcacaaaagacggcttcatgttcctcgtaatgggatttactggcaaaaaagcagccagactaaaagaagcttacattgaaaaatttaacgcaatggaagaagaactccacaaacgtcctcctgcagcacaaaactcccccgccccaaataatggatgcgcattactgatccacttcgataaacacggtcaggtcgagttcacagaaaaagtccccgccgatgcgatggtatgcacgctggaacggtttaaattttatctggagcaacatgggtggatcgttgcccgtaaagaacaattggtggaaaggttgatgcggttttaa

SEQ ID NO: 7520 - DNA, 1272 bp, Escherichia coli
atgcagcacaacacactaccgaaacacgatcagaaattgccgtttacacgctacgacttcggctgggttttattatgcataggcatggcgattggtgccggaaccgtgctgatgccagtacaaattggcttgaagggaatttgggtatttattaccgcagcgatcattgcttatcctgccacctgggtagtacaggacatttatttaaaaaccctttctgaaagcgattcctgtaatgactacaccgatattatcagtcattacctggggaagaactggggaattttcctcggggttatctactttttgatgattatccacgggatttttatctactctctctccgtggttttcgacagcgcctcgtacctgaaaaccttcggtttaaccgatgccgatctttctcaatctctattttataaagtcgccattttcgccgtactggtggcgattgcgtctggtggtgaacgattactgtttaagatttccggaccaatggtggtggtcaaagtagggattattgtcgtgttcggttttgcgatgatcccgcactggaatttcgccaatataaccgccttcccgcaagcctccgactttttccgcgatgtcctgcttactattccattttgcttcttttccgcggtatttattcaggtacttaacccaatgaatattgcctatcgtaaacgggaagcggataaagtactggcaacccggctcgcgctgcgtacccaccgaattagttatgtcacgctcatcgcggtgatcctgttttttgccttttcgtttaccttctcaattagccacgaagaagccgtttctgcctttgaacaaaatatctcggcactggcactggccgcgcaggtgatccctgggcatatcattcatatcacctctacggtgctgaatatctttgccgtactgactgcattctttggcatttatctcggtttccacgaggccattaaaggcattattctcaatctgttaagccgaattattgataccaggaaaattaactcacgcgtgctgactctggcgatctgcacttttatcgtcattacgttgacgatttgggtttcgtttcgtgtatcggtactggtgttctttcagttgggaagcccgttatatggcattgtgtcgtgcctcattccgtttttcctgatctataaagtctcacaactggaaaaacttcgcgggtttaaagcctggatgattctgctgtacggcattttgttatgcttgtcgccactgttgaagttgattgagtaa

SEQ ID NO: 7521 - DNA, 1395 bp, Escherichia coli
atgaaaaaatcgacattatctttagccatcggtttattattggcatgtagtaccggtatggcaaaaacacagcatttaacgctggaacaacgcatggcattgctggaagaacgcctggaagcggcagaaatgcgggcagcaaaagcagaggggcaggttaaacagcttcagacacaacaagccgccgagatccgcgaaattaaaaccgcacagggcaacacgccggtaaacggtcaatcaacgacggagtcagagaagaaaaacgccaccccgcctaatctcctgctttcagggtatggcgatttaaaaatctacggtgacgtagaatttaatatggatgcggaaagtaatcatggcctgctggcaatgaccaacgctgatgtgaatagcgatcccactaatgaacagtggaatctcaatggtcgtattctgttaggttttgatggtatgcgaaaactggataatggctatttcgctgggttctccgcacaaccgctgggggatatgcacggttcagtaaatatcgatgatgcggttttcttctttggcaaagaaaacgactggaaggtcaaagtaggccgttttgaagcctacgatatgttcccgctgaatcaggatacctttgttgaacattccggtaatactgcgaacgatctttatgacgatggcagcggttatatctatatgatgaaagagggccgcgggcgttctaacgctggcggtaatttcctcgtcagcaaacaactcgataactggtattttgaattaaacacgttactggaagacggaacatctttatataacgacggtaattatcatggacgcgatatggaacagcagaaaaatgttgcttatctgcgtccggtaattgcctggtcgccgacggaagaattcaccgtttccgcagcgatggaagcgaacgtggtaaataatgcttatggttataccgatagcaagggtaattttgtcgatcagtccgatcgtaccggttatggcatgagcatgacctggaatggcctgaaaaccgatccggaaaatggcatcgtggttaatcttaataccgcctatttagatgctaataatgagaaagatttcaccgctgggattaacgcgctgtggaaacgtttcgagctgggttatatctacgcacataataagattgatgaatttagtggcgtggtttgtgataacgattgctggattgatgatgaaggaacatacaacattcacaccattcatgcgtcttatcagttcgctaatgtgatggatatggagaactttaatatttacctcggcacgtattactccattctggatagcgacggcgataagatacacggcgacgatagtgatgaccgttacggcgcacgcgttcgctttaaatacttcttctga

SEQ ID NO: 7522 - DNA, 402 bp, Escherichia coli
atgtacgcaaaatcctttatcgctcttgatagcaacggacgtctgacgggcgcccgtactgtacaggccgcaccttatgctcactacacctgccacttgtgtggcagtgcactcagataccatccgcaatacgacactgaacttccctggtttgaacacactgacgacaggctgacagagcacggtcaacagtgcccttatgtcaggccggagcgcagagaaatacagttgattaaacgtctgcagcaattcgtaccggatgccttacccgtggtgcgtaaagccagctggcactgcagacaatgtcaccacgattattatggggagcggtactgcacacactgccagaccggaggattcagtattccccggacaactcaggaggaaatatgcgaattctga

SEQ ID NO: 7523 - DNA, 1152 bp, Escherichia coli
atgtcacttgtcaccgatctacccgccattttcgatcagttctctgaagctcgccagaaaggctttctcaccgtcatggatctcaaggagcgcggcattccgctggttggtacctactgtacttttatgccgcaagagatcccaatggcagccggtgcggttgtggtttcactctgttccacctctgatgaaaccattgaagaagcggaaaaagacctgccgcgcaatctctgcccgctgattaaaagcagctacggcttcggcaaaaccgataaatgcccctacttctacttttctgatctggtggtcggtgaaaccacctgcgacggcaaaaagaaaatgtatgaatacatggcggaatttaagcccgttcatgtgatgcaactgccaaacagcgttaaggacgatgcctcacgcgcgttatggaaagccgagatgctgcgcttgcataaaacggtagaagaacgttttgggcacgagattagcgaagatgctctacgcgatgccattgtgctgaaaaaccgcgaacgtcgcgcactggccaacttttatcatttggggcagttaaatcctccggcgcttagcggcagcgacattctgaaagtagtctacggcgcaaccttccggttcgataaagaggcgttgatcaatgaactggatgcaatgaccgcccgcgttcgtcagcagtgggaagaaggccagcgactggacccgcgtccgcgcattttaatcaccggctgcccaattggcggcgcagcagagaaagtggtgcgcgcaattgaagagaatggcggctgggttgtcggttatgaaaactgcaccggggcgaaagcgaccgagcaatgcgtggcagaaacgggcgatgtctacgacgcgctggcggataaatatctggcgattggctgctcctgtgtttcgccgaacgatcagcgcctgcaaatgctcagccagatggttgaagaatatcaggtcgatggcgtagttgatgtgattttgcaggcgtgccatacctacgcggtggaatcgctggcgattaaacgtcatgtgcgtcatcagcacaacattccttatatcgctattgaaacagactactccacctcagatatcgggcagctcagcacccgtgtcgcggcctttattgagatgctgtaa

SEQ ID NO: 7524 - DNA, 1281 bp, Escherichia coli
atgaataaactcattgaactcagacgcgccaaaatgttggcgctctctttactgcttatcgccgctgctacctttgtcgttacgctgtttttgccacccaatttttgggtgagcggcgtgaaggcgattgctgaagcggcgatggtcggcgcgctggcggactggtttgcggtggtggcgctgtttcgccgcgtgccgattccgatcatttctcgtcatacggcgattatcccgcgtaataaagaccggattggcgaaaatctcggtcagttcgtgcaggaaaaatttctcgatacccaatcgctggtggcattgattcgacgtcacgaaccggcgttgttgattggcaactggtttagtcagccagaaaacgcccgccgcgttggtcagcatctgttgcagatcatgagtggttttcttgaactgaccgatgatgcgcgtattcagcgcctgcttaagcgcgcagtccatcgggcgattgataaggtcgatctttccggcaccagtgcgttgatgctggagagtatgaccaaaaacgatcgtcatcaggtgctgctggatacgctgatcgcacagttgatcgcccttctccagcgcgataaatcgcgcaagtttatcgcccagcagattgttcgctggctggagagtgagcatccactgaaagccaaaattttgcccactgaatggctgggcgaacatagcgcggagttggtttctgacgcggtgaattctttgcttgatgatattagtcgcgatcgtgcgcatcagatccgccatgcgtttgatcgcgccacctttgccctgatcgacaagctgaaaaacgatcctgaaatggcagcgcgaaccgatgccgtaaaaagctatctgaaagaagatgaagcttttaaccgctatctcagtgaattgtggggggatttacgggaatggctgaaagcggatatcaacagtgaagattctcgtgtgaaagaacgcatcgcacgagcgggtcaatggtttggcgaaacgttaattgccgatgatgccttgcgggcgtcgttaaatggtcatcttgaacaagccgcgcaccacgtcgcgcctgagttttccgcattcctgacgcgccacatcagcgatacggtaaaaagctgggatgcgcgggatatgtcgcggcaaatagaattaaatatcggcaaagatctgcagtttattcgtgttaacggtacgctggttggcggatgtattgggctgattttgtatttgctgtcgcagctcccggctttgttccccctcggcaatttttag

SEQ ID NO: 7525 - DNA, 1413 bp, Escherichia coli
atgacgcgttatcaacatctggcgactctacttgccgagcggattgagcaggggctgtatcgtcacggggagaaattgccgtcggtgcgcagcttaagtcaggagcacggcgtcagcatcagcaccgtgcagcaggcgtaccagacgctggaaacgatgaagctcatcactccgcagccgcgttcggggtattttgtcgcacaacgtaaagcccagccgccagtgccgccgatgacgcgtccggtgcagcgcccggtggaaattacccagtgggatcaggtactggatatgctggaggcgcatagcgacagttccattgttccgttaagcaaaagcacgccggatgtcgaaacgcccagcctgaaaccgctgtggcgggagctaagccgggtggtgcagcataatctgcaaaccgttctcggttatgacttgttagccggtcagcgagtgttgcgagagcagattgcccgcctgatgctcgacagcggctcggtagtcaccgccgatgacatcatcattaccagcggctgccataactcgatgtcgctggcgttaatggcggtgtgtaaaccgggcgatattgtcgcggtcgaatccccctgttattacggttcgatgcagatgctgcgtggcatgggcgtgaaagtgattgaaatcccaaccgatccagaaacaggcatcagcgttgaagcgctggaactggcgctggagcagtggccgattaaaggcatcattctggtgccaaactgtaataatccgctgggatttattatgccggacgcgcgcaaacgggccgttctctctctcgctcagcgtcatgatattgtgatttttgaagatgatgtctacggtgaactggcaacggagtatccgcgcccgcggaccattcattcctgggatatcgacgggcgagtgctgctgtgcggctcgttcagtaaaagtattgcacctggcctgcgcgtgggctgggtcgcaccggggcgctatcacgataaactgctgcatatgaaatatgccatcagcagctttaatgtgccgtccacgcaaatggcggcggcaacgtttgtgctggaaggtcactatcatcgccatatccggcggatgcggcagatctatcagcgcaatctggcactttatacctgctggatacgggaatattttccctgcgaaatctgtattacgcgcccgaaaggcggatttttactgtggatagaattgcctgaacaggtcgatatggtctgcgtcgcgcggcagctgtgccgcatgaaaatccaggtggcggcaggctcgattttctcggcttccggcaaataccgtaattgtctgcgcaccaactgcgctttgccgctcagcgaaacctatcgcgaagcactgaagcaaattggcgaggccgtgtatcgggcaatggaataa

SEQ ID NO: 7526 - DNA, 165 bp, Escherichia coli
atggaattttacgaaaacaaagccaaaacgccgtttatcagacttgtgcaactctggcaggcggtgaggcgttggcggcggcaaatgcagacccgacgagtgttacagcagatgagtgatgagcggttgagggatattgggttacgcagggaggatgtggagtga

SEQ ID NO: 7527 - DNA, 3264 bp, Escherichia coli
atgagtctctctttcagtgaagcaaaattagaacaagcgatcattgaactgttacaggatcagggatatcaacacctgatcggcgataatgtcccacgttcgagcctcgatcaggtcattatcgaagacgatctccgtcattatttagcggcacgctaccagcctgatggcattactgaagaagagattcagcgactgatcaaacagttcaccacgcttccggcctccgatctttatgaaagcaacaaaacattttgtcgctggctggcaaatggttttctgttcaaacgcgacgatcggcaacaaaaagatctctatattgaattgctcgacacccggcatctacctgccgcactgcgccagatatttgacgccgaagatgtcccgttgcaacaggcggcggaactcccgccttcctatatgaatccgccgcttaaccggattaagattgttaaccagcttaaaatctccggcaaagataatcagactcgtattcctgacggcattctctatatcaatggtctgccattggtcgtctttgaatttaaaagtgcggtgcgcgagcaggaagccagtattggcgatgcctggaagcagctctgtaaacgctatcgccgggatattccgcaactgtttatctacaacgcgctctgcattattagcgatggcgtaaataaccggatgggcaacctgtttgcgccctatgaatacttttactcatggcgcaaagtcaccggtaatgaaaaccgtgaacaggacggaattccatcattgcactcaatgattcaggggctgtttcatccggtacgtctgctggatgtgattaaaaactttatctgcttcccggataaagccaagcacgaagtaaaaatttgctgccgatatccgcagtactatgccgcccgcaaactctattacagcatcaagcaagcgcgtaaacctttcggtagcggtaaaggcggcacttactttggcgcaacgggctgtggtaaaagttacaccatgcaatttttaacgcgtcttttgatgaagagcgtggagtttgccagcccgaccattgttttgatcaccgaccgcaccgatctggacgatcagctttctgcgcaaatgtgcaacgccaaaaattacattggcgacgacaccatcgttcccgttaccagccgtgaagatttgcgtaatcaactggcaggacgcaatagtggcggagtctttctgacaacgatccataaattcaccgaagacaccgaactcctttctgaacgcaacaatatcatttgcatctcggacgaagcacatcgtagccaggttaacctcgaccagaaagtcatcgttgataaagaaagcggaaaagtgcgcaaaacgtatggctttgcgaaatacctgcacgattcactgccaaacgccacctatgttggctttaccggcacaccgattgacgcgacgctcgatgtcttcggtgaggtgatcgacagttacaccatgaccgaatccgttcaggatgaaatcactgtacgcatcgtgtacgaaggccgtgcggctaaagtgatcctggactccagcaaactggaagaagtcgaaaagtattacgaagagtgcgcaaacgcaggcaccaatgagtggcaaatcgacgaaagcaaaaaagccaccgccaccatgaatgcggttctgggtgatgaagatcggttaaaagccctcgcagaagattttgccaaacattatgaaaaacgcgtagccgaaggttccaccgtaaaaggcaaagccatgtttgtttgtgccagccgtgaaattgcctgggatttctaccgtcagcttaaagctattcgccctgcctggtttgaagtgaagcaagcacccgatggcgtcgtcctgacggaacaggagcagaaagagttaccgccttcagaaatggtgaagatggtcatgacgcgcggtaaagatgacgacgaggcgctttatgatttactgggcacaaaagaatatcgcaaagagctggataagcagttcaaaaacgctaaatcgaatttcaaaattgccattgttgttgatatgtggctgaccggtttcgacgtcccggaactggataccatctatattgataaacccttacaaaaacataatcttatccagactatttctcgcgttaaccgtaaactggaaggcaaaagtaaagggttagtggtggactacatcggcattaaaagtcagatgaaccaggcactggcaatgtattcccgcattgatgccaccaactttgaagatattcagcaatcggtaatagaagttaaaaaccatctcgatttgttggggcaagtcttttacgaatttgacagtcgggattattttagtggtgagccacaagcgcaattatcctgcctcaaccgcgcggcggaatttgttctgcgtacccagaaagttgaacgtcgttttatgggactggttaaacgcatgaaagccgcctacgacgtctgctgcggcagcgaagcattatcacagacagaacgtgactatattcactattatcttgctgttcgttcaattgttttcaaactgacgaaaggtgacgcaccggatgttacccagatgaatgcacgcgttcgtgaaatgattgcagaagcgttaaaagctgatggcgtagaagaaatttattttcttggcgataaaaaagcggaatccatcgatatttttgacgaagattatctggcgcgaattaacaagatcaaacttccggcaacgaagatccagttattacaaaaattactggaaaaagcgatcagcgacttcaagaaagtgaaccagttgcaagggattaacttcacccgccgcttccaggcgattatagatcgttataatgagcggcgagaagatgatgtactcaacggtgaagaattcgatacattcagtcaggaaatgaccgatattatctatgatattaaaaccgaaatgggcacctgggccgatttaggcattgatattgaagaaaaagcctttttcgacattcttgctcatatgcgcgataaatatcagttcacctatgacgatgaaaaaatgctgtcactggcaaaagagatgaaaagcgtggttgacaacacatctaaatatcctgactggagtaaacgcgatgatattaaagcgaaactgaaagttgaacttattctgcttctacacaagcataagttcccgccagtagcgaatgatgatgtttatatgggtgtgctggcacaggcagagaattttaaagaacaccatatgagttctttaaattaa

SEQ ID NO: 7528 - DNA, 1305 bp, Escherichia coli
atggggagtaagtggtgtatatatcgcttaggtgatatagctgaattttcatacggaaaaatgcctaaaaaggagtttgttggtacaggtgactatgtcattttttcaggatataaatacacagaaagctaccctgaaaaaaatacttcggcaggtgagttaattgttgttgcccgaggtgttggtggaactggcgatgttaaaataacgactagagattgttatttaacaaatttgtccattaaaataaatttggatgaaacaaaagtaagaaaagaatatttttattatctgtttctacagagtaatttacgatatcttgatagcggttctgctcaaagccaaataaccatcaatgatctagcgaatgtagaaatatctgctccttcgctaaatgttcaagatttaatagtcaagagtctcaaagcttttgatgacaaaatcacaacactttcatccatgaaccaaaccttggaacaaatgtcccaaaccctgttcaaatcctggtttgtggattttgatccagtgattgataacgctctggatgcaggaaatccaatcccggaagccctgcaaactcgcgccaaattgcgtcaaaaagtacgtaatagtgcagattttaaaccgcttccggcggaaattcgctcgcttttcccaagtgaatttgaagaaacggagttgggttgggtgccaaaggggtggaaagaagggacgcttccagagatagcttttataaactccacatcgtggactaataaaaatcaaccagattatatcaattatgtagatctctctaatgcgaaagatggcagaatatactcaattgaaaaattatcatttaatgatgctccaagtcgagctcgaagaatattaaaaaaagatgatctgatttttggccttgtcagacctgctaacagatcatttgcatatgtacatgttgatggtctaacgggtagcacaggctttgccgttattagagcccaaaagacgatatataaaaatttcatttattactttgtgacctatgataaaaatatagaagaactagcgagaattgctgatggtggagcatatcctgctataaaacctgatgatatttgtacattacctctaattattccatcaataaatataattgagaaatttgatgaattaacaagcaatttcagagagatgatgaataactcattaattcaaaacgaatatctcaccaacctccgaggcaccttgctcccgaaactcatctccggcgagctatccctggaagatcttccggatctcaccaccgatacagaagccgcataa

SEQ ID NO: 7529 - DNA, 1620 bp, Escherichia coli
atggccaaagcaccaactaaaaaagccaaagcaaaaaaaggctttgaagaaacattatgggataccgcaaaccaacttcgcggtagcgttgagtcctccgaatacaagcacgtggtgttaagcctcgtgttcctgaaattcatcagcgataagtttgaagcacgccgcaaaaaaatgattgccgatgggcaagctgacttccttgagatggaagtgttctaccagcaggacaacattttctacctgccggaagaggcgcgctggtcgtttatcaaacaaaatgccaaacaggacgatattgcggttcgtattgacaccgccctctcgacaattgagaaacgtaacccaaccctgaaaggcgcgctgccagacaactacttcagccgtcagaatctggaaaccaaaaaactggcgtcactgattgataccatcgacaacatcgaaacgctggcacacgaaactgacgttgaaacgttgtcgaaagaagacctggtcggacgcgtttacgaatacttcctcggtaagtttgccgcaaccgaaggcaaaggcggtggagagttctacacgcccaaatgtgtggtcacgctgttaactgaaatgctcgaacccttccagggcaaaatttatgacccgtgctgcggctcggcagggatgttcgtgcagtcggtgaagttcgtcgagagccatcagggtaaaagccgtgatatcgcgctgtatggtcaggaactgacagccacgacgtataaactggcaaaaatgaacctcgccattcgcggtctttcagctaacctcggcgaacgcccggcaaacactttctttagcgaccagcacccggacctgaaagccgactacattctggcgaacccgccgttcaacctgaaagactggcgcaatgaagccgaattaaccgaagatccacgctttgccggttatcgtatgccgccaaccggtaacgccaactacggctggattttgcatatgctctccaagctgtcggctaacggcacagcaggttttgtgctggcaaacggttcgatgagttctaacaccagcggtgaaggcgagatccgtgcacagatgatcgaaaatgatctgattgactgcatgatcgccctacctggacagttgttctacaccacgcagatcccggtgtgtttatggtttatgaccaaatcgaaggctgccgacccggccaaaggttatcgtgatcgtcagggcgagacgctgtttattgatgcgcgtaacctcggcaccatgattagccgcacaactaaagagttaacggcggaagatattgccacaatcgccgatacctaccatgcctggcgcagcacgccggaagaactggctgcacggattgcgcgtggtgacagcaagctggaaaaatatgaagaccaggcaggcttctgcaaagttgcgaccctgcaagatattaaagataacgactacgttctgacaccgggccgctatgtgggtgcagccgagcaggaagaagacggcgtggcatttgagaccaaaatgcgtgaattgtcgaagacgttgtttgagcagatgaagcaggcggaagaactggatcgtgcgattcgccagaatctggaggcgctgggttatggggagtaa

SEQ ID NO: 7530 - DNA, 1167 bp, Escherichia coli
gtgaaaaactataaagttattaccccgctttttcctacctatgcacaggttaaagctatgatgaaagccgtctcaggctattccctgaaagcggtacgcaatatgattaccgccattcgcgatcaaaccggtacgccgcaaaaacccgttgactggtcggaacctgacctgtggatcagcgaacgcttaacgggcgaagatgccgacatcgcccgtcgtatttgggatacagataatcacatattgaacccgcgccacagctacggctgctacttattcctcaactatccccagtttgagctgatggaaagcacgccagatgatacctggcagcccacctcgcgcgggcaaaaattcctgcaagatgacgaaaaaacgctgcgttcactggatgaccaggaaggcattctgcaactgcttgagctgctggctggccgagaaatgtcgcgccgcgccgatttattgccggaatggcaggcctttttgcatcagcattcgaaattcgcgtctgcaagttcagtgaaaagcacgctctactcccgtctctataaccttattgaccgtggcatggttactcgcgaaggtatgagctattgcatcaccgataccggacgcgcctggcttggaaaagcgttgccagcacgaaaaagcgatccgcgtaaagagctgctggaagcggtgaaacgctacaacgagcagcaaaaagagctgctgcgcgaacaaatcagcacaatgaacccgtacaaatttgaacaactggtcggtcaattactggaagcaatgggctacgagcaggtcgaagtgaccaaagcctcaggcgataaaggtgtggacgtgattggtcaggtgcaggtcggcatcaccactattaccgaagtggtgcaggtcaaaagaatgcagaacaccatcactcgaccgtatatcgaccagttgcgcggagcgttgccttaccacaaggccattcgcggtacgctcatcaccaccgggaaatttgcagcgaaatgtgcagaagcggcgctctttccgggggccgcgcccattacgcttatcgacggcgatcgcttactggaactgttaatcgaaaataacgtcggcattcgccgcagcaatgcagtggaattgctggatgtggatttgcagttgtttgatgagctggagatggattaa

SEQ ID NO: 7531 - DNA, 1203 bp, Escherichia coli
atggaccgcgtccttcattttgtactggcacttgccgttgttgcgattctcgcactgctggtaagcagcgaccgcaaaaaaattcgtatccgttatgttattcaactgcttgttatcgaagtgttactggcgtggttcttcctgaactccgacgttggtctgggcttcgtgaaaggcttctccgaaatgttcgaaaaactgctcggttttgccaacgaagggactaacttcgtctttggtagcatgaatgatcaaggcctggcattcttcttcctgaaagtgctgtgcccaatcgtctttatctctgcactgatcggtattctccagcacattcgcgtgttgccggtgattatccgcgcaattggtttcctgctctccaaagtcaacggcatgggcaaactggaatcctttaacgccgtcagctccctgattctgggtcagtctgaaaactttattgcctataaagatatcctcggcaaaatctcccgcaatcgtatgtacaccatggcagcaacggcgatgtccaccgtgtcgatgtccatcgttggtgcatacatgaccatgctggagccgaaatacgtcgttgcggcgctggtactgaacatgttcagcacctttatcgtgctgtcgctgatcaacccttaccgtgttgatgccagtgaagaaaatattcagatgtccaacctgcacgaaggtcagagcttcttcgaaatgctgggtgaatacattctggcaggtttcaaggttgccattatcgttgcggcgatgctgatcggctttatcgccctgatcgccgcgctgaacgcactgtttgccaccgtgactggctggtttggctacagcatctccttccagggcatcctgggttacatcttctatccgattgcatgggtgatgggtgttccttccagtgaagcactgcaagtgggcagtatcatggcgaccaaactggtttccaacgaattcgttgcgatgatggatctgcagaaaattgcttccacgctctctccgcgtgcggaaggcatcatctctgtgttcctggtttccttcgctaacttctcttcaatcgggattatcgcgggtgcggttaaaggcctgaatgaagagcaaggtaacgtggtttctcgcttcggtctgaaactggtttacggctctaccctggtgagtgtgctgtctgcgtcaatcgcagcactggtgctgtaa

SEQ ID NO: 7532 - DNA, 210 bp, Escherichia coli
atgaagaaatatataccagtggtattatttgttttttcatgtcaggtattttctgctgatattcatggacgggttgtgcgtgttctggatggtgataccattgacgtcatgttatctcagcatccggtgcgtgtccgtcttgttaatattgatgcacctgaaaagaaacaggactatggccggtggtcggtaatggtgccaacttactga

SEQ ID NO: 7533 - DNA, 558 bp, Escherichia coli
atgacagagcagaagcgaccggtactgacactgaagcggaaaacggaaggggagacgcctgtccgcaggcggaaaaccatcatcaatgtcaccacgccaccaaagtggaaggtgaaaaagcagaagctggccgagaaagcagcccgggaagcggagctggcggcaaaaaaagcgcaggccagacaggcgctgtccatttatctgacgctgccctcgctggatgaggcggtgaacactctgaaaccctggtggccgggattgtttgacggtaacacgcccaggcttcttgcctgtggtatccgggaggttttactggatgaggtgtttcagcggaatatcccgctctctcataaaaaactcagccgggcgctgaaagctatcacccgttcggaaagttatctgtgtgcaatgaaagccggcgcctgccgctatgatacggaaggctatgtgacagaacatatcacacaggaagaagaacagtatgcgcaggcgcgcctggaaaaggtgcgcagacagaaccggatcaaggatgagctgcgggcgatcctggcggaataa

SEQ ID NO: 7534 - DNA, 747 bp, Escherichia coli
atgacaacggataacacgaacacgacacgtaacgattcactggctgcacggaccgatacctggtttcagtcatttctggtctggtcacccggacagcgggatatcatcaaaacggtggcactggtgctgatggtactggaccacatcaatctgatattccagctgaagcaggaatggatgtttctggccgggcgaggagcctttccgctgtttgccctggtgtgggggctgaatctgtcccgtcatgcgcatatccggcaaccggccattaaccggctgtggggatggggaattattgcccagttcgcatattatctggcaggctttccctggtatgaggggaatatcctgtttgcctttgcagtggcggcacaggtgctgacgtggtgtgaaacgcgcagtgggtggcgtacagcagcggccattcttctgatggccctgtgggggcctttgtccggcaccagttacggcattgccgggctgctgatgctggcagtcagccaccggctgtaccgggcggaagacagagcggaacgtctggcgctggtcgcctgcctgctggctgttattccggcgcttaaccttgccaccagtgatgcagcggcggtggctggtcttgtgatgacggtgctgaccgttggtctggtgtcctgtgcaggaaaatcattaccccgtttctggcccggggattttttcccggtattctacgcctgtcatctggctgtgctgggcgttctggcgctgtga

SEQ ID NO: 7535 - DNA, 2325 bp, Escherichia coli
atgagttttaacgcaaaggatatgacccagggcggtcagattgcgtccatgcgtatccgcatgttcagccagatcgccaatatcatgctttactgcctgtttatttttttctggatcctcattggtctggtcttatgggtaaaaataagctggcagacgtttatcaacggctgtatttactggtggtgtacgtcactggaaggcatgcgggatttaataaaatcccagccggtctatgagatccagtattacggcaaaaccttccggatgaacgctgcccaggtactgcatgataaatatatgatctggtgcggagagcagctatggtctgcattcgttctggcgtctgtcgtggccctggttatttgcctgatcaccttctttgttgtctcctggattctggggcatcaggggaaacagcagagtgaaaatgaggtgaccggcgggcgtcagctgacggataacccgaaagaagtggcccggatgctgaaaaaagacggcaaggactccgatatccggattggcgacctgccgattatccgggattccgaaatccagaacttctgtctgcacggcacggtcggggccggtaagtcggaagttatccgtcgtctggccaactacgcccgtcagcgcggtgatatggtggtgatttatgaccgttcaggggaatttgttaaaagttactatgatccctccatcgataaaatcctgaatccgctggatgcccgctgtgccgcatgggatttgtggaaggagtgcctgacacagccggattttgataataccgcaaatactctgatccctatgggaacaaaagaagacccgttctggcagggttcagggcgtaccatttttgcggaagcggcgtacctgatgcgtaatgaccccaaccgcagctacagcaaactggtggacacactgctttccatcaaaattgaaaaactgcgtaccttcctgcgtaattcaccggcagccaacctggtggaagagaaaattgagaaaacggcgatttccatccgtgctgtgctgaccaactacgtgaaagccatccgttacctgcaggggattgagcataacggtgagtcttttaccatccgtgactggatgcgtggtgtccgggaagatcagaaaaacggctggctgtttatttcgtcgaacgccgacacccatgcctccctgaagccggtgatctccatgtggctgtccattgccattcgtggtctgctggcaatgggagaaaaccgtaaccgtcgtgtgtggtttttctgtgacgagttacccacgttacacaaactgccggacctggtggagatcctgccggaagcccgtaagttcggtggctgttatgtgtttggtatccagtcctatgcccagctggaagatatctacggtgagaaagcggcggccacgctgtttgacgtcatgaacacccgtgcctttttccgttctcccagccataagattgcagagttcgctgccggtgaaattggtgagaaagagcacctgaaagccagcgagcagtattcctacggtgctgacccggtacgtgacggggtatcgaccggtaaggatatggagcgtcagacgctggtcagttattccgacattcagtctctgccggatctgacctgctatgtcactctgcccggaccgtatccggcagtcaaactctctctgaaatatcaggcacgaccgaaggtcgctccggagtttattccgcgtgacatcaacccggaaatggagaaccgtctgagtgccgtacttgccgcaagggaagcagaaggtcgtcagatggccagcctctttgaaccggaggttgcctccggagaagatgtgactcaggctgaacagccacaacagccacaacagccacaacagccacaacagccacaacagccacaacagccacaacagccacaacagccacaacagccacaacagccacaacagccacaacagccacaacagccacaacagccacaacagccacaacagccgcaacagccgcaacagccgcaacagccgcaacagccgcaacagccggtgtctcctgccatcaacgataagaagtcagattcaggtgtgaatgttccggcaggggggatcgagcaggagctgaaaatgaaaccggaagaagagatggaacagcaactgccacccgggatcagtgaatccggtgaagtggtggatatggccgcttatgaggcatggcaacaggaaaatcatccggacatccagcagcagatgcagcgtcgtgaagagatgaacattaatgtgcaccgggagcgtggggaggatgttgagccgggagatgatttctga

SEQ ID NO: 7536 - DNA, 738 bp, Escherichia coli
atgacatcagacaatatcgctgaatatgttggtgagaataatcaatttactgagaagcctgtaactgaataccccccggtgatacaggataatacagtgaccactaaagactatctgtacagcaataatattgatactgaccttttagtggttatcggagggcttattgttatattgtttctcatgatgcttatcatgtactttattaattctctcaggcataaggaattaactgaaatactggaaaaaatatcttttcctgaaaaatccgggagcaatttgcttaaaccggaggcggtcagctgtaatttgttgtccctgtgtgtgctggcaccggtattctgtacacccagaaagctggctgaagtttccagggagatcatcgtggcgagtgcgcaggaaattgcatggacgccggggagcagtcgtattgatggccaccaggcggagaatatcacctgggcgatttcatcgcagtctcctgccgataagtatgatctcatcaataaaacgtcccgtgtttctcctgacagtggctgtttttatgaaccggacacagttctggatcaccgtgaacgggtacgcctttttattcagatccagtttccgcatgggagtgactggtctgaagtattgcgcctgactgacattgttacagagaaggtctcttccggcaggactgcaggcgggtatcaccaccggcatacagggtacacctggtctgtttctgtgaattaa

SEQ ID NO: 7537 - DNA, 777 bp, Escherichia coli
atgacaggcgataagaaaactgtggtttgtaaaaaaggtaatttgatgaaaacaaaaaaattgatgatggttgcactggtcagttccactctggccctttcagggtgtggtgcgatgagcacagcaatcaagaagcgtaaccttgaggtgaagactcagatgagtgagaccatctggcttgaacccgccagcgaacgcacggtatttctgcagatcaaaaacacgtctgataaagacatgagtgggctgcagggcaaaattgctgatgctgtgaaagcaaaaggatatcaggtggtgacttctccggataaagcctactactggattcaggcgaatgtgctgaaggccgataagatggatctgcgggagtctcagggatggctgaaccgtggttatgaaggcgcagctgttggtgcagcgttaggtgccggtattaccggatataactcaaattctgccggtgccacactcggtgtaggccttgctgctggtctggtgggtatggctgcagatgcgatggtggaagatgtgaactataccatgatcacggatgtacagattgcagagcgtactaaggcaacggtgacaacggataatgttgccgccctgcgtcagggcacatccggtgcgaaaattcagaccagtactgaaacgggtaaccagcataaataccagacccgtgtggtctcaaatgcgaacaaggttaacctgaaatttgaagaggcgaagcctgttctcgaagaccagctggccaaatcaatcgcaaatattctctga

SEQ ID NO: 7538 - DNA, 498 bp, Escherichia coli
atgaaaaatttagctcatattgctctggtgacggtgatacagttcattgcctgttatctggctgattgggggagtgccgaaacagtttttatcctgtgctttattgtactatggcagggattgtttatatggttattttctcaaatacgaaaaaaacggcatgtgtcggatgagtttaaattcagtaaaggcgtttggtatatactgatgccagtatcttccttactctctccgttattaagcctgatggtttttatcattggtacactatacgaattaaggcgaattagtggttgtgtaagtgtaagagaatggatgcaatctcaggtaaatgaacaaactaatgaagatttgcatctggattttgatgatgtgaattttgattatgtggatttttatcgtactaatccagcaacaggattagctatgcatggaggatttgattcagcaggaaatacttttgggacttgttggcaggactatgatgacaggcgataa

SEQ ID NO: 7539 - DNA, 396 bp, Escherichia coli
atgatgaaagaaaaaataaatgatacagaactggaaatcaaacaaattgaaagggagattgaacgtggttgtgataatgcaaaaaaatacttctggctttttgtggttttctttgctgccggattgattgtaaggaacgttatgcatgattttttcagtgccggtattgattcgtggaaagctgacccggaattaaataattttcgttatatgtggaacaccctgatgtatgtcattccgattatgttatatgcgcttgcagctggttttcttgctgcggcttctctgtcgccgttgtgcgaaataatatttgggggtgtccggatattcctgctgaaacgccgtatgcgtcgggagaacagtttcagggaggggaataacgatgccgtgcattaa

SEQ ID NO: 7540 - DNA, 285 bp, Escherichia coli
atgataagtaaatacagattctctttaccccggcttgatattacgggaatgtgggtattttccctgggtgtctggtttcatatcgtcgcccgtcttgtttacagcaaaccctggatggctttttttctggcggagttgattgcggccatccttgtgctgttcggcgcataccaggtgctggatgcatggattgcacgtgtcagcctggaagagcgtgaggcactggaagccaggcaacaggccatgatggaagggcagcaggagggcggacatgtctctcactaa

SEQ ID NO: 7541 - DNA, 477 bp, Escherichia coli
atgcataaatcagaaaatgaaaaaatagattttattctggatgagcatgagcagatattcagaaaacagggttctttgtgtatggcactgggtaagggctttttagttatagctattctttgtggtgttgccacattctgtgtttctggcctgtatctgaaatccctgtgcctgtccgttgcctgctgttgtggggtattcagtcgtatttttaattattacagcgtaccggaggaatcacgcatggtactcagtcgtcaggaattactccggcttatgcgtctgactgaagacgtaccagatgtgagacaggaactgcttaaccgtttgttgtccggtaaaaaactgactggtcgggatgaacaggatatccggcgtctctggcaggagaaagtggatgcaatgcaggagtctgccacccgtcagcgtgaacaggatactattcggaagtttactgaagggaataaatccgaatga

SEQ ID NO: 7542 - DNA, 318 bp, Escherichia coli
atgaacatgcgtaatattaatgttattactgcccgcgctgtgccggataaaaacgtatcagatgattttatgcatgctgttctcagtaactgcaccacaagaatcgcacttcctgcgccgaagaaattcagttctgaatcattgccgcacaattttaatatggctgctgtcggagtgatgaagaagggtatgtcgatgagtttattttcttctccgggaaatacagtagtctccggacaaccctgtgcaggaaaaacaaatctgacagtagagttaatttctgctgttgtggagagtaataaaaaaggagaagggtaa

SEQ ID NO: 7543 - DNA, 1452 bp, Escherichia coli
atggccagtatcaataccattgtgaaacgcaagcagtacctgtggctggggattgtggttgtcggtgcagcctccgcgattggtggggtactgtatctgtctgatgtggacatgtccggtaacggtgaggcggtggctgaacaggagcctgtgccggatatgacaggtgtggtggatacgacctttgatgacaaggtgcgtcagcatgccaccacagagatgcaggtgacggcagcgcagatgcagaagcagtatgaggaaatccgtcgtgaactggatgtcctgaacaaacagcgcggtgatgaccagcgtcgtattgaaaagctgggacaggacaatgccgccctggcagagcaggtaaaagccctgggtgctaatcccgtcacggcgaccggtgagcctgtacctcagatgcctgcctcaccgcccgggccggaaggcgaaccacagccaggaaacacccccgtatccttcccgccgcagggcagcgttgctgttccaccgccgacggcgttttatcccgggaatggtgtcacgccaccaccacaggtgacgtaccagtctgtgccggtgcctaaccggatacagcgtaaggtgtttacccgtaatgagggaaaacagggaccatcgctgccgtacattccgtcaggaagttttgcgaaagccatgctgattgaaggggcggatgccaatgcctcagtcaccggtaatgaatccacggtgccgatgcagttgcgtatcaccggcctggtggaaatgccgaacagcaagacgtatgacgcaacgggatgttttgtggggctggaagcctggggggatgtgtccagtgaacgtgccattgtacgcacccgcaatatcagttgcctgaaggacggcaaaactattgatatgccgattaaggggcatgtcagcttccggggtaaaaacggtatcaagggcgaagtggtgatgcgtaacggcaaaatcctcggctgggcatggggcgcgggatttgttgacggtatcggtcagggaatggagcgcgcctcccaaccggctgtcgggctgggtgccacagccgcttacggggctggtgatgtcctgaaaatgggtatcggtggcggcgcatcgaaagccgcacagacgctcagtgactactacatcaaacgtgccgaacagtatcacccggtgataccgattggtgcgggcaacgaagtgaccgtggtgttccaggacggcttccagctgaaaaccgtggaggaaatggcgctggagcagtcacagagtacagcggaagagggtaacccggaaagcccggtgccgaatcctccctcggcagaaagccacctgaacggttttaacaccgaccagatgctgaaacagctgggcaatctgaatccgcagcagtttatgtccggagacaagaacccgctgggcggggatgccggcaaggagggcggaaatggcgggtga

SEQ ID NO: 7544 - DNA, 228 bp, Escherichia coli
gtgattaaaggagctttaagatctgcgccaagtagaaaagttttacttacccttgatgaggaaacgaataaattattacttggagccagagagcgtagtggaagaacgaaaacaaacgaagcattggtgaggttgcaggatcatttgcaacgttatccagatttttataatgaagaaatattcagggaggtgatcgaagagaacgagtcaacatttaaagaactttag

SEQ ID NO: 7545 - DNA, 648 bp, Escherichia coli
atgtgtgcgatggatactagagaaagagcactcatacgtcaatcaggcctgccggaaattattttatccgcaaaatatccagtctgtgtccgcacagagtcaggaaaattcatagactcaaactctgtttttttacacttaataaagtgtcagaatagtgattctgaaatatggttttctggtattgatattgatacgcaaattttatttcatactgctgaagttgatgctttctcgtcctcgaatggagtgagtattattaatggtgtaatattgaatgatgtatcatgggatgtggtggttgaaagtacggaagtgaataacttgaatttgtttgtctggagattctttgaaagatacgtagttagtggcttttttataaagggcaaggagtttagttgtgaacctgacaaatatcgctttaataagataataccgtatcttttgggttatagtcatgagtattcttctcagagaatggatatctctgttgaccaatctaaaaaaatatttatgaattttaaaaaacactatggtttctcagacagggatgagtggttgcgatatgctataatctctgatgtgttattttatctatatcaatacttcgctagtaatattaacagccttcactgtaaagaaatgtaa

SEQ ID NO: 7546 - DNA, 384 bp, Escherichia coli
atggctaaggtgaatctgtatatcagcaatgatgcttatgaaaaaataaacgcgattattgaaaaacgtcgacaggagggggcgagagaaaaagatgtcagtttttcagcaacggcttcaatgcttcttgaactgggtcttcgtgtatatgaggctcagatggagcgcaaagagtctgcatttaatcaggccgagtttaataaactacttcttgaatgcgttgtaaaaacacagtcatcagtagcgaaaattttgggtattgagtctctcagtcctcatgtctcaggaaatccaaagtttgaatatgccaatatggttgaagatatcagagagaaggtgtcggctgagatggaaaggttctttccaaaaaatgatgatgaataa

SEQ ID NO: 7547 - DNA, 933 bp, Escherichia coli
atggctaaccttttgaataaattcattatgacgagaatactcgctgcgataacccttttgctgagtatcgtattgaccattttggtcactattttttgctccgtcccgatcatcattgccgggattgtaaaactattgcttcctgtgccagtcatttggcgaaaggtttcgcgtttttgtgattttatgatgtattgctggtgtgaaggtctggcggtattactgcatctgaacccacacctgcaatgggaagttcgcgggctggaagggttaagtaagaaaaactggtatctgcttatttgtaaccaccgtagttgggcagatattgtcgtactgtgcgtgctgtttcgtaagcacattccgatgaataaatatttcctcaagcagcagctggcctgggtgccttttcttggcctggcatgctgggcgctggatatgccgtttatgaagcgttattcccgcgcttatttattacgtcatccggagagacgtggtaaagatgttgaaaccactcggcgttcttgtgaaaagtttcgcctgcatcccaccaccattgttaatttcgttgaaggctcccgtttcacgcaagaaaaacatcagcaaacgcactccacttttcaaaacttgttgccaccaaaggcggcaggcattgcgatggcgctaaatgtactgggtaaacaattcgataaactgcttaatgttacgctgtgttatccggacaataaccgtcagccgttcttcgatatgttaagcggtaaactgacgcgaattgtcgtacatgtggatttgcagcctattgccgatgagttacatggcgactacatcaatgacaaaagctttaagcgccattttcagcaatggctgaactcactgtggcaggaaaaagaccggcttctgacgtcgttgatgtcatcacagcggcaggacaagtaa

SEQ ID NO: 7548 - DNA, 132 bp, Escherichia coli
atgatacgtaagtcagctacaggtgccattgttgcgttatccgtaatctggggtggtggcacatggtacacaggtacgcaaattcagccaggtgtcgaaaagtttattaaagattttaacgatgctaaatag

SEQ ID NO: 7549 - DNA, 270 bp, Escherichia coli
atggaaaatctactttttgtgatgtgttggattaaagatcatcatgtgatgtcattaacttttggcgtcttatctgcaattttatggattaaatctgctacagcaaaagttgagttaggcaaaaaaattgtcatggttacgtatgaagatcccgaacttaacgtgaatctccatgatttcttcgccactgcgcggcttcaatctaagtacaattcatttgcagcattgtctgcagcagcaaccgcgctattccagattattggtttgtaa

SEQ ID NO: 7550 - DNA, 363 bp, Escherichia coli
ttgtttgaaataacaggtgttaacgtctcaggggctctcattgccgtcgttatggcgactggctacgagaaccccttgacttcagttcacgaaatcgagaagaggctttctgttatactgggcaattcacaggctacaggtgaggttttgtttgaccttttgtgttctaatggtccagagtggaatcgctttgtttcgctggaaataaggtgtggcagtattttgctggatactgccaaaattgtggatgagcaagaaattccagcgcagatcttgagacatcagagagatgtattacgtaaccaccctgagtacgtagaagactctgtgttaacaccagatgatgttctttgtattctctag

SEQ ID NO: 7551 - DNA, 1071 bp, Escherichia coli
atgacagtcaggaactacactaatttaaatttagatcggacaactattgaggctacgtctagggcatttattgaaaataaaaactattccgtccattcaattggaccaatgcctggtgcaagagcaggacttcgggttgtgtttgctaaaccaggagaagctttggcaactgttaacattttttataataacggagggacgtctacagtccagtatcaaacaggagctaatcgtaatcttggaaaagagttggctgataatctctatgaaaccatcaatcctgcagaatttgaacaggtaaatatggtgttacaagggttcgttgaagcgaacgttttatctgtacttcagctctcagcagagcagccacatatacaattttacgaatacttacggaacactcatacaacggtgtggaaaattcattcgccagaatttcaggatgagttgacagttagtctgcatcacagaaatggaacactacaaatacaagggcgtccattgtcatgttatagagtgtttatattcaacttgtcagagctactcgatttacaaggactggaaaaagttctcattcgtcaggacgatggcaaagcgtatatagttcagaaagaagttgctcgctcacatctagagtgtgaaatgggggatgcgtacccactattgcataagaatgttgaaaaattgctcgtttctgggctgtgtgttaaactcgccgcccccgatttacccgattactgtatgttgttgtatcctgaattacgttcagttgagggagtacttaaatcaacaatgtaccgatatggcatgccaatcacgcaggatggtttcgggccttattttgataaaattgggagtgaatttattctgaaacaacaatttggacgcaatttatcgtcagctaaggttaagaccattaatgatgcctatactttctttaacagagaacgtcatggcctgtttcatatggagatagttgtcgacacaagccgtatggtttctgacatggcacgactgatgactaaggccagacaggcatggggaattattaaggatttgtatattgtttga

SEQ ID NO: 7552 - DNA, 585 bp, Escherichia coli
atggcattcagaatgagtgaacaagcacggaccataaaaatttataatctgctggccggaactaatgaatttattggtgaaggtgacgcatatattccgcctcatacaggtctgccagcaaacagtaccgatattgcaccgccagatattcctgctggctttgtggctgttttcaacagtgatgaggcatcgtggcatctcgttgaagaccatcggggtaaaaccgtctatgacgtggcttccggcgacgcgttatttatttctgaactcggctcattaccggaaaatgtcacctggttatccccggaaggggagtttcagaagtggaacggcacagcctgggtgaaagatgcagaagcagaaaaactgtttcggatccgggaggcggaagaaacaaaaaacagcctgatgcaggtagccagtgagcatattgcgccacttcaggatgctgcagatctggaaatcgcaacggagggagaaacctcgttgctggaagcctggaaaaagtatcgggtgttgctgaaccgtgttgatacatcaactgcaccggatattgagtggcctgcaagccctgttatggaataa

SEQ ID NO: 7553 - DNA, 1662 bp, Escherichia coli
gtggcgcttgaggatgcgagcacgacgaaaaagggggtagtacagctcagcagtgcgaacaacagcacttccgagtcactggcggcaacgccaaaagcagttaaggccgcgtatgacctggctaacgggaaatacaccgcacaggatgcaacgacagcacagaaagggataatccagctaagcagcgcgaccaacagcacgtctgaaacgctggcggcaacgccaaaggcagtaaaagcagccaatgacaatgctgagaaacgtctgcagaaagatcagaacggtgcggatatccctggcaaagacacctttacgaaaaatattggtgcctgccgtgccttcggtgggtcagtaagcacaacaacaggagactggacgactgcacagtttatcgagtggctggattctcagggagcatttaaccatccatactggatgtgcaagggttcctggtcttatggcaataataaaatcattactgatactggttgcggtaatattcatctcgccggagctgtcattgaagtaatggggataaagtcagcgatgacgatccgcattaccacaccgaccacctccactggtggtggaacaactaacgcccagtttacctatattaatcacggaacagattattcacctggctggcgaagggactataactccagaaataagccaacggcatcagagatcggggcgttaccgtcaggtggaacagcagtatcatcagttaatctggcttcaaaaggtcgggtaaccgcgctgacagacaatacgcagggggcaacaggtcttgagttatacgaggtgtataacaacggatatccaacagcgtatggaaatatcattcacctgaaagggatgacagccgttggcgaaggtgagttactcatcggctggagtggtacaagcggtgctcatgctccggcatttattcgttcacgacgggatacgaccgacgcaaactggtcgccgtgggcgcagctttacacctcagctcatcctcctgcagagttttatccagtcggtgcaccaatcccgtggccatcagataccgttccgtctggctatgccctgatgcaggggcagacttttgacaaatctgcttacccgaaacttgcagccgcttatccgtcaggcgtgatccctgatatgcgtggctggacgattaagggcaaacctgccagtggtcgggccgtattgtctcaggaacaggacggtattaaatcgcacacccacagcgccagcgcatccagtacggatttgggtacgaaaaccacatcgtcgtttgattacggcactaaatctacgaataacaccggggcacatacacacagtgtgagcggtacagccgcaagtgccggaaaccatactcatagtgtcacaggcgcatcagcagtcagccagtggtcacaaaatgggtcagtacataaggttgtgtctgcggccagtgtgaatacaagtgctgcaggagcgcacactcatagtgtcagcggcacagcagcatctgcaggtgcacacgcacatactgtcggtattggtgctcatacgcactccgttgcgattggctcacatggacacaccatcaccgttaacgctgctggtaacgcggaaaacaccgtcaaaaacatcgcatttaactatattgtgaggcttgcataa

SEQ ID NO: 7554 - DNA, 3474 bp, Escherichia coli
atgggaaaaggtggcggtaaggcacacacgcctcgtgaggcgaaggataatctcaaatccacgcagatgatgagcgtgattgatgcgattggtgagggaccgatagaaggtccggtgaagggactgcagagtattctggtgaacaaaaccccactgacggacacggacggcaatcccgtgatacacggtgtgacggcggtctggcgcgccggggagcaggagcagacaccaccggaaggctttgagtcctccggagctgaaaccggactgggcgtggaagtgacgaaggcaaaaccggtgacgcgcaccattacgtccgcgaacattgaccgcctgcgggttaccttcggggtgcagtcactggtggagaccacctcaaagggtgaccgtaacccggcatccgtccgcctgctgattcagttacagcgtaacggtaactgggtgacagaaaaggacgtcaccattaacggcaagaccacctcacagttcctggcctcggtgattctggataatctgcctccccggccctttaacatccggatggtcagggagacggcggacagcaccacggaccagctgcagaataagacgctgtggtcgtcatacaccgaaatcatcgatgtgaaacagtgctacccgaacacggccattgtggggctgcaggtggatgcggagcagttcggcggccagcagatgacggtgaactaccatatccgcggtcgcatcatccaggtgccgtcaaactatgacccggaaaaacgcacgtatagtggtatctgggacggcagtctgaaaccggcatacagcaacaacccggcctggtgtctgtgggacatgctgactcacccgcgctacggcatgggaaaacgtctgggggcggcggatgtggacaagtgggcgctgtatgccatcgggcagtactgcgaccagacggtcccggatggtttcggggggaccgagccgcggatgacctttaatgcgtacctggcacaacagcgtaaggcgtgggacgttctcagtgatttctgctctgcgatgcgctgtatgccggtatggaacggtcagacgctgacgttcgttcaggaccgcccgtcggatgtggtgtggccgtacaccaacagcgatgtggtggtggatgataacggcgtgggattccgctacagcttcagtgccctgaaggaccggcacacggcggtggaggtgaattacaccgacccgcagaacggctggcagacctccacggaactggtggaagacccggaagccatactgcgctacggacgcaacctgctgaagatggacgcgttcggctgtaccagccgcggtcaggcccaccgtgccggactgtgggtgataaagaccgaactgctggaaacgcagacggtggatttcacgctcgggtctcaggggctgcggcacacacccggtgacattattgaaatctgtgataatgactatgccgggaccctgaccggcggacgtgtcctgtccattgatgctgccacccgcaccctgacgctggaccgtgaggttaccctgccggagacaggtacatcggcggtgaacctgattaacggcagcggtaagccggtgagtgtggacatcaccgcacaccccgcgccggaccggatacaggtcagtaccctgcctgatggtgtggagacatacggggtgtggggactctccctgccgtcactgcgccgtcgcctgttccgctgtgtctccatccgggaaaacacggacggcacctttgccatcacggcggtgcagcacgtaccggaaaaagaagccatcgtggataacggtgcccgctttgagccgcagtcaggttccctgaacagcgtcatcccaccggcagtgcagcacctgacggtggaggtgagcgcagctgacggccagtatctggcgcaggcgaaatgggacacgccgcgggtggtgaagggtgtgcgcttcagtctgcgcctgaccagtggtaagggaacggatgccagactggtgaccaccgccatcaccgcagacacggagcaccgtttcagcggcctgccgctcggggaatacaccctgacggtgcgggcgataaacagctatggccagcagggtgaacctgccaccaccaccttccggattgccgcaccggcagcaccgtcgcggattgagctgacgccgggctattttcagataaccgcaacgccacatcttgccgtttatgacccgacggtacagtttgagttctggttctcggaaaagcggattgcggatatcaggcaggttgaaaccgcagcccgctatcttggctcggcgctgtactggatagctgccagtatcaatatcaaaccgggccatgattattatttttatatccgcagtgtgaatactgttggcaaatcggcattcgtggaggctgtcggtcgggcgagcgatgatgcggaaggttacctggattttttcaaaggagaaatcgggaaaacacatctggcccaggagctgtggacgcagattgataacggtcagcttgcgccggacctggctgaaatcaggacgtccattacgaatgtcagcaatgaaatcacgcagaccgtcaataaaaaactggaaaatcagagtgcggcaatccagcagatacagaaagttcaggttgatacaaataataacctgaacagcatgtgggccgtgaaactgcagcagatgcaggacggacgcctttatattgcgggtatcggtgccggtattgagaatacgccagcaggaatgcagagtcaggtgctgctggcggcagacaggattgcgatgattaatcctgcgaatggcaacacaaagccgatgtttgttggtcagggcgatcagatatttatgaatgaagtgttcctgaaatatctgacggctcccaccattaccagcggcggtaatcctccggcattttccctgacaccggacgggcggctgacggcgaaaaatgccgatatcagcggtaacgtgaatgcgaactccgggacgctcaacaacgtcacgattaacgagaactgtcgggttctgggaaaattgtccgcgaaccagattgaaggcgatctcgttaaaacagtgggcaaagctttcccccgggactcccgtgcaccggagcggtggccatcaggaaccattaccgtcagggtttatgacgatcagccgtttgaccggcagattgttattccggcggtggcattcagcggcgctaaacatgagaaagagcatactgatatttactcctcatgccgtctgatagtgcggaaaaacggtgctgaaatttataaccgtaccgcgctggataatacgctgatttacagtggtgttattgatatgcctgccggtcacggtcacatgacactggagttttcggtgtcagcatggctggtaaataactggtatcccacagcaagtatcagcgatttgctggttgtggtgatgaagaaagccactgcaggcatcacgattagctga

SEQ ID NO: 7555 - DNA, 582 bp, Escherichia coli
gtgaacacggcagcggaagccatccgggcgctgtcgttacaggtgccgggctttcgccgtcagatgaacgaaggctggtaccagatacgtattgccggttatgacacggcaccggaggcggtgtacgcccgtcttcacgaacagctgggtgagggaacggtcatccatattgtgccgcgactggccggggccggaaagggtggactgcagattgtgctgggggcggcagccatcgtgggctctttcttcactgccggggcatcaatggcgttatggggttcagccctggcagccggtggtttttctgccaccacgatgctgttttcacttggagccagcatgattctgggcggtgtggcccagatgctggccccgaaggcaaaaacaccggattaccgcgcaacggataacggcagacagaacacgtacttttcctcgctggataacatgattgcccaggggaacccgatgccggtgccttacggggaaatgctggttggctcccgccgtatatcccaggacatcagcacccgtgatgaaggcgggggcggaacggtcgtggttatcgggcgacagggataa

SEQ ID NO: 7556 - DNA, 744 bp, Escherichia coli
atgacacagactgaatcagcgattctggcgcatgcccggcggtgtgcgcctgcggagtcgtgcggcttcgtgataagcacgtcggagggggagtggtatatcccttgtgtgaatatttctgcagagccggaggcgtattttcgtatcgcaccggaagactggctgcgggcagagatgcagggggagattgtggcactggtccacagtcatcccggtgggctgccctggctgagcgaggctgaccggcggctgcagataaaaagcgcactgccctggtggctggtctgccggggtgacattcacaaattccgctgtgtgccacatctgacaggacggcgctttgagcacggggtgacggactgttacacgctgttccgggatgcttatcatctggcggggactgaaatgccggattttcatcgcgaggatgactggtggcgcaacggtcagaacctttacctggacaatatggcggtcaccggcttttaccgggtgcccctgtcctctgcacaggcgggcgatattctgctgtgctgctttggtgcttcggtaccgaaccatgccgccatttactgcggcaacggtgagctgcttcaccatctgcctgaacaactgagtaaacgggagaggtattccgaaaaatggcaacgacgaacgcattctgtctggcgtcaccgccactggcacgcatctgccttcacggggatttacaacgatttggccgccgcctcagcctgtatgtga

SEQ ID NO: 7557 - DNA, 699 bp, Escherichia coli
atgcaggatattcgcgaagaaagtctgaacgagtcggttaagtcagagcagtcaccgcgggtggtactctgggaaatcgacctgacggtacagggcggtgagcggtattttttctgtaatgagctgaatgaaaaaggggagccggtcacctggcaggggcggcaatatcaggcatacccgattgacggcagcggttttgagatgagcgggaagggcagcagtgccagaccgtcgctgacggtgtccaatctgttcggtctggtcaccgggatggcggaagacctgcagagtctggtgggggccacggtggtccgccgccgggtgtatgcccgttttctggatgcggtgaatttcgttgcgggcaatccggaggcggacccggagcaggagctgagtgaccgctgggtggtggagcagatgtcgcagctgacagccatgacggcctcgtttgtgctggctacaccgaccgagacggatggggcgctgtttcccggtcgcatcatgctggcgaacacctgtatgtgggattaccggggagatgaatgcgggtataacggtcctgcggtggcggatgagttcgacaaccccaccacggatatccgtaaggacagatgcagcaagtgcatgcgcgggtgtgaactgcgcaggaatgtcggcaattttggcggtttcctttccattaataaactttcgcagtaa

SEQ ID NO: 7558 - DNA, 342 bp, Escherichia coli
gtggctgagataaaaacgctgcatctggtcccgcgtgaagggatgcaggtgagtgagaaaccgtcggtggtgagggttcggtttggtgacggttatgaacagcgccgaccgacgggacttaatgccagactgaagacgtttcaggcggtgttccgggtgacggatgaaccaacccggcgctggctggatgaatttttatcgtggcatggtggttaccgtgcctttttgtggcgaccgccgaaacataacctgacggtgagggtggtgtgccgggagtggagcgtcacagataacgccaggcacagtgatttcagttgtacgattgagcaggtggtgaactga

SEQ ID NO: 7559 - DNA, 3243 bp, Escherichia coli
atggcgacgttacgtgaactgattatcaaaatttcggcaaattcgcagtcattccagtcggagatccagcgggcttcccgcatgggcagtgaatattaccggaccctgcagaatggcgggcgtcaggctgccgcagtcgcccgggtgcagcgacgcgccctggctgagctgaacagccagttgacggaaatccgcgcttcagctgccggaacggcgggggcatttgcaggtgcctttgccaccggacacctgatttctctggccgatgaatggagttccgtgaatgcccgactgaaacaggcgtcgcagtcatccgatgaattttcgtcatcacagaaagtgctgatggatatcagccagcggacgggcacggcattttcagataatgcggccctgtttgcccgctcggcagcctcaatgcgtgaatatggttacagtgctgatgatgtgctgaaggtgacggaggccatttccacggggctgaaaatctccggtgccagtacggcagaggcgggctcggtgatcacccagttcagccaggcgctggcacagggtgtgttacgcggtgaggaatttaattcggtcaatgaaagcggagaccggatcgtacgtgcactggctgcgggtatgggcgtggcccgtaaagaccttaaggcgatggcggacgacggcaaactgacggcggataaagtcgttcctgcgttaatcagccagctgggggtattgcgtgatgaatatgccgccatgccggaaacggtctctgacgggatcacaaaggtggaaaacgcctttatggcctgggtgggtggcgcgaatgaagccagcggagcgacgaaaacgctctccggcgtgctgaacggtgttgccggtaatattgataatgtggcaacagccgcgggggcgctggttgccgtcggggttgcccggtactttggcaatatggcctccggagcggtgtctgccacggcaggacttgtgacggcagcacgtaatgaagtggcactggcggaagcacagctcagggggacgcagattgccacggcgcgggcaagggcagccgtgtaccgtgcacagcaggctgtggcggcagcccgcgggacggagatgcagattgctgcagaagcccgtctggcggccacacaggaacgcctgaacagaaatattgctgccagaaccgcagcccagaatgagctgaacagtacaacggcggtgggctcacgtctgatgactggtgcgttgggactggttggtggcgtacccggactggtgatgctgggggcagcagcatggtatacgctgtaccagaatcaggagcaggccagggagtcagcgcgccagtatgcactgacgatagatgaaatcgcgcataaaacgccgtcaatgtctttgcctgaagcctcagataatgaaggacgaacacgggcggcgctggcagagcagaaccggctgattgatgaacaggccagccgggtgaaatccctgcaggaaaaaatcgctggatatcagtatgttctggctaaccctggctggacaaccggtgacggattcatgataaaccatctgacatcggtgaagaccgtgacggaagggctttctcaggcaacagagcagcttgccgttgagcagtcccgtctggcacagatgcaggaaaaagcgcagtccattcaggatgtgcttgccgggctggaagaccgtcgtgtggcgttaattcgtcagcaggcggcagagcagaataaggtgtaccagtccatgctggttatgaacggtcagcatacggaattcaaccgtctgctggggctggggaatgaactgcttcagcagcgtcagggactggtgaatgtaccgttacggctgccgcaggccaccctggatgataaacagcagagcgccctgacaaaaacagaacgtgagctggccctgtcccgactgaagggggaggaaaaagagcgtgcccggctggggtatgcggcggatgaccttggttttgtgggggattcgtatcaggaggcgagacagcgttatatcagtaatgctctggaagcctggcgtaataacgaggcgaacaaacctaaatcccggggtggaaaatcagagacggaaaaagcggaagacagtttttcccggctactgaagcagcagaaagagcaactggcactggcgggtcagaatacagagctggcgaagctgaagtaccagactgcgcagggcgaactgaaaaccctgacggagatgcagaagcaggaactgctgcgtaacgcggccctgattgaccagcaaaaaatccgggaacagttgcgatcccgggaagagaccctgaagaatgataatgtggctgcgcgtgcatcaaatgaagccgaactgctgggatacgggcagggagaacgagccagggaacgcatgcgggagttgcagcagatccgtgacagcttccgccagaaggatgcggaccttcagtctcagtatcagaccggggatatcagtgaggatttttacagacaggcacgggcacagaacgcgcagtatctgagcgaacgccttaaggaccaggcagccttttatgccgaatcggatgcgcagcgtgcggactggcagaaaggcttgcaggaggggctcagtaactgggtggacaatgcatccgattacgcctcacaggcagcacagcttgcgacggagggtatctcagggatggtgaataacatcacggagatgctgaacggaaacaaagtggaatggcgcaactgggcctcatccgtactgcaggaaatctcaaaagttcttatgaatgctgcgattgtcaacggaattaagacggcggcaaacggtatgtccggtgcgggaggatttattggcagcattggtgactggctgggcggtgcggtggccaatgcaaaaggcggcgtgtatacctcggcaaacctgagtgcgtacagcaacagcattgtggacacgcccacgtactttgcgtttgcaaaaggggccgggctgatgggggaagccggacctgaagccattatgcccctgacccgggcggcggatggctcgctgggcgtacgcgcggtgggcagtatgaacggcagtgccggtctggtgtattccccggtctaccacatcgccattcagaatgacggggctaacggacagataggggcggaggcggcaggcagtcttgtgcagctgattgaccagcgggtgcaggcggtgatgctgtccatgcgacgtgacggaggaatgctgagtggctga

SEQ ID NO: 7560 - DNA, 210 bp, Escherichia coli
atgtggatggagttcgacagggtatccccgctgggtgatgagcgcggggatatccgtaatgcacagatcgtgaaagcggtttttggggcacaggggatgaatgttgcactgaaggacgccatgctctgctggggcgaggatgaggataagccggaggtggatccgtttgcggcgctggaagacgcgctgagcttcgcaacacagtcatga

SEQ ID NO: 7561 - DNA, 375 bp, Escherichia coli
atgaaaaaggatctgaaaacgctggcgctggccagactgtcagggtttcgtcataaaacggtgaaggtgccggaatggggtaatgtcagcgtggtgctgcgggagccttcggcagaggcctggtatctgtggcaggaagtgctcaatggtgatggagaggatgacgataccctgtcggtggtggcgaaaacccgccgtaacctagaagcggatgtgacgctgttctgcgatgtcctgtgtgatacggatctgcagcgggtgttcgctccggacgaccgtgagcaggtgctggccgtctatggtccggtacatgcccggttgctgcgtcaggcactggaactgatcgctgatgcagagtcggccagaaaaaagtag

SEQ ID NO: 7562 - DNA, 717 bp, Escherichia coli
atgtctgctttgtatgaacgctcacagctgacgcaggtgatgatttcatctgccccggcgactgctgaaactatggataaggcggaatatctgcgcctggactgcaccatcaaggaagtccagttcaccgctggtcagaaacaggatattgatgtgaccacgctctgctccaccgagcaggagaacatcaacggtctgggggcgtcgtctgagatttccatgtcgggtaatttttatctgaatcaggcccagaacgccctgcgtgatgcctatgacaatgacgcgttgtatgcgtttaaggtgctgtttccgtccggtaagggctttaagttcctggcggaagtgcgtcagcacacctggtcatccggtaccaacggcgtggtggcagcaacgttttcactgcgtatgaaaggcaaaccggtgtcctttgtggtaccgctggcgtttgtgaaaaatctggataaaacacttaccgtgaatacaggtgcgctgctgacaatgtcagtcagtgccaacgggggaacgccgccgtataaatacgcctggaagaaggatggtcagccggttgacgggcagacgacagacaccttcagtaagccaggtgcgcagtccgctgatgcggggaaatatacctgcgtggtgaccgattcggcagagaaagcacagagtgtgacgtctgttgaatgcaccgtgacagtgagcgcagccgccggataa

SEQ ID NO: 7563 - DNA, 345 bp, Escherichia coli
atgacggaggcggatttgtatcctcatctggcgcatcttgccggcgggcaggtgtacccgtatgtggtccccctgctggatggcaggccgtcggtggcgcttccgtgggtggttttcagcctgatttcatcggtgtctgcggacgtgatgggcgggcaggcggagtcctcagtgtcggtgcagatagacgtttatgccgggactgtgacgcaggcgcgtcagatacgtcaggacgcccgtgaagccataatgctgctggccccgggatccgtcagtgaaatgcaggactatattccggaaaaccgctgttaccgtgcaaccctggagtttcaggtcacggtgtga

SEQ ID NO: 7564 - DNA, 447 bp, Escherichia coli
atgatcgaaaccctgctggatttttcggggctggaggacatcagccgcgatttgcagcttctgagtggtgcggaaaataaccgggtgctgcgtgaggcaacccgtgcgggtgcgaatgtgctgaaagaagaagtggtgtcacgggcaccggtacgcaggggaaaactgcgccgcaatgtggtggtcctttcccggcgctcccgcgatggcgggatggaatccggtgtccatatccgtggtgttaatccggacaccggtaacagcgataacaccatgaaggcggataacccgcgcaatgctttctactggcggtttgtggaaatggggaccgtgaatatgccaccgcacccgtttgtgcgcccggcgtttgatgtgcgcagtgaacaggcagctcaggtggcgattgcgcggatgaaccgggccattgatgaggtactgagacgatga

SEQ ID NO: 7565 - DNA, 351 bp, Escherichia coli
atggcaatatctgcaggtcgtctgacacagatgataagtgttctgaacccggtgttaacccgtaacgctgccggagaaatgacggaagaatgggtgtcatgcgggaaaattcatgcggatatccgaggcaggagcagccgggagcggatgcagtccggtgcggaaatggcgcaggcggaaatccgcatctgggtgcgcggtcagtccggtcgggaaatcacggcagcgtcacgacttcatgtgctgagtggtccatggcgtgaccggatcctgaacgttgtcgggctgcccgtgccggatgcgaccggcgggcgtctggaaattctctgtcggctgggaggggaaaaatga

SEQ ID NO: 7566 - DNA, 327 bp, Escherichia coli
atgacggcattactgacactggaagagatcaaggcacatctgcgtgtcgaccatgacgcggatgatgacatgctgatggacaaggttcgtcaggctaccgccgtgctgctggcctacattcagggcagccgggataaagtgatccgtgaggacggtgaactgatcccgggcgaggcattaacccggatgaagggggctgccatgcgactgaccgggatgctgtaccggaatccggatcttgcggagcgggaagaactgcttcagggggagctgccgttttctgtttccgtgctgatttacgatttgcgttgtccgacggtgttatga

SEQ ID NO: 7567 - DNA, 2586 bp, Escherichia coli
atgtggaaccttttacggcgaacccgaaaaaaccagaaatcaggacgtgacgtaagagaggcgggctggaccagcctgtttcaggcggtggctgagcccttttccggcgcctggcagcagggcgtgaaagccgatcctgaagccgtcctctcctttcatgcggtgtttgcatgtatttcgctgatatcccaggatatcgccaaaatgcggctgcgtcttatgcagacggatgcgcatgggatacgcagggaaacgcgccggggggatattgcccgcctctgtcgtcgtcccaacgcccagcagaaccgcatccagttttttgaactgtggctgaacgccaaactgcgtcatggcaatacggtggtgctgaaaatccgtaatgcccgggggcagatcaaagaactgcgtattctggactggagccgggttgaacctctggtggcggatgacggcgaggtgttctaccgcatcacgccggaccggaactgcgggatcacggaggcggtgacggtgcctgcccgggaagtgatccacgaccggtttaactgtttttttcatccgcttataggattgccgccggtgtatgccgccgggctggcggccacgcaggggcatcatattcaggaaaattcgacgtcttttttcagaaatggcggcaggccgtccggggtgattgagatccccggcagtattacggaagaaaatgcgaaaaaactgaagagcaactgggacagcgggtatacaggcgaaaatgcggggaaaacggccattctgagcaacggggcaaaatacaaccccacgacgttttcacctgtggatgcgcagacggtggaacaactgaagatgaccgctgaaattgtctgttcggtgttccgtgtcccggcctacaagattggcgtgggacaaccgccttccagtgacaacgtggaggcgctggagcagcagtattattcccagtgcctgcagacgctgattgagtccattgaactgttactggatgaggcgctggaaacgggggaaaacgagagtacagaatttgatgtcaccacgctgctgagaatggacagtgagcggcgcatgaaaacgctgggggatgcggtgaaaaatacgcttctcacgcccaatgaggcccgtaaacgggagaacctgccgcccctggccggcggtgatgcactgtatcttcagcagcagaactacagtctggaggcgctgtcccgtcgtgatgcccgtgaggatccgttcgcgtctgccgggaaaacagtttcatcacagctgcctgacggcgcatctgacggtaataaggcaatcagtgaaacagagcatgatgcggtgaaagcgatgttcaggggggatactgagaaaatgacggaacgggaactgtccattattcgtgcactgggagaagaattctccacagtgctggcggatttacagcgcacatttgaggggaagatggcctcgcaggcacaagcgtttgaagagaaactgacttccctgtcggcggtattacagaagcatgtgacggtggatgaggtgcgtccggttctgcaggcgatggtggatgacgctgtgggggccattccggtaccgcgtgatggtcgtgattatgatccggatgtactgcagcaggcggtgaatgatgcggtcgcaaatattccgcagccggcggacggtaaaagtctcaccccggatgatgtgcgtccgatgcttgaacagatggtgaaggaggctgtaagccatatccctgttccgcgtgatggtcgtgactacgatccggaagtactgcagaaggcggtgaatgatgcggtcgcaaatattccgcagccggcggacggtaaaagtctcaccccggatgatgtgcgtccgatgcttgaacagatggtgaaggaggctgtaagccatatccctgttccgcgcgacggtcgtgactatgatcccgatgttctgcagaaggcggtgaatgatgcggtcgcaaatattccgcagccggcagacggtaaaagtctcaccccggatgatgtgcgtccgatgcttgaacagatggtgaaggaggcggtaagccatattcatgttccgcgtgatggtcgtgactacgatccggatgttctgcagaaggcggttctggatgcggtgagtgccctgccggctccgcaggacgggcgtgatgccacggctctggaaatactccccgccattgacgatcaaaaatcctttccccggggcacgtatgccacacaccagggcggactctggcgggcgtatgaaaaaacgcacgggatgcggggatgggaatgcctggttgacggggtggcggatattgacgtcagcatgacgggtgagcggttgttctctgtggtggtccggcagagcagtggccagcgtacggaaaaaacattttccctgccggtgatgctctaccgcggtgtgttcagagccggtgaaacctaccaccccggcgatacggtgacgtgggggggctcgctgtggcactgcaacagtatgaccgaagataaacccggagaagctcattcatcagcctggaccctggctgcaaaacgtgggcgggatgcaggaggcggaaaatga

SEQ ID NO: 7568 - DNA, 222 bp, Escherichia coli
atggcaaagatccgatatctgcagggcacgcatgatgcccgggccggggatatccgtgatgtggcacagccgtgtgcggaggtgctggttcgcctgggaaaggcggagtacatcacggtgcgacgtccggcaggtcagaaaaagaaacgtgatgcggagcatggcgaatgtggaaccttttacggcgaacccgaaaaaaccagaaatcaggacgtgacgtaa

SEQ ID NO: 7569 - DNA, 1938 bp, Escherichia coli
gtgactcttaaacgggcctgttccctgctgacggtgaaatccttcagtgaggatgaacgggtgatcaccgggattgcgtcaacgccttctccggatcgggatggtgacatcctggagccggagggcgcggagtttggcagtgcgatcccgtttctctggcagcatgaccattcccgcccggtggggcagtgtacggtgcgccgggtcagcgaagggctggaaatcacggcaacactggtgaagcccgtaccggatatgccgtcgcaactggctgcccggctggatgaggtctgggcggccattaagaccgggctggtcagggggctgtccgtgggcttccgtccccatgaatacacctttctggacggaggcggactgcattttctgcgctgggaactgatggaggtgtctgccgtcaccgtgcccgcgaatgcggaatgcaccatccggaccattaaatcttacgaccgcccgttttctgccgcgtccggcaaccggaaaccggtggtgaaaatcgcatcttctgccggcgctgcggcacagtcaacaaccgtttttcataaggaaaagaccataatgaatattggcgaacagattaaaagttttgaaaacaagcgtgcagcgctggcagcctcccttgaggaggtcatgaccaaagccgcagaggaagggcgcacgctggatgtggaggaggaagagcattacgacaacaccgcagcggaaatccgtcaggtggatgcgcacctgaagcgcctgcgtgaactggaagccggtaaggccgccacggcgcagccggtgaaacaggccggtaacgggaatgtggccgcggtggcttctgcgccggtgatccgtgtggagcagaaactggataaggggattggcttcgcccgctttgccaaatcgctggctgcggctaaaggcgtccgatctgaagccctggaagtggcccgtcgtcagtatccggatgacagtcgtctgcatcatgtcctgaaatcggcagtgggcgcggggaccaccacggatccgcagtgggcaggcagcctgtctgaatatcaggaatacgcacaggactttattgattacctgcgtccgcagaccattatcgggcgatttggtcagggcgggatccctgcacttcgtcaggtgccattcaatatccgtgtgcacgcccaggtgtccggcggtgctgccggctgggtgggtgagggtaaggcaaaacccctgacgaagtttgattttgaatccatcaccttcagtcatgcgaaggtgtcggccattgcggtactgacggaagaattgatccgtttttccagtccggctgctgatgcactggtccgtaatgcgctggcggaagcggtggtggcgcgtctggatacagactttgtggacccgaaaaaagccgcagtggcagatgtctccccggcgtccatcacccatgatgtgaagggcacggcatcaaccggtaacccggatgcggatgcagaggctgcgtttggacagtttgtggcagcaaacctgcagcccaccggtgcggtctggctgatgtccagcaccaatgccctggcactgtccatgcgtaaaaatgcgctgggtcagaaggaatacccggacatgaccctgctgggtggctccttccaggggctgccggtgattgtctcccagtacgtgggtgaccagctggtgctggtgaatgccccggatatttatctggcggatgacggcggcgtggcagtggatatgtcccgcgaggcatcactggaaatgcagtctgagccgaccggcgacagtaccacgccgtccccggtggagctggtttccatgttccagacaggcagcgtggccatccgtgcggagcgctggatcaactggcgtcgtcgccgtactgcggcggtggcggtgatcaccggagtgaactacggcagtgcgtccggcggctga

SEQ ID NO: 7570 - DNA, 1662 bp, Escherichia coli
atgatacctgtatggagcacagcctgcccggactgggcagagcgcctgaaaaaggggctgtcgattattccggatccgatttatccggacgaggccgcacatgccctggcgatttttaaacaactgcggattgtggatgcacctggtagccctacgttcggggagtcctgtgcaccgtgggtgtttgacctggtggcggccctgtttggctcctacgatgcgcagaccggtgtacgccatatcaaggaagtttttatccttatccccaagaaaaactcgaagtccacgctggccgcggggatcatgatgactgcactgttactgaactggcggcaggcggcgggttacacgattctggccccgactgtggaggtggcggccaacgccttcaaccctgcccgggatatggtacgacgtgacgatgatctggatgacctctgccaggtacagacccatatccggaccatcacccaccgagtgacggacaccaccctgaaggtggtggcagccgatccgaatacggtgtccggtatcaagtccgtgggtacgctgattgatgagttgtggctgtttggcaagcagtgcaaggcggaggacatgttacgtgaagccataggcggccttgcctcccgcccggaagggtttgtggtgtatacgaccacccagtcgaatgaaccgcccgccggggtgttcagacagaaactgcagtacgcccgggatgtgcgcgacggcaaaattcatgatccgcactttctgccggtgatatttgaacaccctcctgaaatggtggaaagcgggactaacctgctgatggaaaacctcgccatggtcaatccgaatctcggctattcagtggatgaggcctttctgtaccgggagtaccgtaaagcccgggaagccggtgaagagacattccgggggttcatgtcaaaacacgccaatgtggaaattggtcttgccctgcgctctgaccgctgggcgggggctgatttctgggaagagcagggccgttgtatcagcctggacgatatcctgcgtcgtgctgatgtggtgacggtggggattgacggcggagggctggatgatctgctggggatgtatgtgattgggcgtgaccgggagacccgcgaatggctgggctggggccatgcctgggcgcatgaaaccgcggtggtccgacggaagagcgaggcgtcccggtttcaggatcttgttgcctgtggagatatgaccattgtccggcgtgtcggggatgacacggcggaagtggcggaatatgtgcgtcgcattcatgaggctgagttactggaccatatcggtattgacccgtcaggggtggggcagattctggattcactggcggaagccgggatccccgacggaattgtggtggggataagccagggctggaaactgggcggggccattaaaaccaccgagcgcaaactggctgaaggggtgctggtgcatggtgaccagcccctgatggcctggtgtgtcggcaatgcccgggtggagcctaaaggtaacgccattcttatcaccaaacaggccagtggacggggaaaaattgacccgctgatggcgctgttcaatgcggtctccctgatgtcccttaacccggaaccgaaaaagaaagaatatgcggtttttttcatataa

SEQ ID NO: 7571 - DNA, 564 bp, Escherichia coli
gtgctgacaacgcaaaaacgaaaatttgcgctggcgctcatgtccgggaaaaacaaaacagcgtcagccattgccgccggttattcggcgaagaccgccagggttaaaggctcgcagctggcaaaagatcctgaggtgcttgcgtttatagcccgtaaacaatgcgagacggtggaggtggatgaggttcctgtttaccggcagaaaaaatcagagcaggaggataaaccccgtcgccgtgaggcggctgcaataccacagccggacgaaaacaatctggagatgccaccgtccgcggtgatgtctcctggtattgaatatatggaggatggtcttcccgatccggtgaaagccatggggcggatcctggtggaaaacctctgcattgatccgaaactggcactggatgcggcctggcgtctggcgcagttcacgcaccataaaaaaggggataccgggaaaaaatcggcaaaaggtgatgccgcgaaaaaagcggctaaccgttttgcggtgccaccgcccccccgactggtggtgaataacgataatgagggcaacggatga

SEQ ID NO: 7572 - DNA, 366 bp, Escherichia coli
atggctgagcttcgtacactccagagcagaatcaaaacactgaatacccgacgggtgaatattctgaagggggagcagcgtcgtgtcagtggcagtgcacgtgtttccctcaagcgtcatatctggctgagggacgccgggcagtgctgtatctgtggtcgtgtggttgacctctgtgacagtgaactcgatcaccgaattgcacttcagttcggtggtggtaatgaggagacgaatctttggacgctctgtgccgaatgccatcgacaaaagtctgctcgtgaagcggcgagtggtatgccggacccgacgctgccggaggtgtccggaggtagtggcagagaggacgacatcatcggactgtaa

SEQ ID NO: 7573 - DNA, 201 bp, Escherichia coli
atgtcatcgaaaaaccggacccgcagaaccacaacccgcaatatccgtttccccaatcacataattgaacagatcaacatcgcccttgagcataaagggtccggtaacttttcagcgtgggttattgaagcctgcaggagaaggctggcaacagatgcaacgcatctgcgcccggccagcatgacaaataacgagaaatga

SEQ ID NO: 7574 - DNA, 216 bp, Escherichia coli
atgaagaaattacgggtaaccgtagaaccttttcagggaacaattccgttccgtattttgcagcgtggtcgtgttcttgttgaaggttcgttcagtggtaaatgtacgcaattacactcccggacctttcaggtgaatgccacgaatgaagagctaaccgtggagtgtacgatgaatgccgctaaatgccgcatggtattacagccagtgtgttga

SEQ ID NO: 7575 - DNA, 495 bp, Escherichia coli
atgaaccgtgttctgtgtgtggtgattattgtcatgctggtagcctgtggtgtgcttagtctggggctgaatcattaccgcgataacgccatcacctacaaagcgcagcgcgataaaaaagtcagtgagctgaaactggcgaatgccactattactgacatgcagcagcgccagcgagatgtcgctgcgcttgatgccagatacacgaaggaattagccgatgcgagagctgaaaatgaaactctgcgcgctgatgttgccgctggtcgtaagcgcctgcgggtcaacgccacctgccccggtaccgtgcgtgaagccaccggcacctccagcgtggataatgcaaccggcccccgactggcagacaccgctgaacgggattatttcatcctcagagaacggttgatgacaatgcagaagcagctggaaggggcgcaggaatatatccgcactcagtgcactaagctggctttttattatccggaggatacatga

SEQ ID NO: 7576 - DNA, 132 bp, Escherichia coli
atgtcagacaaactcataacgccggcaaaggtcctgtgtgtgattgtcggtatttcattttcactaatgctggttgctctttttctgtccctcgcctgggtgatgttgtcttcgtcggggctgctggggtga

SEQ ID NO: 7577 - DNA, 534 bp, Escherichia coli
atgaacgcaaaaatcagatacggcctgtcggctgccgttctggcgctgattgccgctggtgcgcctgcgcctgacattctcgaccagtttctggatgaaaaggaaggtaaccacaccacggcataccgtgatggcgcgggtatctggaccatctgtcggggtgccacgatggtggatggaaaacccgtttttcccggtatgaaactgtcgaaggaaaaatgcgaccgggttaacgccattgagcgtgataaggcgctggcatgggtggagaaaaacatcaaagtgccattgaccgaaccccagaaagcggggatcgcgtcattctgtccgtacaacattggtcccggtaagtgtttcccgtcgacgttttacagacgaattaatgcaggtgatcgcaggggagcatgcgaagcgattcgctggtggattaaggacggtggcagagactgccgtattcgctcaaataactgttacggtcaggtattccgtcgtgaccaggagagcgcgctggcgtgctggggaatcgacagataa

SEQ ID NO: 7578 - DNA, 273 bp, Escherichia coli; identical to SEQ ID NO: 7046

SEQ ID NO: 7579 - DNA, 330 bp, Escherichia coli
atgaagaccttccgctggaaagtgaaacccggtatggatgtggcttcggtcccttctgtaagaaaggtgcgctttggtgatggctattctcagcgagcgcctgccgggctgaatgccaacctgaaaacgtacagcgtgacgctttctgtcccccgtgaggaggccacggtactggagtcgtttctggaagagcacgggggctggaaatcctttctgtggacgccgccttatgagtggcagcagataaaggtgacctgcgcaaaatggtcgtcgcgggtcagtatgctgcgtgttgagttcagcgcagagtttgaacaggtggtgaactga

SEQ ID NO: 7580 - DNA, 2562 bp, Escherichia coli
atggctgaaccggtaggcgatctggtcgttgatttgagtctggatgcggccagatttgacgagcagatggccagagtcaggcgtcatttttccggtacggaaagtgatgcgaaaaaaacagcggcagtcgttgaacagtcgctgagccgacaggcgctggctgcacagaaagcggggatttccgtcgggcagtataaagccgccatgcgtatgctgcctgcacagttcaccgacgtggccacgcagcttgcaggcgggcaaagtccgtggctgatcctgctgcaacagggggggcaggtgaaggactccttcggcgggatgatccccatgttcagggggcttgccggtgcgatcaccctgccgatggtgggggccacctcgctggcggtggcgaccggtgcgctggcgtatgcctggtatcagggcaactcaaccctgtccgatttcaacaaaacgctggtcctttccggcaatcaggcgggtctgacggcagatcgtatgctggtcctgtccagagccgggcaggcggcagggctgacgtttaaccagaccagcgagtcactcagcgcactggttaaggcgggggtaagcggtgaggctcagattgcgtccatcagccagagtgtggcgcgtttctcctctgcatccggcgtggaggtggacaaggtcgctgaagccttcgggaagctgaccacagacccgacgtcggggctgacggcgatggcacgccagttccataacgtgacggcggagcagattgcgtatgttgctcagttgcagcgttccggcgatgaagccggggcattgcaggcggcgaacgaggccgcaacgaaagggtttgatgaccagacccgccgcctgaaagagaacatgggcacgctggagacctgggcagacaggactgcgcgggcattcaaatccatgtgggatgcggtgctggatattggtcgtcctgataccgcgcaggagatgctgattaaggcagaggctgcgtttaagaaagcagacgacatctggaatctgcgcaaggatgattattttgttaacgatgaagcgcgggcgcgttactgggatgatcgtgaaaaggcccgtcttgcgcttgaagccgcccgaaagaaggctgaacagcagagtcaacaggacaaaaatgcgcagcagcagagcgataccgaagcgtcacggctgaaatataccgaagaggcgcagaaggcttacgaacggctgcagacgccgctggagaaatatgccgcccgtcaggaagaactgaataaggccctgaaagacggaaaaatcctgcaggcagattacaacacgctgatggcggcagcgaaaaaggactatgaaacgacactgaaaaagccgaagcagtccggcgtgaaggtgtctgcgggcgatcgtcaggaagacagtgctcatgctgccctgctgacgcttcaggctgaactccggacgctggagaagcatgccggagcaaatgagaaaatcagccagcagcgccgggatttgtggaaggcggagagtcagttcgcggtactggaggaggcggcgcaacgtcgccagctgtctgtacaggagaaatccctgctggcgcataaagatgagacgctggagtacaaacgccagctggctgcacttggcgacaaggttacgtatcaggagcgcctgaacgcgctggcgcagcaggcggataaattcgcacagcagcaacgggcaaaacgggccgccattgatgcgaaaagccgggggctgactgaccggcaggcagaacgggaagccacggaacagcgcctgaaggaacagtatggcgataatccgctggcgctgaataacgtcatgtcagagcagaaaaagacctgggcggctgaagaccagcttcgcgggaactggatggcaggcctgaagtccggctggagtgagtgggaagagagcgccacggacagtatgtcgcaggtaaaaagtgcagccacgcagacctttgatggtattgcacagaatatggcggcgatgctgaccggcagtgagcagaactggcgcagcttcacccgttccgtgctgtccatgatgacagaaattctgcttaagcaggcaatggtggggattgtcgggagtatcggcagcgccattggcggggctgttggtggcggcgcatccgcgtcaggcggtacagccattcaggccgctgcggcgaaattccattttgcaaccggaggatttacgggaaccggcggcaaatatgagccagcggggattgttcaccgtggtgagtttgtcttcacgaaggaggcaaccagccggattggcgtggggaatctttaccggctgatgcgcggctatgccaccggcggttatgtcggtacaccgggcagcatggcagacagccggtcgcaggcgtccgggacgtttgagcagaataaccatgtggtgattaacaacgacggcacgaacgggcagataggtccggctgctctgaaggcggtgtatgacatggcccgcaagggtgcccgtgatgaaattcagacacagatgcgtgatggtggcctgttctccggaggtggacgatga

SEQ ID NO: 7581 - DNA, 423 bp, Escherichia coli
atgttcctgaaaaccgaatcatttgaatataacggcgtgaccgtcacgctttctgaactgtcagccctgcagcgtattgagcatcttgccctgatgaaacggcaggcagaaccggcgggatccgacagcaaccggcaggttactgtggaagacgtcatcagaaccggcgcgtttctggtggcgatgtccctgtggcataaccatccgaagaagacgcagatgccgtccatgaatgaagccgttaaacagattgagcaggaagtgcttaccacctggcccacagaggcaatttctcatgctgaaaacgtggtgtaccggctgtccggtatgtatgagtttgtggtgaataatgcccccgaacaggcagaggacgccgggcctgcagagcctgtttctgcgggaaagtgttcgacggtgagctga

SEQ ID NO: 7582 - DNA, 741 bp, Escherichia coli
atgcctgtaccaaatccagtaatgccggtgaaaggggccgggaccaccctgtgggtttataaggggaacggtgacccttatgcgaacccgctttcagacgttgactggtcgcgtctggctaaagttaaagacctgacgcccggcgaactgagcgctgagtcctatgacgacagctatctcgatgatgaagatgcggactggactgcgaccgggcaggggcagaaatctgccggagataccagcttcacgctggcgtggatgcccggagagcaggggcagcaggcgctgctggcgtggtttaatgaaggggatacccgtgcctataaaatccgcttcccgaacggcacggtcgatgtgttccgcggctgggtcagcagtatcggtaaggcggtgacggcgaaggaagtgatcacccgcacggtgaaagtcaccaacgtgggacgtccgtcgatggcagaagatcgcagcacggtgacggcgacaaccggcatgacggtgacacccgccagtgcttccgtagtgaaagggcagagcactacgctgaccgtggcattccagccggagggcgcaaccgacaagagcttccgtgcggtgtctgcggataaaacaaaagccaccgtgtcggtcagcggtatgaccatcaccgtgaacggcgttgctgcaggcaaggtcaacattccggttgtatccggtaatggtgagtttgctgcggttgcagaaatcaccgtcaccgccagttaa

SEQ ID NO: 7583 - DNA, 396 bp, Escherichia coli
atgaaacatacagaactccgtgcagccgtactggatgcactggaaaaacatgacaccggggcgacgctttttgatggtcgccccgctgtttttgatgaggaggattttccggcagttgccgtttatctcaccggcgctgaatacacgggcgaagagctggacagcgatacctggcaggcggagctgcatattgaagttttcctgcctgctcaggtgccggattcagagctggattcgtggatggagtcccggatttatccggtgatgagcgatgtcccggcactgtcagatttgatcaccagtatggtggccagtggctatgactaccggcgcgacgatgatgcgggcctgtggagttcagccgatctgacttatgtcattacctatgaaatgtga

SEQ ID NO: 7584 - DNA, 579 bp, Escherichia coli
atggccataaaaggtcttgagcaggccgttgaaaacctcagccgtatcagcagaacggcggtgcccggtgccgccgcaatggccattaaccgcgttgcttcatccgcgatatcgcagtcggcgtcacaggttgcccgtgagacaaaggtacgccggaaactggtaaaggaaagggccaggctgaaaagggccacggtcaaaaatccgcaggccagaatcaaggttaaccggggggatttgcccgtaatcaggctgggtaacgcgcgggttgtcctgtcccgacgcaggcgtcgtaaaaaggggcagcgttcatccctgaaaggtggcgacagcgtgcttgtggtgggaaaccgtcgtattcccggcgcgtttattcagcaactgaaaaatggccgatggcatgtcatgcagcgtgtggccgggaaaaaccgttaccccattgatgtggtgaaaatcccgatggcagtgccgctgaccacggcgtttaaacagaatattgagcggatacggcgtgaacgtcttccgaaagagctgggctatgcgctgcagcatcaactgaggatggtaataaagcgatga

SEQ ID NO: 7585 - DNA, 354 bp, Escherichia coli
gtggctgatttcgataacctgttcgatgctgccattgtccgcgccgatgaaacgatacgcgggtacatgggaacgtcagccaccatgacatccggtgagcagtccggcgcagtaatacgtggtgtttttgatgaccctgaaaatatcagctatgccggacagggcgtgcgcgttgaaggctccagcccgtccctgtttgtccggactgatgatgtgcggcagctgcggcgcggcgacacgctgaccatcggtgaggaaaacttctggatagaccggatttcgacggatgatggcggaagctgtcatctctggcttgggcgtggcgtgccgcctgccgttaaccgtcgtcgctga

SEQ ID NO: 7586 - DNA, 399 bp, Escherichia coli
atgacgaaagatgaactgattgcccgtctccgctcgctgggtgaacaactgaaccgtgatgtcagcctgacggggacgaaagaagaactggcgctccgtgtggcagagctggaagaggagcttgatgacacggatgaaactgccggtcaggacacccctctcagccgggaaaatgtgctgaccggacatgaaaatgaggtgggatcagcgcagccggataccgtgattctggatacgtctgaactggtcacggtcgtggcactggtgacgctgcatactgatgcacttcacgccacgcgggatgaacctgtggcatttgtgcttccgggaacggcgttccgtgtctctgccggtgtggcagccgaaatgacagaacgtggcctggccagaatgcaataa

SEQ ID NO: 7587 - DNA, 333 bp, Escherichia coli
atgacgagcaaagaaacctttacccattaccagccgctgggcaacagtgacccggctcataccgcaaccgcgcccggcggattgagtgcgaaagcgcctgcaatgaccccgctgatgctggacacctccagccgtaagctggttgcgtgggatggcaccaccgacggtgctgccgttggcattcttgcggttgctgctgaccagaccagcaccacgctgacgttctacaagtccggcacgttccgttatgaggatgtgctctggccggaggctgccagcgacgagacgaaaaaacggaccgcgtttgccggaacggcaatcagcatcgtttaa

SEQ ID NO: 7588 - DNA, 1602 bp, Escherichia coli
atgaaaacgcccaccattcccacccttctgggaccggacggcatgacatcgctgcgtgaatatgccggttatcacggcggtggcagcggatttggtgggcagttgcgggcgtggaacccaccgggtgaaagtgtggatgcagccctgctgcccaactttacccgtggcaatgcccgcgcagacgatctggtacgcaataacggctatgctgccaacgccatccagctgcatcaggatcatatcgtcgggtcttttttccggctcagtcatcgcccaagctggcgctatctgggcatcggggaggaagacgcccgtgccttttcccgcgaggttgaagcggcatggaaagagtttgccgaggatgactgctgctgcattgacgttgagcgaaaacgcacgtttaccatgatgattcgggaaggtgtggccatgcacgcctttaacggtgaactgttcgttcaggccacctgggataccagttcgtcgcggcttttccggacacagttccggatggtcagcccgaagcgcatcagcaacccgaacaataccggcgacagccggaactgccgtgccggtgtgcagattaatgacagcggtgcggcgctgggatattacgtcagtgaggacggctatcctggctggatgccgcagaaatggacatggataccccgtgagttaccgggcggtcgtgcttcgttcattcacgtctttgaacccgtggaggacgggcagacccgcggtgcaaatgtgttttacagcgtgatggagcagatgaagatgctcgacacgctgcagaacacgcagctgcagagcgccattgtgaaggcgatgtatgccgccaccatcgagagtgagctggatacgcagtcagcgatggattttattcttggcgcgaacagtaaggagcagcgggacaggctgaccggctggattggtgaaattgccgcgtattacgccgcagcaccggtccggctgggaggcgcaaaagtgcctcacctgatgccgggtgactcactgaacctgcagacggctcaggacacggataacggctactccgtgtttgagcagtcactgttgcggtatatcgctgccgggctgggtgtctcgtatgagcagctttcccggaattacgcccagatgagctactccacggcacgggccagtgcgaacgagtcgtgggcgtactttatggggcggcgaaaattcgtcgcatcccgtcaggcgagccagatgtttctgtgctggctggaagaggccatcgctcgccgcgtggtgacgttaccttcaaaagcgcgcttcagttttcaggaagcccgaagtgcctgggggaactgcgactggataggctccggtcgtatggccatcgatggtctgaaagaagtacaggaagcggtgatgctgatagaagccggactgagtacctacgagaaagagtgcgcaaaacgcggtgacgactatcaggaaatttttgcccagcaggtccgtgaaacgatggagcgccgtgcagccggtcttaaaccgcccgcctgggcggctgcggcatttgaatccgggctgcgacaatcaacagaggaggagaagagtgacagcagagctgcgtaa

SEQ ID NO: 7589 - DNA, 477 bp, Escherichia coli
atgcaaaatcttaatcctcagcgtaaagccttcctcgatatgttggcgtggtcagaaggaacggataacgggcgacaaccgacacgtaaccacggttatgatgttattgttggcggcgaactgtttactgattactccgatcaccctcgcaaacttgtcacgctacaccccaaactcaaatcaacagccgccggacgttatcagcttctttcacgctggtgggatgcttaccgtaaacagcttggtttgaaagacttctcccccaaaagccaggacgcagtggcattacagcagattaaagagcgtggtgctttaccgatgattgatcgcggtgatatccgtcaggcaatcgaccgttgcagcaatatctgggcttcactgccgggcgctggttatggtcagttcgagcataaggctgacagcctgattgcaaaattcaaagaagctggcggaacgctcagagagagtgaggtatga

SEQ ID NO: 7590 - DNA, 291 bp, Escherichia coli
atggctgacttgagaaaagcagcgcgtggtcgggaatgccaggtaagaatccctggcgtatgtaatggcaatcctgaaacgtcagtactggcacatatccggctggctggattgtgcggtaccggtatcaaaccgccagacctgattgccaccattgcatgttctgcctgccacgacgaaatcgaccgtcgcacgcattttgttgacgctggatatgcaaaagaatgtgcgctggaaggtatggcgagaacacaggttatctggctgaaagagggggtaattaaggcgtga

SEQ ID NO: 7591 - DNA, 171 bp, Escherichia coli
atggctacaccgcttattcgtgtcatgaacggacacatctacagagtaccaaatcgtcgtaagcgtaagcctgagctgaaaccatccgaaataccaacactgctcggatataccgccagcctggttgataaaaaatggttgcgactggcagcaaggaggaatcatggctga

SEQ ID NO: 7592 - DNA, 456 bp, Escherichia coli
gtgaacctaccacaagatggcatcaaactgcatcgcggtaacttcatcgctatcggccagcagatccagccttatctggagaacggaaaatgctttcgcatggtgcttaaaccgtggcgtgagaaacgcagtctttcccagaatgcactcagccacatgtggtacagcgaaatcagtgaatacctcatcagcagggggaaatcgttcgctaccgcagcatgggtaaaagatgctctcaaacacacatacctcggttatgaaaccaaggacctggttgatgtcgtaaccggcgaaatcactactatccagtcgttacgccatacctccgatctcgataccggagagatgtatgtcttcctgtgtaaggttgaagcctgggcggtgaatattggctgccacctgactattccgcagagctgcgagttccagctgctgcgcgacaagcaggaggcgtaa

SEQ ID NO: 7593 - DNA, 426 bp, Escherichia coli; identical to SEQ ID NO: 6184

SEQ ID NO: 7594 - DNA, 1071 bp, Escherichia coli
atgagtacagaaatgaaaacggggctggtgctgtccggtggcggggcggtgggcgcttatcaggcgggagtggttaaggcactggcagagtgtggtacacagatcagcatggtttcaggggccagcattggcgcattcaatggtgccattatcgcggcctctcccgatctgtcagaagctgccgtacgcctggaggcgctctgggatcatctggggaataatcaggtgctgtcggtaaaccgattggtttacttttcattgctgaaaaaattgttccaggcaatgaacctctgccagatccccggacgtgcaggagcactgcttacgacgcttcttcgccatatatcgatactcaacgggtttgacaatctgatggctcagccgttgttgtcagatgagcccctgacagcgctgttggatcattatcttgatactgatgctctggcagacgggctaccgctgtatgtgtcgctgtaccccacagaagggggcatgcaggatattattgactgcattcgtgctgaactgggtgccggaaccacgaaaaacgccgtttttcagcatatccagagcctgccccgcggacagcagaaagaggctctgcttgcgtcagccgcgctgcccctgctgttccgtccccgtgaggttcaggggacaatgttcggtgatggtggtatgggaggatggcgaaatatgcagggaaatacccctgtgacgcctctggtcgatgccggatgcaatatggtgattgtgacgcatctgagtgacggttctttatgggatcgccaggcttttccggtcaccacaatccttgagatccgtccccggaaaaggctgaaatatgcaggtgatggtgacaacagcggcggtctgctcagtttcacgttggcacataccgacgcctggcgtcagcagggctatgaagacacgatgctgacgatggagcatatccggaaaccgctggcagcacgtcaggtactgtcccggtcagaaacggtgttgcagaaaagtctggagataacggaagaggcagatttggcactgagaaacgcgatggcccggattaaataa

SEQ ID NO: 7595 - DNA, 693 bp, Escherichia coli
atgatggaactgcaacatcaacgactgatggcgctcgccgggcagttgcaactggaaagccttataagcgcagcgcctgcgctgtcacaacaggcagtagaccaggaatggagttatatggacttcctggagcatctgcttcatgaagaaaaactggcacgtcatcaacgtaaacaggcgatgtatacccgaatggcagccttcccggcggtgaaaacgttcgaagagtatgacttcacattcgccaccggagcaccgcagaagcaactccagtcgttacgctcactcagcttcatagaacgtaatgaaaatatcgtattactggggccatcaggtgtggggaaaacccatctggcaatagcgatgggctatgaagccgtccgtgcaggtatcaaagttcgcttcacaacagcagcagatctgttacttcagttatctacggcacaacgtcagggccgttataaaacgacgcttcagcgtggagtaatggccccccgcctgctcatcattgatgaaataggctatctgccgttcgggcagtgggatcaaacgttcgccggtgatgcagcactgacctcagcgatgctggaccgtatcttacaccactcacatgtcgttcaaatcaaaggagaaagctatcgactcagacagaaacgaaaagccggggttatagcagaagctaatcctgagtaa

SEQ ID NO: 7596 - DNA, 426 bp, Escherichia coli; identical to SEQ ID NO: 6184

SEQ ID NO: 7597 - DNA, 429 bp, Escherichia coli
atgaaaaaatttattaatgtttacattaaatcagattatgacatagttattcttcgcctgtctgttattataatatttatgctcttcgggacctataaatggtttgattttgaagtgatggccctcaagcccctgatttctcccacgtggctgaatatcctgtacattatgtttggtgttcatggggggagctatttcctcggcatagtagaaactatcacttttctagcactgagtatcggcttcttcaggcctgctgctggcatactgggagatattatcgttattgttacaggtttagtcacactaagtctgttaccacaactgggaaaagttgacagttttgtcatcaaagatgtgctgctgttaggtgctggtagtgtcctgctgaaatatgatttgaaaaattatttaaatatcaaaaactga

SEQ ID NO: 7598 - DNA, 1194 bp, Escherichia coli; identical to SEQ ID NO: 5954

SEQ ID NO: 7599 - DNA, 1725 bp, Escherichia coli; identical to SEQ ID NO: 5953

SEQ ID NO: 7600 - DNA, 3888 bp, Escherichia coli
atgaataaaatatactcccttaaatatagtgctgccactggcggactcattgctgtttctgaattagcgaaaagagtttctggtaaaacaaaccgaaaacttgtagcaacaatgttgtctctggctgttgccggtacagtaaatgcagcaaatattgatatatcaaatgtatgggcgagagactatcttgatcttgcacaaaataaaggtattttccagcccggagcaacagacgtaacaatcactttaaaaaacggagataaattctctttccataatctctcaattccggatttttctggtgcagcagcgagtggcgcagctaccgcaataggaggttcttatagtgttactgttgcacataacaaaaagaaccctcaggccgcagaaactcaggtttacgctcagtcttcttacaaggttgttgacagaagaaattccaatgattttgagattcagaggttaaataaatttgttgtggaaacagtaggtgccaccccggcagagaccaaccctacaacatattctgatgcattagaacgctacggtatagtcacttctgacggttcaaaaaaaatcataggttttcgtgctggctctggaggaacatcatttattaatggtgaatccaaaatctcaacaaattcagcatatagccatgatctgttaagtgctagtctatttgaggtcacccaatgggactcatacggcatgatgatttataaaaatgataaaacatttcgtaatcttgaaatattcggagacagcggctctggagcatacttatatgataacaaactagaaaaatgggtattagtcggaacaacccatggtattgccagcgttaatggtgaccaactgacatggataacaaaatacaatgataaactggttagtgagttaaaagatacctatagtcataaaataaatctgaatggcaataatgtaaccataaaaaacacagatataacattacaccaaaacaatgcagataccactggtactcaagaaaaaataactaaagacaaagatattgtgttcacaaatgggggaaatgtcctgtttaaggataatttggattttggtagcggtggtattatctttgacgaaggccatgaatataacataaacggtcagggatttacatttaaaggagcaggaattgatatcggaaaagaaagcattgtaaactggaatgcattgtattccagtgatgatgttttacacaaaataggccccggtactctgaatgttcaaaaaaaacagggggcaaatataaagataggtgaaggaaatgttattcttaatgaagaaggaacatttaacaatatataccttgcaagcggaaatggtaaggtaatactaaataaagataattcccttggcaatgatcaatatgcggggatattttttactaaacgtggtggcacgctagatttaaatggacacaatcagacttttactagaattgccgccactgacgatggaacaacaataactaactcagatacaacgaaagaagccgttctggcaatcaataacgaagactcctacatatatcatgggaacataaatggcaatataaaactaacgcacaatattaattctcaggataagaaaactaatgcaaaattaattctggatggtagtgtcaacacaaaaaatgatgttgaagtcagtaatgccagtcttaccatgcaaggccatgcaacagagcatgcaatattcagaagcacagcgaatcattgctccctggtatttctttgtggaacggactgggtcaccgttttgaaagaaacagagagttcatataataaaaagttcaattctgatcacaaaagtaataatcagcagacctcatttgatcagccagactggaaaaccggggtgtttaaatttgatacattacacctgaacaatgctgacttttcaatatcacgcaatgccaatgttgaaggaaatatatcagcaaataaatcagctatcacaatcggcgataaaaatgcttacattgataatcttgcagggaaaaatattactaataatggttttgacttcaaacaaactatcagtactaatctatccataggagaaactaaatttacaggtggcatcactgcacataacagccaaatagccataggtgatcaagctgtagttacacttaatggtgcaacctttctgaataatactcctataagtatagataaaggagcaaaagttatagcacaaaattccatgttcacaacaaaaggtattgatatctccggtgagctgactatgatgggaatccctgaacagaatagtaaaactgtaacgccgggtctccactacgctgctgatggattcaggctgagtggtggaaatgcaaatttcattgccagaaatatggcatctgtcaccggaaatatttatgctgatgatgcagcaaccattactctgggacagcctgaaactgaaacaccgactatatcgtctgcttatcaggcatgggcagagactcttttgtatggctttgataccgcctatcgaggcgcaataacagcccccaaagctacagttagcatgaataatgcgatctggcatctaaatagccagtcatcaattaatcgtctagaaacaaaagacagtatggtgcgttttactggtgataatgggaagtttacaacccttacagtggacaaccttactatagatgacagtgcatttgtgctgcgtgcaaatctggcccaagcagatcagcttgttgtcaataaatcgttgtctggtaaaaacaaccttctgttagtcgacttcattgagaaaaatggaaacagcaacggactgaatatcgatctggtcagcgcaccaaaaggaactgcagtagatgtctttaaagctacgactcggagtattggcttcagtgatgtaacaccggttatcgagcaaaagaacgatacagacaaagcaacatggactctgatcggctataaatctgtggccaacgccgatgcggctaaaaaggcaacattactgatgtcaggcggctataaagccttccttgctgaggtcaacaaccttaacaaacgtatgggtgatctgcgtgacattaacggtgagtccggtgcatgggcccgaatcatgagcggaaccgggtctgccggcggtggattcagtgacaactacacccacgttcaggtcggtgcggataacaaacatgaactcgatggccttgacctcttcaccggggtgaccatgacctataccgacagccatgcaggcagtgatgccttcagtggtgaaacgaagtctgtgggtgccggtctctatgcctctgccatgtttgagtccggagcatatatcgacctcatcggtaagtacgttcaccatgacaacgagtataccgcaactttcgccggccttggcaccagagactacagctcccactcctggtatgccggtgcggaagtcggttaccgttaccatgtaactgactctgcatggattgagccgcaggcggaacttgtttacggtgctgtatccgggaaacagttctcctggaaggaccagggaatgaacctcaccatgaaggataaggactttaatccgctgattgggcgtaccggtgttgatgtgggtaaatccttctcgggtaaggactggaaagtcacagcccgcgccggccttggctaccagtttgacctgtttgccaacggtgaaaccgtactgcgtgatgcgtccggtgagaaacgtatcaaaggtgaaaaagacggtcgtatgctcatgaatgttggtctcaacgctgaaattcgcgataatcttcgcttcggtcttgagtttgagaaatcggcatttggtaaatacaacgtggataacgcgatcaacgccaacttccgttactctttctga

SEQ ID NO: 7601 - DNA, 369 bp, Escherichia coli; identical to SEQ ID NO: 5950

SEQ ID NO: 7602 - DNA, 540 bp, Escherichia coli
atgcgtaaacataacgaaccttccctggaggcagaacgcgatgcgttgcgggaggaagtcgcccgactgaatcaggaaatacgccgccggcagatggagctggatattctgaaaaaggcggaggaaatcataaaaaaagacccgggcatcagtatcagtcacctgaacaacagagaaaaaacaaagatcgctgatgccctgaggcaaacatatcccctgacagaattacttcatgttctgggccttacccgtagcagttatttttatcaccgggctgcactgaaagccggtgataaatacgccacgatacgtacgatgctgacagatatatttaacagtaattaccagtgttatggctatcgtcgcctgcatgcgatgctcaggcatgagggggggcggctatcagaaaaggttgtacgcagacttatggtggaggaacagcttgtcgtcagccgtaaccgtcgtcgtcgctacagctcatattgcggagaaatcggaccggctccggataaccttatcgccagagattttaaggcgtag

SEQ ID NO: 7603 - DNA, 360 bp, Escherichia coli
atgaaagataacagcacaaccgccaccccagaagcctggaaaatgcgttttctggccaacgggacatccggcacatggttttacactgacgacattacagtcactgacgcgtggcttcgcgcgcacccggatgatgtggaggttatccctctctgccggataccaccccgtcagcattcccatgaacaacatattgaagaactccgtgcagccctggcccggatgctgcatatgcatcatatgatgctggaaaccacgcattacagggaaaacatcaccgatgcccgttgtatccgtgaaatgcatgaagctccattacaggcgctcaatattctggccagatacccgcacgaggtgtga

SEQ ID NO: 7604 - DNA, 243 bp, Escherichia coli; identical to SEQ ID NO: 6065

SEQ ID NO: 7605 - DNA, 2091 bp, Escherichia coli; identical to SEQ ID NO: 6130

SEQ ID NO: 7606 - DNA, 906 bp, Escherichia coli; identical to SEQ ID NO: 6961

SEQ ID NO: 7607 - DNA, 366 bp, Escherichia coli
atgattgatgtcttagggccggagaaacgcagacggcgtactacacaggaaaagatcgctatcgttcagcagagctttgaaccgggaatgacggtctcccttgttgcccggcaacatggtgtggcagccagccagctatttctctggcgtaagcaataccaggagggaagtcttactgctgtggctgccggagaacaggtcattcctgcctctgaacttgctgccgccatgaagcagattaaagaactccagcgtctgctcggcaaaaaaacgatggaaaatgaactccttaaagaagccgttgaatatgggcgagcaaaaaagtggatagcgcacgcgcccttattgcccggggatggggagtaa

SEQ ID NO: 7608 - DNA, 987 bp, Escherichia coli; identical to SEQ ID NO: 6009

SEQ ID NO: 7609 - DNA, 936 bp, Escherichia coli; identical to SEQ ID NO: 6007

SEQ ID NO: 7610 - DNA, 426 bp, Escherichia coli; identical to SEQ ID NO: 6184

SEQ ID NO: 7611 - DNA, 330 bp, Escherichia coli
atggagacgtttcactggaaagtgcgcccggatatgaatgtggtatcagagccgaaagtggtgacagtgaagctgggcgatggttatgaacagcgtcgtgcggcgggactgaataaccagttgtcgacttacagcgtgacgatacgtgttcgtaaatgtgaacacccatctttaaaagcctttctggaacggcacggtggcgtccgcgcatttcagtggacgccaccttatgactggaagccgatcagggtggtttgtcgtaaatggtcggcaagcgtgggggcgttgtgggtaaccataacggcagattttgaacaggtcgtggcatag

SEQ ID NO: 7612 - DNA, 3066 bp, Escherichia coli
atggaccagatagccaacctggtcattgatttggggattgatgcggcagagtttaaaaatgaaattccccgtatcaaaaaccttctgaatggtgccgccagcgatgcagaacggtcttctgcccgtatgcagcgttttatggagcgtcagactcaggccgcccggcagacaacgcaggcggcttcttcggctgcaacagccgcatccgtccatgcgcagacggtggagaagaacgcacaggctcatgaacgcatggcccgcgaggtggagaaaacccgccagcgcatggaggcgctgagccagaaaatgcgcgaggaacaggcgcaggccatggctctggcggaggctcaggataaagcggctgctgcgttttatcgtcagattgacagtgtgaaacaggccagtgcggggctgcaggaattacagcgtattcagcagcagatccgacaggccagaaacagtggcgggattggtcagcaggattatctggcgctgatttctgaggttacggcgaaaacccgtgttcttacacaggctgaggaagaggctacccgacagaaagtggcgtttatccgtcagcttaaagagcaggcaacccgccagaatctttcatcttctgagttgcttcgtgctaaggctgcccagctgggggtaagcagtgctgcagaagtgtatatccgcaaaatggagcaggcaggaaaagccacgcattcgctgggtctgaaaagtgcagcagcccgccaggagataggcgttctgataggtgaactggcccgcggcaatttaggggcgctgaggggatccgggataacgctggctaaccgtgccggatggatagacacactgatgtcaccgaaaggcatgatgctgggcggggttattggcggtattgccgcggctgtctatggtctgggtaaagcctggtatgacggtcagaaggagggggaagaatttaaccgccagttgtcgctgacggggcattatgccggagtcactgccgggcagctgtggacgctcagtcgtgctatttccgggaatggtatcacacaacatgctgcagccggtgcgttggctcaggtggtggggagtggtgcatttcgtggaaacgatatcggtatggtggcgagagctgccgcacagatggagcgatcggttggccagtcggtcagcgataccataaatcagtttaagcggctgaaggatgatcctgtaaatgccgcgaaggctctggacaatgagctgcattttcttactgccactcagcttgagcagatacgtgtccttggggatcagggacggtccagtgatgctgcaaggatagccatgtctgcactggcagaggaaaccggtcggcgtactgcggatattgataataacctcaatgcgcttggcagtacgctgaagtatctgtctgatttgtggagtcgtttctgggatgcggccatgaatattggttgtgaagactcgctggatgaacagattgccgctttacaggagaaaatgtcgcgggcgaaaagactcccctggacggcatcatcttctcaggttgaatacgatcagcagcgtcttaacgatcttcaggagaaaaaacgccagaaggatttgcaggatgcaaaagagcaggcagagcggaattatcaggagcaacagaaacgacgtaatgctgaaaatgctgcactgaaccggatgaatgaaacggaagcagcacgacatcagcgtgaaattgcgcgtattaatgccatgcagtacgccgaccaggctgtcagggatgcggcgatacaacgtgaaaatgaacgttacgagaaagccctggcatccggtaagaaaaaaacacgcgaaacccgtaatgatgaggccacccggttattgctgcagtacagtcagcaacaggcacaggtggaagggcagattgctgctgccagacagtcagcaggcattgccactgacaggatgacagaagcgcataaacagcttctggctctgcagcagcgcatcagcgatctggacgggaaaaaactgacggcagatgaaaagagtgtgctggcccgtaaagatgaactgattcaggcactgacgctgctggatgtaaaacagcaggagcttcagaaacagacggcactcaacgatctgaagaaaaaaacaattcagctgaccagtcaactggctgaagaagagcgcgctcagcgtcagcaacatgacctggatatcgccacggtgggtatgggtgatcagcagcggcagcgatatcaggtacaactgagtcttcgccagaaataccagcaacagctggagcagttgaggcgggatagtgagcagaaagggatatataacactgatgactacagaaaggccgagcaggcgctgacggagagcctgaaccgacaactgaatgagaatcgccgttactggcaacagcttgaagttgtgcagggtaactggaaaaacggagttctgcgtgcatttcaggattttaccgtggatgcagataatacggcaggaacagcagaacaggtgttctcgtcagccttcagcaacatgggaaatggcctggcaacttttgtcactaccggcaaactcaatttcaaatccttcacctcttctgtgctgtcagatatggcgaaaatcctggcgcaggcaaccatgatgaaatcgataaaagggattggcagtgtactgggatttgatttcagcagcctttccctgaatgccaatggggggatttatcagtctgctgatttgagtcgctacagtggcacggtggttaaccgtccgacgttttttgcttttgcaaaaggtgcgggtgtgatgggggaagctggacctgaagccattctgccactgcgtcgtggtgctgacggtaagctgggggttgtggcggatattggtggttcaggtatggcgatgtttgccccgcagtacaacatcgagatcaataacgatggcacgaacgggcagataggtccggctgccctgaaggtggtttatgacctcgggaaaaaagcggcagcggactttatgcaacagcaggcccgtgatggtggtcggttaagtggagcatatcggtaa

SEQ ID NO: 7613 - DNA, 495 bp, Escherichia coli
atggatcgagagttaaaaaatctgacgctgaatatcagtcaactggcagcactgtcaggtgtacatcgccagactgctgcggcaaggctgcaaaatctacccgttgcaggggggcatgaaagcaacctcaagctttatcgggtggttgatattgtgtcggcatttctggcattaccaccgccggttgcagaaggcgaaatggacgcgcatgagcgcaaagcctggtatcagtctgaacgtgagcgtcttaagttcgaacaggaaacggcgcaactcattccggccagtgatgtcagacgggagtttgccatctgggcaaaagcggtcgtgcaggtgctggagacattaccggatattctggaacgtgactgcggtctgcagcctgtcgctgtgagccgtgttcagtccattattgatgatctgcgcgatcagatagccctgcgggtgaccgaagcaggtgcggatgatgaggaggaattacagcaggaggagtaa

SEQ ID NO: 7614 - DNA, 153 bp, Escherichia coli
atgccttcgatgatagcgataattttactcatcatccttcacatttggctctgtagacagggtggtgatcacttctggagtgaatccagattaaacatctcattgctgatgcttgaagttgagcatctggcgcgcggtaaggggctgcgttga

SEQ ID NO: 7615 - DNA, 207 bp, Escherichia coli
atgcgaaagctgaaaatgatgctcttcggcgcaagcttgataatggtggtcgggtgctcgtcaaaggaaaatgctctgtgccatcctcagccgaaacctccagcgcctccggcatgggcaatgatgccaccgtcgaactctctccagttgctggacgaaacgttctcggtatccgggacggaatcatcagagaccagacagcactga

SEQ ID NO: 7616 - DNA, 705 bp, Escherichia coli
atgtcctctaattttgagcgttcgcaactgacgaaaattatgatttcgtctgcaccggtaacagcagaaaccctggattctgccagctatcttggcctgagctgtacaatcaaagaggtgcagtttaccgcaggacaaaagcaggatattgatgtcaccacgctgtgttctgttgagcaggaaaatattaacggtcttggtgccgcgtcagagatttccatgtcaggcaacttttatctgaatgctgcccagaacgcgttgcgcagtgcctatgacaatgacaccacgtatggctttaaagttatttttccgtcaggcaacggatttacctttatggcagaggtgcgtcagcatacctggtctgcaggaaccaatggtgttgtggctgcaacgttttccttgcgcctgaaaggtaaacctgtgctgacgacagagccgctgaaagtgaaggccgatttaaaaagcacgctgcgggttgcttccggagcgaaacttgaaatggcggttgaggctgcgggtggtgtgccgccttattcttatgtctggaagaaaggtggttctcctgtttccggacagacggcggcaacgttcagtaaggcatcggcagtatccggtgatgcgggtgcatatacctgcgagatttctgattcagcaagcccggttaacaaagtgacctccacttcctgcactgtaaccgtcagttaa

SEQ ID NO: 7617 - DNA, 294 bp, Escherichia coli
atgaaaaaaatgttgttttctgccgctctggcaatgcttattacaggatgtgctcaacagacgtttactgttggaaacaaaccgacagcagtaacaccaaaggaaaccatcacccatcatttcttcgtttcgggaattggacaggagaaaactgttgatgcagccaaaatttgtggcggcgcagaaaatgttgttaaaacagaaacccagcaaacattcgtaaatggatttctcggttttattactttaggcatttatactccactggaagcgcgtgtgtattgctcacaataa

SEQ ID NO: 7618 - DNA, 303 bp, Escherichia coli
atgcagcagcgtcagcgtgatgttgctgcactcgatgcaaagtactcgagagaattagccaatgcgaaagctgaaaatgaaactctgcgcgctgatgttgccgctggtcgtcgtcggttgcacatcaaagcagtctgtcagtcagtgcgtgaagccaccaccgcctccggcgtggataatgcaaccagcccccgactggcagacaccgctgaacgggattatttcaccctcagagagaggctgatcactatgcaaaaacaactggaaggaacccagaagtatattaatgagcagtgcagatag

SEQ ID NO: 7619 - DNA, 258 bp, Escherichia coli
atgattactcataacctgaaaaatgtcggatatctgattaatatatttatcagcctactcttcaccgaaatggtggtacccgtaatgctagatatcctccagatcctgactggctttaggtgtgagtttaacggttttcaccggaagccctcgcgccagctttcacttttttcagaaacgcatttttttcccacgacacaggttcaccgctgctcaagccttctgccagtaaatcccgcaggacacctggagacgtga

SEQ ID NO: 7620 - DNA, 183 bp, Escherichia coli
atggccagaacaatgacagttgctctcggagatgaactctgggagtacatagaatctctcatagaatcaggtgattatcgtacacagagtgaggtaatccgcgagtcacttcgtctccttcgagagaaacaggcagagtcacgtctccaggtgtcctgcgggatttactggcagaaggcttga

SEQ ID NO: 7621 - DNA, 294 bp, Escherichia coli
atgaattacgatgaaataacgaaaattaccgctgaacgtattagcgactacatgactgaagcagttaatacagactctatagccgttgcggaaatgtttcataacgctgcatggggagcgcgaacattgtggtttgaactcgtcacaaaaatagatatagatatacataaaaagaacaggtatgcgagttatgatcttagaaggaaaatcgaaatgcagcatgaagagtttcagaaaatgacagagcgcgagcaagtacctttattgaaatgtattagctcagacctgatctga

SEQ ID NO: 7622 - DNA, 276 bp, Escherichia coli
atggaactgaagtggaccagtaaggcgctttctgatttgtcgcggttatttgattttctggtgctggccagtaaacctgctgccgccagaacggtacagtccctgacacaggcaccggtcattctgttaactcatccacgtatgggagaacagttgtttcagtttgaacccagggaggtcagacggatttttgctggcgagtacgaaatccgttacgaaattaatggccagactatttatgtattgcgtctgtggcacacacgagaaaacaggtag

SEQ ID NO: 7623 - DNA, 279 bp, Escherichia coli
atgaaaaacaatgccgcacaagcaacaaaagtaattaccgcgcatgtgccattacctatggctgataaagtcgaccagatggccgccagactggaacgttcccggggctgggttatcaaacaggcgctttctgcatggcttgcccaggaggaggagcgtaatcgcctgacgctggaagccctggacgatgtgacatccggacaggttatcgaccatcaggctgtacaggcctggtcggacagcctcagtactgacaatccgttaccggtgccacgctga

SEQ ID NO: 7624 - DNA, 753 bp, Escherichia coli
atgatcgcaactaaaacgcctgccattgataaagctgcccgaatatttcattttattgccgggaaaggctctgccacctacagtgaaattcaccagaatgtcggattgcctcaaagcaccacctcggccctgcttgccagcctgaccacgcatgcctttctgagacaaaaaaatggccggtattatctggggctaatcttttacgagcttggtaataaagccattcaggattttgattttcgtgaactggctgaagagtcactcgtttttctccgtgaccagacccgtcttgcctgccatctgggcgttctggatggttccaccggcatctatctggcgaaaaaagaaagccagaatgcgattatcgttcgcagctggacgggaaaacgactttccctgcacagttcctcccttgggaaagtgttgttggcctggcttccggaagaccacattgatgctcttttacccacagaacaccttcctgcgtttactgcccggacaattacaacacgtaaagcgttgaaagctgagctggaggtggtccgcctgcagggatgggcgtttgataatcaggaagatgtcgacgatgtcacctgtattgccgcgccggtatttaacagtgatcaggccgttgttgccgcaataagtatttccggggttcgttttcagatgcctgaggaaaaaatacctgagtatgcgaacgcggtgatgaaagccgctggcatgatgtctgaaaagttatgcggtatatga

SEQ ID NO: 7625 - DNA, 924 bp, Escherichia coli
atgctggcccccctgtttctgggggcggtactgcataccttctggccaggtaccggcaaatactttggttcatttactaatggcatgatcaccggcgtggtccccatcctcgctgtctggctgttctgtatgggcgcctccattaaaatcagtgcaaccgggaccgttctcaaaaagtctggcacactggtagccacaaaaatcgccactgcctgggtctgtgcctttgtttttgcccagctcctaccggaagggggaatggtaaaaacaggtttctttgccggtttatctgttctggcgattgttgcggcgatggatatgaccaatgccgggctttatgcttccctgatgcaggagtacggcacaaaagaagaagccggtgcttctgtacttatctcgcttgagtccggccccctgatgacgatgattattctggggtccgccgggcaggcaacgttcgaacctgaacacctcgccggcgtcctgatcccctttctggtggggtttttgctgggtaatcttgatcccgaacttcgggaattgttttccagggccaccaaaagtctgatcccattctttgcatttgcgttggggaataccattaatcttggcgtcatcatcgacaccggactgctgggtattcttatggctctggcagtcattgttatcacaggcgtaccactgataatcatggatatcatgctgggtaagggccgtggcacggctggaattgccgcatcgagtactgctggcgctgccgtggccactccgttgctggtagccgagatcgcgccggacttcgctgaggccgcaccggcagccaccactctggtggcatcctgtgtggtgatcaccgccattgtcgtgccggtgatcactgcgttgtgggcaaaacacggagcctcccgcgtcagagcaacgtaa

SEQ ID NO: 7626 - DNA, 381 bp, Escherichia coli
atgaaaaaagacatcatttataccaccggggctcctgcccccggtggggcattatctcaggcggtgaaagccggggaaaccatttatctcgccggtcaggtcggttttgacccgcataccatgcaagtggtctcaacagatttcgatgaacaggcccgtcaggcgtttaaaaatttgctgtcggtggcagaggccgcaggagggagtgatagggatattgtgaagctgaatgcctatctgaccgacgtgaacatgttcccgcgatttaacgccattatgtcggaatacttttcgccaccgtaccccgccagggctacgttgggtatcgccgccctgccgcagggggctgttattgaaattgaagccatcatggtgctctga

SEQ ID NO: 7627 - DNA, 891 bp, Escherichia coli
atgaatcagacaatgaagttttcaggggcagtctgcccttccgtcattcctctggatgacagcggtcagatagacctcacggggctggaaaaacatatggcacgcctttctgattccggcatcaacggcattctgctatcaggtaccatcggggaatttgccacaatgagcgtccgcgaacgggcaatgctcatcctggaagcccggaaaatgagtgacctccctttgattgcccatatttcatctaccgttgaagaggacatgctttatctggctgatgccgcctatgacagtggctatgacgcagtaatggtactgccacagtattactacgcccagacatcccgtcagttacttagctatttccgcagtcttgaccgtaaacttgccggtgactggtttatctataacttcccggccagaaccggatgtgatgtggatgctcaccttgtcagaatgctggcggaaagctgcccgcggtttattggcatcaaagatactgtggactgtgcgtctcacacccgggccatcgtcaacgcggtcacaccgctgagaaaagattttgccgtattcgccggttttgatgagtactttgtacccaatctgatgaacggaggcgccggagttctttccggactgaataatgtggtgccggagctttttgcccaaattatgcgggcctatcgggccggcgacctcaatgaagtcgccggattacacaaagaaattgggcgactttccgggatatatgccattggtgatgattttgtcagtacgatcaaaaccgccatttccagaaagtatggctacatgacgccggtctcacggaatcataacggccagttaacagccgaccaggcagactgcctagacaaattgttcggtctgtaa

SEQ ID NO: 7628 - DNA, 228 bp, Escherichia coli
atgaagccgttcccggtaccggcctttacccttatcggcgacgactgcagcatctccggctcggcgatcggtaacccatccgaactgcgcacgctgaggaagttcgccggacgcagcaaagtggctccgaccaccgagctgttccctatgtcgcaaattaacgaagcgttgaaacacgttcgcgaaggcaaagcccgctaccgcgcggtgctgaaagccgacttatga

SEQ ID NO: 7629 - DNA, 867 bp, Escherichia coli
atgagaaagacctggcttccctggctgatcctgtcgccttccctgctgtttttactgctgtttacctggtttccgctggggcgttcggtgtatgacagcctgtttgatacccgcatggccaacgcgcaatacgtcgggctggataactttgcccgcctgtttgccgataacgtcttctggcagtcgctgggcaataacctactctatatcctgctgacggtgatgcccggggtgacgctcgccctgctgctggcggtcgccctgagcgagaaccatcgcgtcaaccgttggctgcgcaccgccttcttcttcccgatgattatcccgatggtcagcgccgctgcactgtggctgtttatctttatgcccggcctcggcctgctcgaccactatctggcaaagctgttcgggccgatgaacaacaactggctggggcgcagcaacagcgcgctgctggccctggcgctgatcggcgtgtggaagttcgccggctactacatgctgtttttcctcgccgggttgcagagcattccggcctcgacgcgggaagcggcgctgatggagggggctacccgcacgcaggtcttttttaaggtcacgctaccgctgctgcgcccgacgctgagctttgtgatcaccaccgcgctgatctactccatcacccagattgaccacgtggcggtgatgactcgcggcgggccggataacgccaccaccgtgctgctctattacatccagaatctcacctgggatacccacgaccttggtaaagcctccgcagccaccttcctgaccctggccggactgttcgccttctcgctgattaacctgaaactgctggagaaaggagcccactatgagcgctga

SEQ ID NO: 7630 - DNA, 888 bp, Escherichia coli
atgagcgctgacatctcgccgctgctggtccacacacccgccgctgcgcgtccgctgtggctgcgcctgcgtcgctcgtcgccctttacgctcacagtattaatgtgctgcctggcgctgctgtgggtcagcccgtttatctggatgctgaccacctcattcagcgcaactaccttcggcgacgatatggcctcgctgctgccgcgcctgccgctgactctcgataacttccgcgacgcctggaacagcgccgactggctgagcctgtacgccaacacaattatcttcaccttcggcaccttcttcgtgcagctgttgaccatcaccaccgccggctacgtctttgcctgtcacgagtttcgcggcaagcagacgctgtttctcctgttcctggtgcagctgatgatcatgccggtagtgatgatggtgccgaacatgctgaccctgaaaaccttcggtctgctcaacaccctcatcggggtgatgatgccctacttcacctcggcgttcggcgtattcctaatgcgtaaggcgttcctcgccattccgaaagagctggaggaggcggcgctgatggagggctgcagctggtggcaggtgctgttccgcgtgctgctgccgatgtcctggccgtcggtgctggccttcgctaccgtcagcattacctaccactggaacgagtacctgtggccgctgatgatgctcaacgatcccgataagcaggtgctgaccgtcgggctggtctctttcgccatgggcgccgaatccggtggccagtggggcaccatcggcgccgggacgctgatggtctgcctgccgctgatgctggcgtttatcctttttcagaaacagttcctgcggagcttcggcttctccgggatcaaataa

SEQ ID NO: 7631 - DNA, 825 bp, Escherichia coli
atgctgttagcacacatttccgatacccattttcgcagccgcggcgagaagctgtatggctttatcgacgtcaatgccgccaacgccgacgtggtctcccagcttaacgcactgcgcgagcgcccggacgcggtggtggtgagcggggatatcgtcaactgcggccgcccggaggagtatcaggtggcccgccagatcctcggcagcctgaactatccgctgtatctgatccccggcaaccacgacgacaaagcccattttctcgaacatcttcacccgctgtgcccgcagctgggcaacgatccgcaaaatatgcgctatgtggtggatgacttcgccacccgcctgctgtttatcgactccagtcatgccggcacgtcaaaaggctggctgaccgacgagaccatcggctggctggaagcccagctgttcgagggcggcgacaaaccggcaacgatctttatgcaccacccgccgctgccgctgggcaatgcgcagatggatcctattgcctgcgaaaatggccaccgtctgctggagttggtggagcgttttccgtcgctgacgcgcatcttctgcggccataaccacagcctgaccataacccagtatctccaggcgctgatctccaccattcctggcaccgtccatcaggtgccgtactgccacgaagatacccggtcctattacgatctctccccggcctcgtgcctgatgcaccgtcaggtcggcgagcagtgggtgagctaccagcactcgctggcccaccacgccggaccgtggctgtacgacgaaaacatcagttgcccaacggaagagcgctaa

SEQ ID NO: 7632 - DNA, 1074 bp, Escherichia coli
atgctcagtctgcaaaacatcagtaaacgtttcgacggcaaaccggcgctcagcgccctgtcgctggatatccacgaaggcgaattcgtggtgctggtcggcccgtcgggctgcgggaaaagcaccctgctacgcctgctcgccgggctggaaccggtcagcgaaggccaaatctggctgcatgatgagaacatcaccgccaccacgccgcgcgatcgcaacttcgcgatgatcttccagaactatgccctgtttccgcatctgtcggtgcgcgacaacatcaccttcggcatgaaggtgcgcaaggaagagaaaagcagctggcagccgcgagtggataaagtggcgcagatgctgcagctggaggcgctgctcgactgcaaaccggcgaagctctccggcggccagcgccagcgggtggcgatggcccgggcgattgtgcgtaatccgcggctgttcctgatggacgagccgctctgcaacctcgacgcccgcctgcgcagcgaagtgcgcgacagcattatggccctccatcagcagctgaaaaccagcaccatctatgtgacccacgatcagaccgaggcgatgtcgatggccgaccgcatcgtggtgatgaacggcggccacgtgcagcaggtcgggcacccggagtatctgtacgccaacccggccaacctgttcgtcgctgggtttatcggttcgccggcgatgaacctcctgtcgctgccctgcgccaacggtgaagtactgttgggagaacagcgccatccgctgccgccgcgccaccgggatcagacccgcgtctggctgggcgttcgcccggaacatattaccgaccacgtggaggaggaccatctgcgcctgccggccaccgttctgcaacgagaactgatgggagccgattatctgctccacgtcagcaccccgatcggcaccctgcgctttagccgccgcaaccgcggcaaggtgccggagaaagacgagtcgctaccgatcggcttctcgcctgccgatgtgcatctttttcatgctgagacccagcataatttacagatggagacagatcatgtttaa

SEQ ID NO: 7633 - DNA, 1311 bp, Escherichia coli
atgtttaaacccctcaccgccctgacggttgggctcagccttgccctgagcggcgcggcgctggcgaaagagaaaatagactttatgttcccggcgccggtggacggcaagctgaccatggagatgacccgcgtcattaagcaattcaacgactcgcagcaggatgtcgaagtgcgcggaatcttcaccggcaactacgacaccaccaagatcaaagccgaatcggcgcagaaggccggccagccaccggcgctggtgatcatgtccgccaacttcaccaccgatctggcgctgaaggatgagatcctgccgatggatgagctgtttaaatatggcgatcaaaaggccggcaattttctgcaaacggaattctggcccgcgatgcataagaacgcccaggtgatgggcaccacctatgcgatcccgttccataactcgacgccgctcctctactacaacaagacgatgttcgatcgggccgggatccaacagccgccgcagacctgggccgagttgctggccgatgccaaaaagctgaccgacgagagcacaggccagtgggggatcatgctgccgtcgaccaacgacgacttcggcggctggatcttctcggcgctggtgcgcgccaacggcggaaaatactttaacgaagactatccgggcgaggtctattacaactcgccgaccacaatcggcgccctgcgcttctggcaggatctgatctacaaagacaaggtgatgccgtccggggtgctgaactcgaaacagatcagcgccgcgttcttctccggcaagctcgggatggcgatgctcagcaccggcgcgctgggctttatgcgtgagaacagcaaagactttgagcttggggtagctatgctgccagccaaagagcagcgcgcagtgccgatcggcggcgccagcctcgtaagttttaaaggcatcagcgaggcgcagaagaaagcagcgtatcggttcctgacctatctggtgagccccgaggtgaacggcgcatggagccgcttcaccggctacttctcgccgcgcaaggcgtcatacgatacgccagagatgaaggcctatctgcagcaggatccgcgggcggcgattgcgcttgagcaactgaagtacgcccatccatggtactccacctgggagaccgtcgccgtgcgtaaggcgatggagaaccagctggcggcggtggtcaacgatgccaaagtaaggccggaagccgcggtacaggcggcgcagaaggaagctgacgcgctaatgaaaccctatgtggataagaccgcgttgtcggaagtgaagtga

SEQ ID NO: 7634 - DNA, 294 bp, Escherichia coli
gtgctgggcctgcggcagggaggtatcagtgaagaaacacaaaatgacagctgtgagaaaatactggcgccgacagagtggaaattgctgtgggttaagctggaaggaaaaccgcttccgtcacagacgccgacactgaaatgggcctgtctgaaactggcgaaactggggcgatggtatgacagcaaacgcacaggccgccccggttgggtagttatgtgggatggctggttcagacttcaggatatggttgagggttacctggtgatgaagtctcttgatcaggagatctga

SEQ ID NO: 7635 - DNA, 174 bp, Escherichia coli
atggatgcagcaattcagcatctcaggcgtgaggagtacccggtcctggattcagacgttgagaaactgtcaccattacagtgcgggcatattaatatgcaagggcgctattcatttatagtgccggaatcagtcagtaagggtgagctgagggcgttcaatgaagatgtatga

SEQ ID NO: 7636 - DNA, 369 bp, Escherichia coli; identical to SEQ ID NO: 4841

SEQ ID NO: 7637 - DNA, 378 bp, Escherichia coli
atgaaaacattacccgacacgcatgtacgggaggtatcgtgctgcccgtctccagtcaccatctggcagacactgctcacccgactgctggaccagcactacggccttacgctgaatgacacaccgttcgctgatgaacgtgtgattgagcagcatattgaggcaggcatttcactgtgtgatgcagtgaactttctcgtggaaaaatacgcactggtacgtaccgacctgccgggattcagcgcctgtacccactctcagttaataaacagcatcgatatcctccgggctcgccgggcaacaggcctgatgatccgcgacaattacagaacggtaaataacattaccctggggaagcatccggaggcgaaacgatga

SEQ ID NO: 7638 - DNA, 489 bp, Escherichia coli
atgaaactggccctgacgctggaagccgacagcgttaacgtgcaggcgctgaacatggggcgcattgtcgttgacattgatggtgttaatctcgctgaactgattaacatggtctgcgataacggctactcccttcgtgttgttgatgaatctgaccggacctcagcagactgcacgccaccatttgttgcccttaccggcatacgctgcagtaccgcacatatcacggaaacggacaacgcctggctgtactcgctgtcacaccagaccagtgacttcggtgaatcagaatggattcattttaccggtaccggttatctgttacgtaccgatacgtggtcatacccggttctgcggcttaagcgcctggggctgtcaaaaacgttccgtcgtctggtcgtcacactcatccggtgttatggtgtcagtctcattcatctggatgccagtgccggatatctgccgggtttacccactttcgactggtaa

SEQ ID NO: 7639 - DNA, 1623 bp, Escherichia coli; identical to SEQ ID NO: 5879

SEQ ID NO: 7640 - DNA, 1287 bp, Escherichia coli; identical to SEQ ID NO: 5876

SEQ ID NO: 7641 - DNA, 453 bp, Escherichia coli
atgaaatttatggaatgtgctgtccgggatgtgatttatgggaccaatgtccgtattgtcaaaccggtcaacatttatgaatgtgaactcagggacaatgtgtttgtcggccccttcgttgagatacagaaaggctgtgtcattggtagtggaagccggatacagtcgcacacgtttatttgtgagaacgtaacactgggggagaactgcttcattggtcataacgtgacgttcgccaacgatctgtttcgttcaggagcaccagatccgtcaccggataactggatcagcattaccctgggggattcggttactgttggcagtggagccattattctgtctccgtatatatgcagcggagctgttattggtgcgggggcagttgtagtaaaaccgattgagaacaaaggcatttatgcaggaaacccggcaagactgatcagaatattatga

SEQ ID NO: 7642 - DNA, 210 bp, Escherichia coli
atggaattaaaagcgagtgaatttggtgtagttttgtccgttgatgctcttaaattatcacgccagtctccattaggtgttggcattggtggtggtggcggcggcggcggcggcggtagctgcggtggtcaaggtggcggttgtggtggttgcagcaacggttgtagtggtggaaacggtggcagcggcggaagtggttcacatatctga

SEQ ID NO: 7643 - DNA, 855 bp, Escherichia coli
atgatcaatattctgccgtttgagataatttccagaaatacaaagaccctgcttattacctacatttcttcagtagacattacacatgagggaatgaaaaaagtactcgaaagcctacgatccaaacagggtattatttctgaatacctccttgataaactactggacgaatcgcttattgataaagacaagggcaaagagtttcttattaccacaggcgtgataaataaaacgaaaacatcacctctctgggtaaactcagtcataataagcgatgttccacatcttttcagtaatgcccgggaacaatggaaatctgatggtgtttttgtttctcatatcattgatataaaagataataatattaatgtgagcgattcaacactaatctggttacatctcgaaaactatcattcagacattgtaaaaagaatctattcaaaatttgaaagtaaccctggtgttgccttcatccaaagctactacctaaaggagtcattcaggatagatggagtatattcacctgatcttggtactccctgccatttttgtcatatagagagatggctgagcagggaagaaaaaagcttcagacgtaacgaaatgtcctgggcaaacttacttcagttactgaaaaaataccaaatgacactaccagcattggctttaggcgaatcagaaagaggattcagctatcatttaataaaacggcgacttcaggagttgacaggtacttcactggttaaaagtcatgtcgataactttatgtcatctgttagcgctgatttaatcacctgtattttatgtaaagagccggtaattcactggcaggcttgcagctgtctggagagataa

SEQ ID NO: 7644 - DNA, 819 bp, Escherichia coli
atgtcaaaacacgaactctctttagtggaagtaacgcattacacagatcctgaagttctggccattgttaaagattttcatgtcagaggtaactttgcttccctccccgaatttgctgaacgaactttcgtgtccgcggtacctcttgcccatctggagaaatttgaaaataaagaagttctcttcaggccaggtttcagctccgtaataaacatatcctcatcacataattttagtcgtgaaaggctcccatcaggaataaacttttgcgacaaaaataaactttccattcgtactattgaaaagttattagtcaatgcattcagctcacctgatcctggctctgtaagaagaccttatccttctgggggggcattgtacccgattgaagtttttttatgcagattatctgaaaatacagaaaactggcaggcaggaactaatgtttatcactacctgccgctaagtcaggcactggaacctgttgctacatgtaatactcagtcactctaccgaagcctgtccggtggggattcggaacgtcttggtaaaccccattttgctctcgtctattgcattatttttgaaaaagctttgttcaaatatcgctacagaggataccggatggccttaatggaaacaggttcgatgtatcagaacgcagtattggttgcagatcaaataggactgaaaaaccgggtatgggcgggatataccgattcatacgtagcaaaaacaatgaatctggatcagaggactgtagcgccactgatcgttcagttttttggagatgtaaacgatgataaatgtctacagtaa

SEQ ID NO: 7645 - DNA, 1191 bp, Escherichia coli
atgataaatgtctacagtaaccttatgtccgcatggccggccacaatggccatgagtccaaaactgaacagaaatatgccaacgttttctcagatatgggactatgagcgtattacaccagccagcgcggccggtgaaactctgaagtcaattcagggggcaataggtgaatattttgaacgccgtcatttttttaatgagatagtcaccggtggtcagaaaacattatatgagatgatgcctccatctgctgcaaaggcttttaccgaagcattttttcagatctcatcactgacccgcgatgaaatcataacccataaatttaaaacggtcagagcctttaatctgtttagccttgaacaacaagaaatacctgcagtcataattgcactcgacaatataaccgctgcagatgatctgaaattttatcctgacagagatacatgcggatgtagctttcatggtagtttgaacgatgccatagaaggttccttgtgtgaatttatggagagacagtccctccttctttactggttacagggaaaagccaatactgaaatatccagtgaaatagtaacaggcataaatcatatagatgagattttactggctctcaggtcagaaggagatatcaggattttcgatatcaccctgcccggagctcctggacacgcagtactaaccctgtatggcacaaaaaacaaaatcagtcgaataaaatacagtaccggattatcctatgctaatagtctgaaaaaagcactttgtaaatccgtagtggaattgtggcaatcgtatatatgcctgcacaactttcttattggcggttatactgatgatgacattattgatagttaccagcgtcactttatgtcatgcaacaagtacgagtcgtttacggatttgtgtgaaaatacggtactactgtctgatgatgtcaagttaacgcttgaggaaaatattacgtcagacacaaatttattaaactatcttcaacaaatttctgataatatttttgtttactatgccagggaaagagtaagtaacagccttgtctggtacacaaaaatagtaagccctgattttttccttcatatgaataactcaggtgcaataaacattaataataaaatttaccataccggggacggtattaaagtcagagaatcaaagatggtaccattcccataa

SEQ ID NO: 7646 - DNA, 726 bp, Escherichia coli
atggttacattaaaaatggcgataatttttctgatggaacaaatcagaacccctttcagcttaatatggacaattatgtcacctacagtgttgttctttttccttcatttcaatgaaattgaacttcattatggtgatacagcatggctcggaaaacaaatatcatggtttgtaggctacatttctttttctgttgttctgtttaattactgtctgtatctggtcggaagaagagaaagtggttttattgctaccttcgtgcataatatggatggtcgactattatttattcgttctcaattaatagcctcacttatcatgtctattttgtatgtgttttttttcattttagtcgtactaacaggattccaggcaagtccagattatcaaatagtaatgattattttaaaatcgatatacataaatgcatttatgatggtttcactcactttcatggcatcgttcagagtcacattccaaacagccagcactatctattctgtattaataactgtctgtatggtatcaggaattgtatcattaaaatataatgaggggatcgtttactggataaatcaggttaatcctatcgccatctattctacaatactccagtcagaccaggagttgtctctgatgacgatatttttctatagtataatgttaatcataagtattatttcagcactaaccttcaaaactgagccagtctggagttctcaatga

SEQ ID NO: 7647 - DNA, 732 bp, Escherichia coli
atgaccatacctcttttagaaatcaactctctgagcttttcatataaagtaaatttaccccctgttttcaataatctgtcgcttaagattgagcagggagagttgataggtctgcttggagaaaatggagccgggaagaccactctttttaaccttatcaggggcggagtcagtaattatgaagggaccctcaagcgaaatttctctggtggagaattagtaagtctacctcaagtcataaatctttcaggtacactaaggaatgaggaggttcttgatttgatttgctgcttcaataagttaactaaaaaacaggcatggacagagcttaatcataaatggaatgataattttttcattcgctatgataaaataagacgtaaaaggacttacacggtaagttatggagagaagcgttggcttatcatatctttgatgctaacgctttgcaaaaatgcccgtttatttttactggatgaaccaactgtaggcattgatattcagtacagaatgatgttatgggaactgataaataagatcaccgctgacgggaaaacggtatttttctcaactcatatttttgatgaattaacaagagataaaatccccttctatatgctttcaaaaaatagtataaatcgttattctgatatgagtgattttattcaatccaataatgaaacaactccagaaaaggcatttattaaagaagttatgggaacaggagactga

SEQ ID NO: 7648 - DNA, 564 bp, Escherichia coli
atggatataatagaaaaaagaatcacaaaacgacacctcagtgaaagtgaattatcaggtgtaaattattacaattgtatatttgaacgaatacagcttgacaactttaactttcgcgattgtgagttcgaaaaatgtcgcttcgtaaactgctcaataaagaatttaaaacttaatttttttaaacttattgactgtgaattcaaagattgtttattacaaggagtaaatgcagcagacattatgtttccctgtactttttctcttgtaaattgtgatttgagatttgttgattttattagtttacggttacagaaatctatttttttatcctgtcgcttccgtgattgtttatttgaggaaacagaccttcgtaaatctgattttactggttcggagtttaataatacagagttcagacattctgatttgtctcactgtgatttttcaatgacagaaggtctcgatataaatcctgagataaacaggatcttatctataaagataccacaggaagcaggtttaaaaatacttaaacgaatgggagtggttgtagggggatga

SEQ ID NO: 7649 - DNA, 666 bp, Escherichia coli
gtgatgttctggaaccgaaacaagaaagataaagcaactatagccaatgaaaaaaaacgcttcaatcatctgctttctgtggcagagaaactacccgttaaggcgctaccagatctcattcgcgctatcgtgcggccagtacagagtgatttcttgctggcggtagctgaggagggaacagatgcccgcccggatatgaccccgcaggagttcttctttaagggacttacccaaatacaatcttacgaaaagatgaaagagtgtgagatgaacggcgctgattatccgttgtcgctggcaagcgacatagtgctgccgtggccttggagcctaccacgctatatcgataacgtttcacgcattggaacccataaggggaagccgtggaagcaagataaaaacaaccactatgttgacctgtggttgccctggcgtattggctttgtgcacgggggcaaccactccataacggcgggtattctggccggagaagggtcgctgatcccggaacacgtttacgatatgtcatggatgtttgagttggtccgaacggacggtaataactggtttgttgagggacagaaagccgaagcggtgaagtcgggacggtcagctgcggtgtttgagataggtcggctgttagtggaaggagctaaagaacgttga

SEQ ID NO: 7650 - DNA, 300 bp, Escherichia coli
atgagttatgaaatagaatggcgaccaggtgcgattgaggatataacggcgttgtttgaatatctggtcgagaatgcatctctttgggatgcaaggaacgtgacagagcgtctgatcactgcaaccgatcgcctggctgattaccccaggctgtatgaaacggatgaacgctatggtgaaggggttcgccgtattagcttacttggacagcatgtactttatgaagtgaatgatgaggccagtcgtgtcaatatcctggcggttgtaggccagcgtcagaatccccgattcattctttga

SEQ ID NO: 7651 - DNA, 264 bp, Escherichia coli
atgaatagcaccacacattacgaaaacgccaatttcctgcgcgagctggccgaaagcctgcctcgtatttttccagaaggcagtacagacaagtctgcactattgcaacgcctcgctaatgaagaactggcacgggcggaatacgacgaacagatccgagcgaaagttgccgctgcccgcgccgataagcggccgggaatgagttccgcgcaactgcgccagcaactacagggacgttatcaggaactgcgcaatgagttatga

SEQ ID NO: 7652 - DNA, 159 bp, Escherichia coli
atgacatactggaccagtacgaaaaacacctgcacttcctgcacctggttcgttaatagcaacatgccgtcctgggggcggcaattattatcccggccgcaatatgagggaatgcagaatgatttcacgctggaaatggatgctgaagcagacaattaa

SEQ ID NO: 7653 - DNA, 1278 bp, Escherichia coli
atgatttcacgctggaaatggatgctgaagcagacaattaaaaaactatggttcagggcaacgttattcgcaattgtcgcgataataacggcccttttatcaattctttttaaatcaatgatacctgagtcggtttccgtgaaggttggtgcggaagcagtcgataacattctgaacatactggcatcgagtatgctggcagtgaccacattttcgctgagtatcatggtcacagcctacggttcagccactactaatgtgactcccagagctacgcgtttagttgttgaagacgtcaccacacaaaatgtactggccaccttcatcggttcttttctcttcagtctggtagggattattgccctcaatatgggagcttatggagaaagggggagagtcattttattcattgtcacactggttgtcattgccttaatcctcatcacattgcttcgctggatacagcatttgacctctctggggagggttggtgagacaacggcacaagtagaacaggcggccatcgaaacatttattgcgagagcaagaaatccctgtctcggcggatatccatggcttgagaacaatgaacagccgaaaggaacagttgcagtttatccgaagaagattggctatgttgaatatattgatatggtgaaacttagcaagctgctgaccaatgatccccgtcatgtatacctcgtggcgcagccaggcagtttcatacatccgtccatgccagttttgtacctgagtcagggccaggagtcgtcaatcaacaccgatttacttgagacgattattgtctcggatgcacgttcatttgctcaggatcctcgattttgtcttagcgtcatggccgaaatagcctgccgggccctttcccctgcagtgaacgatcctggaaccgccattgatgtcattggcagaggtgttcgtatactttccacttacgcgcagaataaatctgatgaaatagaagtgaaatatccttcagtacatgttgcaccacttcagaataacgatctactggaagactttttctcacctgtcgcgcgcgatggtgccagtatgagggagattcagataagagtccttaaaggactgtcgatgctgagtaaaggttggcctgagatatttgctgaagccgcacataccctggcatttgaaacattagagcatgcaactcatgctgaccatatagattctgatagatatctaataaaatcaacttattataatttatttagtggcgaatattctaataaaaaaacatag

SEQ ID NO: 7654 - DNA, 657 bp, Escherichia coli
atgacaggcgaaaatcgtggccggggaaggccgcgaaagacagaaagtacctatgcagatactcgtaatgatctgatccgcagtggccttgaactgctgacgcagaatggttttcttgcgacgggagtcgatgccattgttaaaaatgccaatgtccctaaaggctcattttattactactttaagagtaaagaggattatgctcagaccgttctgaacgcctatgacagtttcttcgagcataaactcaaaaaacatctacatgaatcatcctgcacaccaatggtacgtctggaaaatttcatcaatgatgcctgtgaggggattaaaaaatacaattttacccgcggctgcctggttggaaatatgatgcaggagagtccggggcttccccaatccttcattaaagtactacagaatattcttgagagctggcaggcacttgttgcggcctgcctgtccgacgcgttatcttcaggcgaaataagttcaaatatgaataatacacaactggcggctattttctggagtggctgggaaggtgcggtaatgcgttccaaactatattgttctactgagccagtgtacgacttctggagctatttcaaaacctcggtacgctatcagtcttctcaggaagcaacaactggccagtaa

SEQ ID NO: 7655 - DNA, 783 bp, Escherichia coli
atggaaacgaagcaaaaagagcgtatccgacgtttgatggaactgcttaagaaaaccgacagaatccatttgaaagacgcagcgcgaatgctggaagtttctgtaatgactattcgtcgcgatctccatcaggaagatgaacctctgccactgaccctactgggtggctatattgtaatggtgaataaacccgcgccatccatgccagtaatccatgacgttccaaaaaatcatcgtgatgacttacctattgcaattctggctgccggaatggttaatgaaaatgatctgatcttctttgataatggccaggagataccactcgttataagcatgattccggatgcaatcaccttcaccggcatctgttactcacatcgcgtctttgttgcgttgaatgaaaagcctaatgtaacagcaatactttgtggtggtacgtatcgtgccagaagtgatgctttttacgatgccagtaactcttcgccattagactctctcaatccgcgaaaaatatttatttccgccagcggtgtgcataatcactttggcgtcagctggtttaaccctgaagatcttgccactaagcgtaaagcgatgaaccgtggactacggaaaattttgctcgcccgccacgcgttgttcgatgaagtggcctctgccagcctcgcaccgatctctgcatttgacgttctgattagcgatcgtccgttaccggcagattatgttacgcactgccagaatggttctgtaaagatcattacacctgattcagaagacgaatga

SEQ ID NO: 7656 - DNA, 921 bp, Escherichia coli
atggacattgcagttattggttccaatatggtggatctcattacttacactaatcagatgcctaaagaaggagaaactctggaagcacctgccttcaaaatcggatgtggtgggaaaggtgctaatcaagcggtggcggcggctaaattgaattcaaaagtcctgatgctgactaaagtaggtgatgatatttttgcggataatactattcgtaatcttgaatcatggggaattaataccacttatgttgagaaggtcccctgtaccagcagtggtgttgcaccgatctttgttaatgccaactcgagcaatagtatattaataattaagggagcgaataaatttctttccccggaagatatcgatcgagctgcagaagatctgaaaaaatgcaaattgatcgttttacaactggaagttcaactggaaacagtttaccacgcgattgagtttggtaagaaaaatggtattgaagtgttattaaatccggctccggcattgcgtgagttagatatgtcttatgcctgcaaatgtgatttctttatcccgaatgaaacagaactggaaatattaaccggtatgtcggttgatacttatgatcatattcgtttggccgcacgttcgttagttgataaagggctgaacaatattattgttaccatgagcgaaaaaggcgcattatggatgacccgcgatcaggaagtccatgttcctgcattcaaagtaaatgctgttgatactagtggcgctggtgacgcatttattggttgcttttcccattattatgttcaaagcggtgatgttgaagccgctttgaaaaaagccgctctctttgccgctttcagcgtcacagggaaaggtacgcaatcatcttatccgagtattgaacaatttaatgaatttttaaccttaaacgaataa

SEQ ID NO: 7657 - DNA, 1317 bp, Escherichia coli
atgaacgataaaaacatcattcagatgcctgatgggtatctgaataagactcccttgttccagtttattttgttatcgtgtttattcccgctatggggatgcgcagctgcattaaatgacatattaatcactcaattcaaaagtgtattttcgctaagtaactttgcttcagcattggtgcagagcgcattttatggaggttattttttaattgcaataccagcatcccttgtgattaaaaagaccagttataaggtggcaattttaattggcctgacgctgtatattggtggttgtacactttttttccctgcctcgcatatggcaacctacactatgttccttgcagctatttttgcgattgcgattggcctgagtttccttgaaactgcagcgaacacatacagttcaatgatcggtccaaaagcctatgccacattgcggctcaatatcagccagaccttttatccgattggtgctgcgtctggtattttattgggcaaatatctggttttctccgagggggaaagccttgagaagcagatgtccggaatgaacgccgagcaaattcacaactttaaggtgctgatgttagagaacacccttgaaccgtataagtatatgattatgattctggttgtggtcatggtgttgttccttttaacccgcttcccaacctgtaaagtggcacagacaagtcaccataaacgcccgtcagcaatggatacgctgcgctatctggctaaaaattcgcgctttcgtcgtggtattgtggctcaattcctttatgtgggtatgcaggtcgcagtatggtcatttaccatccgtctggcactggagttgggcgatatcaacgaacgtgatgcttcaaacttcatggtctacagctttgcctgcttctttattggcaagtttatagccaacatccttatgacacgttttaatccggaaaaagtcctaattctctattccgttataggggcgctgtttctggcatatgttgcactggctccaagtttcagcgcggtctatgtcgccgtcctggtaagtgttttgtttggcccttgctgggcgacgatctatgcaggaacactggatacagttgataatcaacatacagaaatggcaggagcagtcattgttatggctattgttggcgcagcggtggttccggcaattcaggggtatattgcagatatgttccactcactacagctttcattcctggtttctatgctctgttttgtctatgtcggtgtctacttctggcgtgaaagcaaagtacgtaatgcactggctgaagtcacagagtcctga

SEQ ID NO: 7658 - DNA, 774 bp, Escherichia coli
atgttgattctcgattgctcctcacgaactcaggcgttgcatacattatctgccgggtttggctgttcccctgaaaagctgaaaaaagtgctgctttcgctcgatcttgaaagtatctacgagcttaatcctcgccagttggttgatgcacctcagtatctgagagaatacgtctgtgcggaactgggcgaaccgggaccattcacccgggctctgtggtttcatggcacccggactttcgccggtaatacttttccggcggggttactggcgctaaatcagtcagaatccctcgccatgaaaatgctgcttgacctggccccgaatgagatggtccgtacacacctgaaggaatgggatgttccggggggcgttccggatgagatgtttcagctcagaaccggcgataaaatccactgggggccttttggccatttagtccgggaattacattttaacgccagtgaaaatggactgcatgattacctctggctgccggagctggtagaggatgtctgtaaggcctaccagaagaaatacggccacgatcttaaaccgcattatctgagcgtgcttcatccctgtattgtctggttcgaggcggatattgtttatgaaaaaggagttcttgaaacggctctgtcatatgcctatacatcagtccgtgacctcccgccggacggaaacgcaactttcggcatagactgtgacgggaaatctgtgtctaggtcggccattgccagaatcgagtttctgcagcccgggcagatgtaa

SEQ ID NO: 7659 - DNA, 501 bp, Escherichia coli
atgggaaattattcagattttgagaccgattttgttcagcgaacactggcgcttatcgatcaatataacgaaatgattgaggtgctgggcaaaccattcagggagcagtacaactacacgttgaccctgaattgcctcctgggtcttatcgtgttaccgaaagagagagcgctctctttcctgcctgccgaccgtttaacgcggcaacttaaagctgaaatgggattacatgagtcacagctgcccggaccggaaatgaacctgcgggagttgatccataagatgcggaattcagttgctcatttctgcgtccaggtagagtcagccagcgatgcacaccttgtagactggattgttttcagggaatctcaggaagatggagaagtctacgccagcttcagcgctccggagcttttaccctttctgaaatattatgcgaccctgctgctcgacaatatggcccgccgtcgagcccccgatgttaacatattggatttgtaa

SEQ ID NO: 7660 - DNA, 231 bp, Escherichia coli
atgagaaccgtatctattttcaaaaatggcaataaccgcgcgatccgtctgccccgcgatctggattttgagggggtgagtgagctggagattgtacgggaaggggacagaatcattctgcgtcccctccgcccgagctggagctcattcctggagctagaaaaggccgatccgggctttatgacggaacgcgaggacgttgtctgcgacgaaggacgatttaacctgtga

SEQ ID NO: 7661 - DNA, 417 bp, Escherichia coli
gtgaacaagatctatatgctcgacacgaacatctgctcgttcatcatgcgcgagcagcctgaagcagtgcttaagaatctggagcaggcggtgctgcgcggtcaccgtatcgtggtctcggccatcacctactccgagatgcgcttcggcgccaccggtccaaaggcatcgccacgccacgtgcagctggttgacgcgttctgcgcccgtctcgatgccatcctgccctgggatcgcgctgcggtggatgcaaccacggaggttaaggtggcgctgcgcctcgccggcacgccgatcggtccaaacgacacggcgatcgccgggcacgccatcgccaccggggcaatactggtgacgaataatgtgagagagtttgagcgggtgcctggactggtactggaagactgggcaggataa

SEQ ID NO: 7662 - DNA, 3825 bp, Escherichia coli
atgagaagaccatcccgaactgaagcactgatgccagtactgagtgctaacaaagctcaggaagaacagattaacacctcctatgaaccactgactccctcagtcattacagatgaaaaagcacaaagctatatcgaagctttgaattttgcctgttctcgcccggatatcagaaatattgcagtaacagggccgtacggggccggtaaaagttcggtattactgacatgggaaagggcggaggataatgactttcgggtgatgaccgtatcactggctgactttgaaatgcagcgggcataccccggagattcgctgtcagttgagggtaagcccgactatgatgataacgaaaaaaaagcgggaaaagccgaagagaaaacaatcgagtacagcatcctgcaacaactgctctataaagagaaaaaaagtgtgttaccctattcccgtctggagcgcatttctgacgtaagtgcgtgtcagatagccatgatgacggccagtctgttattcatactggcttcgacggcaactggtctgctttttcttttcccggattacatccgggaaaagctctccctgtcgccagaactgagtcagtttctgctggagttgcctgtactcgctaggtttggtagcgccgggatatttctttttactgctttattctttgcactgaagaaattgcaccgtacaggggtatttgatcggcgtgtaagtattgataaagttgacatactgaaaggtgccattacaacacgccctgcggccccttctcttctcaatgtgtacattgatgaaatcgtctactttttcgaacagacacaatacaatgtagtcatatttgaggatcttgaccgtcataatgacggagccatttttatcaaactccgggaaataaatcagcttatcaataactgcctccccacagacaatcctgtccgatttatctacgctgtcagggataatcttttcataacaccagaatcacggacaaaatttttcgatttcgtcataccagtaatcccagtaatggacagtgagaatgcttctgagcattttctaagtaaatttacacttgatgaactcaggcaggaaggattcaaagactgccttgccagactggctctttttattcctgatatgcgggttatgcataacattgcgaatgaatttcgtctttaccggaatattgtgaataatggaggagatttaaagcgtcttatttcactgatcacctataaaaacctttatgctgaagactatcacaggatagatcagaaaaaaggaatgctttatagcattgtatctgaatatacatcaggtaaattaagagaggattattgcaataatctaaaaaacaaaattgaaacgtgtctaactgaactatctaaactacataatgaagaagtggtcactgaacatgagttaagaagtgaaattttgcggccatatatcagtgaaaaaacagcaccccgattacatattatgacaggtacaggagggcaatatgattttgatgatgtaatccaaaatgaaaatacatttctttctttgctgagcaaccaaataatcagcattaaacctagtggatataacattactataacaacaatcgataaaaaaacagctcaggttatgaaggaggaatatcaggaaagaatagcgattattcaaaagaaactaaataatgatgtttctcgattggaggaaaatattaaaaaaaacaggtgcgagattcagaatgcatcctcgtatgatcttgcttttttcatcaataaaatggggagatcaggtttcgaaagatatattgcatgttgttcaacgcctgaacaacatgacggagaatccattactgataatgccgcaaatattgattttatttatttccttctatctcatggttatctttccactgactatatggcctaccgctcagtctttatgccaggtagtctgagcacggaagacaataactttatcagggctgtgacgtcaggaagattacctgatgaaacggcaaaaatgcccctcagcaatattgctaacacagtagcaaaattgcatggactgggcatactgatgcatgacaatgcatggcatcctcagattctctggtacctcatgcgcaatgatacgaactctctgaagactatcatgaggatgcaggcagaggtcggagccgaacggcggatggtaagactggccaatgagatcttccccctatgggaacctgctgcgcagcgggaatatatcagattaatggtcgacggggatggtcatttatccactatgatccaccagattgggcgcctgaatgataccgtagctgaacaaaatcttctcccggtattactgtccttaccgatactttcttgggaagccgtctctcagataactcgggaagaactgcagagactcatcgatttgcaatttaatctcgtaacgtccttaccggagaattgtgcgcagtttttctgtgaaaacctgcggaattcaggttgtcgcctgactaacattcctttggcccggagtgactctgggcaggaaacattgcatttggtggtacagaaaaaattgtggacctattccacgttaaacctgcaaaacatttgtttctcactttctcatgagtcagagaataacagtgataccttccgtaagaagcctgttgctttaataaaatcgcttcgtattccgaaccttgaaaaatatgtttatgaaaacatatcatcattcattcgtgatgtttttatacactctgaagaaaatgatctcattcctgattttcttaattcgacattcgttgactgggatgatgcaaagtacatgacagaaagtatgagcttcgtactggaagacgtatcagttatcctgaacaaagagaataccgaaacaacagaaatttcttatgatcaaaacctgtattcacttctggctcatcataatcatattaccccttgctggaataatgttatttctctactgagtgaagatgcgtcaattgctggtgatactttttgtgagtggcttaatattaattattctttattgccaaatgactcgttgcctttgactgatgttcagttctcgcaattacttattaaggctgttacatcacctcatatcagtaaagaagcgttaatagcgataaccatggcatttaggataactcttattaatgtgccagaaaacttaccactgaataatgctgcggtactaatcaagcaaaaatggctggcaccaaccagtactgtgtttgaacaactttatcaggcactgtacgaagaaggtgacaaactgacatcactactttatgcacttatttgtgcccgtcctgtattattgagtgataattacgagcttgttttattttctgatgaccagtttgacctggggattactcgtttaattctgaatggcgataagattgcagatgaagtctgtatcagtatcctgaactggctctgggaaaaagatgaagccctgctctctgaggcaccacttctcagccagcaagccctgataaggttctccaccaaaataaccgatgaccggcagaagcaggcactgctgatgcaatgtcttaaaaatgacggtgggtcacacaagttcatcagacaggtgctcatgacgttcgggcatcaggattatgccgctttcctcacagagaggaattatcgtagcattccccgtagtgatgccatgtggcaactggctgtccagctgggaaatagtggatttatcaggccgccgaaacttactcacgctgatacacgtattcgtatagagcccttttttaacgctgaaaatgaatacgactga

SEQ ID NO: 7663 - DNA, 231 bp, Escherichia coli
atgagaaccgtatccatttttaaaaatggcaacaaccgtgctatccgccttccacgcgatctggattttgagggggtgagcgagctggagatcgtccgggaaggggacagcatcattctgcgccccgtccggccgacctggggctcattcctggagctagaaaaggccgatccggactttatgacggagcgcgaggacgttgtcagcgacgaaggacgagttaacctgtga

SEQ ID NO: 7664 - DNA, 1566 bp, Escherichia coli
atgccactgatcacgcggcttatgctgcaaaacttcaaaaagtttccggaactggacctgcgcttcagcaacgatcgtaacattctggttggggacaatgagtccgggaaaagcactattctgctggctcttgaccttgtgctgagtgacagcaggcatcgggttgaggcgctgggggtggaatcgctcctgtcacagtcagcagtcaggcattttcaggaaggtgagcgccgtgccgatcagttacccgtgctgaccgctgacgttttcctgagtaatgggggagagcctgacctgaacggcaggcaaaatctggcgggtatcgatgcggatggtctcagaatgcgcattgctcccatgatggaggaatacggtcaggatatacaccatgttttgcagcaggatcctgataattttccctatgaatactattccgtgcagttcagcacattctccggtggtcatttcgcaggcttcagacgctatctgcgccatctgttcttagacagtgcacgcattgataacgagcatgccgcacaggagtatacgcgcacagtttacagcgtcaatgtgccggtggccgatcggtaccggcttgaaaacagttaccggcaacagaaaatgcacttctgcgcccggcatctgtccgccataaacgacacgctgaaaacgtatcagtttggcgtgcgttccggcgctaaatcaggtcttgaggcgaacctggacattactgaggacggtatttccattcgtcaccgcggaaaaggaagacagtgtttcatcaaaacggagtttgcgctgcagcggcatcagcagcaggggggagagatccacgcgctgttgcttgaggagccggagaatcatctcagccatgtcagtatgaagaggctggttaatcagcttgccacggaacggcagacgcaggtgtttattgccacacacagtagccatatctcctcccgcctcgacctacgtaaggctattctcctcggagctacccggccggtactgatgaatgaactttccgctgagactgccgccttcttcatgaaagcaccggataataacgtgctggaatttgcgctggccagacgcgtgctgctcgtggagggggatgctgagtttattctgatcgaggccttttatcaccgcctgtatggcagggcaccggaggatgacggggttcacatcatcgctatcggcggaacgagtttccgtcgttatcttgaactggcccgtcttctggaaaatcgtgtcgcggcccttcgcgacaatgacggcaactatcagcaaaattgcgatgaacgctatgctgacgtgctttgttcccgctcccgggtatttgctgaccacgacaacagccgctccacatttgaaatctgcctgtatcaggataatgccgacctgtgtgatgcgcttttccgcggaacccgccggacactcacggttcaggattacatgctggccaataaggcagaagcagcattccagctgttacagttgcacgccgaaaagctgaccgttcctgattatatccaggaggcactggcatggataagagagtga

SEQ ID NO: 7665 - DNA, 1023 bp, Escherichia coli
atggataagagagtgatatttgcggttgccggctcgggtaaaaccacgctgctgatacgtcggttaagagaggaccggcggacgctgatcctgaccttcaccgtaaataatgaagcacatctgcgggcgcagattatcagacgctttggctacataccgtacgggatccgtgtgatgacctggtttgagtttctgcacggtttctgttttcgccctttcctgcaggagcaactgtcatcgcgtggtctgagcttcaaccagcccccttccagaataccgcgcacgaatatccggcattatcaggatcccgccggacggctgtatcaccggcggctcgcacacctgctgacagcccgggggttgctgccagatatccgtacccgacttgcccgttactacgatgagttgttcgttgatgaagtccaggactttgccggccatgactttaattttctgctggagctatgccgcgcggaaatctcagtgctgtgctgcggggatttttatcagcatacctttgacacaagccgcgacggtaacgtcaatgctacgctgcatgaagacataacccgatacgaggctcgcttcagggctgcgggtatcatggtggattgtgagacgctcagccggacatggcgctgttcagctacagtgtgtgagttcattaccggacaactgaacattcgcatttcggctcatggaacacataccacccagattgaaatcgtcacggatgaagcgcgttcagcggccctgcacgcggacaacacgatgatcaagctcttctatcgcgaacatcaccgttacggatgccactcaatgaactgggggggcagtaaaggactcgaccactttcaggacgtctgcatcgtgatgggggccaaccactggatgcgcctcatccaacagaagctggcagcacttccaccatcatcccgtaacaggctatacgtggcctgctcacgggcacggggcaacatctattttattccggaaagccatcttcggagattcagaaactaa

SEQ ID NO: 7666 - DNA, 426 bp, Escherichia coli; identical to SEQ ID NO: 6184

SEQ ID NO: 7667 - DNA, 1122 bp, Escherichia coli
gtggatgaaacaggccagactggccgaaacctttttgacaaaacccagccagtcctctcctacggagtgctgtcgtctgatgctaatctggataaggttgctgaagcggatctagccgtaatacgcaaaacgcttggcgtgcagcgcctgcacgctgcggaactgggcttgcaccgcctttctgaccttgtagatacgctgctggttctgcagaaaaagcaccggatacggtttgacatctggcaggtagtaaagcgcgatcatgccattatttcgttcttcgaccaggtatttgatcagggaatgaatccagccgtaccctggtctgcatactggacccctctgcgctaccccctgctgctgaatctggccagcctgtttgatgatgaacttgcttcaaacgcatggacggcaaggctggaggcgcatgatgagcgtgcgtcggaacttttttgtaccgtcagtgatgaactgatcagcaggacggcagccagcgcgctggaccaccggtcgaagcagctgatcaccgatgccctgaactgggcgtcagccaattttgaacagttgggctataactgtaaaaccaacaaggaaaggctgcggattatgcccaatatgattggctttcagtccgtattgcacgggatctgttcccgactgggggcaccagaaagaaaggccagtatcattgttgaccagcagtcacagttcaacaccacccagcgtgaacttaacgagttttactaccagatacgggatatgccctgggaactggggcccggattacctgttatgaacatgaaaaatatgccggctgaaccacttgtattccagtccggtaccaagagtgcaggtctggagttggtagatatttatctctggacattcaagcgattcatggaagacaaggcgctggcaaagccactttcccgccttgtttataccaatctgaaaacagccaggaccaacagcgtgtcaatccagtcggttgccagtcgatttaaggaactcctgggtaaactcccggtaccaagcgcagagatcatgaggcaggcgcaggagctgcgggactttgatgaagccagacgcatgccatatgtggtgtcgggatcacccgactga

SEQ ID NO: 7668 - DNA, 513 bp, Escherichia coli
atgaccatctttaaggagaatattgtggacacaagtctgattggaccgatccttacggcgctgcttgccgctgcggggttctactgtaagttttggtttacgcgttatcaggcctcccgtgatcaggcccagaaagtcagccgggcgatcgaggatgtcctgagcaaaatggccgcgctgttcggacagaagaaacctgcccggatactgagagaggaattttccgctgttattgcgccgcttcatcaggaaatgcgtatccttgacgatatgacgtcccgtctgccgctgaaatggctgcagcgcgaacagcgccacgttctttatcatgcccgatggctgcagcggtatctggattcgcgcaggggcggcagtgacggggactttttcctgctattgcacgatgtggcgatggggaccgattatcaggttgctgacattctggcatcgcagcatgactgtaagcagcgtcgtggatcacagctgccggttaacctgaaaacctgcccctaa

SEQ ID NO: 7669 - DNA, 219 bp, Escherichia coli
atgaagcagcgtattacagtgacagttgacagcgacagctatcagttgctcaaggcatatgatgtcaatatctccggtctggtaagcacaaccatgcagaatgaagcccgtcgtctgcgtgccgaacgctggaaagcggaaaatcaggaagggatggctgaggtcgcccggtttattgaaatgaacggctcttttgctgacgagaacagggactggtga

SEQ ID NO: 7670 - DNA, 306 bp, Escherichia coli
atgcagtttaaggtttacacctataaaagagagagccgttatcgtctgtttgtggatgtacagagtgatattattgacacgcccgggcgacggatggtgatccccctggccagtgcacgtctgctgtcagataaagtctcccgtgaactttacccggtggtgcatatcggggatgaaagctggcgcatgatgaccaccgatatggccagtgtgccggtctccgttatcggggaagaagtggctgatctcagccaccgcgaaaatgacatcaaaaacgccattaacctgatgttctggggaatataa

SEQ ID NO: 7671 - DNA, 807 bp, Escherichia coli
atgtcaggctccgttatacacagccagtctgcagtcatggtaccggcagtgtattctgccgggcagcctgcatcgctgcctgttgccattgattatccggcagctctggcacttcgccagatgtcgatggtccatgatgaactgccaaaatatctgctggctccggaagtgagtgccctgctccattacgtcccggatctgcaccgcaagatgctgctggccacactgtggaacaccggagcacgcattaatgaagcactggcgctgacgcggggggatttttcgcttgcgcctccgtatccgtttgtgcagcttgcgaccctgaaacaacggaccgaaaaagctgccaggacggcggggagaatgcccgccggtcagcagactcaccggctggttccgctctctgactcctggtacgtcagccagctgcagacgatggtggcaacactgaaaatacccatggagcggcgtaaccgtcgcacaggaaggacagagaaagcgcggatctgggaagtgacggacagaacggtcaggacctggattggggaggcggttgccgccgctgctgctgacggtgtgacgttctctgttccggtcacaccacatacgttccgccattcctatgcgatgcacatgctgtatgccggtataccgctgaaagttctgcaaagcctgatgggacataagtccatcagttcaacggaagtctacacgaaggtttttgcgctggatgtggctgcccggcaccgggtgcagtttgcgatgccggagtctgatgcggttgcgatgctgaaacaattatcctga

SEQ ID NO: 7672 - DNA, 645 bp, Escherichia coli
atgagcagaattatcaccaccaccgtgtatacactgcatgagctatcctccaccgcacaggaaaaagcccgcgactggtaccgtcagcatcatgctgacagcaactggtatgaaaacgtgtatgaggacttcagggcggtctgtggcattttcggaattgacctccgccagcgcgttttccggctcagcaacggcaggtttatggaagaggcgtgcatctggttcagcggattctgcagccagggggacggagcctgttttgaaggacgctggcactggcagccagcaacagccagaaggctccgggagtatgccacacaggaccatgaactccatcgtatcgcggatgccctgcaggcggtgcagaaacgtaacttctggcaactgcaggctgaaatccaccaccggggacgttactgccatccgtacagcatggatatcactgttacccggaacagtccgactggtcaggctatgacagccgatgcggaagccgctgtcagcgaagccctgcgcgacctggccttctggttgtaccgtcagctggaaaacgagtacgacaggctgacctctgatgccgctgtggatgaggcccttctcatcaacgaatacaccttcaccgaagccggtctgcgcgccggctga

SEQ ID NO: 7673 - DNA, 246 bp, Escherichia coli
atggacgtggacgactggacgggcttcagccgccacttcacccacttgaaggacggggccgaggccaaagacaggacgttgctgctgtccgcaatcctcggtgatgcgatcaacctcgggctgaccaagatggccgagtcgagccccggcctgacctacgccaagctgtcctggctgcaagcctggcacatccgcgacgaaacctattcggggtcggttccggctgagggcgaaatgacaccctaa

SEQ ID NO: 7674 - DNA, 606 bp, Escherichia coli
ttgggacatcgtgccgccatttactgccgggtttcaacagcggatcagtcttgtgaacgccaggaatttgatctgcgagccttcgccggctgtgccggctacgacgtggtgggaatatttaaggaaacaggttcaggaactaaactcgaccgggccgagcgaaagaaagtcctggcgcttgcccagtccagacaaattgatgcaatcctggtcactgagctttcccggtgggggcgctcgacgctcgatctgctcaatacgctacgtgaactggagaactggaaggtttccgtgatagccatgaatggaatggcgttcgatctttcgtcgccgtatggacgaatgctggcgacgtttctttccggcattgcggagtttgagcgggatctcatcagcgagcgggtcaagtcaggccttgctgttgcgaaggcacgtggtaagaggcttggtcgtcaggccggagtgcgaccaaaatcagaccgacttttgcctaaggtggttgcgatgagggccgagggacgcagctatcgctggatcgcacgcgagctcggtatcagcaagaataccgtcgctgacatcgtgcaacgacacagagctaacgcttag

SEQ ID NO: 7675 - DNA, 2898 bp, Escherichia coli
atgtcacgacgccatattttcaccgaacggcagcgagcagcgctgttcgatctgcccacggacgaactgtcgctactgaagttctacacgctgggcgatgatgacctggaaaacattaggcagcgccgcagaccggaaaacaggattggctttgccctgcaactttgtgccttacgatatccgggccgtgcactggctcctggtgagatgatcccgcgtgaagtcctttccttcgtcggtgctcagcttggagttccggctgatgcgcttctcacttatgccacacggcgccaaacccgtcagcagcacatggacacgctgcgcgaaatttacggctacaagaccttcacgggccgtggtgcccgtgatctgcgggagtggactttcggccaggccgaagatgccagatcaaacgaggatcttgctcatcgttttattgtgcggtgtcgggaaacttccaccattctgcccgcagtatcgacaatcgagcgcttgtgcgcggatgctctggtcgccgctgagcggcggattgaaacgcggattgcggaaaatttaacagcggatgttcgcgatcacctggacaaacttctgagtgaaatgctcgccggcaatatcagtcgtttcatctggcttcgcaacttcgaggttggtaacaactcggctgctgctaaccgtttgctcgacaggctcgaatttctgcgtaccctgaatatcaatcatagtgctttggccagcatacctgcccatcgcattgcccggctgcgtcggcagggtgaacgctacttcaccgacggtttgcgtgacatcacttcggaccgccgctgggcgatccttgccgtctgtgttgtggagtgggaagcggcgattgctgatgccatagtcgaaacccatgacaggatcgtaggaaaaacctggcgggaagcgaagcgccagcatgacgaaacaatttccggctctaaagccacactcacggatacgatccgtaccttcaccgcgctgggagcttcgttgcttgaggcccgcagtgacggaaccccgctggagatggctgtcgccagttcggttgcatgggaccggctcgctcaactggtagcgacagggactcaactcagcaacacgctagccgatgagcctcttgcatatgtcgggcagggataccatcgctttcgtcgttatgcgccccgcatgttgcgctgtctgaagctcgaagccgcgccggtcgccggaccattggtagcagcagctttgtcgatcggagagatgaaaggtgttgcatcgccagaaaggcgtttcctgcggcccagctccaaatggaaccgtcatttacgagctcaggaaaaaggagatacccgtctttgggaagtggcggtactctttcacctccgggatgcttttcgttccggagatgtctggctcgctcattcgcgccgctatggtgacctcaagcaggtactggtgccgatgatcgcggcgcaggaaaatgcaaaactggccgtgccttccaacccacaggattggctggcagacagaaaggcgcgactcacgatcgctcttaagcggctggcccgggctgcccgtaacggcactattccgcacggtagcatagaagatggaacgttgcggatcgacaggttgacagcagacgtgccggatggtgccgaggcactcatactggatctgtatcgccgaatgccgtccgttcggattaccgacatgctgcttgaagttgatgcagcccttggtttcacagatgcgtttacccatctgagaaccggggctccatgtcgcgaccggatcggtctgctcaacgtcctgctcgctgaagggctcaatctgggcctgcgtaagatggcggaagctacaaacacgcatgattactggcagctctcacgccttgcccgctggcatgttgaaagcgaagccatgaaccaggcattggcaattgtggtggccgcgcagggtaaactgccgatgtcacgcgtctgggggatgggcacgtcagcatcgagcgatggtcagtttttcccgacagcgcggcatggcgaagccatgaacatggtcaatgccaaatatggttctgttcccggcctcaaagcgtatactcacgtaagcgaccagttcgcgccattcgcttgtcagtcgatcccggcgaccgtgagcgaggcaccgtatattctcgatggactactgatgaacgaggtcggtcgccatgttcgcgaacagtatgccgatacagcaggattcaccgaccatttgttcggagccagtagcctgctcggctacaatctcgttctgcgaatcagggatctgccatcgaagcggttgtacgtatttaatcccgatacgacccccagggagttacgcaagttggtaggtggaaaagcccgggaggatcttatcgttgcgaactggcctgatattttccgttgtgccgcgacgatgaccgctggcaaaatcaggcccagccaactcctgcgcaagctcgcttcttacccacgacaaaacaaccttgcagttgcgcttcgtgaagttggtcgtattgaacggacccttttcattattgagtggatcctggatacggacatgcagcggcgtgctcagatcggtcttaacaagggagaggcccaccatgcgctcaaaaatgcgctccgtatcgggaggcagggggaaattcgcgatcgcacgacagaggggcagcactaccgaatcgctgggctcaatttattgactgcggtgatcatttactggaataccgtccatcttggtcatgccgtcacggagcggcggaacgaagggttggatgttccccctgaatttcttccccacatatccccattgggctgggcgcacattctactgactggcgaatatctttggcccaaggaaccgaaagcttag

SEQ ID NO: 7676 - DNA, 654 bp, Escherichia coli
atgattcaaacacgtaatcaatatctgcagtttatgctggttatgctggctgcatggggcattagttggggagccagatttgtcatggagcaggccgttctgctttatggatcaggaaaaaactatttgttcttcagtcatggtactgttctgatgtacctgctgtgtgttttcctggtataccgccgttggatagctccgctaccggtcgttggtcagctgcgcaacgttggcgtaccgtggctggtcggtgcgatggccgtggtgtatgtcggtgtatttctgctcggtaaggcgctggctctgcctgctgagccatttatgacgaaactttttgccgataagtccatacctgacgtgatcctgacgttgctgaccatctttatccttgccccgttgaatgaggaaacgctgttccgggggattatgctgaacgtcttccgttcacggtactgctggacgatgtggctgggggcgctgataacgtcgttgttgttcgtcgccgcgcacagccagtatcagaacctgctgacactggcagaactgttcctggtggggttgattacatcagtggccaggatcagaagtggtggcctgctgctgccggtattgctgcatatggaagcaaccacgctgggtttactgtttggttga

SEQ ID NO: 7677 - DNA, 651 bp, Escherichia coli
ttggcgattcgtcttcataaactggctgttgctttaggtgtctttattgttagcgctcctgccttttcgcatggtcatcactcacacggcaaacccttaacagaggtcgaacaaaaagctgctaatggtgtttttgatgataccaatgtacaaaaccgaacgctcagtgactgggatggagtctggcaatccgtttaccctttactgcaaagtggcaaacttgaccccgtctttcagaagaaagcggatgcagataaaaccaaaacatttgctgaaattaaagattattatcgcaaaggttatgcgacagatatcgaaatgattggcattgaggacggcattgtcgaattccatagaaataatgaaacaacatcctgtaaatatgattacgatggatacaaaatactcacctataaatcaggcaagaaaggcgttcgttacttattcgaatgtaaagatcctgaaagcaaagcccctaaatatatacaatttagcgatcatataattgcaccacgaaaatcatctcattttcacatttttatgggtaatgattcccagcaatctttattgaatgaaatggaaaactggccaacgtattatccctatcagttgagtagcgaagaagtggtcgaggagatgatgtctcattga

SEQ ID NO: 7678 - DNA, 288 bp, Escherichia coli
atggatataagccccttacttcatgcactttgtgctgtggctgcgcaaacactggttggtctttttaccggaaactgggcttacggagcgatagccggttgtacgttcttcattgcgcgtgaacacacccaggcagaatatcgctggatcgaaatgttcgggcatggcaagcgaatgaatatgccgtggtggggcggttttgatccgcgcgcgtgggatgtgacaagcctgatggattttgctgtgccggtggtggcgtgtctgctgatctggatgttgatccgttaa

SEQ ID NO: 7679 - DNA, 2379 bp, Escherichia coli
atggcagcagtaaaaatctcaggtgtgctgaaagatggtgcgggaaaaccaatacagaactgcactattcaactgaaggcaaagcgtaacagcaccacggtactggtgaacacggtggcttctgaaaatccggatgaagccggacgttacagcatggatgttgagcatggtcagtacagcgtcaccctgctggttgaaggttttccgccttcacatgccgggaccattaccgtctatgaaggttccagaccaggtacgctgaatgattttctcggtgccatgacggaggatgatgtccgaccggaggcactgcgccgctttgagcagatggtggaagaagcggcacgcaacgctgaagccgcctctcagagcgcagcggcggcaaagaaatccgaaactgcagcggcatcatcgaagaacgcggcgaaaacctcagaaacgaatgcagctaacagcgcacaggcggcagcgacctcaaagactgcatcggcaaactccgcgacagcagccaaaaaatcagaaaccaacgcgaaaaatagcgagacagccgcaaagacgagcgaaaccaacgcaaagtccagccagacggcagcgaaaaccagcgaaacgaatgccaaagccagtgaaactgcggcaaaaaacagccaggttgcagcagcccaaagcgagagcgcggcagccggttctgcgacttcagcagctggatcagcaactgctgcggctaacagccggaaagctgcgaagacgagtgaaactaacgcaaagtccagccagacggcagcgaagaccagcgaaacgaatgccaaagccagcgaaactgcggcgaaaaacagtcaggatgcagcagcccaaagcgagagtgctgcagctggttctgcaagcgcggcggctgcttctgccactgcatcagccaacagtcaaaaagcagcaaaaaccagtgaaaccaatgcaaagacaagcgagactgcagcggcgaactcggcgaaagcatccgctgcaagccagaccgctgcaaaagcaagtgaagacgcagccagagagtatgcaagccaggcagcagatccgtataaatatgtcttacagccgctgcctgatgtgtggataccgtttaacgattcactggatatgattacgggcttttcgccatcatataaaaagattgttattggtgacgacgaaataacgatgcctggcgacaagattgttaagtttaaacgtgcatcgaaagcaacctatattaacaaatctggtgtgctgacagaggctgccattgatgagccacgatttgaacgtgatggcctgcttattgaggggcaaagaactaatcttctgcttaattcaacaaatccatctaaatggaataagtcaggcaatctggaactcacagaaatatccacggattcttttaattttacttatgggagatttactgtaaaagatactcttattggtcagacaagtgctattaatatcgtaacgatttctggcagtaaagggtttgatgtcacaggtgatgaaaaatatgtgaccatttcatgccgtgtaagaagtgatgttgaaaatataaggtgtcgtttaagatttgaacaccatgatggttatacttacacttttttgggagatgcttacctcaatttatcaacacttgtaattgataaaactggtactgctgcagaccgtattattgcaaaggctgtaaaagatgaggttactggttggattttctatcaggctacaattaatgcactagatacagagagcatgattggtgcgatggttcaatacgctcctgtaaaaggttcaggtacagcatctggagactatctggatatcgcaactccacaagtggaaggtggatcaagtgcttcgtcatttattgtaactgatataactgcaagcactcgcgcaagcgatatggtgacagtcccaatcaagaataacctttataatcttccttttacggttctttgtgaggtacataagaactggtataaaacgccaaatgcagcaccgcgtgtttttgataccggcggtcatcaaaccggagcggctattattcttggcttcggtcgttcaacagattacgacggatttccttattgtgatataggtttggctaacagacgggtaaacgaaaacgcatcgcttgaaaaaatggttatggggatgcgtgtaaagtcagatcagtctacgtgctcagtaagtaacgggcgtatatccagcgaaaagaaagccacatggtcctatattcagaactccgcaattatccgtattggaggccagactacagccgggttgcgtcatttatttggtcatgtcaggaatttcagaatatggcacaaggcattgactgatgctcagatgggggagtcaatctaa

SEQ ID NO: 7680 - DNA, 1680 bp, Escherichia coli
gtggttccgggattaaaccgtctccggccccgttcggtttcagggcctgccatcgtcatgaccgtggctgttgtggttgcgctttgcacgtttattcaccgtaaaccggcattgctgggcgttgaaccgggtagctcacagcaaatgtactggatggctggcgtgattgccgcaggcgtggtctttctgattatcatgggggtttatcatctgctgaaccgccacgctgccgtgcagaactttgaactccgcagacagcttgccgccggagatgactatcgtgcggtgacgacaaagaaagccgacagccgtcatccggcaatggtggaactcgccgccttcctgcgcgaccgctacggcccattctggcggcgtaaaatccgcctgctgctggtgaccggcgagcctgaacaggcagaggccatcgcgccggggctgaccgggcaacactggctggagggcgaccacacggtgctgatatacggcggcaggccatcagcggagcctgatgtcgcgctactgaccgccttaaaaaaactgcgccgcagccgtccgctggacggcatcatctggccgctgacagaagaacagagccgccagacagcgcaactcgacaaaggctggcgcgaactgataaacggcggtaagcgactcggttttcaggccccattctatttgtggcaggtctgtgacaacggtgattatcagtccgggcgcgtcctgcaaagcgtcggctgcctgctgccggaaggctgtaccccggaacaactggctgcaatgctggaagcacagaccctaccgctgacggaacagggcatgtcgcagctgctgaccgataaccgccatgattttctgctgcgtctggcccatacccttgcagagcggggtatcacccactggcagaccgtcctgaaaccgctgctggcaggcggcgcattttcttccctgcgcctgcgcggcctgatgttcagcccgccgcttgccgccgtaccggaggccgcacctcatgcgtggctgccgtcgccggtctgggcaggcatcaccggcgataacgcgcggggccgcgcggtgggctttccgtggctgcgtaccgcactgatgtccgctgtctgcgtgctggcgatagggggggccggaatgacgacctcgttcttcgccaaccgcgcacttgttcaggaaaccagcatccagacggcgcgggcgctcgatacccgcctgccgctggcagaacaactggtggcgctgcataccctgcagggcgaactggaacgcctgcaataccgtatccgcgaaggtgcgccgtggtatcagcgttttggccctgaacgtaaccagcaactgctcgccgccgcctttcccggctatgcgcaggcggcaaaccggctggtgcgcgacgtggccgttgaccatctgcaacagcaactgaacgcctttgtcgccctgccgcccaacagtcctcagcgtaccgccaccggtgaacaacgctataagcagcttaaggcattgctgatgacttcccgcccggaaaaggccgacgctgcctttttcagtaccacgctgatggcagacggcctgcgctatgaaaatatcccggaaggcgtgcggcagagcgtgttgccgtcactgctgcgtattttcatgaaaggagatcactcaataacttccatcgagatcgggtaa

SEQ ID NO: 7681 - DNA, 1215 bp, Escherichia coli; identical to SEQ ID NO: 5959

SEQ ID NO: 7682 - DNA, 534 bp, Escherichia coli
atggccagcacagaagaaaaattactcacgctcctgttatcggtggagcatctgcaacataccgcaatggagcaacagaaagctgttgctgattctctggctgtggcaagggaaactcttcgcggatatcgggatatttctgacggtgtggcaaaacaggtcagggatgaagtcagaaatgaggtgcagaagctggacgtggcaggactgataggtgagcgcatcagccaggattttcagcggctggaagagtcagtcgcaaacatgaaggcaaacgcggatgccctgaacagggatattgcgacaattcacagcaatatcgtgcaggaatacaacacccttaaagggtatagctggaaatggctgggtggggtgtcagtggcttttctggttatgttctgtgtgctcggatggggaatgaaaacaatactcgacaggaactacaacgccacagcggcggtgtatcagaaagttgtgacactggaagataaactggtggagaaacctgtcacggggaagagccggaaaaactga

SEQ ID NO: 7683 - DNA, 210 bp, Escherichia coli
atggcaaaattaggtgaaaacaccccacatattatcgatgctactgtagattttatggcatcaagccaggcatttcgtgagtatctgaaaaaacttccccctgataacacaataccgccagctcttactgatgagcacgtaccgttatatatacgaaggctggaatactatcgtctgctttatcgaccaaagcagacagaatcatattga

SEQ ID NO: 7684 - DNA, 168 bp, Escherichia coli
atgtatggaatggaagtgagctttaaggtttcagctctaaaaaataaaatatttattagttggctggttgttgttcttgttctgtatgtatataaacactatcgacatattatgaccgggaacattccttaccccctctgcgctcgcagaggttttttttgtcattaa

SEQ ID NO: 7685 - DNA, 531 bp, Escherichia coli
atgagtaattcactgttaccgccatcagccagcaatttcatgcgttgcgccgaagctgtcggagcgcgcattacagacatcccggtagacctcaacacgctgtggtcaccggacacctgcccggtgcatctgctgccttatctcgcctgggcattttccgttgaccgctgggatcgcaactggccggaagagacaaagcgacaggtgattcgtgatgcatggctgatacaccgacacaaagggaccatcagcgcactgcgccgggccattgagccgctgggatacctcattcgcgtgtctgagtggtgggagttcggcggagaaccgggaacatttaccgttgaagtcggcacgctggacagtggcgtgacggaggaaatgtatctggaaatggagcggttgattgctgatgcccgcccggtcagccgccacatgacagggctgaatatcattcaggagattcagggagatattttcgcggcggcagcaacttacgacggcgaagtcattaccatttatccggacgattaa

SEQ ID NO: 7686 - DNA, 897 bp, Escherichia coli
atgcctgctgttgatctttcccagttaccggaacccgccatcatcgcggagcctgattttgaggcaattctggctgacacaaaggccatgatgattgcgtcctatcctgccgaacagcgtgaagccgtctccgccgcgctggagctggaatcagaacccctgaacgttatcgctcaaaccatgtcgtttcgtgaaatgctgttacgccagcgggttaacgagggcgcacgcgcctgcatgttaagccacggttcagggacaaacctggacaacctcgcgggcaatatgaacacaaagcgcctggttatcactccggcaacggataccaccgacgcggtgatggagagcgacacctcgctgagactgcgggcgcagcgggcgtatgacggcctgagtgttgctggcccgtcaggtgcatacgagtattttgcacgcagcgccagcggtctggtgcgtgatgcgcgggccatcagcccgtctccggcctgtgtgacggtttccattctgtccactgaaggcgacggcacagcaacggaggcgttgcttaataccgttcgcgccgttctgaatgcagaggatacccgcccggtggccgaccgactgaccgtacagagcgccagcatcgtgacatggcggctgaatgcaaaactgtacttttaccccggcccggaatccgaacctattctggctgcggctgaatcgtcgttcaggaagtggctggctgagcaggggcttattggtcaggacgtggcgttgtcagccattgctgccgcacttcatgtgcacggcgtgcaacgcgtggagataatcgaacccacacagaatatggccatcagcgacatacaggcggcgcgctgtgagtcattcaccatcagcgaaggtgggcgtaatgagtaa

SEQ ID NO: 7687 - DNA, 351 bp, Escherichia coli
gtgacaacccgctacacaggaatgaacccggacgggacgggaaacctgaacgatatggagcacctgaaacagtcagtcagggacatcctgatcaccccgctggcaagccgggttatgcgacgggaatatggcagccttgtgcctgatttgattgacgaacccatgaataacaccacgcgtctgcaatgcatgagtgctgccgtgattgcgctgacacgatgggaaccccgcattgccctggacgccatcgacgttgtctggaaggcaggaggccgcgccggggtgacgctgtcgggcactgtcatgcagaccatgcagaatgttgaattaaccatcacgctgagagagtaa

SEQ ID NO: 7688 - DNA, 582 bp, Escherichia coli
gtgagcgcagaactcatgcgactgctgagcaacatcatccgcaccgggatcatctctgaagttgatgagaagtcctggcgcgtgcgcgttcgcagcggcgaactggaaacaggctggttgcgctggaacaccacgcgcgcgggagccttcaatgtgtggctgccgccatcaccaggcgaacaggtggtaattgcctgcattggcggcaacccggaaaccgccatgataattggcagcctgtggagtgatgccagtccggcccccggcaaaagcctgaaagaaatcgtggtcagcgcgccggatggcgcggtgttccgctacgacgcagacgctggcgcactgagcgccagcggcatgaaaacagccaccctgcaggcatccgtcagcgtgacactggatacgcccgtcgtggaatgcacaaaccttctgagaacggcgacgcttgacgtcacaaaagagggaaagatgagcggcaatatcacgcacagcggcggcaatttcacctcaaacggcattaccgtgcatacgcataagcacggtggcgttaaaggtggcagcgattcgacaggaggcccgcagtga

SEQ ID NO: 7689 - DNA, 738 bp, Escherichia coli
gtggcgctgccctttgctgctgacgcctgtctggtcgcctcatcttttgaagcagacgcagatgatgccgatgacgccgctgaactggctgacgatgcggctgccgccttagaggaagcagcattgtctgctgaagtctttgcatttgtttcagaggtttttgctgcagaagcagacctcgctgctgcagtggcttgctcagtggctttgccagccttcgttgtggctgttgaagcggatgatgcggcgctttctgccgattttccggcggcggtggcactggctgaggcctgcccggcacttgttgacgcggcactggcagataatgcagccgctgtttttgaacctgccgcagctgaggcgctctgtcccgctgctgtttcagaagacttagcgttcgtctcggacgtttttgccgccttcgcggaatttcctgccgccgttgccgaggaagctgcactactggcacttgatgatgcattcgtttctgaagatttcgctgcctcttttgaggccgccgcaccccgtgccgaggtggcagcttctgacgccttcgtggtcgctgtggatgcagaagtggctgccgatttttgtgatgctgcggcattcgtttctgacgttttcgcggcactggcgctggtagctgccgcgctttttgatgactctgcagcagcagcactttttgctgcttcacgggcctttgtcgatgccgttcctgcgctggaagacgctgactga

SEQ ID NO: 7690 - DNA, 1431 bp, Escherichia coli
atgggtgaaacgaacaagaaagcgcccttaaatagtcctgcactgaccggaacgccaacaacaccaactgcgcgacagggaacgaataatacccaaatcgcaagcacggcttatgttatggctgcgatcgctgccctcgtggactcgtcgcctgacgcactgaatacgctgaacgagctggctgcggcgttgggcaacgacccgaattttgcgaccaccatgactagcgcgcttgcgggtaagcaaccgaaagatgccaccctgacggcgctggccgggcttgctactgcggcagacaggtttccgtattttacggggaatgatgttgccagtctggcaaccctgacaaaagttgggcgggatattcttgcgaaatcgaccgttgccgccgttatcgaatacctcggtttacaggaaacggtaaacaaggctggtaacgccgttcagcgttccggcgataaaatgaccggagaactgaaaattggcacggtgaatgcgctgcgaattttcaatgatgccttcggtcttattttccgtcgttcagaagattttcttcatttcattccgacggctgaaggacaaggcgaaaacggtgatatcggcccattaaggccattcgctataaatctgagaacaggtgctatatctgtcagccacggggccaaaattgatggtgggctggcgcttggtacagataacgcactgggcggtaattccattactctcggagataacgacactggtattaaacagggcggcgacggtgtccttttattctattcaaatggacaactggcatttgggcttcaacccgcatctgctgatttttataagcgggttgcatatattcatcagggaataattcctgatggaagtggcgcatttgcagaccagttgaataatgccaccgcgccttttgttcagacgcagtttgcctggaatcccactcctggtggtctttacgtgccgatagttaagggcttgtccattcgcaatggacagggctatcccggcgcggtcagctttgggtatttactgacagaacagtatggatttccggttccatgtattcatatgcgtggcgatggcggtaatgatgctttatggcagtttaacccgaacgataaatcctttatttcaccgggtgctcttattgcgggtggcgtccgttataacaccgatggaaatatatttggtgggtgctgggggtcaaacttaaatgattacctgaatagttcttttatcagaaatgtgcgtctgggaggcagacgttctgacacattatatcgcggaggactttgcgaaccaggtaatggtcatgtgacaacaggattgcaaattattggtgaggttgatggagatgactggatggtgtcacgaccactacaaaaatacatttctggtaactggtataacgttgaacaggcatag

SEQ ID NO: 7691 - DNA, 528 bp, Escherichia coli
atgcaacatctgaaaaatattaccgccggaaaccccaaaaccattgagcagtatcagcttacgaaaaaagctggcgttatctggctatatacagaagacggtaaaaactggtatgacgaattaaaaaactttcaggatgatactttaaaaatagcttatgaccagaaggggattattcgttgtattgagaaagacgtatcaacacttaaccctgacgggttaagtgttgttgagttaccgaatataacagccaaccgtcgcgccgatatctcgggaaactggaagtttctggatggtaaagtagtaaagcgggaatatacaaaacaggaactgcaacagcaggcagagttacaaaaagccgctttgctttccgaagcggagtctgtgattcaaccgctggaacgtgctgtcagactgaatatggcaactgatgaggaacgcacacgactggaatcatgggaacgctacagcgttatggtcagccgtgtggatactgcaaagcctgaatggccacagaaaccagaataa

SEQ ID NO: 7692 - DNA, 252 bp, Escherichia coli
atgtttaaagatggcgcagtcattaaacgtgtatataccgaagaagagttgcgcctacagacggaaaaccagaaaaaaatattattacagcaggccagagaaaaaacgcagttctggcaaacacagcttactttggggattatcactgattcagacagacagcaactgatgaactggatgcgatacgtgcaacaggttgagacaactgatacctcggttcttcctgtaacattcccggaaccaccagaataa

SEQ ID NO: 7693 - DNA, 822 bp, Escherichia coli; identical to SEQ ID NO: 6107

SEQ ID NO: 7694 - DNA, 573 bp, Escherichia coli
atgcaaaaacttgaaaaccggtgtgagctgctgctcatccagcatcagaaatggatgacaaacgtgacgaggcttatcgtcgctcatggaatgggggctccgcatcttcatggttatcaccgcctgaccctggcccacttttttctgccagaaaaaggcaccatcatctcagtggcaccacagggactctatcaggtcgtcaacccgggaacaccaccgttcattcctgccattcaggaagggttaatgaccagcattcagacccatgaaatcatgctgcttacacattttaatctgggcggcgttttactcagtgagctacatcgtctgggtgaaaaccggctggcaaacaggctgaacagcctgctccggcgtttcgacgatcgtgatctctaccacacgctgatatggctgtgctggtatgatctgatgtgtgcccactccatgcagccctggactgaagagttaaagcataaatcacatgcagagcttgaaaactgggctgtggcgcgcaaacgggaaaagcgcgagctggaactgatgattgacgagtacctgttatacgcctgttga

SEQ ID NO: 7695 - DNA, 261 bp, Escherichia coli
atgtcgcagacagaaaatgcagtgacttcctcattgagtcaaaagcggtttgtgcgcagaggtaagcctatgactgactctgagaaacaaatggccgctgttgcaagaaaacgtcttacacacaaagagataaaagtttttgtcaaaaatcctctgaaagatctcatggttgagtactgcgagagagaggggataacacaggctcagttcgttgagaaaatcatcaaagatgaactgcagagactggatatactaaagtaa

SEQ ID NO: 7696 - DNA, 561 bp, Escherichia coli; identical to SEQ ID NO: 5114

SEQ ID NO: 7697 - DNA, 720 bp, Escherichia coli
atgagcgtacgttcacgggcactggttcccctctgcacagagcaacaagccgcatggcgggcggtggcggagacggaaaaacgccgccatcagggaaacacgctggcggaatatccgtatgcgggggcgtttttccgctgtctgaacggaagccgcaggatttcgctgtctgacctgcgatttttcatgccgtccctgaccgcagaagaactgcgtggcaaccgttctcagtggctgtatgccgtcgatgtgctgattgaaacacagggcgaggtctgcctccttcctcttcccggcgatgcagcagaacgcttgttcccgtcggtgcggtttcgtgtcagggagcgcagtcgccataaatccgcgctggtcatgcagaagtacagccgccagcaggcacgggaggcagagcagaaagcccgtgcgtaccaggcgctggtcgctcaggctgaaatcgaactggcattccattcgccggaaacagtcggaagctggcatgcacgctggagtgaccgggtggcagagcatgacctggaaaccctgttctggcagtggggcgagcgttttccgtcactgaccgggatggaacgctggcagtggcaggatatgccattctggcaggtcatcacagaggctggtatggcggcaagggaggccggtcatgccgtccgtgagatggagcggtggatggtgccgaacaaactccgggaggcggcgtga

SEQ ID NO: 7698 - DNA, 315 bp, Escherichia coli
gtgaagtggcgttactcactgcgctggaaactgccttatccctgtcctggcgagcatgaactggtttcagaagtggtggaggcggggcagcctgctccggcatccgttatgtcacgctgggttgccggagcagggtatgcggtctgtctggattttatttctgaccgcccggtgcgccgctggagcgaagaacgtaaggctgcggtacgacggcggaatctggagaaacgtatcaacaggcatgcaccactgtttgcggatgaactgatagcccgtgaactggctgaacgaccggattattttcagggaaagtga

SEQ ID NO: 7699 - DNA, 216 bp, Escherichia coli
atgtctaaccaacaccagtatggcctcttaccgtgcaaattgcaaggaggagtaaaccatgaaactaccgggaaacgcccttatctggtgcgtattaatcgtgtgctgcacgttgttgatattcacactcctgacccggaatcgcctgtgcgaagtccggctgaaggacggatacagggaagttacggcaacaatggcttacgaatccggcggtaa

SEQ ID NO: 7700 - DNA, 324 bp, Escherichia coli
atgggcagaaatatgtcagcagcacgtaccgatggctttattcgtaatattcattcccgcaatccctttgatgttatccgggctgatgtggtgatcagcaagctggaaaagcaggctcattggggatgtggtctgcactatgaaatttatgaagcgaatttgtttgatatggcgatgaatcatctttcccggcttcctctgaaggatcgtccggtattcattggtgctgctgcacgaaaggggctttttctgacgatggaagaaaccaggctggcacgggaagcgaaagatgctctgatggctgaacttgctctggaatactga

SEQ ID NO: 7701 - DNA, 243 bp, Escherichia coli
atgggatatatcacatatgttacagatcaacgacccggtgaaccagatatcctgaccgggaacacgtttgctgatctggagatttgtgattctgatgggcatcttctgctgaaagtgtctgcacctgaagccggctggacacacgaaagcctgaaccttgttcagccgcaggaagtgcaggaggggaatgatgcatttgatgcttatctgaatggtatatggatcggttcgacagaggtctga

SEQ ID NO: 7702 - DNA, 231 bp, Escherichia coli
atgacggtaagtattgtttcaccttccgcagcggctgtaaagccccgccgtcatccccgtttcagacgcgaagacatccccgcgccggaaattgaccccgtgctgaaagccttcgggcgacacattgcccggagttttcaccggggacgtggtgtacacatccccgccatgaaaaatacggctttcgggcaggtgctccgcacactcgaactgaaacgcgcttttaactga

SEQ ID NO: 7703 - DNA, 930 bp, Escherichia coli
gtgtccgctcagcacatccagacgtccgccattttccagtacgacattatcagccttacccgccacaacggagaatgctcccaggcggtttgtgccggtgacggttgcagctgtactggtaaccagtgcaccgcccgtgttctgggtgacatcagacgctttaccgccggcattcacctgcagctttcctttctggttgatggtggtatgcgcggcagttcctccttccttaatcacctgccagccatcacggtttatcagcgtctctgttgccgtgccaccgttgtgtacatactggttacccccctccagtcgggtgttatgtgcctctccgtgtaccgtctggtcaccaccggcgtaaatgagggtgtcccgtgccatccccgaagaccagataacctgccggccatttttattgatggtggtggattcagccgtccctccgaccatctgaccgctggacacattttcagactccggaccaccttctgcaccggtgttgacgatggttccggttgccagtccgccatgttttatggtctggtaaccatcctggttaataattgtaccggcagctttccctcccccgtgtacccactgctcacctctgttatccagcgtggtgttcaccgccagtccgttaaggctctgccctccgccatcacgaataaccgtatcactggcagttcctcctgcctgcacaatctgacgaccatttgcggtgacagtggtgtttctgcctgtgccacccgcttttatccattgcccgccggtgttttcgtcactgtccggccccagctcaagcccggtactgacagtcacgccatcagctgttccggatacaaactggttgtcatggtttaccagtgttccgccattcactgtttcacacgggtgcacaacgatgtcagcagccagcaccgggagtga

SEQ ID NO: 7704 - DNA, 357 bp, Escherichia coli
atggaaataaaaccagaggatgagttaagcaatatcgttttatttccggtaaaagaggatgaccctcgtaatcaggttaattttctttatgagccatcggaaagaccatattgccatcacgcttctgtccgggttgacgaaaaagagcgtcaggtccgctgtaaaatctgcggtgcagttgtggagccatttgactggatgctctctgtggcgaaaagagaaaccagactggcagatgatgtaaggctcttgcgccaggaggaacgggaaaggcgaaaaaatatagaaaagctaattcagattgagcgtaacgcgaaagcgcggatacgcagggtgacaaaatccagaactgaataa

SEQ ID NO: 7705 - DNA, 177 bp, Escherichia coli
atggctgattttggttcaactaaatacaacgtcagttttgaagaatggcatgaactgttaatggactatgcagagttacgtggtggcagtgctgctgatgctgaagcatggcgtgatgattatgaagcaggaaaaactccggtcgaagcatattgtgatgagtggggcgatgaatga

SEQ ID NO: 7706 - DNA, 861 bp, Escherichia coli; identical to SEQ ID NO: 5314

SEQ ID NO: 7707 - DNA, 558 bp, Escherichia coli
atgcgactttttggttacgctcgggtctcaaccagtcagcagtctcttgatcttcaggtcagagcactcaaagacgcaggtgtgaaagcaaaccgtatatttaccgataaggcatccggcagttcaacagaccgggaagggctggatttgctgaggatgaaggtggaggaaggtgatgtcattctggttaagaagctcgaccgtcttggccgcgacactgccgatatgatccaactgataaaggaatttgacgctcagggcgtggcagtccggttcattgatgacgggatcagtaccgacggtgatatggggcaaatggtggtcaccatcctgtcggctgtggcacaggctgaacgccggaggatcctagaacgcacgaatgagggccgacaggaagcaaagctgaaaggaatcaaatttggccgcaggcgtaccgtggacaggaacgtcgtgctgacgcttcatcagaagggcactggtgcaacggaaattgctcatcagctcagtattgcccgctccacggtttataaaattcttgaagacgaaagggcctcgtga

SEQ ID NO: 7708 - DNA, 264 bp, Escherichia coli
atgaaatctctggttgcgggaaaaacggttactgtcacatattttcagcgagatcgttatggtcgtattctcgggcaggtttatgcaccagacggaatgaatgttaatcattttatggtccgtgcaggcgctgcatgggtttatgagcagtacaacaccgatcctgttcttcccgtcctgcagggagaagcacgacagcagaaacgtggtctgtgggcagacagcgctcctgttccgccctgggtatggcgctcacggaaataa

SEQ ID NO: 7709 - DNA, 213 bp, Escherichia coli
atgaactatcaggcagtatcagaattaatcacatcgtctaatcataatgttcttatagtgtgggactcagcttctgaagttgatggttttttaaataaactgaatatcactgattataagtattatgatttcagccagatttacagttgttctgacagaacattaaatgattatgcggttattttttatcagggatgcactgaacgccagtga

SEQ ID NO: 7710 - DNA, 438 bp, Escherichia coli
atgaaatatgatgatgtgtcagaattgatgattaaatgtgaacacaacattcttattgttggtaatacttactcccgagttgataatttttttaaggggtattctgtaccagattctaaatattatgatttcactcagattaacagtgattcagatgcagagagaaatgatcatgccgtctcctttatcagggatgcaatgaatagtgaagagcatataattatttttaattgtgttgggtggcctgatttaggtggtggatcagcagtatcgcagtttgcaatgatggccagaaaatttggtaaacaacttattgtcgctgtaagtgaaaaggatgccataaaattaaaagacaactttaatattattggaacgttgtcatatggtaaagaaaattttattgccatgagccatacgaaaagcgagttctgtagttaa

SEQ ID NO: 7711 - DNA, 150 bp, Escherichia coli
atgacgaaatatacccttatcgggttgctcgccgtgtgcgccacggtgttgtgtttttcactgatattcagggaacggttatgtgagctgaatattcacaggggaaatacagtggtgcaggtaactctggcctacgaagcacggaagtaa

SEQ ID NO: 7712 - DNA, 198 bp, Escherichia coli
atgctgaaacagcaggatatgacagaaaccgccagagtggtgtttaatgaattaagcgtcaccgaaccggcgacagccggggagattgcgcagaatacttacctttcacgcgaacgctgccagttaatactgacccagctggttatggcgggtctggcagactatcagttcggttgttacagacgccttccgcagtga

SEQ ID NO: 7713 - DNA, 1050 bp, Escherichia coli
atggctaatactgtaaaaatatccagttgtgagttaatcaacgccgactgcctggaatttatccggtcgttacccgaaaattctgttgacctgatagtcacggacccgccgtactttaaagtgaagcctgagggctgggataaccagtggaagggcgacgatgattacctgaagtggctggaccagtgtctggcgcagttctggcgggtgctgaaacctgccggaagtctttacctgttctgtggtcatcgcctggcatctgatatcgaaatcatgatgcgtgaacgcttcagtgtgctgaaccatattatctgggcgaagccgtccggacgctggaacggatgcaacaaggaaagcctgcgggcgtatttccccgccacagagcgcattctgttcgcggaacattatcaggggccgtatcgtccgaaagatgccgggtatgcggcgaagggcagtgcactgaaacagcatgtgatggccccgctgatttcttactttcgtgatgcgcgcgcggccctggggataacggcaaaacagattgcagatgccacaggaaagaaaaacatggtgtcgcactggttcagtgccagtcagtggcagctaccgaacgaaagcgattatctgaaattacagtcgctgtttgcccgggtggcagaagagaaacatcagcgcggtgaactggaaaagccccaccaccagctggtggatacgtatacgtcactgaaccggcagtatgtggagctgcagagtgaatataagcatctgcggcggtattttggtgtgacggcgcaggtgccgtacacggatgtgtggacacataaaccggtgcagttctatcccgggaaacatccgtgcgaaaaaccggcagaaatgctgcagcagataatcagcgcaagcagtcgtccgggtgacctggttgcagatttttttatgggctcaggttcaacggtaaaagcggcactggcgctcgggcgtcgtgcgattggcgttgagctggagaccggacgttttgagcagacagtcagggaagttcagggtttaatcgtttga

SEQ ID NO: 7714 - DNA, 1221 bp, Escherichia coli
atggacgaaaaatccctctatgcccatatccttaacctgactgcaccatggcaggttaaatcccttaccctcgatgaaaatgcaggttccgttactgttacagtcggaattgctgaaaatactcagttaacctgtccgacctgcaggaaatcctgttctgttcacgatcaccgacatcgtaaatggcgccaccttgatacctgccagttcatgacattagtagaagccgatgttccccgcgttatgtgcccggagcatggctgccagactctgcctgtaccgtgggcaggttccggcagtcggtacactctgctgttcgaatcgttcgtgctctcatggcttaaaatcagcaccgttgatgcggtcagaaaacaacttaaacttagctggaatgccgttgacggcatcatgacccgcgcggttaagcgaggcctgtcgcggattaaaaagcctttatcagtgcgtcatatgaatgtagacgaagtcgcctttaaaaaagggcataggtatataaccgtggtatctgatcgcgacgggcgggcactggcattaaccgatgatcgtggcacagagagtcttgccagctatctccgttcgcttactgacagtcagttgttggccatcaaaacactgtcgatggacatgaatgcgggctatataagagcagcgcgtatccatttacccaatgcggtcgagaaaatcgccttcgatcgcttccatgtggcgaagcaactgggcgaagtggttgataaaacccgccagaatgaacatccgcacctccctgttgaaagtcgtcgtcaggccaaaggtacccgcttcctgtggcagtacagcgacaaatggatgactgagtcccggcaggaaaagctgatgtggttgcgggaacagatgcaacagacaagccagtgctggacactgaaagagctggcaaaaaatatctgggatcgcccctggagcacagaacgcaggaatgactggttgcagtggatatcgctggcgtctgaatgtgatgtgccgatgatgaaaaacgcagcgaaaaccattaaaaaacggttatacggaatactgaatgcaatgcgtcatcgcgtctcgaatggaaatgcggaggcgctgaacagcaagatcagactgctgaggataaaggccaggggataccgaaaccgggaacgctttaaactgggagttatgttccactatgggaaactgaatatggcgtactga

SEQ ID NO: 7715 - DNA, 519 bp, Escherichia coli; identical to SEQ ID NO: 5755

SEQ ID NO: 7716 - DNA, 297 bp, Escherichia coli; identical to SEQ ID NO: 5319

SEQ ID NO: 7717 - DNA, 312 bp, Escherichia coli
atgcttaacccacccaatggcgtgcagcttaagctccggatacatggcgttaacttctggcattttcatcaacgcttcaacgatatgtccgtcgaatgttgccatgtcttcctgcaacaattcctgtgcgctaataaccatatcaacggtgatgttttcacatgtgtcgaacttaaccatgacagcgttctgtacttcaggggccagcttgtcaaaagtgacgttcatcggatcggattcagtctcaaccgggacaaaagaagcagactcctcatcccagcggttttcctgcatatattcagcatcccatga

SEQ ID NO: 7718 - DNA, 192 bp, Escherichia coli
atgaatccagtatttgcacttattctgacggtttttcttgtttccggagagccagttgatattgcagtcagtgttcacagaacaatgcaggaatgtatggcagcagcaaccgaacagaaaattcccggtaactgttacccggtcgataaagttattcaccaggataatatcgaaatcccggcaggtctttaa

SEQ ID NO: 7719 - DNA, 189 bp, Escherichia coli
atggaaacgttattaccaaacgttaatacgtctgaaggttgttttgaaattggtgtcactatcagtaatcctgtatttactgaagatgccattaacaaaagaaaacacgaacgggagttattaaataaagtatgcattgtttcaatgctggcccgtttacgtctgatgccaaaaggatgtgcacaatga

SEQ ID NO: 7720 - DNA, 129 bp, Escherichia coli
atggttctagcgatatttcaattagtgccaaaaatgtcaatgcatttgcactccgacaaacaggtaatactgttaatggtgatacatccgttggatggaattgggatagtggtgcatataacgccatga

SEQ ID NO: 7721 - DNA, 414 bp, Escherichia coli
atgattggtggtgcatctgcattaattcttcactttaatataaatgctggtagctgtcctgccgtacaattccgtgtgaattataaaaatggtggcatttcctacaggtcggctcgtgatggttatgggtttgaattaggttggtcagatttctataccacgacacgaaaaccttcagcgggagatgttggtgcatatacgcggacagaatgtaactcaaggtttattacaggtattcgccttggcggtctgtcatctgttcagacatggaatggtcccggctggtctgacaggtcaggttatgtcgttacgggttcagttaacggaaaccgtgatgaattaattgatacaacacaggcaaggccaattcagtattgcattaatgggacgtggtataacgcggggagtatttaa

SEQ ID NO: 7722 - DNA, 534 bp, Escherichia coli
atgatgcacttaaaaaacattactgctggcaaccctaaaacaaaagagcaataccagctaacaaagcaatttaacatcaaatggctttattcagctgatggaaaaaactggtatgaggaacaaaagaatttccagccagacactttgaaaatggtctatgaccataacggcgttattatttgtattgaaaaggatgtttcagcaattaatccggaaggcgcaagcgtcgttgaattacctgatattacagcaaatcgccgggctgatatttcggggaaatggatgttcaaagatggcgtagtggtaaagcgaacttataccgaggaagagcagaggcaacaagcggaaaatgaaaagcagagcctgttgcaacttgtcagggataaaactcagctatgggactcacagctacggctgggcatcatttccgacgagaataaacaaaaattaaccgagtggatgctctatgcgcagaaagtcgaatccacagacacctccagcctgccagtaacatttcccgaacaacctgaatga

SEQ ID NO: 7723 - DNA, 228 bp, Escherichia coli
gtggttaaacggatttatacggctgacgaacagcaacaacaggccgaatcacaaaaggccgcattgctttccgaagctgaatcagtcatccagccgctggaacgcgctgtcaggctgaatatggcaacagacgaggaacgcacacgactggaagcatgggaacgctacagtgttctggtcaaccgtgtggatacggcaaatcctgaatggccacaaaagcctgaataa

SEQ ID NO: 7724 - DNA, 720 bp, Escherichia coli
atgagcgcacgttcacaggcactggttcctctcagcacagagcaacaggccgcatggcgggcggtggcggagaccgaaaaacgccgccatcagggtaacacgctggctgaatatccgtatgcgggtgcgtttttccgctgtctgaacggaagccgcaggatatcgctgtctgacctgcgatttttcatgccgtccctgaccgcagaagaactgcacggcaaccgtcttcagtggctgtatgccatcgatgtgctgattgaaacacagggcgaggtctgcctccttccccttcccggtgatgcagcagagcgcttgttcccgtcggtgcggtttcgtgtcagggaacgcagtcgccataaatccgcgctggtcatgcagaagtacagccgccagcaggcgagggaggcagagcagaaagcccgtgcgtaccaggcgctggtcgctcaggctgaaatcgaactggcattccattcgccggaaacagtcggaagctggcatgcacgctggagtgaccgggtggcagagcatgacctggaaaccctgttctggcagtggggcgagcgttttccgtcactggccggaatggaacgctggcagtggcaggatatgccgttctggcaggttattgcggaagccagtcttgcagcaagagaggccggtcacgctgtccgtgagatggagcggtggatggtgccgaacaaactccgggaggcagcgtga

SEQ ID NO: 7725 - DNA, 213 bp, Escherichia coli; identical to SEQ ID NO: 5358

SEQ ID NO: 7726 - DNA, 660 bp, Escherichia coli
atgtgcaaatgtaataccgtcacccgcgacgatattccgtttgccatctggtcagggcttcaccccgacaccccgcatcagtgcgtacgtgctcaatgtggtttccggttctcttccgcttcctcgcccactcgctcactaacgttcggtcgctggggctgcggcgagcggtgccacctctcgcatgttatcggtgattccgctgttgttctttcggggatgagtcgccagatagctcttcaaacgctctcagaagctctcaggcgcacgaaacgggttttaaatgcccgtcagggcatggaaggcgcgaaaaacgcttacagagggtttcaggaggtcaggcgcgccgatacccctaaccaggggctttcaggtcgccaggaaccgcgtcagccccctgcaaagcccatttgcacggcactggcagctattcagctggttggtggtcgtagaccgtcgatgttacagcgatgggggtctggggttctccccagacggtttccggttgcgctcaaggcgctgccggaaccgtggcagctcagacgttttggagattatcgggcaaaggttgcgaatgacgtcaatgacgtcattttgcggcgtttgccctatcctgcatcgcatcgaactgacatgcggcaaaagagcaatgcaggatag

SEQ ID NO: 7727 - DNA, 441 bp, Escherichia coli
atgagtaaggatgtcgagagaatcactcagataaatgaccagggtgagattatcggcggcttcgttgccgttatccgccctaaacaaaaatcagcatttcagaggcatttcaccatgaatcaagacgcattacggatcttggctaaggaattaaccggggagcaattcaaggtcttaatgctgatgcttgcagatctggattacgaaaacttcattcagatcgcccaagcagatattgctgaaactttagggatgcagaaaacgaatgttagtcgcgccgttcgcgcgctactggatgttggggtgatctttgagggacctaaagttggcagatcaaaaacataccggctgaatgaacaatttggttggaaaggcaccgtaaccaaccacaaaaaggcactcaaaaacggctttagtgtcattcagggcggccggatttaa

SEQ ID NO: 7728 - DNA, 891 bp, Escherichia coli
gtgctcgcatcctcaagcgccacagcggatgcaatatcctctgcccgttttgccgctgtctcggcgcgcgttgccgcggattctgccgtacttttgctctgtgctgccgccgtcgcactgccagctgcctctgtcgccttcgtggatgccgtcgtggcgctgcccttcgctgctgacgcctgtctggtcgcctcatcttttgaagcagacgccgatgatgccgatgacgccgccgaactggcggacgatgccgctgccgtttttgaggattctgcacgggtttccgacgctttcgcgttcgtttcggatgtcttcgctgcggaagctgacctcgctgctgccgtggcctgctcagtggcttcgccagccttcgttgtggctgttgaagcggatgatgcggcgctttctgccgattttccggcggcggtggcactggctgaggcctgcccggcacttgttgacgcggcactggcagacgacgcagccgctgtttttgagcctgccgcagctgaggcgctctgtcccgctgccgtctcagaagacctggcgttcgtctcggacgtttttgccgccttcgcggaatttcctgccgccgttgccgaggaagctgcgctactggcgctcaaggatgcgttcgtttctgatgatttcgctgcctcttttgaggccgccgcatcccgggctgaggtggcagcttctgacgctttcgtggtcgcggtggatgcagaagtggcggctgattgttctgacgctgcggcattcgtttctgacgttttcgccgcaccggcactggtagctgccacgctttttgaggactctgcagcggcagcactttttgaggcttcagtggcctttgttgatgccgttcctgcgctggaagacgctgactga

SEQ ID NO: 7729 - DNA, 174 bp, Escherichia coli; identical to SEQ ID NO: 4526

SEQ ID NO: 7730 - DNA, 360 bp, Escherichia coli
gtgccggctgcgaaaattaccaaagcgtatttcgagctgggaatgacgttcccggaactgtatgacgacagccatccggaagccctggcccgtaatacccagaaaattttccgttggctggataaagacacccctgatgctgttgaaaaaatgcaggctctgttaccggcgatcgaaaaggcgatgccgcctttgctggtggcccgtatgcgcagccacagttctgaatattaccgtgagatcgtcgaacggagggatcggctggtgaaggatgtcgatgattttgttgcgtcagcggttgttttgtatgaccagatgaatcgcggcggcccggcagggaatgctgtggtgatgcactaa

SEQ ID NO: 7731 - DNA, 291 bp, Escherichia coli
atgaaaatacgcacgctggcacaggcggcactgacttaccgttatggtgacgaacatcagccagtcaccaccgctgacattctgacaccacgacgccgggaggattacggtaaagacctgtggagcgcatatcagaccatccaggagaatatgctgaaaggcggaatttccggccgcagtgcaaaaggaaaacgtatccacacccgtgccattcacaacatcgacaccgatattaagctcaaccgcgcattgtgggtaatggcagaaacgctgctggagagcctgcgctga

SEQ ID NO: 7732 - DNA, 474 bp, Escherichia coli
atgaaaacattgtctcagaacaccacctcttcggcctgtgcaccggagactgacctgcaaaaactggtagccactcccgtccctgatgaacggcgcatcagcttctggccgcagcactttggcctcattccacagtgggtgaccctggagccccgtgtcttcggctggatggaccgtctgtgcgaaaactactgcggtggtatctggaatctgtacaccctgaacaacggcggggcatttatggcacctgaaccggatgactatgatgacgaaacatgggtactgttcaatgccatgaacggtaaccgcgctgaaatgagcccggaagccgccggcattgccgcctgtctgatgacgtacagtcatcacgcctgccgtacggagtgttatgccatgacggttcattattaccgtctgcgggattacgccctgcagcatccggaatgcagcgccattatgcgcattattgactga

SEQ ID NO: 7733 - DNA, 270 bp, Escherichia coli
atgttcggtaaaggcgggtatatggatggccctggcggaaacgtaacgccagtaaccattaacggtacagtctggctccagggcgacggttgcaaagccaatacctgcggctgggactttatcgtaacactctataacccaaaaacccatgaagtcgttggctaccgctactttggtttagatgacccggcctacctggtttggttcggcgaaattggcgtgcatgaattcgcgtatctggtgaaaaactacgtagctgcggttaactaa

SEQ ID NO: 7734 - DNA, 411 bp, Escherichia coli
atgaaaacttttatcaaaactttactcgttgctgtaactattctgttctctgtcttcgctgcggcgaaacaagtaaaactgccaaacaacatcaaatacgttaatactacagaggcgttttcctgtactgagattgacggtatgaattgccagacgaagaatccgttcaactataaagataacagctatgttttcgtgcttgaacgtggtggtgcctggtgttacgactacactgtctcggtacttaacctgaaaaccgggaaagaacagatgctcgaatacaaagacaaccagctgtgctcaggtagcaacaaaccgttcttcgaaatcaaaaatggcgtaccgacggtaggagtcatcgacacatccggaaaacctgtcgttgtggctctggacaaacttaaaacctga

SEQ ID NO: 7735 - DNA, 351 bp, Escherichia coli; identical to SEQ ID NO: 5999

SEQ ID NO: 7736 - DNA, 363 bp, Escherichia coli
atggttaaactggcttcacaactaggagcttgtgttgcacagattgcacgtgaaaatggcgtcaatgataatgttattttcaaatggctcaggctctggcagaacgaagggcgtatatcgcggcgtcttccggtaacaacctcttctgacgctggcgttgaattattacctgttgagataacgcctgatgagcagaaagagcctatggcggctcttactccgcttttatccactccttcacaaagcacagtcagtgccagttcctgtaaagttgagttccgccacggtaacatgacgctggaaaatccttcaccagagctgctcacggtgttgatccgtgaactgaccgggagggggcgatga

SEQ ID NO: 7737 - DNA, 657 bp, Escherichia coli
atgtttgtggcgcagggcaaccagatattcatgaacgacgtgttcctgaaacgcctgacggcacccaccattaccagcggtggcagtcctccggtattttccctgacatcagacggaaagctgaccgctaaaaatgcggatatcagtggcagtgtgaatgcgaactcagggacgctcaacaacgtcacgattaatgagaactgtcagattaaggggaaactgtcagccaaccagattgaaggtgatattgtcaaaacggtcagcaagtctttcccccgcacgaacagttatgccagtggcaccatcacggtaagaatcagtgatgatcagaaatttgaccggcaggtcatgataccgccagtgttattccgcggtggtaagcatgagaatttcaacagtaataaccaacagtcatactggtattcaacctgccggttaagagtgacccgcaatggtcaggagatttttaatcagtccacgacggatgctcagggcgtattttcctcagttatagatatgcctgccggacaggggacactgacactgacattcaccgtatcttcatcaggagcgaataactggacaccaacaaccagtatcagcgatctgctggttgtggtgatgaagaaatccacagcaggtatcagtatcaactga

SEQ ID NO: 7738 - DNA, 513 bp, Escherichia coli
atgtaccgcgtactcaaaaaagacgcgctgatggtgagcttctacggctggaaccgcgtcgatcgctttatggccgcctggaaaaatgcgggattcagcgttgttggtcacctggtcttcaccaaaaactacacatcgaaggccgcatatgtgggctatcgccacgaatgcgcctacatcctggcaaaaggccgtccacgtctgccacaaaacccgctgccggacgtgctgggctggaaatattctggcaatcgtcatcacccgacggaaaagcccgttaccagcctgcaaccgctgattgagagcttcacacacccgaacgcaattgtgctggacccgtttgcaggcagcggctcaacctgcgtcgccgccctccagtccggacgccggtatatcggtatcgagctgcttgagcagtatcaccgtgccgggcagcaacgccttgccgccgtgcaacgggccatgcagcagggggccgcgaatgatgactggtttatgccggaggctgcgtaa

SEQ ID NO: 7739 - DNA, 420 bp, Escherichia coli
atggacaaatatgaatttagacgacagcaactcatcaaaattcgtgatgagaaatgcgatggtaaagcggttaacgtggccagaaagatcgggcgcgagccttcttatgtatcaagaatgttgtacccagaggggaaaaagggaaaaaaacggatcgctgatgatatggtggagattatcgaagagtcctttgggttaccccggggatggatggatggtatcgtttcatcatcaacgaacacagcctccagttatgaaacaagggttctaacgccacgacaacgtatttttttagatctcttagacgaactgccagaaagtgaagcggataaattattaaaaactcttgaagagaaaaaacagtattacaatatgatctacgaagaaatccgtaaaaagaaagcacaaaacgcatcatag

SEQ ID NO: 7740 - DNA, 282 bp, Escherichia coli
atggaagaattaagaatatttctcaattctctttcgtcagatgaacagcgtatgtttgcatgcgagtgtggtaccagcatcggttatctaagaaaggcattgagtaaaggtcaagtgttaggggcatcgttatgtgtccttattgagcgagccagtaatggtgaagttacacgtcagcaactaaggccttttgattggatgaatatttggcccgagctggaagataccaaaacgttaacacaacaactttctaggagcttgattcatgaaaatcaagcatga

SEQ ID NO: 7741 - DNA, 384 bp, Escherichia coli
atggcgaaagtgcaggcttatgtcagtgacgaaattgtctataaaataaataaaattgtggaaagaagacgtgcagaaggagctaaaagtacagatgtaagtttctcaagcatatccactatgcttctcgaattagggcttcgtgtatatgaggctcagatggagcgtaaagagtcagcgttcaatcaggctgagtttaataaggtacttcttgaatgtgcggtaaaaacacagtcaacagttgctaagattttaggtattgagtcactaagccctcatgtttccgggaatccaaagtttgaatatgcgaatatggtcgaagatatcagggataaggtgtcatctgagatggagaggttctttccagaaaatgatgaggaataa

SEQ ID NO: 7742 - DNA, 612 bp, Escherichia coli
atgggagaaggaagttgtcctgcagctcagtttcggattaattataaaaatggcggtattttttatcgttcagcccgtgatggttatggttttgaagccgactggtccgaattttacaccaccaccagaaagccttcagcaggagatgttggtgcactgccgttatctggtggtcaactgaatggtgcactgggtatcggaacatccagtgctcttggcggtaattcgattgtattgggtgataatgacacgggctttaaacaaaatggcgatggtaatctggatgtttatgctaataacgtccatgttatgcgctttgtctccggaagcattcaaagtaataaaaccataaatattacagggcgtgttaacccctcggattacggtaactttgattcccgttatgtgaaagatgttcgacttggttcacagcaatattatggagtgaacaactggcaaacatggaatttccagtgcccttcaggtcatgtattgtctggtattaatgttcaggatacagggtctaactctgccgataatatagcgggcgtttattacagacccgttcaaaagtatataaatggcacctggtataatgtagcgagcgtttaa

SEQ ID NO: 7743 - DNA, 819 bp, Escherichia coli; identical to SEQ ID NO: 6059

SEQ ID NO: 7744 - DNA, 534 bp, Escherichia coli
atgaacgcaaaaatcagatacggcctgtcggctgccgttctggcactgattgccgtcggtgcgcccgcgcctgatattctcgaccagtttctggatgaaaaagaaggtaaccacacaacggcataccgcgatgggtccggcatctggaccatctgtcggggtgccacgatggtggatggaaaacccgttttccccggtatgaaactgtcgaaggaaaaatgcgaccaggtcaacgccattgagcgtgataaggcgctggcatgggtggagcgcaatattaaagtaccactgaccgagccacaaaaagcgggtatcgcgtcattttgtccctataacattggccccggtaagtgttttccgtcgacgttttataagcggctgaatgctggtgatcgtaaaggtgcatgcgaggcgattcgctggtggataaaagatggtgggcgcgattgccgcatacgttcaaataactgctatggacaggttattcgtcgtgaccaggaaagcgcattagcctgttgggggatagatcagtga

SEQ ID NO: 7745 - DNA, 510 bp, Escherichia coli
atggtcgggaagtgctgtcatgagcgcactgaccagcgtatccagttcccagccggtgcgggccgatacggccacaaccggatgtacgggccggaacagacggaataccgcctccgttttctcccgaatgttctgtgcctgtgcgggagaaggctgaatgccggccatatcccattcatggcagggctccgttttgtcggcctgcgtcaccacaaacagcacctgctgatgtccccggtgcaggatgtgtcgccagaaatactcatccacagacagggcacggtcatcggctttaatcagccacagtaccaggtcaagttcaggcagaatgtcacggtacagggcttcatactctgcatccctgttccggctctcgcccaccccgggcaggtcagtgataaccatgctgtgaccatggccactcagacggaagcgccgtacttcccgggtgccggcgtgaacatcactgaccggggtgacctccccctgaaacagtgcattacagagtga

SEQ ID NO: 7746 - DNA, 291 bp, Escherichia coli
atgcatgatttaaaatataaaatatatttttacacagaaggtgaatttcttgaaatgcttgaggagatagtaaatgcaactagcaaagataaatccctaaaagggaaaaaattagaaaaatatctcgataccttagtggatcatttcattaaaattactgaacatcctaaaaagggagatctcattttctatcctaattcccaagaagatggtgaacctgaaaacatcctgaaaatcgtcaaagaatggcggcgttcacaggggctacccttgtttaaagactctaaataa

SEQ ID NO: 7747 - DNA, 474 bp, Escherichia coli
atgtttgccgtctttggtctgctcaattttgacagcccacatggcattccatttatcgttggcatccttccactctttcgaaaactcatccagtctgctggcgttatcctccgtcagatctactttttccagcagctctttaccgagatgggattcggttatcttgcctttgaaaaaatccaggtaaccttccgcatcatcgctcgcccgaccgacggcctccacgaatgccgatttgccaacggtgttcacactgcggatataaaagtaataatcatggcccggtttgatattgatactggcggctatccagtacagccccgtgccaaggtagcgggctgtggtttcaacctgcctgatatcggtaatccgcgtttccgagaaccagaactcaaactgtaccgtcggatcataaaccgcaagatgcggcgtggcagttatctgaaaatagcccggcgtcagctcaatctgtga

SEQ ID NO: 7748 - DNA, 237 bp, Escherichia coli
atgacggcagggttcaactttaataactatgcagcaggtttttgttccgctaccccggcgttaaggggaaatgaggtcaacatggatactatcgatcttggcaacaacgaatctctggtatgtggcgtgttccccaaccaggacggcacgttcaccgcaatgacgtataccaaaagcaaaacgtttaaaaccgaaaatggtgcccgtcgctggctggaaagaaactcaggtgagtga

SEQ ID NO: 7749 - DNA, 129 bp, Escherichia coli
atggatttcgacacaatcatggaaaaggcttacgaagaatacttcgaaggccttgccgaaggcgaagaagctctcagcttcagtgagtttaaacaggcgctttccagctcggcaaaatctaacggctga

SEQ ID NO: 7750 - DNA, 219 bp, Escherichia coli
atgcagaaacgagaacccgtcatcatcgcgccagactataccgatgatgaactttatgagtggatgcgccagaaaattaatgcagcgcaggatctgaaatgggccaatgaagccaggactaagcaggctgaaaatctgtccgctctggagcaggatatcaccaggctggaaaaagcagcggcattaagcattgccagaatggttacatacccgcgttaa

SEQ ID NO: 7751 - DNA, 657 bp, Escherichia coli
atgaaaaaaaacacagatgatggggctaaaatttacacaccacttaccctaaagctttatgactggtgggttttgggtgtatcaaatcggcttgcatggggatgtcctacaaaggaacaccttcttccacactttctggaacatttaggtaacaaccatctggatattggcgttggaactgggttttaccttactcacgtacctgagagtagtctgatatctttaatggatttgaacgaagctagcctgaacgcggcatcgacaagggctggggaatcaaaaattaaacataaaattagccatgatgtttttgatccttatcccgcggcgttacatggtcaatttgattccatttccatgttttaccttcttcactgcctgcctggaaatatatctacaaaaagctgtgtaatacgcaatgcggcgcaggccttaactgacgatggaactctatacggagccacaattcttggtgacggcgttgtgcacaatagcttcggtcaaaaactgatgcgcatttacaatcagaaaggcatcttttcaaacacaaaagattccgaagaaggcttaacacatatactctcagagcatttcgagaatgttaaaaccaaggttaaaggtactgtagtaatgttttccgcttcagggaaaaaatag

SEQ ID NO: 7752 - DNA, 159 bp, Escherichia coli; identical to SEQ ID NO: 6188

SEQ ID NO: 7753 - DNA, 519 bp, Escherichia coli
gtgctgcgcctgtaccgatactgcgcctttattggcaatcagtttgatacccgccttgcgcacaaacacgctcagcgcccgccctacgccgataaacatattcttcaccacgccgatatcggcgttgtttcccgcatttatctggaggtttttcactgcggccagttgcaggtgctcgccgctggcgaccgccacacctttcggcgcgtgcatcaaaatcaccgaggcggtcaggtcatttatccggctggttatcagcgccacctgcgcggccatatccgccggatcggcgttcgccgtggccgcatcgtcagacagtttctggattttatcgctcaggctgttcagttcgctgataatgtcggccatttcgcgtacctgaccctgcgccttatcctgcgcgtcggcgctgataaagatgcctttctttgcccgtactgcaccccacagatcggtacgcagttcaaaaccttccccgcgctgctgttttccggcatccaccagatggccgaggtttag

SEQ ID NO: 7754 - DNA, 612 bp, Escherichia coli
gtgctgcgcctgtaccgatactgcgcctttattggcaatcagcctgatacccgccttgcgtacaaacacgctcagcgcccgtcccacgccgataaacatattcttcactacgccgatatcggcgttgtttcccgcatttatctggaggtttttcaccgcggccagttgcaggtgctcgccgctggcgaccgccacgcctttcggtgcgtgcatcaaaatcaccgaggcggtcaggtcatttatccggctggttatcaatgctatctgcgcggccatatccgccggatcggcgttcgccgtggccgcatcgtcagacagtttctggattttatcgctcaggctgttcagttcgctgataatgtcggccatttcgcgcacctgaccctgcgccttgtcctgcgcgtcggcgctgataaagatgcctttctttgcccgtactgcaccccacagatcggtacgcagttcaaaaccttccccgcgctgctgtttcccggcatccaccagatgaccgaggttgagctggctcttgccgccgtactcggtactgaccttgatatgctctttgccgcgctcatcgtcgaggcggattttgttgttcgccggggtgcgtag

SEQ ID NO: 7755 - DNA, 294 bp, Escherichia coli
gtggcgcacgtcttcggtgaacgcactctggccacactggagcgtcttctgagcctgctgtcggcctttgaggtcgtggtatggatgacggatggctggccgctgtatgaatcccgcctgaagggaaagctgcacgtaatcagcaagcgttacactcagcgcattgagcgacataacctgaatctgagacaacatctggcaaggctgggacggaagtcactgtcgttctcaaaatcggtggagctgcatgacaaagtcatcgggcattatctgaacataaaacactatcagtaa

SEQ ID NO: 7756 - DNA, 486 bp, Escherichia coli
atgaaaaccatttcacataattccaccacatcttctgtttccgtaaccgctgcatcagggaatgaccagcctcagttggttgccaccatagtccctgatgaacagcgcatcagcttctggccgcagcattttggcctcattccacagtgggtggccctggagccccgtgttttcggctggatggaccgtctgtgcgaagactactgcggtggtatctggaatctgtacaccctgaacaacggcggggcatttatggcccccgaaccggatgacgatgatgacgaaacatgggtactgttcaatgccatgaacggcaaccgcgctgaaatgagcccggaagccgctggcattgctgcctgtctgatgacgtacagtcatcacgcctgtcgtacggagtgttatgccatgacggtccattattaccggctgcgggattacgccctgcagcatccggaatgcagcgccattatgcgcatcatcgactga

SEQ ID NO: 7757 - DNA, 384 bp, Escherichia coli
gtgatccatatcgtgccgcgtctggcaggagccaaaagtggcggtgtgtttcaggctgtgctgggggcggctgttatggcggttgctatatggatgccgggggtaggaattatggcgagtaatctgctgttttctctcggtgccagtatgacgcttggcggtgttgcacagatgctggcccctaaacccagaaccccccgcacacagacaacggataacggcaaacagaacacctatttttcttcactggataatatggttgcccagggcaatgttctgcccgttctgtacggtgaaatgcgcgtgggatcacgtgtggtatctcaggagatcagcacagcagatgaaggtgatggtggtcaggttgtggtgattggtcgctga

SEQ ID NO: 7758 - DNA, 462 bp, Escherichia coli
atgctcaatacactcactgaccagatacatttccaccgacgaaaaacgagcgccccggttcaggatggcatcgagcaccacgggcaggttttcgtcgtcttcatcgagccagcaggggtgatcgctttccttcaccaccaggcgaaagcggcgcgtctggcgggtcagcaacgtctgaccggtggtggtcagcgccgcacggatacgccgcgcatcttctgccacctggtaactgacactgcatactgcatcgcgtaccgcaccaagaacggccctgatttcgtcctctgccagccactcaccggcatacgggaaagacacctgcgttccgtctgccggaagtaccggcagcgactgccactgactgccggacagaacaagttccgctccggttccggtcagtttctgaatggcagaggccaggagcggcggcagtacgccgccgtgacggttgataagtaa

SEQ ID NO: 7759 - DNA, 459 bp, Escherichia coli
atggggaacgaaaagagcttagcgcacacccgatggaactgtaaatatcacatagtatttgcgccaaaataccgaagacaggtgttctacagagagaagtgtagagcaataggctgtattttgagaaagctgtgtgagtggaaaagtgtacggattctggaagctgaatgctgtgcagatcatatccatatgcttgtggagatcccgcccaaaatgagcgtatcaggctttatgggatatctgaaagggaaaagcagtctgatgccttacgagcagtttggtgatttgaaattcaaatacaggaacagggagttctggtgcagagggtattacgtcgatacggtgggtaagaacacggcgaagatacaggattacataaagcaccagcttgaagaggataaaatgggagagcagttatcgattccctatccgggcagcccgtttacgggccgtaagtaa

SEQ ID NO: 7760 - DNA, 375 bp, Escherichia coli
gtggccttcacctccacccgtgcggcacgagaatggctgattctgaacatggcgggactggagcgtgaagagttccgggtgctgtatctgaacaaccagaatcagctgattgccggtgaaaccctcttcaccggcaccatcaaccgcacggaagtccatccccgggaagtgattaaacgcgccctgtaccacaatgccgctgctgtggtactggcacacaatcacccgtccggtgaagtcacacccagcaaggcagaccgccttatcacggaacgtctggtacaggcactgggcctggtggatatccgggtgccggaccatctgatagtcggtggcaaccaggttttctcctttgccgaatatggtctgctttaa

SEQ ID NO: 7761 - DNA, 366 bp, Escherichia coli
gtggccgccgcgcgccgcagtcgtgttgaatgggaaaacaaacagcgcaaaaagcaggggctggataccctgggtatggatgagctgatagcgaaagcctggcgttttgtgcgtgagcgtttccgcagttaccagacagagcttaagtcccgtggaataaaacgtgcccgtgcgcgtcgtgatgcgaacagagaacgtcaggatatcgtcaccctggtgaaacggcagctgacgcgtgaaatctcggaaggacgcttcactgctaatggtgaggcggtaaaacgcgaagtggagcgtcgtgtgaaggagcgcatgattctgtcacgtaaccgcaattacagccggctggccacagcttctccctga

SEQ ID NO: 7762 - DNA, 366 bp, Escherichia coli
gtggccgccgcgcgccgcagccgtgtggtatgggaaaacaaacaacgcaaaaagcaggggctggataccctgggcatggatgaactgatagcgaaagcctggcgttttgttcgtgagcgttttcgcagttatcagacagagcttaagtcccggggaataaagcgtgcccgtgcgcgtcgtgatgcggacagggaacgtcaggatattgtcaccctggtgaaacggcagctgacgcgcgaaatcgcggaagggcgcttcactgccaatcgtgaggcggtaaaacgcgaagttgagcgtcgtgtgaaggagcgcatgattctgtcacgtaaccgtaattacagccggctggccacagcttccccctga

SEQ ID NO: 7763 - DNA, 228 bp, Escherichia coli
atgttctatttcccgttcatcttcttcgatcttttcttcggcacgtgtcagtgcagagcgcaggaaggcttccgtctcttcaaccagactcagttgctggtctttctgacggagggcttcagcctgctcagagagcaacctttccagctctgcgatgcgaatgaggtatttctgactcatgaccgtttttataatgcggtcaggagttttttacaacattgtcagtga

SEQ ID NO: 7764 - DNA, 156 bp, Escherichia coli
atgaagcagcaaaaggcgatgttaatcgccctgatcgtcatctgtttaaccgtcatagtgacggcactggtaacgaggaaagacctctgcgaggtacgactccgaaccggccagacggaggtcgctgtcttcacagcttacgaacctgaggagtaa

SEQ ID NO: 7765 - DNA, 216 bp, Escherichia coli
atgtaccagatggaaaaaatcacaacaggtgtgtcatacaccacgtcagcggtgggaacgggctactggttcctgcagttgctggacagggtttccccgtctcagtgggcggcaataggcgtgctggggagtctgctgtttgggctgctgacatatctgactaacctgtatttcaaaatcagagaggaccgtcgtaaggcggcacggggagagtaa

SEQ ID NO: 7766 - DNA, 258 bp, Escherichia coli
atgtcgcagacagtaaatgcagagacttcctcatcgggaaaaaaacgaccttacagaaggggtaatcctgttcctgcgagagaacgacaaaaagcgtctcttgcaagaaggagtgccactcataaagcgtttcatgccgtcattcagcttcgactgaaagaaaagttaagtgagcttgctgatgaagacgggatcactcaggcacagatgcttgagtggctgatagagtcagaggttaagcgcagaaaatctttgtga

SEQ ID NO: 7767 - DNA, 255 bp, Escherichia coli
atgccagcgggtatcgctgtagcgcgttttttgctcatcctcagcattggcataactgaaggacgtaatcagccccagcgcgtccgtaaactcataacggtatttcacgttaatcccgttcagatcatcactaccgggaacgttcgtcgaggcatggagataccccgcgctcagcgtggactgatgttctgctgcactcgctggcgtagcagcggcgacctgccagactactgcggacaaaataacagcacataa

SEQ ID NO: 7768 - DNA, 228 bp, Escherichia coli
atgcacgcgtttaccttcccgatgcttacgtttctggtaagcgtcgattcgggctttcagggcattgatgaagcgggatatcacagctgcgtccgttgctgccggtacatccgggaaacgcaggtcaacccgcaatgccgtcaggcggggatgaacattcagtgcgtgccgcaccgtctcacgaatacgttgctgccagaaggggttgtatttgtaggtcatggttaa

SEQ ID NO: 7769 - DNA, 327 bp, Escherichia coli
atggctaacctgcaacttgctgttaaaagtgaatacttcgatgccatgattcgcggagagaaaacggaagagtatcgcttgtgtaatgactactggaataagcgaattatgttccgggaatatgaccgcctgattatcacaaagggatatccgaagcgcgacgattccagtcgcagaattgatgttccgtatgacggatatgaagtgaagacaatcacacatccgcactttggcgataaaccggtaaaggtgttcgctataaaggtgaatatcagcactgaatatcaatccgcacaacacaaggtcaagaatgttcagagtgattga

SEQ ID NO: 7770 - DNA, 852 bp, Escherichia coli
atggttgatacaactcaaactaccaccgagaaaaaactcactcaaagtgatattcgtggcgtcttcctgcgttctaacctctttcagggttcatggaacttcgaacgtatgcaggcactgggtttctgcttctctatggtaccggcaattcgtcgcctctaccctgagaacaacgaagctcgtaaacaagctattcgccgtcacctggagttctttaacacccagccattcgtggctgcgccgattctcggcgtaaccctggcactggaagaacagcgtgctaatggcgcagagatcgatgacggtgctatcaacggtatcaaagtcggtttgatggggccgctggctggtgtaggcgacccgatcttctggggaacggtacgtccggtatttgcagcgctgggggctggtatcgcgatgagcggcagcctgttaggtccgctgctgttcttcatcctgtttaacctggtgcgtctggcaacccgttactacggcgtagcgtatggttactccaaaggtatcgatatcgttaaagatatgggtggtggcttcctgcaaaaactgacggaaggggcgtctatcctcggcctgtttgtcatgggggcattggttaataagtggacacatgtcaacatcccgctggtggtctctcgcattactgaccagacgggcaaagaacacgttaccactgtccagactattctggaccagttaatgccaggcctggtaccactgctgctgacctttgcttgtatgtggctgttgcgcaaaaaagttaacccgctgtggatcatcgttggcttcttcgtcatcggtatcgctggttacgcttgcggcctgctgggactgtaa

SEQ ID NO: 7771 - DNA, 972 bp, Escherichia coli; identical to SEQ ID NO: 1484

SEQ ID NO: 7772 - DNA, 1557 bp, Escherichia coli
atggaattcttaatggacccctcgatttgggcggggctactcacgcttgttgttctcgaaattgtgctgggtatcgataacctggtcttcatcgccattcttgctgacaaactgccgccaaaacaacgcgataaagcgcgtttgctgggattatcactggcgctgattatgcgtctggggctgctgtcgctgatttcatggatggtcacgctgaccaaaccgctatttaccgtcatggatttctccttctccggacgcgacctgattatgttgttcgggggcatattcttgctgttcaaagcaacaaccgaactgcatgaacggctggaaaaccgcgatcatgattccggccacggtaaaggctacgccagtttctgggtggtcgtcacacagattgtcatccttgacgccgtcttttcgttggatgcggtaattactgcagtagggatggttaaccatttgccggtgatgatggcggcggtagtgattgcgatggcggttatgctgctggcatcgaaaccgctgacgcgatttgttaaccagcaccccacggtggtggtgctctgtctgagcttcctgttaatgattggtctgagtctggtggcagaaggtttcggtttccacattccgaaaggttacctgtatgccgcgattggcttctcgatcatcatcgaagtgtttaaccagattgcgcgtcgcaactttattcgtcaccagtcgactttgccgctgcgagcgcgtactgccgatgccatcctgcgtttgatgggcgggaaacgtcaggccaatgttcagcacgatgccgataacccgatgccgatgccgatcccggaaggtgcgtttgccgaagaagaacgttacatgattaacggcgtactgacgctggcgtcgcgttctctgcgcgggatcatgacgccgcgcggtgaaataagctgggttgatgctaatctcggggtcgatgaaatccgcgagcaactgctctcctcaccgcacagtttgttcccggtatgtcgcggtgaactggatgaaattatcggcatcgtacgtgctaaagaactgctggtggcgctggaagagggagttgatgtggcggcgatagcttcggcgtctccggcgattatcgtcccggaaaccctcgatccgatcaacctgctgggcgtgctgcgtcgtgctcgcgggagctttgttatcgtgaccaacgagtttggtgtggtacaaggtctggtcacgccgctggatgtgctggaagccattgcgggtgaattcccggacgctgacgaaacgccggaaatcattaccgacggtgacggctggctggtaaaaggcggtacagatttgcatgccttgcagcaggcgcttgatgttgagcaccttgccgatgacgatgatatcgcgacggtcgcgggcctcgtgatctcggcaaatggtcacattccccgtgtgggcgatgtgattgatgtaggtccactgcatatcaccatcattgaagccaatgattatcgtgttgatctggttcgcattgttaaagagcaaccggcgcacgatgaagatgagtaa

SEQ ID NO: 7773 - DNA, 888 bp, Escherichia coli
gtggtacggcgtttaacttctccgcggctcgaatttgaagctgcggcaatttatgaatatcccgaacatttacgttcattccttaatgacttacccacccgaccaggggtgtatctgtttcatggcgaaagtgacaccatgccgctctatatcggcaaaagcgttaatatccgcagtcgggtgctttctcatttacgcaccccggatgaagccgccatgctgcgacaatcccgacgcatcagctggatatgtaccgccggtgaaatcggcgctctactccttgaagcgcgattaatcaaagagcagcagccgctgtttaataaacgcttgcgccgcaatcgccagctctgcgccctgcaattaaatgaaaagcgtgttgatgtggtgtatgccaaagaggtggatttttcacgagcctccaacctgtttggcctgtttgccaataggcgcgcagctttgcaagcattgcagaccatcgccgatgaacaaaaactttgttatggcctgttgggactggaaccgttaagccgcggtcgtgcatgttttcgttctgcattaaaacgttgcgccggggcgtgttgcggtaaagagagccatgaggaacatgcgctacgcttgcgccaggctctggagcgtttgcgggtggtgtgttggccttggcaaggcgcggtggcattgaaagaacagcacccggaaatgactcaatatcatattattcaaaactggctgtggctgggggcggttaattcgctgaaagaagcgacaacgttaattcgggcacccgccgggtttgatcacgacggttataaaattctttgtaagccgctgctttccggtaactatgaaattactgaacttgatccggtgaatgaccagcaagccagttga

SEQ ID NO: 7774 - DNA, 339 bp, Escherichia coli
atgaacaagaatatggcaggaattctgagtgcagcggcggtattaaccatgctggcgggttgtacggcttatgatcgtaccaaagaccagtttgtacagcctgtggtgaaagacgtcaaaaaaggcatgagccgggcgcaggttgcacaaattgcgggtaaaccttcgtctgaagtgagcatgatccatgctcgtggtacttgccagacctacatcctgggtcaacgtgatggtaaagcagaaacctactttgtcgcgttagatgataccggacatgtcatcaactccggttatcagacctgtgctgaatacgacactgatccgcaggctacgaagtaa

SEQ ID NO: 7775 - DNA, 141 bp, Escherichia coli
atgagtaatgttattgcatcgcttgaaaaggtactcctcccttttgcagttaaaataggaaagcagccacacgttaatgcaatcaaaaatggctttattcgcttaatgccgttaacccttgcggggccatgtttgtattaa

SEQ ID NO: 7776 - DNA, 2280 bp, Escherichia coli; identical to SEQ ID NO: 5389

SEQ ID NO: 7777 - DNA, 651 bp, Escherichia coli
atgcgcgacggcaaaatcgtccgttttgaagagataacgcgtactccactggaagtacaagactgtttattaggtatgctttctgacagggttatgacggtgccggaactcactggtgaagccagtcaactctatgctcgggaaggctttaatattattgccactgccaatacgcgcgatcgcggcgtcaatgaaatgagtgccgcgctaaagcgtcgcttcgattttgaaactgtctttccgattatggatttcgcccaggagctggagcttgtcgccagtgcttcggcgcgtttgctggcccatagcggcattccgcataaagtgcctgacgcggtactggagttactggtccgcacctttcgcgatctgcgtgccaacggcgaaaagaaaacgtcaatggatacactgacagcgattatgtccaccgctgaagccgtgaacgtggcccacgcggtgggcgtccgcgcctggtttttagcgaatcgagcaggtgagccagccgatctggtggactgtattgccggaaccatcgtcaaagataacgaagaagaccgcgcgcgcctgcgccgttacttcgaacaacgtgttgccacacataaagaagctcactggcaggcttattatcaagctcgccaccgcctgccgtga

SEQ ID NO: 7778 - DNA, 2004 bp, Escherichia coli
atgaattcactacgtccggaattattagaactgacgccgcaggctctgacggcgttaagcaatgccggttttgttaagcgcagccttaaggaactggaaaatggcaacgtcccggaaatcagtcatgagaacggcgctttaatcgccaccttcagtgacggtgtccgtacccagctggcgaacggccaggcactgaaagaggctcagtgcacctgcggggccagcggcatgtgccgtcatcgcgtgatgctggtgttaagttatcaacgactttgtgccaccgcccagcctacggaaaaaaaagaagaagagtgggatccagcaatctggctgaaagaactggctaacctgcccgatgccacccgcaaacgcgcgcaggcgctggtcgctaaaggcatcaccattgagttgttctgtgcgcctggcgaaattccctctgcccgattaccgatgagcgatgtgcgtttttattcccgcagcagcattcgcttcgcacgctgtgattgcattgaaggcacactttgcgaacatgtcgtactggctgtgcaggccttcgtcgaggccaaaactcagcaagcggaatttactcatttaatctggcagatgcgcagtgaacacgtgacatcatctgatgatccgtttgccagcgaagaaggcaaaacgtgtcgtcaatatgttcagcaattaagccaggcattatggctgggcgggataagtcaaccgccaatccattacgaggccgctttcagtcgcgcgcagcaagcggcggaacgctgcaactggcgatgggtgagtgaatcgctacggcaattgcgcgccagtgttgatgccttccacgcccgtgccagccactaccatgccggagaatgcttacgtcagcttgcggcattaaacagtcgattaaattgcgtacaagagatggcgcgacgcgacagtatcggtgaagttcctcccatgccgtggcgcacggtcgttggcgctggcattgccggagaagcaaaacttgatcatctgcggctggtgtctttaggtatgcgttgctggcaggatattgagcagtatggtttacgcatctggtttaccgatcccgacacaggaagtattttgcatctttcgcgtagttggcagagaagcgaacaggaaaactcaccggcagcgacgcgtcggctgtttagttttcaggctggcgcactggcaggtgggcaaattgtttcacaagctgcaaaacgcagtgccgatggcgagctgctgttagcgacccgtaaccgcttgagtagtgttgttccactgtcgccagacgcctggcaaatgttgagcgcgccgttgcgccagccgggcattgtggctttgcgggaatatttacgccagcgtccccccgcctgcatacgaccactcaaccaggtcgataacttatttattctgccggtagcggagtgtatttcgctcggttgggatagcagccgccagacactggatgcgcaggtaatcagcggcgaaggagaagataatgtgctgacgttatcccttccggcatctgcctgttctccttttgccgttgaacgcatggcggcgcttttgcaacaaacagacgaccccgtgagtctggtttctggctttgtcagttttgtagaggggcaattgacactggaaccacgggtgatgatgacaaaaacccgcgcctgggcgctggacgcagaaactgcgcctgtggcaccgctaccttctgccagcgttctgcctgtgccgtctaccgctcatcagttgctgatgcgctgccaggcgttacttattcaactgctccataacggctggcgctatcaggaacagagtgctattggtgaggcagagttgctggcgaatgacctcaccgcggtgggtttttatcggctggcacatgtgttgggacaatttcgtaatacagaaagcgaggcacgggtagaagcaatgaataacggtgttttgctttgcgaacaattattccccatgcttcagcaacaaggatga

SEQ ID NO: 7779 - DNA, 1671 bp, Escherichia coli
ttgcaatttgactacatcattattggtgccggctcagccggcaacgttctcgctacccgtctgactgaagatccgaacacaaccgtgctgctgcttgaagcaggcggcccggactatcgctttgacttccgcacccagatgcccgccgcgctggcgttcccgctacagggcaaacgctacaactgggcctatgagacggaacccgaaccgtttatgaacaaccgccgcatggagtgcggacgcggcaaaggtctgggcggttcatcgctgatcaacggtatgtgctacatccgtggcaatgcgctggatctcgataactgggcacaagaacctggtctggagaactggagttatctcgactgcctgccctactaccgcaaggccgagactcgcgatgtgggcgagaacgattaccacggtggcgatggcccggtgagcgtcatcacctccaaacccggcgtcaatccgctgtttgaagcgatgattgaagcgggcatgcaggcaggctacccacgcacggacgatctcaacggctatcagcaagaaggttttggcccgatggatcgcaccgtcacgccgcatggccgtcgcgccagcaccgcgcgtggctatctcgatcaggccaaatcgcgccctaacctgaccattcgtactcacgccatgaccgatcacatcatttttgacggcaaacgcgcggtgggcgtcgagtggctggaaggcgacagcactattccgacccgcgcggcggcgaataaagaagtgctgttatgtgcaggcgcgattgcttcaccgcagatcctgcaacgctccggcgtcggcaacgctgaactgctggcggagtttaatattccgctggtgcatgaattacccggcgtcggcgaaaatcttcaggatcacctggagatgtatctgcaatacgagtgcaaagaaccggtttccctctaccctgccctgcagtggtggaatcagccgagaatcggtgcggagtggctgtttggcggcaccggcgttggtgccagcaaccactttgaagcaggcggatttattcgcagccgtgaggaatttgcgtggccgaatattcagtaccatttcctgccagtggcgattaactataacggctcgaacgcagtgaaagagcacggcttccaatgccatgtcggatcgatgcgctcgccaagccgtgggcatgtgcggattaaatcccgcgacccgcaccagcatccgggaattctgtttaactacatgtcgcacgagcaggactggcaggagttccgcgacgcaattcgcatcacacgcgagatcatgcatcaacccgcgctggatcaataccgtggccgcgaaatcagccctggtgtcgaatgccagacggatgagcagctcgatgagttcgtgcgtaaccacgccgaaaccgcgtttcatccgtgcggtacctgcaaaatgggttatgacgagatggctgtggttgacggcgaaggccgcgtacacgggctggaaggcctgcgcgtggtggatgcgtcaattatgccgcaaattatcaccggcaatttgaacgccacgacgattatgattggcgagaaaatagcggatatgattcgtgggaaggaagcgttgccgaggagcacggcgggatattttgtggcaaatgggatgccggtgagagcgaaaaaatga

SEQ ID NO: 7780 - DNA, 1860 bp, Escherichia coli
atggaaggttctgattttttactcgcaggagtgctgtttctcttcgcggcggtggctgcggtgccgctggcatcgcggctgggtattggtgcagtgttgggatatttgctggcggggattgcgattggcccgtgggggctggggtttattagcgacgtcgatgagatcctccacttttcggaactcggcgtggtattcctgatgtttatcatcggccttgagttgaatccctccaagctttggcaactgcggcgttcgatttttggcgtaggcgcggcacaggtgctgttaagcgcggcgttgctggcgggattattgatgctgacggatttcgcctggcaggcggcggtggtcggtggcattggccttgcgatgtcttcaaccgcaatggcattgcagttgatgcgtgaaaaagggatgaatcgcagcgaatccggccagttaggtttctcggtactgctgtttcaggatctggcggtgatcccggcactggcgttagtgccgttgttggcgggttcggcagacgaacatttcgactggatgaagatcggcatgaaggtgctggcgtttgtcggcatgctgattggcgggcgctatttactgcgtccggtattccgttttattgcagcttctggtgtgcgggaagtgttcaccgccgcgacgctgctgctggtgttgggttccgcattgtttatggatgcgctggggttgtcgatggcgctcggtacgtttattgcgggtgtgctactggcggaaagtgaatatcgccatgaactggaaacggctatcgatcccttcaaaggcttgctgctcggtttgttctttatctctgtcggcatgtcactcaacctcggggtgctttatacccatctgttgtgggtagtgataagtgtggttgtgctggtggcggtgaaaattctcgtgctgtatctgctggcgcgattgtatggcgtgcgtagctcagagcggatgcagtttgctggcgtgttgagtcagggcggtgagtttgcctttgtcctcttttcttccgcttcttcacaacgcttattccagggcgaccagatggcgctgttgctggtgacggtgacgctttccatgatgaccacgccgctgctgatgaagctggtagataaatggctatcccgccagtttaacggaccggaagaagaagacgaaaaaccatgggtcaacgatgataaaccgcaggttattgtcgtgggctttgggcgttttggtcaggtgattggtcgtttgctgatggcaaataaaatgcgcattactgtactggagcgggatatcagtgccgttaacctgatgcgcaaatatggctacaaagtttattacggcgacgccacgcaggtagatcttttacgttctgcgggtgcagaggccgctgagtctatcgtcattacctgtaacgagccggaagacactatgaagctggtggaaatatgccagcagcactttccgcatttgcatattcttgcgcgagcgcgcggacgtgtggaagcgcatgagttattacaggcaggggtgacgcagttttcccgtgaaacattctccagtgcgttagagctggggcgcaagacgctggtcacgcttggcatgcatccgcatcaggcgcagcgcgcgcaactgcattttcgccgcctggatatgcgaatgctgcgggagttaatcccgatgcatgctgataccgtacaaatttctcgcgccagggaagcccgacgcgaactggaagagattttccagcgtgaaatgcaacaagaacgacgccagggtaatgactccaacttattgatagtgttttatgttcagataatgcccgatgactttgtcatgcagctccaccgattttga

SEQ ID NO: 7781 - DNA, 552 bp, Escherichia coli
atgtctcagccagcgaaagttttgctgctgtatgcccatccggaatctcaggactcggtggcaaaccgggttctgcttaaaccggccacgcagctcagcaatgttaccgtgcacgacctttacgcgcactatcccgacttttttattgatatccctcgtgagcaggcattactgcgcgagcacgaggtgattgtctttcagcatcctctttatacctatagctgcccggcgctactgaaagagtggctggaccgggtattaagccgtggttttgccagcggaccggggggaaaccaactggcgggaaagtactggcgtagcgtgattaccaccggggagccggaaagtgcttaccgttatgacgcgttgaatcgctatccgatgagcgatgttctgcgcccctttgaactggcggcgggcatgtgccggatgcattggttaagccccatcattatttactgggcgagacggcaaagcgcacaggagctggcgagccacgccagagcctacggtgactggctggcaaatccgttgtctccaggaggccgctga

SEQ ID NO: 7782 - DNA, 1050 bp, Escherichia coli
atggaaacccctcaacccgataaaacgggcatgcgcattctgctcaagttggcctcgctggtagtgatcctcgcgggcattcacgcagcggcagatatcattgtgcagctattactggcgctgttttttgccatcgttctcaacccgctcgtcacctggtttattcgtcggggagtacaacgccccgttgccattacgattgtggttgtggtgatgctgatcgcactcaccgcgctggtcggcgtactggcggcatcgtttaacgaatttatctctatgctgccgaagtttaataaggagctgacgcgcaaactttttaaattgcaggagatgttgccttttcttaatttgcatatgtcgccggagcgaatactacagcggatggactcggaaaaagtggttaccttcaccacggcgctaatgaccgggctttccggggcaatggcgagcgtgcttttgctggtgatgaccgtagtttttatgctgtttgaagtgcgccacgtcccttacaaaatgcgtttcgcgttgaataatccacagattcacatcgccggactacaccgcgcacttaaaggcgtttcgcattatctggcgttaaagacgctactcagtttatggacaggcgtaatcgtctggctggggttggagctgatgggggtgcagtttgcgctgatgtgggcagtactggcgtttttgctcaactacgtgcccaatatcggtgcggtaatttccgccgtaccgccaatgattcaggtgctgctgtttaatggtatttacgaatgtattctggtcggcgcattgtttttagtggtccatatggtcatcggcaatattttagaaccacggatgatgggccatcgcctggggatgtccaccatggtggtatttctttcattgttaatttggggatggctgctcggcccggtagggatgctactttcggtgccattaaccagcgtgtgtaaaatctggatggaaaccaccaaaggcggcagcaaactggcgattttactggggccaggcagaccgaaaagtcggttaccgggatga

SEQ ID NO: 7783 - DNA, 177 bp, Escherichia coli
atggcggaaataagtatgacgattttaagtattcgtcatactgattacctgttctggatcaatagatgggcagtcgggtgggcggatcagttaactgaatcgatccattgcacactgtcggcggtgagcgtaaagggggtaggggtgcagatcgccaggcttaaattttctagctga

SEQ ID NO: 7784 - DNA, 639 bp, Escherichia coli
atgaaaaaaagacatctgcttagcttactggcgctgggtattagcacagcttgctacggcgaaacatatcctgcgcccattggtccgtcgcaatcggatttcggtggcgtaggattattacaaacgcccaccgcgcgcatggcgcgggaaggggagctgagcctgaactatcgcgataacgatcagtaccgttattactcagcttcagtgcaactcttcccgtggctggaaacaacgctgcgctacaccgacgtgcgcacccggcagtacagcagcgtcgaagcgttctctggcgatcaaacgtataaagataaagccttcgatctcaaactgcgtttgtgggaagagagttattggctgccgcaagtggcggttggtgcgcgggatatcggcggtacggggctgtttgatgcggaatatcttgttgccagcaaagcctgggggccgttcgattttacactcggcctgggctggggatatctgggcaccagcggtaacgtgaaaaatccgctctgttcagccagtgataaatattgctatcgcgataacagctacaaacaggcgggatctatcgacggcagccagatgttccacggcccggcctcactgtttggcggcgtggaataccagacgccctag

SEQ ID NO: 7785 - DNA, 417 bp, Escherichia coli
gtggcctgcttctttatgccgctgaccaccattacgctgtccggtttgccaccggaacgactggcggcggcatcgagcctctccaactttacgcgaacgctggcggggtctatcggcacgtcgataaccacgaccatgtggaccaaccgcgagtcgctgcaccatgcacagttgactgagtcggtaaacccgttcaacccgaatgctcaggcgatgtacagtcaactggaagggcttggtatgacgcaacagcaggcatcaggctggattgcccagcagataaccaatcaggggctgattatttccgccaatgagatcttctggatgtcagccgggatattcctcgtcctgctggggctggtgtggtttgctaaaccgccatttggcgcaggtggcggcggaggcggtgcgcactaa

SEQ ID NO: 7786 - DNA, 1659 bp, Escherichia coli
atgttgcagcttaacgagaataaacagtttgcatttttccaaagactggcatttccgctgcgtatctttttgctgattctggtgttctcaatatttgtcattgcagccctggcgcaatattttacggccagttttgaggactatttaacgcttcatgtgcgcgacatggcaatgaatcaggcaaaaattattgcttctaatgacagtatcatcagcgcagtgaaaacgcgtgactacaagaggctggcgaccatcgctgacaaattacaaagagatactgatttcgattatgtggtgattggcgaccggcactcgattcgtctttaccatcctaatccggagaaaattggttatcctatgcagttcaccaaaccgggcgcgctggagaaaggggagagctacttcatcaccgggaaagggtcaattggcatggcgatgcgtgccaaaacgccaatctttgatgacgatggaaaagtcatcggtgtggtgtcgattggctatctggtgagtaaaatcgatagctggcgggctgagtttttattaccgatggcaggcgtgtttgtcgtgctgttagggattttgatgttgctatcgtggttcctggccgcgcatatccgtcggcagatgatgggcatggagccaaagcaaatcgcacgcgtggtccgtcagcaagaggcgctgtttagttcggtttatgaagggctgattgcggtggatccgcacgggtacattaccgccatcaatcgtaacgcaagaaagatgctggggctgagctcccccggacggcaatggttgggtaaacccattgctgaagtggtcaggcccgccgatttctttaccgaacagattgatgaaaaacgtcaggatgtggtggcgaactttaacggtctgagcgttatcgccaatcgggaagctattcgttctggcgatgatttgctgggggccattatcagctttcgtagtaaagacgaaatttccaccctcaatgcgcaactgacgcaaattaaacaatacgtcgagagccttcgtacattgcgacacgagcatctcaattggatgtcgacgctcaatggtctgttgcagatgaaagagtatgatcgcgtgctggcgatggtgcagggtgagtctcaggcccagcaacagcttattgacagcctgcgtgaggcgtttgccgatcgccaggtggcggggctgctttttggtaaagtgcagcgcgcccgcgaactggggctaaaaatggtcatcgtccccggtagccagctttcgcaactgccgccaggactggacagcaccgagtttgcagccattgttggcaatttacttgataacgccttcgaagcaagcctgcgtagcgatgaaggaaacaagattgttgaattatacctcagcgatgaaggcgatgatgtggtgattgaagtcgccgatcagggctgcggcgttccagagtctctacgagacaaaatatttgagcagggtgtcagtacgcgtgctgacgagcccggtgaacatggcattgggttgtacttgattgccagctacgtaacgcgctgcggtggtgttatcactctcgaagataatgatccctgcggtaccttattttcaatctatattccgaaagtgaaacctaatgacagctccattaaccctattgatcgttga

SEQ ID NO: 7787 - DNA, 561 bp, Escherichia coli
atgaacgtgagtaaatatgtcgctatatttttctttgtttttattcagttaatcagtgttggtaaagtttttgctaacgctgatgagtggatgacaacgtttagagaaaatattgcacaaacctggcaacagccagaacattatgatttatatattcctgccatcacctggcatgcgcgttttgcctatgacaaagaaaaaaccgatcgctataacgagcgaccgtggggtggcggttttggtcagtcgcgttgggatgaaaaaggaaactggcatggcctgtatgcaatggcatttaaggactcgtggaacaaatgggaaccgattgccggatacggatgggaaagtacctggcgaccgctggcggatgaaaattttcatttaggcctgggatttaccgctggcgtaacggcgcgcgataactggaattacatccctcttccggttctactgccattggcctctgtggggtatggccccgcgacgtttcagatgacctacattccgggtacctacaacaatggcaatgtgtactttgcctggatgcgctttcagttttga

SEQ ID NO: 7788 - DNA, 1158 bp, Escherichia coli
atgaccacactcaaagaactcaaagaagagcttgctcagattcaagatgaaaacgcgaaaaatagaaaaaaagctgaaattgcagccttggtcacttctgccgacaacgagattaggcttgctcagagaaatattggatacaacgtacgtgaatggaccgttgaattaattgtacaaaagtatggcaataatcttgaaactgacaaaaacgaactttttattcctgattatcaacgcgattacaaatgggatatcaaaacagcctctcgattcatcgaaagtatattattagattttccaatcccgtacctctacatctccgacgtatttaatgaagatcctgagttggatggtcgtgtagaaattattgacggttcacaaaggattcgctcaatttactacttttggaacaatcagtttgaattgaaagacttaaaagaactcaaaagtttagagggcttcaaattttcagatcttttggctagccgccagaggcgatttttaagggcatcactaagatttattgaattgaaaggtgatgttgaggagcaacatagaagagatttattcgaaagaataaattcaggtgttaagagactggaagcgatggaggttagacatggttcagatgcggccacttcaattttctatagggatgttgtgactccttgctcaacaaatccacttttcgctagtctagctccattatcagaccggaaacgttcgaatggcgatcatcgtgagttagttttgagattttttgcatacttaaatgatttagaaaattataagggttatgtcgctccttttattgacaattatcttaatgttcaggccgaaagggtcacacaacaagatgtagacaaatttaaacatgattttgaaagcatgcttgcttttgtagatgctcatttccctatggggtttaaaaagacaccaacaagcaaaaccaccccccgtgctagatacgaagccatagcagtgggaactgctcttgccttaaaagccaatccacatctacaggctccggttattcctgtaggagactggctgtttggggaggaatttgaaaccatagttactgctgatagtgccaacaacaccagccaactcaaaaacagaatattttatgtcaaagataaattattaggaatgtaa

SEQ ID NO: 7789 - DNA, 690 bp, Escherichia coli
atgagtttgattgatttaagagatgaatacgaagaaagagcaagagatattatggaattgctttctcttgcgtcatctttagaggctcagactcagcagttagatcagcaaacgcataaagatgaaatagaatcaaatacccttagggttaacattttaaaatcatccgtgcacatgatgctgtacaatcaggttgaaaacactgccagaggatgcattgagtcaatttatgaccatttgcaagataatgaagtaaattacgcatcactcagggagaaattccaagtaaatatcttgcaccgtatcatttcagataatgaatcgggaaaatctctttatcaaaaaattggttccgatatatctaaaaggatcatttcagcctcattaaacatacgtaaagaattcaatggtaatgtttgcaagtctgtattgcacaaaataacacaagcttacggaataactgttgcaaactcaccagagtgtagaaatggtgttgacttagatttacttaaagatatcagaaatgagctggcacatggaagtaccagcttttctaaaaaaggtcaaatagaccctttagaagaagtcaaatcgaggtcagaaagaattgatctatatttgcgtttattaatcaactcaacagaaaattatattacctctaacgggtatttatcccctcaacatgtctga

SEQ ID NO: 7790 - DNA, 1041 bp, Escherichia coli
gtgaacattcaggcagtagacattttttgtggtgcggggggcttaacttttgggctaaaaaaagccgggattgaggtttctcatggtattgatattgatgaatcctgccgttttgctattgagagcaataatcctttaacgcagttcattaatcagtcagttacagaactgcaatcctgcgatgtgtctgctatgttcaaggaaggaaatattagattgcttgctggatgtgctccttgccaaccgttttccaagtatcgtaatccaaatagccgtaaagacgatacaaagtggcgtttgttatatgagtttcaaaggcttgtaagtgatgtcatgccagagcttgtgacgatggagaatgttcctcaacttagaaaccataaggtttttgaagggtttgttagtgcattaaagactcttggatatcatttgtggtacgacgttgtaagatgttctgagtatggcttacctcaaaatagacgtagattaattctaattggttcccaattggggccgatcagccttgatcaaaaaaaagttagccgtaaagttactgttaaggatgctattggtaggttgccaaaagtaggggcaggtgagaagctggaaagcgatcccttgcatcgttcgcctaaattgatggatatcaatcttaaacgaatcatgcattctttacctggtggtacgtgggatgactggcctgaagaaattagagcagactgtcataaaaagaattcaggtgctacctataaaagcgtttatggacggatggtttgggacgatactagccctacgataactacccagtgttatggatatggaaatggacgatttggccatcctgagcaaaatcgcgccataactttgcgtgaagctgcgattttgcaatcctttccaatggattataaattccttgacaaggagacgcctttttcattccaaaaattggggacaatgattggaaatgctgttccccctataattggtcagataataggggaaacatttatcagacatgttgaggggataaatacccgttag

SEQ ID NO: 7791 - DNA, 369 bp, Escherichia coli
atgcgtgatatgtacgaagttttagatcgttggggggcctgggctgcagcagataacagtggtgtggactggcagccgatagcagcaggcttcaaggggcttttaccacacggtaaaaagtcacgtctccagtgtgatgatgacgaaggtatcatgatagacggttgtgtggctcggttgcgaaagtataaacccgaagagtatgagttgatcattgctcactttgttattggtatctcattacgcgctattgctaaaaaacggaaatgttcagatggaacaatacggaaagagatgcaaacagcaatggggtttattgatggctgcttgtcatttttcatttactacaatgacttaagttctatgtaa

SEQ ID NO: 7792 - DNA, 258 bp, Escherichia coli
ttgaacaaccagacaatgacttttacccctgagcaattacgtaaacaggcacaggaaatgttgcggcaggcggaacaactggaaaaaacaggtgtaacaaaagatgccattcgtcgggatatggtgccagcgctcagggaactgatgcaggcaaaacaccgtgcacaaaaagcagtggatgagctggtggattgtgtggcagagctggaaaccagagttggtaagtttgaaaaactggtgcaggaggtactgcgctga

SEQ ID NO: 7793 - DNA, 1401 bp, Escherichia coli
atgaccagccagaacaccccggcatggcgtaacgatgacctggaaggcgctgtcatcggtgcgttttttctgcgtggggccgatccggaagtgatggatattctggccacacttccggcggatgtattttttgtgcgtcagtaccgggatatttacgcggggatttgcagacaggctcgcatatccggcgtcattgaccccgtactgctgtgcaatgagatgccggaacttgccccggtgattaccgacaccggacgcaaaacctgggtgaagtcttcactggagcactatgtcgcagcgttgcggcgcaatgccgcactgcgtgatgcagaaaaaacactgactgaagcattacagaatttacgtgatgcgtatacctgtgaagcagccgaggatgccctgaaggatgcgcagaacatgatggcctcactgtcgaccggaaagggcgtcattcagccggttcacattgatgatgtccttccggaagtggtcgaccgtgttgaatgccgcaatcagggactggagaaatccagggcgctgatgaccggtattgatgaactggacgcaaaaacgggcggtatggagcccggagacctggtattcattgccgcccgtccttcgatggggaaaaccgaacttgcgctggacatcatcgacaaggtgactgagcaggggcatggcgtgcttctgttcaccatggagatggcgaacatccagattggtgaacgtatggtgtctgctgccggtggaatgccggtatcccgtcttaagtctgttgcccgttttgaagatgaagactgggcgcgtttctcgcagggcgtgggacgaatgacggggcgtaatatctggatggtggaccaggcaaacctgaccattgatgagatatgtgcaaccacgaagcaccaccggatgaagcatccggaaacggcgctggttgtggtcgattacctcggcctgattaaaacccgcagcacggggcgtcacgaccttgctgtgggggaaatctcaaagggacttaaaagcctggcaaaatccggcggttttccgctgattgctctgagccagctctcccgtggcgtggaatccagacccaataaacgcccaatgaactcggacctgaaaaactccggggaaatcgaggcggatgccgacatcattctgatgctttacagggaggaggtatacaacccggaaactcaggccagaggcatagcagaaatcaacatcacgaaacagcgtaatggcacgctcgggaccatttaccggcgttttcataacggacattttctgcctgtggaccaggagagtgcccgggttctttccacaccaatgcaacagccccagccgcgcagatacagcaacaaacgaactgacagcagtaagatggagcgtttcttttga

SEQ ID NO: 7794 - DNA, 900 bp, Escherichia coli
atgatgacgattgaccaacgtgagaaacaaacaagactacaggcgcgaatggatgagttacgggcagaaatggatgagttacgggcagagattgcatttgctcagaagggcgaaaagccatggccttatcgttcctgcctgatgcgtgaaggtcgcggatattgcgaaaaacacggtaaatatcgtacgcatatactggtgtggatcgatcgtaatggcgaggacagagaaaaaatttcatgctgccctgactgcttgatcgctgaggccagtgatttgaccatggaactgtcgtccctcaaggcggaagaactgactgataacgccggaattgctctgcgttttcgggactgcgagtttgataattatctggaggttaatcctgacgcagccagaaatcttgcggcctgtcgccgctatgcggagaactggccagatatgctggagaacggtaccagtcttgttatgaccggcagttgcggtaccgggaaaaatcatctggcggtatcaatggcaaaacacatcatccgtaactatctggccagtgtggagatcaccgacgtgatgcgccttacccgggctgtgaaaaactgctggcggaatgacagtgaaaaaacagcggatgacgtcattgagcattatgcgtcactggatttgctgattgtcgacgaagtcggcgttcagtttggcagtgcggctgaaatggccattttgcaggaaattatcaatgcccggtatgagggtattttgccaactatcctgatcagcaacctttcaccggaagaattgtgggcgttcatcagtccccggattgccgacaggatcaccgatggcgggcgcaactggttgtcgtttaactggcccagctaccgttctcgtatcggaggtgttgccgcatga

SEQ ID NO: 7795 - DNA, 987 bp, Escherichia coli
atgagccgttacgcccccacaccggaagttatggctattggtcaaattaatatttccggcaatgttacacctgcgaactggtggaaatatattcgactacccagtgggcgtccggatgcgacggctatcgctctgctttcagagatcgtttactggtaccgcccgacagaggtcagggatgagcacaccggagcgttgctgggatatcgcaagcgttttcagggcgacaaactgcaaagaagctaccaggcgtttgctgagcagtttggtttcgggaaaagggaaaccgcagatgcgctgaagcgtctgcgcgatgcagggtttattactctggatttacgcacggtggaaatgctcgatggggtgaaatgcagcaatattttgtttgtcgggatcaacccacaggcaattgcggccatcaccacaccttcttctgtttcgccagaaagtaacagcaataatgcaatcagcgatacagctattacgttaaaacggaacaccccccgacgtcataacggaacaggggatacgccgaatgttgatacaaatacagagattactacagagattacaacggagactaaaaacactattgatgcatccgctgacgcgtctgcgcgttctgcccgacaggaatattcaccggaatttgaacaggcctggcaggaatatcccaaacgtgctggtggcaattccaagtcagcagccttcaaagcctggaaagcccgtatcagggagggaataaaaccggagaccatgcttgatggcgtgaagcggtatgccgcctgggtacgtgctacaggaaataccggcacacagttcgtgaagcaggctgcgacgttctttggacccgatcgtcacttcgaagattactggcaacagccagccgctcacggaggtgggcgacagcgacaggtcgatgtcctggctggcctgggagccatgtctgacaaattcggtaaatccagtaacaaattgacattctga

SEQ ID NO: 7796 - DNA, 300 bp, Escherichia coli
gtgaactgttttcagtttgtgtgcggatgtgctttcgataacccgattcagcgcctaattatgttgcgtgttttgatgtcgggttcttcagacggtgaaggcgagagagttattgatcatcaggtgcttgctgatttctgctgttgttctaagcaagcgatattcagggaaaccctggcactggaaagagctggttatcttcatatccgaaaaattgcaacgcttactattgatgcaaaagccagactacaacctgcgcgtggctacacaattctcatgccgcggaaggaggttgtatga

SEQ ID NO: 7797 - DNA, 225 bp, Escherichia coli
atgatccgccacatcgttaattccctgtatcaccgatacaaccgttgcccccgtgtggggcagtggttcgccaccagcaacggtcacgttctgcgggtttgcctagtcaacgctgaaagccagaaagtcgtgtgcgaactacaggggcgtagctacaccatcagttaccctctggcggtatttctgtctggaaaaatgtttaagcgtctgggaggtgtggcgtga

SEQ ID NO: 7798 - DNA, 195 bp, Escherichia coli
atgattagttacgaaatcatcatctccactacggaatacagaaacgatgtatcagttcgcacggatgtatctgtctggcaccgtcgctataaatccagaaaaacagcggaactgaaagcggcagagatgtgtgaaaccatctcaatgaaaggtagcccggttaaatacgtaactacggcggaggtgcgtccatga

SEQ ID NO: 7799 - DNA, 852 bp, Escherichia coli
atgatccgccaccagcatattgattctgcaattccgggacgttacactgctcaggcaccttataaagcgggtgccgggcgtggaaacccgaaattcaatatagagcacaaccgcgctcatgcggttttttcgtgtcatgagcatcgttacacccaaattatggtggggcgtgcagggccaacttcggttgggccgggttctatgttgaccggtatttccacccctgtacgtctcaccacctatatggtcgtggaaagccttggtggtgagttcattgaattcaacataggggctgtcaccatgactactctcccaacccaatctcaccctgaaatcacgattatcaatggtcgcgttgtcaccacatctcttgcagtagctaattactttactaaacggcatgagcgggttttagatagaattagaaacctcgaatgttccgctgaatttactgaacacaattttgtgttaagtgaatacaccgacgcatcaggccgcaaactcccttgttaccaaatcacccgcgacggttttgcgtttcttgccatgggcttcactggtaaacgtgctgcccagttcaaagaggcatacatcaacgcctttaacctgatggagaagagtttatcaggtgccgatgcgtctgatatgtcagctgtcgcacgaaacgccagaggcgtatacctgcatttgcgtgaaatccatcaaatctggacaagccagctttatccaatgcttaaggccgttgaatctccgctggctagcaaactgtacgaccgtgttggtgatgctgtttttggcgctgcacttgttgattccaggctgaatggttctgacaaggaggttcgcccatga

SEQ ID NO: 7800 - DNA, 663 bp, Escherichia coli
atgatcatttcaagaccaaatattgattctgcaatttcgggacgttacactgtctccgcaccttataaagcgggtgccgggattggcgtcctgaaattgtcaacggcgatgtatgacgcgccagcgtcttttttatcgtccgcatttgctcacatccagattatggtgggctgggcgggggcaccgaaaggtgcgccggtctccgttgacgccggttacgccaaccccgtccagttcaccaccagtgaaattggcgtttccggtggtggaagtttttcactgtcaacggaggctgccatcatggctactgtcctaacttccccattcctaaaaatcgaagtcgtcaacggcaaggccgttattttctccctgcatgttgcctgccatttcaagcgcatgcaccagaacatcgttgacaaaatcgagtatctgaactgctcacgcgagttttttacccgcaatttcataccgggtacttatcacatctacggtgactccctgcgtggttattacatcacccttgatggtctgatgatgcttcagcttgggttaagtctgcgcacaatgcggtactacgagagctgtattgaagcattccatgaggctgaaaccgtccagggtcactccgcgttccgtcgtaatcaacgggaggtgcacctatga

SEQ ID NO: 7801 - DNA, 708 bp, Escherichia coli
atgaacaccgcaatttttaacggcaaagcatccatgaccagcgttgagatcgcagagctggtgggaagccgaccagatagtgttaagagaactattgaaacactggctaaaaagggaatcatccaatttccacagactgtggaaattgagaataaacaatcacttgggcctcgccgattttctagcgcgtatgtattcgaaggtgaacgaggtaagcgcgacagcatcattgtcgtcgcacagctctgtcctgaattcacagctcgcctggtagatcgctggcgcgaactggaagaacagatccgtaagccaatgagcgaaatcgaaatggttgccgcgatggctcttgaagccgttcgccaacagaaacggatcactcaggtggaagaaaaagtcagccacgttgctgaaacagtcgagcaaattaaaaagggcactattcgtgagggctatgccggatatcgccaactgaaagcaaaaaccggtttgtcagatgataaatgccgcaatctggtgaacgcctatcaaattcctacagacacacatgagttcatgacgccggacggattgttgtcacgtcgcgcaattgttgctgtggaaccgtttatggctgctttttatcgggttatggaggaagcagaaccgcgagggactcgctggtatcacccgaaaatggggttatttcaggttattggttggcagcggtga

SEQ ID NO: 7802 - DNA, 228 bp, Escherichia coli
atgaccctttatgaaatattaaaaattcaatttaaaaccaatgccgctattggtcgcaggttcccaaagaaaggaaggcctcgtggcagtcaaggtgttggaaagtggaaaacgcgaggtgttccggaggatgttgccattctttgtcatctggatccgagcattccatatacacacccaagtctagcgaatacagaagatgacaagcccacaggagaccaacaatga

SEQ ID NO: 7803 - DNA, 657 bp, Escherichia coli
atgaagtctttaggtgaacgtctcatcaacgcacggcaaaaagctgggttaacacaagatgcgttggctaaaaaagctgggatcaccagagttgcaatcagtaaagccgagcaaggccttacaaaaagtttcaacggtgacaccctttttaaagttgcagctgcactgcggtgttcaccgcagtggcttcagaacggagatgaaaaagataagcattgggaaaataatgttaagagctgcccacagagagacacagcacactcttaccctgtaattaactgggttcaggcaggattattcgcaacttctggtgatgactacaacatgtatgatcaggataattggaggcattctgtaaaatacgctggtgagagggggttctggctggaagtgcacggagactcaatgacttcgcccgtaggaataacatttcctgaaggaatgtcgatccttgtcaacccagataaagaagttttttcagggtgttacgtcatcgccagaaaaaaatctaccaatgaagcaacattcaaaaaatatatttctgacatgggaaaggcgtttctaaagccccttaatccacaatatccaatcatagaaatggacaatgattgcgaaatagtaggtgttgtggttgatgccaggtgggatattttctga

SEQ ID NO: 7804 - DNA, 504 bp, Escherichia coli
atgatcaataaagctacaactcttgactgtctcgaagaactgaaaaacctcggcagcctcattacactaatagcaaaagcaacacctgatgctacgctctctagcgatatagagtcatgcgcaggactggcatgggatatgacaaatagcatatccagaaagctatcgtcagcaatgcttttacagaacaaaaattctgcaatcaacaaccgtcttcgcacccaacgcgaagcctgcggcttaacaaccgccgaactcgccaggctgctcgatctcgatgaagaaattatcatccagtgggagagcggagagtatgaaccaactatcagtatgcttatcccactggcaaatattcttggctgcgatgcgatgtggctgttaactggtgaggttactcctccggagcaaccaaaaagtgaggagcagcaacaccatgacgcatctcaacaagtttgccccttatctcgcgaagctcttctacggaagaaccaataccaatggtga

SEQ ID NO: 7805 - DNA, 261 bp, Escherichia coli
atgttttcgaactttttcatggtttcctcagctgacttatatgttctgctatatagcgagtctcagaagtgttttcatattaagactgtttccgcaatgattgataaaaatgttcgcatgtaccttgaggggcgaagcggcgattatgtcaccattggtattggttcttccgtagaagagcttcgcgagataaggggcaaacttgttgagatgcgtcatggtgttgctgctcctcactttttggttgctccggaggagtaa

SEQ ID NO: 7806 - DNA, 207 bp, Escherichia coli
atgacagaaacaacctcacagcaagataattacgaaggcatttgcctggagcctgattcatttgcggtaaatgtttatcatttattgcatgcaacacaggtattacatatgtccagtaatcacgaaacgaaaacactcggcagcgaaattctgaattttgcatgtgagtatacaaaagctgctgccgaaaaagaattagcgcaataa

SEQ ID NO: 7807 - DNA, 183 bp, Escherichia coli
atgcatcagaaaacagcagaacacgaacaaaccagagtattgctgaccatcaaaaacgggaaagtaatattcattcgccatgttcatgacgatgaacttgtaggaactctttcaacattcctgtttattgcagaaaaggcaggatatgacgttattgcaccagcagatgaagatgaggaataa

SEQ ID NO: 7808 - DNA, 582 bp, Escherichia coli
atgcaatacgatgaattccaggctgaagcaacagccaatggtatacgaactggcagtatgacgattgattatcacgacgccatacgtcgtctggatgccggagaattcgatactcctaatgtgcgaggtttacgtatccttcagtgtctggcgcaagccgacgaagcaggattactgggtaaacttccggttgagatgaaggttgctcagtggcgatggttgtatgtgacgacattcatcaacgaagaagaagacaagaacggcacaattgatatcctgaatgaacacggaacaactgaacacgccgtggtatataacgggatgtatgggtttatgacgatatatcccggccccattcgatttgccttacaacagtatattgaatggaatttaattcaaaaatacggcgaagctgaaggaatgggaagagcgctgtttctttatcagaaaatgctcactacttcccctgataaaggtttcattctttcagatatgggtcgagaagggcttgaaatccttctggatgaaattattaacgaaatgaatactcatggcatgcaatccgaaacagatattaagtaa

SEQ ID NO: 7809 - DNA, 249 bp, Escherichia coli
atgaccgttatcgagtatatccaggaaaatccagattgcagtagagaagatatatccctcgcacttggaagaagcgcaacttctatcagtaatgaattatcacggttattgtggaatgggttaatagtacgaactggagaaaaaaacaaaatgattctgtactgcgtaaacaatctgccgtttggatacagcaatcccctaagtgttatgttcaaccagttacttaaacaggtaagaaatggcaactga

SEQ ID NO: 7810 - DNA, 318 bp, Escherichia coli
atggcaactgactcacaactaaccatagaaacggccctgaatgtcggcctggcgctccttggttatttttacatcgtgttctgcagcggacggtggctgtcgctgttgttcctgaaaaaatggaataaacgccgtaagcaggatgaacgccagaaggcaatgaatgcgttttccgaagccttcggaattgacggcatggaaccaggggatccagctcgcgcaatcagcagagggggtgtggtaatccttgtatatcggagtgaagagaaaaatgacgatcacaaaacaacgagtagaaaaaatcatatatcgccatga

SEQ ID NO: 7811 - DNA, 315 bp, Escherichia coli
atgacgatcacaaaacaacgagtagaaaaaatcatatatcgccatgaaatgggactgaacagcgatgtcactgccgaagaggtttatgacctggctgtactggcgctgaatttatcaaatatcgcaaacctgaagcgatacgagcttgatatggatggttgcgactcgtgcggtcaggattgtggcgcagatatgactgaagatcctgatggtgattatgtcctgtttgatgacgtggttaagttgtttgaatttgatacaaccactcaaaagttagaaatcccggcaaaggaggcaaccagtgagcaagattga

SEQ ID NO: 7812 - DNA, 816 bp, Escherichia coli
gtgagcaagattgactatcaggcactgcgtgaaaaggcagagaaagcaacgtgtggtgagtggtcgctcgaatatggagagggccgatttgatggtgatgatgcgctaattcatcgcgaggctgctggatatattcccatttgcagaattgaaggagcgcatcctgaaagcggtttcgatgaagatttccaaatggaacagcaggccaatgctgaattcatcgctgcagccaatccggctaccgtcttggcgctgctggatgagctggaaagaaaccagcaatacatcaaacgccgcgaccagaagaacgaggatattgctcttacggttgggaagctgagagttgagcttgaggaagtaaaacaacacgctgaagaattatccgaaaccaaggctgttcgtaaccaatggcggccagatatttgcccaataaccggacgtgcatttttcatgtggattgagcatccaacattgggaaatgtgccgacatatggtggcccattagatagttacaccattccaacaaaggacggtgacggtgagttttcatgtgagcgttacgatcatgattttggcggttgggtagaaagcgaatgtcttgggttatatctgattgatgatagagaacaatgcagggtctacgaactggaggagcgcgttaaggaactggatgctcgggaaatatcgctcccggaacgtagcagcatgcttcatcgaacagattttcacgatgattaccaaacggtaatggcatacaaagtttctgaagtcatcgatgcaatccgcgctactggcattcgcatcaaaggagagtga

SEQ ID NO: 7813 - DNA, 411 bp, Escherichia coli
atgaacgctataaccaaagaacgtatcaaattattcattaaaaatccgcttgataacggacttactcgtggcgaacaaatggaactggcacgaattgctctggcatcgctggaagcagaggcagttatgttctgtatatcaggacaaaatgtagattcagaagaacatgtatcaaccagcaaagcggttgttgatgcctgggttgaagaatggaatcaggttgacggaagtcctggcgaaccactgtacaaaactatgccactctactatcacgctgccttgccagcgccggtagtgccggatgaaatgtattggcaggatgcgccagttgaaggcagcagcaaagcggctgcatacgctacaggctggaacgcctgccgcgccgctatgcttcatgggaaaggagagtga

SEQ ID NO: 7814 - DNA, 264 bp, Escherichia coli; identical to SEQ ID NO: 5910

SEQ ID NO: 7815 - DNA, 168 bp, Escherichia coli
atgaccactattaccaaagaacgtattgaattgttcattaaaaatccgcttgaaaacgggcttacccgtggtgaacaaatggaactggcacggattgcgctggtatcgctggaagcagagccggttgtgttctggtttgaaaaatatcaagaaggggctacggcatga

SEQ ID NO: 7816 - DNA, 243 bp, Escherichia coli
atgttcgctttgattcaacgcggtcagatatacacggacagagccggataccccgtggtgattactcgcatcactgagcactcagtgttctttcgacggatggacggacgatccgggcgggtacgcattggtgagttaaactgcctgttcgaacatattgaccaccaggagtaccgcaaaattctcgcggacactgagcaggaaaagcacctgaaaaaattacgagccataaaaaggaagtaa

SEQ ID NO: 7817 - DNA, 147 bp, Escherichia coli
atgaataaagcatttgaacgatgggtccaccagcgttacggcaatcgctatgacctgacgcgagatgttgacggcttctactgtcgtgaagttgtgaagcgaatgtttgaagtgtgttgccactgccgtgggctgagtgttgtgtga

SEQ ID NO: 7818 - DNA, 237 bp, Escherichia coli
atgggcaatgtgattcaactggctcccaatgaatgggtttgtgaaagcgttcttatcgcaattaccgggctcaaaccaggcacaattcttcgggcccggaaagaatgctggatggttggaagagagtatattcacgtatcaccagacggtaatccaaagccttccagtgaatgtatgtataacagaaaagcaatagatgcctgggtcgcctcaatgaaaaacaaacaacccaggtga

SEQ ID NO: 7819 - DNA, 1314 bp, Escherichia coli
atggataaagtcaaatatccaacaggcgtcgaaaaccacggcggcacattacgcatctggtttaattttaaaggtaaacgtgtcagggaaaatcttggtgtccctgacactgccaagaacaggaagatcgccggggaactgcggacatcagtatgttttgccatccgcacaggaagctttgattatgctgcacagttccctgactcccccaaccttcaggcttttggggtaagtaaaaaagaaattacggtgaaggaacttgaagaaaagtggctggatctgaaacgaatggaaatctctgcaaatgcattcaatcgctatgaatccgttgcaagaacgatggttccgaaaattggaggcagtagactggtgtcatcggtaaccaaagaggaattgctgtatatcaggaaagatttgcttaccgggtatcagaattcaacgaaaaacaaagcagcagcaaaaggacggagcgtcgttactgtaaattattacatgacgacaatcgctggaatgtttcagtttgctgcagatcacggttacttagaagcaaatcccttccagggaattaagcctcttaaaagagccagggcagagccagatccgctaactcgtgacgaatttattcgcctgatagatgcttgccgacatcagcagacgaaaaacctgtggtcattggctgtgtacacaggaatgcgtcacggtgaactggtctccctggcctgggaagatatcgatctgaaggcaggaacaattaccatcaggcgcaattatacgaaacttggtgagttcactctaccgaaaactgaagcaagcacaaacagggttgtgcaccttatccagcccgctatcagtgtcctgaaaaatcaggctgaaatgacaagactgggtaagcagtacaacatcaaggtgcaactacgtgaatatggacgttcagtgaaccatgaatgtactttcgtgtttaaccctcaagtggttagaaaaagcgaacaggtaggttttgtctacaaagtcgattctgtaggtgactcatgggaaacagccattaagcgtgcagggatcaggcatcgaaaggcataccagtcacgacacacttatgcgtgctggtcattatctgccggagcaaacccaagcttcattgccagccagatgggccatgcaagtgcccagatggtattcaatgtatacggagcatggatgactgacagcaatgcagaacagatcgcaatgctgaatcagaagctgacagattatgtcccaatgatgccccatagtcaccaaagtgacaccagaggcttattaaaatcagtaagttaa

SEQ ID NO: 7820 - DNA, 726 bp, Escherichia coli
gtggagggtaacaccacgctttatgccctgccgaaacccgaggttgtcctgcgctggcgtgagcagaccacagatgacttccgcttctgttttaagtttccggcgactatttcgcatcaggcagcattacggcattgcgatgatttagtgactgaatttttgacccgcatgtcaccgttggctccgcgcattggacaatactggctgcaactgcctgccacattcggcccacgggagctgcctgcgctttggcattttctcgattctcttcccggcgaatttaattatggtgtggaagtccgccatccacagtttttcgccaaaggggaagaggaacaaacgcttaatcgcggtttacatcagcgcggcgttaatcgggtgattttagacagccgcccggttcatgcagcacgtccacacagtgaagctattcgctacgctcaacgaaaaaaacctaaagttccggtacatgctgtactgacggcgaaaaatccactgatccgttttatcggtagtgatgatatgacgcaaaaccgggaattatttcaggtctggttacaaaaattagcgcagtggcatcagaccactacgccttatctttttttacatacgccagatattgcccaggccccggaactggtacataccctgtgggaagacttacgtaaaacgcttccagagatcggagcagttccggctattccacagcaatcttctcttttctga

SEQ ID NO: 7821 - DNA, 774 bp, Escherichia coli; identical to SEQ ID NO: 7444

SEQ ID NO: 7822 - DNA, 201 bp, Escherichia coli
atgtttttagttgctcccaacaatatattaactcggggttctgaggtaagcagaaacctgtcgtgttacgaatttgatcagttatcgcataaaatttttgaaacttttcaattagatcaatgggataacaaagcatttctgcaagataaagacctgcttctggataattcgcaatataaaattcatatccacagggggtga

SEQ ID NO: 7823 - DNA, 1419 bp, Escherichia coli
atgggaacaggctactttctggtcaggggggataagaccacctgtggtggaaaaattattgaaggggcggacgaccatacgatcatgggtatcccgcaggcacgggatatggaccgggtcacctgcggcagatatccgggaatgtttattattgtgggcggcgttcctgaaacagatattcacggcaggctgatggcggggacgctggacagtcagagcagttgcccgtgtaaagcacggtttattgcgtcaatgatggatgatacgtatgagacggatgacggggaaagtgaagcggaacaacatgcgcagtcggcgaaaaaggatctgacttctggttctgattcatcctctgatgatgtaaaactggattacagaattaaattatcaggtaataagatactgacgccactgaatatacctgattataaagaaatgataaacggtggtagcacgaagaatacagaaaaaatagattttaccatcacaaataaaggcgatgaggctgaaggactttccctggaagtgcttgatggcaatgaagtgatttatagtgaacggcagaccggtaaatattttactaagggagagcatgcctggcaatgggatggctacagtaatcaaggcatactggatacaactaagctaaaaagtaaatcactactcgtaagactgattgctttatgtggtgatatgatgataaaagttgattatccattgaaaacttctgcgaatgaggaagattgggtagatatagaagttaacaaaaacaataagacagtaaatataatatggcgactggcagttagtgatggagggataaaaggaagtaatcctaagttatccccagttccttataacgacttggttgacctgaccaaaaatggagttgaattttattggtctcgaaatggaagtcgcggcggggggattggtgaaagtattgttacagcgattggtgtttttaaagtaaatgtaaaggctgagataaatattactccatccatgcgaactttttctttgatatcatcattagatcctgactttcaggcatccgttagtctatcaggatttgaaaaaatatattataactacggtgatagttataaggatattcaagatgaattacaggcacttcttgacgctaataacagatataaatgggatagtgctcatgaaatggggcataaagtactggatgaatatggagagggttctagccctgattattcgtggactcataaaggaacatctactcttatgcaaaaaacaataccagggaatgttatgcccgctcagggagagattgatgtaatgaaatatggaaaatatcgtcctgacatgtatactcgattggttgcagcagatgaagatgttcaggggttgatctggttaagcaggataaaatttgatgactag

SEQ ID NO: 7824 - DNA, 2481 bp, Escherichia coli
atgttgagaatgaccccacttgcatcagcaatcgtagcgttattgatcggcattgaagcttatgcagctgaagaaacctttgatacccatttcatgataggtggaatgaaagaccagcaggttgcaaatattcgtcttgatgataatcaacccttgccggggcagtatgacatcgatatttatgtcaataagcaatggcgtgggaaatatgagatcattgttaaagacaacccgcaagaaacatgtttatcaagggaaatgatcaagcggttaggcattaataccgataactttgccagcggtaagcaatgtttaacatttaagcaacttattcagggcgggagctatacctgggatatcggagtttttcgtctcgatttcagtgtcccgcaagcctgggtggaagaactggaaattggctatgtaccacctgaaaactgggagcggggtattaatgcgttttatacctcttattatatgagtcagtattacagcgattataaagcgtccggtaatagcaagagtacatatgtacgttttaacagcgggttaaatttattggggtggcaactgcattctgatgccagtttcagtaaaacaaataacaatccaggggtgtggaagagcaataccctgtatctggaacgtggatttgcccaacttctcggcacgcttcgtgtgggtgatatgtacacatcaagcgatatttttgattctgttcgcttcagcggtgtgcggttgtttcgtgatatgcagatgttgcctaactcgaaacaaaattttacgccacgagtgcaggggattgctcagagtaacgcgctggtaactattgaacagaatggttttgtggtttatcagaaagaggttcctccaggcccgtttgcgattacagatttgcagttggccggtggtggagcggatcttgatgttagcgtgaaagaggcggacggttcggtaaccacctatctggtgccttatgcagcggtaccaaatatgctgcaacccggcgtgtcgaaatatgattttgcggcgggtcgtagccatattgaaggggcgagcaaacaaagtgattttgtccaggcgggttatcagtatggttttaataacttattaacgctgtatggtggctcgatggtcgcgaataattattacgcgttcactttggggactggctggaatacacgctttggtgccatttccgtcgatgccacaaagtcgcatagtaaacaagacaacggcgatgtgtttgacgggcaaagttatcaaattgcctacaacaaatttgtgagccaaacgtcgacacgttttggtctggcggcctggcgttattcgtcgcgtgattatcggacatttaatgatcacgtatgggcaaacaataaagataattatcgccgtgatgaaaacgatatctatgacattgccgattattaccagaacgattttggccgtaaaaatagcttttctgccaatatgagtcagtcattgccagaaggctggggttctgtgtccttaagtacgttatggcgagattactgggggcgtagcggcagcagtaaggattatcagttgagttattccaacaacctgcgaaggataagctataccctcgcggcaagccatgcttatgacgagaatcatcatgaagagaaacgttttaatatttttatatcgattccctttgattggggtgatgacgttacgacgcctcgtcggcaaatatatatgtctaactcaacgacgtttgatgatcagggggttgcctcaaataatacgggattatcaggaaccgttggaagccgggatcagtttaactatggggtcaacctgagttatcagtatcagggaaatgaaacgacagctggggcgaatttaacctggaacgcgccggttgcgacagtgaatggcagttatagtcagtcgagtgcttatcgacaggctggagccagtgtttcagggggcattgtcgcctggtcgggtggcgttaatctggcaaaccgtctttctgaaacgtttgctgtgatgaatgcgccaggaattaaagatgcttatgtcaatgggcaaaaatatcgcacaacaaaccgtaatggagtggtggtatacgacggaatgacaccttatcgggaaaattacctgatgttggatgtgtcacaaagcgatagcgaagcagaattacgtggcaaccggaaaattgccgccccttatcgcggcgcggttgtactggttaattttgataccgatcagcgcaagccatggtttataaaagcattaagagcggatgggcaaccattaacgtttggttatgaagtcaatgatatccatggtcataatattggtgttgtcggccagggaagccagttatttattcgcaccaatgaagtaccgccatcggttaatgtggcaattgataagcaacaagggctttcatgcacaatcaccttcggtaaagagattgatgaaagtaaaaattatatttgccagtaa

SEQ ID NO: 7825 - DNA, 1533 bp, Escherichia coli
atgacgcagaaaattgaacaatctcaacgacaagaacgggtagcggcctggaatcgtcgcgctgaatgcgatcttgccgctttccagaactcgccaaagcaaacctaccaggctgaaaaagcgcgcgatcgcaaactgtgcgccgatctggaagaagcgattcgtcgctctggtttacaggacggcatgacggtttccttccatcacgctttccgtggcggtgacctgaccgtcaatatggtgatggacgtcatcgcgaagatgggctttaaaaacctgactctggcctccagctccctgagtgattgccatgcgccgctggtagaacacattcgccagggcgtggttacccgcatttatacctctggcctgcgcggtccactggcggaagaaatctcccgtggtctgctggcggaaccggtgcaaatccactctcacggcggacgtgtgcatctggtacagagcggcgaactgaatatcgatgtggctttcctcggcgtcccgtcctgtgatgaattcggtaatgccaacggctactccggtaaagcctgctgcggctccctcggctatgcaatggttgatgccgacaacgcaaaacaggtcgtgatgcttaccgaagaactgctgccttatccgcataatccggcaagcattgagcaagatcaggttgatctgatcgtcaaagttgatcgcgttggcgatgctgcaaaaatcggcgctggtgctacccgtatgaccactaacccgcgcgaactgcttattgcccgtagcgctgcggatgtgattgttaactctggctacttcaaagaaggtttctccatgcagaccggcaccggcggcgcttcgctggcggtaacccgtttcctggaagacaaaatgcgtagccgcgatattcgcgccgacttcgccctcggcggtattaccgcgacgatggttgacctgcacgaaaaaggtctgatccgcaaactgctggatgtgcagagctttgacagccaagctgcgcaatcgctggcccgtaaccccaatcacatcgaaatcagcgccaaccaatacgctaactgggggtcgaaaggcgcatcggttgatcgtctcgacgtggtggtactgagtgcgctggaaattgacacccagttcaacgttaacgtgctgaccggctctgacggcgtactgcgtggtgcttccggtggtcactgcgataccgcgattgcctctgcgctttccatcatcgtcgcgccgctggtacgcggtcgtattccgacgctggtggataacgtgctgacctgcatcaccccgggctccagtgtcgatattctggtcacagaccacggcatcgctgttaacccggcacgtccggagctggcagaacgtctgcaggaagcggggatcaaagtggtttctattgagtggctgcgtgaacgtgcgcgtctgctgaccggtgaaccacagccgattgaattcaccgaccgcgtcgttgccgttgtgcgttaccgcgatggctcggtgatcgatgttgtgcatcaggtgaaggaataa

SEQ ID NO: 7826 - DNA, 888 bp, Escherichia coli
atgatccagaaagataaagtgcgggttgatatttttggtgagcgttttcgcactcgcgcgagtcagttaacgcctgggttaagagttgtcgccagctacattaatgagcatcgtgaagtggtactcgagcaaacggcgatggaaattgcggccacgttgaacacttccgatgccacagttatcagggctatacaggccctggggtttgccgggctgcgtgatctgaaacgcactctggaacagtggcttggtccagcccttagttccagcgaaaagatgtctacgacggtgagtaacttgacgagcgatgttaacaccgcaatcgactttgttcttgaagggcatttgtatacctgtaatgtcctgtcagagcctgaaaaccgccacgcgcttgcgcaagctgtagcgttgttggtgcaggcacggcaagtcgcaatttttggcattggcgcttcgggtattctggcggactataccgcacgactattcaaccgcataggtttgcctgccacggcactaaaccgtacgggtattggccttgccgagcaactgatcgcgcttcaacgtggcgatgttctgatcatgatggcgcaaaaatctgcgcaccgggaagggctgacaacgcttcgtgaggcgaggcggctggggatccctgttattttgctgacaaacgcgctggattcacgttttagcaaagacgccagtatcgtgattcatgttccgcgcggggatgaaaaagggaaaacgccgctacatggtacggtattgttgtgtctggaaatgattgtctggtcggtagcttccgcagtgccgcagcgtgcggttaaaaccattaagcgaattaacgatttccatcgaggactgaaaacgggaagaaagaatggctaa

SEQ ID NO: 7827 - DNA, 984 bp, Escherichia coli
atgatgcgcacagggctggttactgtaattttcctcgccttactgctggtgggatgcgtggtatatccagggattggtgcccgatttattgcaccacaaacggtgttgcaggcatttcttcattttgatccgcaaaacttcgatcacaacgtaattgtaagactccgtttgccgcgtttagcggcagcattgcttaccggtgcttctcttggtgttgctggtgctttgttgcaggctgtcattcgtaacccattgggggaaccacatattttaggcttaaatgccggagccgctcttgctgtcgttgccgccagtgcgcttggactggcctttccggttggacgcccactgctggcatctacggggggcgcgttattgttcctgttgatattgctgctttcctccgcagggcgttcagggttaacgccaatgaaagttactttatgcggcgtggcgctatcggcgttcgtgtcctcaataacggctgcaatcctgattcttgacgaacaaacactgctggcgatgcggacatggctagcaggtgatttagcggggcaggattgggcgacgctgggtacgtccgcctggttttctctggggggatttgtgttagccctttaccttgcaccctcccttaacatgttggcactgggcgatcgcatggcgcaggggctgggcgtctctgtactccgcacgcgaacattcaccctgcttgcgatcgcgttgctctgtggcgcagccgtatcgattgctggccccattggttttgtcggcctgctagtaccgcagattgtccggcgtctggtatcagcggatctgcgcgttctgctccctctttcagcttgtgtcggcgcgcttttgttattactggcagatattattgcccggacgcttttcacgccccatgagttagcgaccggtgtcatgacggcgttagttggtgcgcctgtttttgtcattatggcgacgaggatgttcaaatga

SEQ ID NO: 7828 - DNA, 1203 bp, Escherichia coli
atgcaaagtgttgatgtagccattgttggcggcggcatggtcgggctggcggttgcctgcggcttacagggtatcggcttacgcgttgccgtactggagcagcgcgtaccggaacctctggcggcggatgcaccaccacaactgcgcgtttcggctatcaatgccgccagcgaaaaattactcacccgtcttggcgtctggcaggacattctctctcgtagggcctgttgctatcacggcatggaagtgtgggacaaagacagctttggtcacatctcgtttgacgatcaaagcatgggctatagccatcttgggcatatcgttgaaaactcagtgattcactacgcgctgtggaacaaagcgctgcagtcgtcagatatcactctgttggcccccgcagaattacagcaggtcgcctggggtgaaaatgaaaccttcctgacgttgaaagatggcagcatgttaacggcgcgtctggtgattggcgcggacggcgctaattcctggttgcgcaacaaagccgatattccgctgactttctgggattatcagcatcacgcgctggtggcgaccattcgcacggaagaaccgcatgatgcggtggcgcgacaggtttttcatggcgaaggcattctggcctttttgccgcttagcgatccgcatctttgctcgattgtctggtcactgtcgccagaggaagcgcagcggatgcagcaggcaggcgaagacgaatttaatcgcgcgttaaatatcgcttttgataatcgcctgggcttatgcaaggttgaaagtgagcgcctggtgttcccgctaacggggcgttatgcgcgccagtttgccgcgcaccgtctggcgctggtgggcgacgccgcgcataccattcacccgttggcggggcagggggtaaatctcggctttatggatgctgcagagctgattgctgaactgaaacggttgcatcgtcagggtaaagacatcgggcagtacatttacctgcgtcgctatgagcgtagccgcaagcacagcgcggcgctgatgctggctggtatgcagggattccgcgatctgttttccggggctaatccggcgaaaaaattgctgcgtgatattggtctgaaactggctgatacgcttcctggcgttaagccacaacttattcgccaggcaatgggattaaacgatttgcctgaatggctgcgttaa

SEQ ID NO: 7829 - DNA, 225 bp, Escherichia coli
atgaaggtatcttatatagattgcgacttctgtcatgcatccacattgacagataaagaagctgttatgttcactaatattgacaggaaagctattggttatcgagaagtccacatctgtaataagtgcattgttgatgcttgggaagcactaaacggtaaagataagaatttttatctcagagcaactgtagaaggtaggcactttaaagaagtgaaaagttga

SEQ ID NO: 7830 - DNA, 165 bp, Escherichia coli
atgaactctgagttattacaaatcgttcaggatgctctctcaaagccatcatcaattgtaggctatcgagacgaagctgagcgagtcgcggatgagcaatctaacgttgttaagaagatggtctttgaaacgctgaaaaatatttatagcaaaagtaagttatag

SEQ ID NO: 7831 - DNA, 720 bp, Escherichia coli
atgaaaaaaagcaatggactcacattaaaacttgacggaaccacccctggccagctgtcaatggctaagttggtcaagtatatgtctgctctcgtagatctatacggttctgcagattctgttcacttcgactgtgtaagtgaaggatcggctgacttaaatgcatgggtcgataatgatatttgttataacgctgtcatagcaagggcctctctctcagccaaagagaaatcacccgcgtatcaaaaaattgttaatttactggaacatgatggtttttcagcgaaactactcggacgaaaccactcaaccattatcgcattcccgcgagtaaaaaaggagccaatccctttactcataacaaaaacgtcagaagttcaaggaaggctatacagtgttggtggaaaagacaactcaatacctgtgcgtattgagggagccaacggtgaaacattcaagtgcgaggcaacccctgatttggcggcagctcttgggtcccatctattcaaatatattagagttaaaggagatgggtgctgggaaaaaaagaacaacaaatgggagctaaagaaactaaaaataacttcatttgtattgctcaaaaaatcatcactcaaggatgctattaatgctatcaagcaagttcctggagatcagtggtccgaggaacgcgatgttgattcaatccttaggactctgaggaagataaattgcgagtaa

SEQ ID NO: 7832 - DNA, 549 bp, Escherichia coli
ttgcgagtaattttagataccaatattctggtatacctactatcagatatagaacacgattatagattatctgaccctatacttggttctgagattccagatgccaaaagaagagcagaagctcttgttgatcgaatagataacaagaacgggacaatcatcgttccaactcctgtattggcggagtttttagttggaatccataaagattaccaacaagaaaaactgaatgttatcaaatcgttatcgtgcttcgagactgtatcatttgatgagttggctgctattgaatgcgcatcgataccaacattaaaagaattaaggaaaattagcacagaaggtacagcaaataaaattaagtttgacagacaaataatagcaattgcaagagcaattaatgctgacgaggtatggactcatgataagggagtgtttgagcgttgcaaaagtctcaatattcctgtgttcacattgtcatcaatagaaccaattccggttcaaagtctcatggagttcttacacgattcagacgatcagagattacactaa

SEQ ID NO: 7833 - DNA, 423 bp, Escherichia coli
gtgtttggtatattaacgagaagcaagataaaaaaattaagggcagaactcgccgaaacacaaaaactggcttcacatttttacaaaatgaaatacgacgctgaagagcgtgcatttgttgagttatgcgatttatctattcgtatgggagtagagccagatgtagcggcaaaaacccaacaaggcattgatatacttgcagatgttgttttaaacaggcaatatgcgttttatctaaacgagaaggccattcagatttactctcaaatcttcctcctagaaaaaagaagaggaactcacgatcgagaagagtggttaaatgaagttgttaaaaaatctggctgggaagttgtttcatcagagctacctcttatttgtgctgatttaatcgaagaggcaaaagagcgcctatccgatggctaa

SEQ ID NO: 7834 - DNA, 2109 bp, Escherichia coli
atggcctatagtcgcgaacagttgatgacggcgttaaggaatgctgatgctgccggtgatactgagggagcacgtcgcattgctcagatgctgtcttctggtgatcaatccactcaaaaccaatcgcagccagaagaacaatctctggtaggaaaagccactggctggctcactggtggtcaaagtgcagggcaaattgcagaacaggctggtcgtggtctggtaaacataccatttgacgtattgcagggtggcgcaagtctgattaatgcaatcagccaggggcttggtggccccaaggttttggatgatgtctatcgtccagtcgatcgaccgacagacccttacgcgcaagccggtgaaacaattggtgggtatctcctgccaattggcacagcggcaaaagctgctggagcgccagcaaagctcgctgaagatatcggttccgcaggaaacatgattgcaggttctcttgctgatgctgcaaatcaggagggcgactttgcacaaaatgctgccattaacggtggtatcaatattggtgctcaaggcgttctttcaggtgtcgggcgcgttattgctccaagggtttcacaggctcttggtggtgcagcactgaattctgctaatgatgtttccaggatggcaaagtcaggtgctgggcgtcagtcaattgccagtcaggccgctaatgtgtccgaagatgtagcaaaagcggctgagtctgctggaattgatataaacgcattaacaccaggaatgcgatctggaagtcgtggaattgcacaagccgaagggatattggcatccgaaccaggaattgttcaggatgcacatactagggcttttagtgaaatacagtcgaaattccactcagcacttgatgaacttggtgctgaggctggatctgcatcagaaaaaagtgcagccataaaacaaagggttttagcaagtattgataaaatgaagaactcagaaaaggcagcatgggatagcgtccgctccacgatgcctgacgcaaaggccagaatgtcaaacctgaacgctacaattcagggtgatattttggctggtatgccgctaactcctgagatgaaacaatttgcatctgcttatgctaaaactggtaaaaaaggaatcacgtttgatgccatgaaggcatggcgaagtaaacttgctgacgctgagcagaagtatataaggtctggtgaggcaaatacggcaaggcgcatggcggagcttcgtgatgcagcaacggaagatatgcgcataatggctcaaaatggcggttttcttgatgactggcaaaaagctaatgatctgtcaaaagcaagatttacagcacaagaacaggctgaagcagcgtttagaaaccttgcaactgatcagttagtcactgatggtattaaagccttgcaaaattcatcaaaaagtgggacaggaaagtttcatcagattattggcgcactgccagagtctgagcgatctccagcaattgcatcaatattacaagatgcggtatcgcaaggggtgcgtggcggtaaatcagagtctgctggcgtattccatatagcgtcgatccttacgccgcagaatattactgccattagcaagcactcgccagaaatgggtaagattgctagggcatacagcgaccttgccagagcagcaaccagaccactgcgatatgtagagcatactgggcgctctataccggcaattaactctcttgagcaaggactgccaaaagctgtcatgacagttctcaatgcaataggcaattcaacatcaggggctattgttggtaccactggtggagggattgttggcggtgttgtgggggctgtttctggatctatagctaaagggacgatagaaaagttagctgcatcccgcagtggtcgttacgctattgaaaaggctgttcaagaggcaacaaaggcagttaaggttggggcaagtgatggtgcattagcggcggctgaacgcagatttatggcaaataaagctgctgtaaaagcgatacgtgataccgtcggaaacgaagagtttcagcgcttagcgaggggtgggattgtggcatcgctaagcggaatggagcgggagtaa

SEQ ID NO: 7835 - DNA, 1275 bp, Escherichia coli
atggctacgtggcaacagggtattaattctggtggttttctggctggcattggtgcgcaaaacgagaatgcgccaaaggcaagcgacattaacgcaacgcttggtctgatccgcgaaaacaatgaactggctcgatcaggtgcaaataacgttggtctgaccgcgttacgtggtctggctggagttgctgatatttataagcaggaacagcaacagaaagctattagtgcgttcaataaggttcacgctgatgcatgggcttctggtgatccatcgggactatttaagtttgcccaggaaaatccagcgtttgttgcacaggcacaacaggcgttttccggtcttaatgatcagcaacgcaacgatatgggcgatttagccatgagggctaacgtcgctctttctcagggaccggaagcctacagtaaattcattactgacaacaaggacaggttaaatcgcgtgggggcgaatgctgactggatgattcagacaggtatccagaatccagagcagctatcacacatgctgactactatgacgctaggggctgttggtccggataaaatgctggattatcaggacaagatggttggtcgccagcaggagcagcaaagaattaacgaaacaatccgtaataatgacatgacaaatgccagagggtgggcaagcaacaatattgcgcaacaaaatgtcaatcttcgtcggatggaattagaggacaagaaatacgacagactcatcgcaaatgaaactaatgccttaaaacttgctgaattgcaggacaagagattgcagaatcagcaagctatggagcaggcaaagcgagataaggccgatgcgtacaactctggaatggataatctctccagaacgatagagacggctacaaaagttcttaatagcccaggattcacgggatatttcggaacaaacctaaacccactatcgagtagattcattccaggaacagaggctgctgatacagaaactctggttgacacactgaaatctcagggattcttatctggcattcagcagatgaaagggatgggggctttaagtaatgccgaggggcaaaaggtaatggatgctattggtagtttgtccccaaatcagtctgaaaaatcagccagagcagctatcaaaacaatcataaaaaccactgagatggctcagaaacgtatgcaacagaaatacgggaaggacatacaaccgtctcaacagcagctttctgatgatgacttgattaataaatatctcggagggcagtaa

SEQ ID NO: 7836 - DNA, 441 bp, Escherichia coli
atggcgcgcccaacaaagtatcaagaggcgtatgccgaacaggcacgcaaactgtgcttgctgggctacaccgatgcagagcttgctgatttcttcgaagtcagtgagtcaactattaacaagtggaagcttgattatcctaagttttcggagtccataaaaaagggtaaggccgtcgctgatgcagaagttagtgatcgtctttatcaacgagctatgggcttcgtggctccagacatcgatattcgtgttattgaaaacagaattgtcgaaactccgcttgagaagtattacccgcctgatacaaccgctgccatcttctggcttaagaaccgacagaaggataaatggcgcgacaaggttgatcacgagctaacaggcaaagacggcggcgcaatccagattgaaacatcaccgatgagcactctattcggaaaatga

SEQ ID NO: 7837 - DNA, 243 bp, Escherichia coli
atggcagagattattcccatgactgaagaacagaaattccagttagagatttacaaactggtcatgaaccagaacgcagctgcagaggaagcatttcagttcattggcactgacgaactgaagcttgagctattcaaaattcacttccagtcaggtggcgctaattcagatatcacgacccgtacaatcgaagcggtgcgtaaatcgaaggaagcgttagacctgtttactaccggagcataa

SEQ ID NO: 7838 - DNA, 543 bp, Escherichia coli
atgaattatccaactatcgttgacggcattgatttcaaagaactggtttttattaccaacaatgaccctgtcaccgattcatttatggtggcgaaagcatttcgtaagcgacatgacaacgttgtgcgtgatgtagaaagaactatcgctgcttgtcctgaagagtttgatacaaaactcaattttgaggtttgctataaaaacaatgagttacagaatggtaagccacaaaaattctatcggctacgtaaggatgggttgatgcttttggttatgtcctacaccaaaaaagaagcaatgcggatcaaaattgcttacatcaacgcattcaactggatgtacgccatgcttcaggttggtcatcgtcaatttgaagaagagagaaatgccgtaatgctggagtacatgaaagagaaggatgttgccagcatgtcaggccgcctgcttaatcgctggggaaaaattaagaagcctcagctactggcgagaattgaacgccttgaacagcacgggcaaaccgtaatccccggactcaccaattaa

SEQ ID NO: 7839 - DNA, 438 bp, Escherichia coli
atgagcagagtaaccgcgattatctccgctctggttatctgcatcatcgtttgcctgtcatgggctgttaatcactaccgtgataacgccatcgcctacaaagagcagcgcgataaggccgcatccacaatcgctgacatgcagaagcgtcaacgtgatgtagcagaacttgacgccagatacacaaaggagcttgctgatgctaacgcgactatcgaaagtctccgtgctgatgtttctgctgggcgtaagcgcctgcaagtcgccgccacctgtgcaaagtcaacgaccggagccagcggcatgggcgatggagaaagtccaggacttacagcagatgctgaactcaattattaccgtctccgaagtggaatcgacaggataaccgcgcaggttgactacctgcaggaatacatcaggactcagtgcctgaaataa

SEQ ID NO: 7840 - DNA, 519 bp, Escherichia coli
atgggcataagagaactaaacctcaccaaagagcagcacgagtggctgaatggctggcttgaactgtggggcgcatgggtttattcaggtcgtctggaaaagcgcatgagcagcgtaatagcgaagttcatggagagcgtagagccgggaagagtcatgacaaggccaatgtgtaatgatgatgatggaatgttgatttctcaggtcgtcgattccgtcatgtacattgacaagaaagcctttggcatcctcctcagctactacgctcatggttcatctaagcgagcaattgcatcctactatcacgcgactgcaaagccacgcaagatgtgtggacgtggtggcgagggatggagaaaaccttcactggcaacctgtagaaacgaaattgacgacatcctgaaagcgtcattatttgttttataccaaccaatgcaaaatgctttcaaaatgcgtaaacgtgttgagaaagttaagcatattgctgttaaaaaccttgacatgcaattatccatttag

SEQ ID NO: 7841 - DNA, 672 bp, Escherichia coli
atgcgctattacgaaaaaattgatggcagaaaataccgaaatatttgggtagttggcgatctgcacggatgctacacgaacctgatgaaaaaactggagacgataggattcgacaccaaaaaagacctgcttatctcggttggcgatttggtcgatcgcggtacagagaacgtcgaatgcctggaattaatcacattcccctggttcagagctgtacgtggaaaccatgagcaaatgatgattgatggcttatcagagcgtggaaacgtcaatcactggctacttaatggcggtggctggttctttaatctcgattacgacaaagaaattctggctaaagctcttgcccataaagcagatgaacttccgttaatcatcgaactggtgagcaaagataaaaaatatgtcatctgccacgccgattatccttgtgacgaatacgagtttggaaagccagttgatcatcagcaggtaatctggaaccgcgaacgaatcagcaactcacaaaacgggatcgtgaaagaaatcaaaggcgcggacacgttcatctttggtcatacgccagcagtgaaaccactcaagtttgccaaccagatgtatatcgataccggcgcagtgttctgcggaaacctcacattgattcaggtacagggagaaggcgcatgggcataa

SEQ ID NO: 7842 - DNA, 207 bp, Escherichia coli
atgacgttctcagtaaaaaccattccagacatgctcgttgaagcatacggaaaccagacagaagtagcacgcagactgaaatgtagtcgcggtacggtcagaaaatacgttgatgataaagacgggaaaatgcacgccatcgtcaacgacgttctcatggttcatcgcggatggagtgaaagagatgcgctattacgaaaaaattga

SEQ ID NO: 7843 - DNA, 612 bp, Escherichia coli
atggctaaaccagcgcgaagacgatgtaaaaacgatgaatgtcgggaatggtttcaccctgcattcgctaatcagtggtggtgctctccagagtgtggaacaaagatagcactcgaacgacgaagcaaagaacgcgaaaaagcggaaaaagcagcagagaagaaacgacgacgagaggaacagaaacagaaagataaactgaagattcgaaaactcgctttaaagccccgcagttactggattaaacaagcccaacaagccgtaaacgccttcatcagagaaagagaccgcgacttaccatgtatctcgtgcggaacgctcacgtctgctcagtgggatgccggacattaccggacaactgctgcggcacctcaactccgatttgatgaacgcaatattcacaagcaatgcgtggtgtgcaaccagcacaaaagcggaaatctcgttccgtatcgcgtcgaactgattagccgcatcgggcaggaagcagtagacgaaatcgaatcaaaccataaccgccatcgctggactatcgaagagtgcaaggcgatcaaggcagagtaccaacagaaactcaaagacctgcgaaatagcagaagtgaggccgcatga

SEQ ID NO: 7844 - DNA, 393 bp, Escherichia coli
atggtgattagccgatacggacaaataacgtttaaacattttcaagacaatccaacatgggctgctgcggctggatatgactttaattattttgattgtctgtcagtcgcatgtatagcaactaccaatgttgctaacaacataatcgatgaattcttggattttccagactatcaggtcagagagttgcctgcattttttgtgaaagtatctgttgctacagctctgttatttattttgttattcgcatatccattgcttgccgtatttgtttatgtgagatgcaaacactcacaaaagaaatacagcggagagcataccgatattaccagccaaaatatgcgtgtgtggttgaggagatgccaagagaaatgggggagacgtcatggctaa

SEQ ID NO: 7845 - DNA, 180 bp, Escherichia coli
atgcttagcccatcccaatccctccaataccagaaagaaagcgtcgagcgagctttaacgtgcgctaactgcggtcagaagctgcatgtgctggaagttcacgtgtgctccgattgctgcgcagaactgatgagcgatccgaatagctcaatgtacgaggaagaagacgatggtgattag

SEQ ID NO: 7846 - DNA, 366 bp, Escherichia coli
atggattattcacagttaagtgattttgaaattaacgtggcggtattcgaagccattcataacggatcaccggattacaaagaaggtgagaatggcgcgatggtgtttatctcatttgagggagacattgtaaacggagacgcagttgaagtagaagttgagcgcggatcctttaacccatgcgcaaacccagcagacgcatggccgattattgaaaaatacaggattagcattatcaatctcgatgaagacgagtggggtgcacgcggtgtggcctactgtaaatctaagcgagctatacatgaaaatcccctccgcgccgccatgattgtctttctcatgattcaggacgccaataatgcttag

SEQ ID NO: 7847 - DNA, 441 bp, Escherichia coli
atgaaaaaactaacctttgaaattcgatctccagcacatcagcaaaacgctattcacgcagtacagcaaatccttccagacccaaccaaaccaatcgtagtaaccattcaggaacgcaaccgcagcttagaccaaaacaggaagctatgggcctgcttaggtgacgtctctcgtcaggttgaatggcatggtcgctggctggatgcagaaagctggaagtgtgtgtttaccgcagcattaaagcagcaggacgttgttcctaaccttgccgggaatggctttgtggtaataggccagtcaaccagcaggatgcgtgtaagcgaatttgcggagctattagagcttatacaggcattcggtacagaacgtggcgttaagtggtcagacgaagcgcgactggctctggagtggaaagcgagatggggagacagggcggcatga

SEQ ID NO: 7848 - DNA, 1881 bp, Escherichia coli
atgactccaagtgaactcagtgacctgctttgggcgcaggttgacagggtggctccgcacctgttgccaaacggcaagagagaggggcatgagtgggttgccggtaacgtcaacggtgacaagggaaacagccttaaggtcaaccttagcggcaagaaaaaatgggctgatttcgctgagggagacggcggtgacatgcttgatttgtggatggcatgtcgtggaattaacctgcatcaggctatgcaggaagcgaaagcctttctcggaatcaaggatgacgatcaccatttcgatgccaaacgtgagaagaaattctccagacctgaccgcaagaaaatcgcccgctacgttaccagaacagaatcccatcttgagtacctgcaatcgcgtggcatatcgccagaagtcgtaaagcgctacgaggttgtcagcggcaaggtgtggaatggagaacgagaacttgatgcactggtgcttccgtacaaacgcgatggtgagttgttgcaggtcaagcgaatcagcactgagcgaccggacgggaagaaagtcattatggcagaaggtgattgcgaaccttgtctgtttggatggcaggctctggacgctggcgtgagggcggttgtactttgcgaaggcgaaattgattgtatgagctatgcgcaatacggcatctcggcgttatccgtgccgtttggtggcgggaaaggcgctaagcaacagtggattgagtttgagtatcacaacctcgacaggtttgaggaaatattcatctcgatggacgttgatgatgttggtcgtgaagccgcaagggaaatcgcaagccgactcggtgaacatcgttgccgtcttgttactctgccgtacaaagacatcaacgaatgcctgatgaacggtgttaccgaggatgaaatctggcagtacatcggcacggcatcctacttcgatcctgaagaactctacagcgcgcgagagttttaccaggacactatcaacgctttctacggcaagcagcagtatctgtttaatccaccgtgggaatctctggcagataaattccagttccgtgaggccgagttgacgctggtcaatggtgtgaacggtcacggaaaaacggaggttgtcgggcatatggcacttgaggcaatgcgtcagggtgtgaagacgtgcatcgcgtcacttgagctgaagcctggtattctccttaagcgccttacccgtcaggcgacgtgctgcaagatgccgccagtgctggaaattgactctgcatttaaattttatgacgagagactttgggtgtttggtctgaccggaacggcgaaagccgacaggctgatcgaaatattcgactacgctcgccgccgatacgggatccagttattcatcatcgacagcctgatgaaatgcggcataggtgacgatgactataacgggcagaaagcatttgttgactcgatttgtgacttcaaaaacaaaacaaactcccacgtcattctcgttactcactccagaaaaggagatagcgaagaaaaaccaaccgggaaaatggacgtaaaaggctctggagcgataacagacctgacagacaacctttttatcatctggcgtaacaaggctcgcgagagagcgttacagagagttcagagtggtgaaaagatgtcagagaaggacgaacagctactggcatctccggcatctgttttgatgcttgaaaagcaacgtaacggcgaaggttgggaaggtggtgtcccgttgttccttgacgagcaatcgcaccagttcctgcaacttgaatcaggatcgccatatagctacatcgccaatatgccgaaatcggaatatgacgaggcgtggcgacaggaaaacgtgacggagtattaa

SEQ ID NO: 7849 - DNA, 861 bp, Escherichia coli
atgagtaatcttgcaaccgtaacacatttaaggccttcacaacggcctgtggagcgtcgtgtggcagaagttgaagatggttatacccgtcttgcaaatgccctgtatgaagagcttatcggcgcagatttaacgaaaaatcagagcaaggttgcccacgccatatgccgtaaaacatacggctacggtaaaaagatggatcgcatctctgatagtcagttagctcaaattaccaggctgccaagacagaaggtaaacaaggccaagaatgagcttatcgcgatgaaggttatccttcgcgaaggccagcaaatcgggcctaacaagaacatcgaagaatggcaaatcgaagggtgtcactactctggtgataatgtcactgcattggtgacaaaaagtgtcaccaaaacggtgacagcgctgtcaccaaaacagggacacacaaaagaaactattacaaaagaaaaaagaaataataaaaacactatgtccgaaagtgttcggacggagtgtgaaaaatcatctgaccgtcaccaagaaaccgacaaggcattcgaggaaatattctggtgtgcaggcatgcggaaagccgggaagaaaaacgcagcttcggcattcagaacacagttcagggaatggcgtaaaactaccaggggtacggcaagcgagtttgccacgatgctggcagaagacatcgcatgcaggaatggtaagcagttcggattcgacaggttgttaccatcgagctacctgaacggtcagcgctggaacgacgagaagccagaaactattcaaccacaatccaaaccatcatccgcaatcaccgtatcgaaaactggctacgtgtttttcgacaggtga

SEQ ID NO: 7850 - DNA, 624 bp, Escherichia coli
atgtcatcaatccgcttaactacgagaatgaaagaggaaatcgctcgtaacgctttaattaagtctggggttttcactgaacttaaagaagtaacaaagttaaagaaccagcttgcacttgacgccagagttattgcgtttggcggtaaaaagaaaactgaggaagtggaacagttatcatccaagttagtagctataagtgaagaacttgaaaaaatgggatgttcattttactcacgcgatgttcgttctacatcaatttatctgactgtatctggcagaagggttggatggctttcatatgggaaagacggcaacggtgaagatatattgctccctactccgaccaaagataaatgcatgtttgacgcagaacacgaaataacaaaaaggtttgatgaaatctgcgcattgcaacaaaaccttgaagccttgaaaaaggatatcgaatcaaatgtatgggctgctttgaactcagtcacaacagttaagcgacttattgaagtttggcctgaaagcaaagaattgctaccaaaagaagaagataaagcaagtacagcacttcctgctttacgggtagaagatttgaataagatgattggacttccttccgaggccgcatag

SEQ ID NO: 7851 - DNA, 252 bp, Escherichia coli
atgacagcaggaagaatgaaaaggccatggaatgttgttggcgctggatttaacgatgatggggtttatttcacgtttgacgatacaaccatccatcgaggtgatgtgagattgatggaggcagctcctgatttgctcgaagctctgcaagcgatgctaaacaaggcatacaagcaaaactggaatgaccattatcctgatgaagtatcgaaagcacagtcagcaatcagcaaagcccttggagatgagtaa

SEQ ID NO: 7852 - DNA, 471 bp, Escherichia coli
atgacaaaatcatggagcgtaccttttcctgaatcagaaactgaacatgagggaatgcctgttttctggagattccaagcgacagttgaagaagatggaatcaaaatattcgcacttcaatatatagcttttcatcagacagagcattatgcatggttggttcctgcgcattggattgttaattttaaaccagcaccaaatcagtggttacaggaatggaaacaaaggagaaatagatatgcaattaagaaagtagcaaaaaatgcagaaagatcttttgcattcccaacgaagaaacttgccattgagagtttattgcgccggaagaaacaccatttaatgagaatcaaacaagatttagctgttgtatcaactcttgttgatgggatgaagaatattgatacatcaacaccagatattgaatataactttggacacaaccaagaaacagaaaattgggtattttattag

SEQ ID NO: 7853 - DNA, 240 bp, Escherichia coli
atgccattgcagggtggcctgttgctggctgcccttccgaatctttacttgaacgaattacccgtaaattacgtgacggatggaaacgccttatcgacatacttaatcagccaggagtcccaaaaaatggatcaaacacttatggctatccagactaaattcactatcgccacttttattggcgatgaaaagatgtttcgtgaggccatcgaagcctacagaaaatggaggtcaaaatga

SEQ ID NO: 7854 - DNA, 189 bp, Escherichia coli
atgattccggtagaactggcgaaaactccagaattaagtcgattaaaaagagaatatcacattgctgaggctcgttactggcgtaaagcgggagataaatcaaagaaacaactttgtttatggcaggctcaaagagagcgcatgaatgagcgcgaatttctttccgtcccatccgaattaccattctga

SEQ ID NO: 7855 - DNA, 681 bp, Escherichia coli
atgggaactgcgacattaatactcggtgaatctggcaccggaaaatcaaccagcatgagaaatatcaatccagaggaagcaatacttataaaaccaataggcaagccgctaccatttaaatcaaaagactggcttgcatgggatgccagagcaaaaaaaggaaccgtagttaccactgacaaatgggacgtaatagttgccgtaattaagcgtgctcacgaatacgggaaaagaatcgttattgttgatgacttccagtatgtgatgagcaatgagtttatgcgccgctcagaagaaaaatcgtttgataaatttactgagataggccgccacgcatgggaggtgattaaggctgcacaggatgcacctgatgacctgagagtctattttcttgcacacaccgaagaaacccctatggggcgcgtgaaaatgaaaactatcggcaaaatgctggacgagaaaatcactgtcgaaggcatgtttactatagttcttcgcacccttacccgtgatgaccagttctttttcaccacaaaaaacaacggtgcagacactgttaaatccccaatgggaatgtttgactccaatgagattgataacgatctctctttcgtcgatgccactgtttgtgattactacggcatcaataatgttcatcaaattaaggaaaacgcagcatga

SEQ ID NO: 7856 - DNA, 588 bp, Escherichia coli
atgagcaacgtgatttttacttataacgaagaagcagcactgaccgcagggcaaggtggttttattaacgaaactggcgctcatatcattaccattactgaagcagaactcaagcaatcagaaaaaggcgcaaaatttattgagttttctggcgaatccgacgacggacgtaaaatccaatatcttagcgtctgtgttcagaaaaatgacggaacggaaaacaaatttggcgcaaatgtcgttcacgccatgatggggtgtgccggtattggacaattaacgcaacatatggtttccgccagtaaatttgttgcgcctgaatttcatggaaagaaaatcgggttagtgctccagaaagtattaaccacaaacaaaaagactggcgcagacagctaccagatggaaatacgcatcccgtttattgcacaaacaggtcaaacccttaaagaaaaggcggaaggcaagcaaccagaaactatcgccaacatggttgccagcctcaaagataaagacaatcgctctaaaaacgtaagccagaatcatgcagatgattatggttacagccagaacgattaccctcctttctga

SEQ ID NO: 7857 - DNA, 294 bp, Escherichia coli
atgccagcgcctctgtatggtgcggatgacccgcgccgctgttccggcaattccgtatcggaggtgctggataaattcagaaaaaactacgacctgataatgtcgctaccgcaggaaacgaaagaggaaaaggaatttcgccattgtatatggcttgcagagaaagaagaacgcgagcgaatttaccagacatcaatccgaccattccgcaaagccacatatacccacttccctgaaattgaccctcgcctgcgtaattaccgctcacgctatggcgctatcagtaatgactga

SEQ ID NO: 7858 - DNA, 378 bp, Escherichia coli
atgagcaagattgattatcaaaagcttcgtgaaatcgctgaaaaaacaaaaattgctggtgaagcacctgtaatgcctttcgatcagcgaattaatgcgcttaacgattttatgaagcacttttcgccagatatcgcgctggcattgttggatgaagttaaacgcctagaagacacaaatattgatgccatgtgccgaattgcagaactggagagcaatcgcgcgacgctggcggcggagcatggtattcagattgcaataaatgaactgcttgctctggccccgcgtctggataaacgagcggtggatgcactctctgtggctgtggagcacctgtgtaaactgattaagaaggaggcagtcagtgagcaaaattaa

SEQ ID NO: 7859 - DNA, 597 bp, Escherichia coli
gtgagcaaaattaattgccaggcactgcgtgaggcggcacagaacgcgaaagatttaggtgggattaagaattacaagcgaggcgagcaagctgttgccgaatttgagtccttgataacgccacacattgtgctggggcttctggatgaacgggaaagaaaccagcaatacataaaacgccgtgaccaggagaacgaggaaattgcgctaacggtagggaagctgcgtgttgagctggaagccgcagagaagcgcaacgcaaaattacaaagcgagaatgcatacatccgcaacaggtacaaagaactggacctattaatcgggaaaaacattctggtcatgcaggctgccattatcgaatggcaatcgactggcgacgctaaaagcggactggcatggatttataacacactgtttggcccaggcgaattgccggacgaatctgagaaagatgctcaggcctactttaatcgcaaatatgcaccgattgacgaaaagctcatggagcttcacaagtggttttgggaacaaagtgaagccgagcgcgccgctggaattcgcaccaaaggagacgcaggagagcaaaacgatgaataa

SEQ ID NO: 7860 - DNA, 192 bp, Escherichia coli
atgaataaccgtaaagcaaagatgcttatttcccgtgtatacagacgttgctatcccagccagtggttgagagttagcaatcgccgtatggtgttgtacttatattctggaattgccagagagggaatcaaagataagcgcagcgcggcgcaaaaccgctggaaaaaccccttgcgtatcaaaggagagtga

SEQ ID NO: 7861 - DNA, 126 bp, Escherichia coli
atgttcaataatttgcctggtactggttttttcgttgttttcggtgtcatttgcgccgttattggttgggcagttattgagtccattctttggctgctttctttcattcacataactattggttga

SEQ ID NO: 7862 - DNA, 798 bp, Escherichia coli
atgaccactttcaccgacaaagaactgattaaagaaatcaaagagcgcataggcagcctggacgttcgagacaatattgagcgacggtcgtatgaaattgctctggcatcgctggaacgcgaactgattcgccacgagcatgccaaatggtctgactccacatttggctgcgttggccccattggtccactgaaacacctctcaaaagaggctctggaagccgcagccgaaccagacgatctcagcgagtgggctgatatgcatttcctgttgtgggatgcacagcgccgtgctggcatcagcgatgctgaaattaccgctgctatggaagataaattgaagatcaacatggagcgccagtggcctgaaccaaaagatggtgagcctcgcttgcacattaaagaacccggcaactctccggtaattccggatggtttatccacggtatgcgctgaggcttatcaggttgtaggagttatggcagatgcgcttggtgtattcggtgatgcagcagtacagaaagttctggataacctgtcacagcaaaaacttgttcacagagatgtgctgccgttctcgcttccggtgactccggatggttggataagctgtagtgagcgaatgccggataccaaaacagccgttcttgttgccagggagtttgacaggaaaggtgactggcgaatgaaatgggcgacttacatcccgggtcatcctgacgctaatgatgggtggataattcctggtgcgtcgtggaaaccgtcacactggatgccgctaccagagcctccactttga

SEQ ID NO: 7863 - DNA, 180 bp, Escherichia coli
atgtcttgtccaaaatgcggttctggaaatattgcaaaagaaaaaacaatgcgtggatggtctggtgattatgtgtgctgcgattgcggatacaacgactctaaagacgcatttggagagcgtggtaaaaacgagtttgtcaaaattaataaagatcgcgaaggcaacggaaaaagctaa

SEQ ID NO: 7864 - DNA, 1011 bp, Escherichia coli; identical to SEQ ID NO: 5562

SEQ ID NO: 7865 - DNA, 1164 bp, Escherichia coli
gtggaacagattaattcaaataaaaaacattctgacagaagaaaatattttgctttgttagcggtagttttatttattgcgctttcaggtgcctatgcctattggtcaatggaattaaaagacatgattagtacagatgacgcctatgtcacgggaaatgcagatccaatttctgcacaagtctcaggcagtgtcactgtcgttaatcataaagatacgaactacgttcgacaaggtgacattttagtttcactggataaaactgatgccactatcgcactcaataaagctaaaaataatctggcaaatattgttcggcaaacgaataaactatacttacaggataaacaatacagtgccgaagtcgcttcagcacgtattcagtatcaacaatctttagaagattataaccgtcgtgtgcctttagcgaagcaaggggttatttcaaaagaagcgctggagcataccaaagatacgttaataagtagcaaagcggcattgaatgctgctatccaggcttataaagcgaataaagctttagtaatgaacacaccattaaaccgtcagccacaagtcattgaagctgcagatgcaaccaaagaagcctggttggcgcttaaacgtacggatattaagagtccggttaccggttatattgcccagagaagtgttcaggtcggcgaaacagtgagtcccggacaatcgttaatggctgtcgtaccggcgcgtcaaatgtgggttaatgccaactttaaagaaacacaactcacggatgtacggattggtcaatcggtcaatattatcagcgatctttatggtgaaaatgttgtgtttcatggtcgggtgacagggatcaatatgggaaccggcaatgcgttctccttattacctgcacaaaatgcgacagggaactggatcaaaatcgttcagcgtgtaccggttgaagtttctctggatccaaaagaactcatggaacaccctttgcgcattggtttatcgatgactgcaactattgatacgaagaatgaagacattgccgagatgcccgatctggcttcaaccgtgacgtccatgcctgcttataccagtaaggctttagttatcgataccagtccgatagaaaaagaaattagcaacattatttcgcataatggacaactttaa

SEQ ID NO: 7866 - DNA, 1146 bp, Escherichia coli
atgacaaataatgaatgcaaagggccgtttgaaggcttattagttatcgatatgacgcatgtccttaatgggcctttcggaactcaacttctttgtaatatgggcgcaagggtaattaaagttgagccaccgggtcatggtgatgatacccgcacatttggtccctatgtggatggacagtcactctattacagttttattaatcatggcaaagagagtgtggttcttgatttaaagaatgatcacgataaaagtatatttataaatatgcttaaacaagctgatgtattagctgagaattttcgcccaggtacaatggaaaaactcgggttttcatgggaaaggttacaagaaatcaacccgcgccttatatatgcttcatcgtcaggtttcggacataccggtccgctaaaagatgctcctgcctacgataccatcattcaggcaatgagcgggataatgatggaaacaggataccctgatgctccgccagtgcgcgttggtacctctcttgcggatctctgtggcggtgtttatttattcagtggaatagtgagtgcactttatggccgcgaaaagagccagagaggggcgcatgtcgatatagcgatgtttgatgccactctgagttttctggagcatggactgatggcatatatcgcgactgggaagtcaccacaacgcctgggaaatcgccatccctacatggcaccttttgatgttttcgatactcaggataagccgattacgatttgttgtggtaatgacaagcttttttctgcgttatgccaggcactggagcttacggaactggttaatgatccccgatttagcagcaatattttacgcgtacataaccaggctattcttaaagaatatattgagcggacgttaaaaacgcaggtagctgaagtttggttagccagaatacatgaagttggtgtgcccgtcgcgccgttattaagtgtggctgaggccattaatttaccacaaactcaggcgagaaatatgttgattgaagccgggggaataatgatgccgggtaatccgataaaaatcagcggctgcgcggacccgcatgttatgccgggagcggcaacgctcgaccagcatggggaacaaattcgccaggagttctcatcataa

SEQ ID NO: 7867 - DNA, 318 bp, Escherichia coli
atgaatatcactgctactgttcttcttgcgtttggtatgtcgatggatgcctttgctgcatcaatcggtaaaggtgccaccctccataaaccgaaattttctgaagcattgcgaaccggccttatttttggtgccgtcgaaaccctgacgccgctgatcggctggggaatgggcatgttagccagtcggtttgtccttgaatggaaccactggattgcgtttgtgctgctgatatttctcggcgggcgaatgattattgagggttttcgtggcgcagatgatgaagatgaagaaccgcgccgtcgacacggtttctga

SEQ ID NO: 7868 - DNA, 810 bp, Escherichia coli
atgtcgttttcctgtccactttgccatcagcctcttttgcgtgaaaaaaacagctatatctgtccccagcgacatcagtttgatatggcgaaagaagggtatgtcaatctgctgcccgttcagcataaacggtctcgtgatccgggcgacagcgcggaaatgatgcaagcacgccgcgcattcttagatgccggacattatcagccgctgcgtgatgcaattgtcgcccaactgcgggaatggcttgatgaaaaggccacggcggtgctggatattggctgtggtgaagggtattacacacacgcatttgctgatgcgttgcccgaaatcaccacgtttggcctggatgtctcgaaggtagcgataaaagcggcggcgaaacgctatccgcaggtcactttttgtgtcgcttccagccaccgtttgccgttttccgataccagtatggacgccataatacgtatttacgcgccgtgtaaagcagaagaattagtgcgagtagtgaagcccggcggttgggtcattactgccacgccgggaccgagacacttaatggagctgaaggggctgatttacaatgaagtacatcttcatgcacctcatgcagaacaactgaaaggttttacattacagcagagtgatgagttgtgttatctgatgcgtcttcgcggtgatgaagccgtcgcattattgcagatgacgccgtttgcctggcgtgcgaagcctgaagtctggcaagcactggcagcaaaagaagtgttcgactgccagacggactttaatattcacctctggcagcgttcttattaa

SEQ ID NO: 7869 - DNA, 741 bp, Escherichia coli
atgtttttcaacactaaatatacagcagcattatgcttcgcaacctgtgtagcttttagctcgtcagctatagcagatatcgtaatttccggtacacgcgtaatctataaaagcgaccaaaaaagtgtcaacattcgcctggaaaataaaggcaataacccattacttgttcagagttggctggatactggtgatgacaatgctgagcctggcagtattaccgtcccctttactgcgactccgcccgtatcacgcattgatgcaaaacgcggccaaaccatcaaactgatgtacaccgccagcagcgtcctgccaaaagacagagaaagtgtgttctggtttaacgtactagaagttcctccaaaaccagatgccgcaacagttgcaaatcaaagcctgctgcaattggcatttcgcacacgtataaaactgttctatcgcccggaagcattgaaggggaatccctcagaagcaccattagccctgaaatggtcctggtcaggttccgagggtaaagcagcattacgagtggccaatccaaccccttactacgtctcttttagcagtggtgatttagaagccagcggtaaacgctttccgattgatgtgaaaatgattgcaccattcagtgatgaagtcatgaaagtcactggccttaatggcaaagcaaattctgcaaaagtgcatttttacgccattaatgattttggtggtgccattgaaggtaatgccagtctgtaa

SEQ ID NO: 7870 - DNA, 2601 bp, Escherichia coli
gtgactataaaaccaactaaaaattatcacaatcatctgacccgtatcgccacgttttgcgcgctgctgtattgcaatggtgctttctgtgctgaacttgttgaatatgaccataccttcctgatggggcagaatgcctcaaatattgatctcagccggtatagtgaaggtaaccccgctataccgggtgtgtacgacgttagtgtttatgtcaacgatcaacctgttattaaccaaagcattacatttgtcgcaattgaaggaaaaaagaacgcacaagcctgtatcacacttaaaaatttattgcagttccatattaattctcccgatataaacagcgaaaaagccgttctgcttgcccgggatgaagctctcggcaattgcctcaatttgacggaaattatccctcaggcttccgttcgttatgacgttaacgatcaacgtctggatatagacgttcctcaggcctgggtaatgaaaaattaccaaaactatgttgatccatcgttatgggaaaatggcattaatgcagccatgttgtcatacaacctcaacggatatcatagtgaaacccctggtcgaaaaaatgacagcatttatgctgcttttaacggtgggatgaatttgggtgcatggcggctgcgtgcctcaggcaactacaactggatgaccgattctggcggtaattatgattttaagaatcggtatatacagcgtgatatcgcctcactacgctctcaattcattattggtgagtcttatacgacgggcgaaacctttgattccgtcagtatccgaggcattcgcttatacagtgacagccgcatgttgcctccgacattagccagctttgcgcctatcattcatggcgttgccaataccaacgccaaagtcactattacgcaaggtggctataagatttatgaaacgacggtgccgccaggcgctttcgtcattgatgatctgagtccatcagggtacggcagtgatcttattgttaccatcgaagaatccgatggctcaaagcggacattctcgcaacctttttcatcggtcgttcaaatgttacgccctggcgttggacgttgggatattagcggcggccaggtcttaaaagatgatattcaggatgagcctaatttatttcaggccagctactactacggtctgaataactatctgacgggttataccggtattcagattaccgataataactataccgctggtttgttaggtcttggtctgaatacttcggtcggtgcattttctttcgatgtgactcactccaatgttcgtataccggatgataaaacataccaggggcaaagttatcgtgtttcctggaacaagttattcgaagaaacaagtacttcactgaatatcgcggcctatcgctattcgacacagaattatcttggtcttaatgatgcactaactctgattgatgaagtgaaacatccagaacaagatcttgaaccgaaatccatgcgtaattactcgcgcatgaaaaatcaggttacagtcagtattaaccaaccgttgaaatttgaaaaaaaagattacggttctttttatctttctggtagttggtccgattactgggcttccggacaaaatcgtagcaattactccattggctacagtaacagtgcatcctggggcagctacagcatcagtgcacagcgttcatggaatgaggacggcgacgctgatgatagcgtttatctcagtttcaccattcctattgaaaaattacttggcactgaacaacgtacttcaggtttccagagtatcgatactcaaatgagcagtgactttaagggtaataaccaactcaacgtcagtagcagtggctatagcgataacgctcgcgtcagttatagcgtgaatactggctatacgatgaataaagccagcaaagatttgagttatgttgggggttatgccagctatgaatcaccgtggggaactctggcaggttcagtttctgcaaacagcgataacagtcgtcaagtttctctcagcaccgacggtggttttgtattgcatagtggcggcctgaccttcagtaatgacagttttagcgactccgatacactggcggtagttcaggctccaggtgctcaaggagcgcgaataaattatggcaacagtactatcgatcgatggggttatggtgtcaccagcgctctttctccttatcatgaaaaccgtatcgcgctggatatcaacgatcttgagaacgatgttgaattaaaaagtaccagtgctgtagctgtgcctcgtcagggttctgtcgtttttgctgattttgaaaccgtgcaagggcaatcagccattatgaacatcacacgtagtgatggcaaaaatattccatttgctgcagatatttatgatgaccaaggcaatgtcattggtaatgttggacagggtggacaggcttttgttcgtggtattgaacagcaaggaaatatcaacattaaatggctcgaagaaagtaaacctgtaagttgtcttgcgcattatcaacaaagttcagaagcagaaaaaatagcgcaatctattattctgaatggaattcggtgtcagattcagtaa

SEQ ID NO: 7871 - DNA, 9492 bp, Escherichia coli
atggataacttgcgcttctcttctgcgccgacagcagattccattgatgcatcgatcgctcaacactacccggactgcgaacctgtcgcggttatcggctacgcctgccattttcctgaatcgccggatggcgaaacgttctggcaaaatctgctggaaggtcgtgaatgcagccgacgctttacgcgcgaagagcttctggccgtcggtctggatgccgccatcattgacgatcctcattatgtcaatatcggtacggtgttagacaacgccgactgcttcgacgccaccctgtttggctattcgcgacaggaagcggagtcgatggacccgcagcagcgcctgtttttgcaggcggtctggcatgcgctggaacatgccggttatgcccccggcgccgtcccccataagaccggcgttttcgcctcttcccggatgagtacctaccccggtcgcgaagcattgaacgtgacagaagtcgcgcaggtaaaaggtctgcaatctctgatgggcaatgataaagactatattgccacccgcgccgcgtacaaactcaacctgcacggcccggcgttatcggtacagaccgcctgctccagctcgctggttgccgtgcatctggcctgtgaaagcctgcgcgcaggcgaatccgatatggcggttgccggcggcgtggcgctctctttcccccagcaggcaggctaccgctaccagcccggaatgattttctctcctgatggtcactgtcgtccctttgacgcctcggctgagggcacctgggccggtaacggtctcggctgcgtggtgctgcgtcgcctgagagacgcgctgctgtcaggcgatccgattatctcggtgatcctctccagcgcggtcaacaacgacggcaacagaaaggtcggctataccgccccttccgtcgcagggcaacaagcagtcatcgaagaggcgttaatgctggcggccatcgacgacaggcaggtaggttacattgaaacccacggcaccggcacaccgctgggcgacgcgattgaaattgaagcgttacgcaacgtctatgcgcctcgcccgcaggatcagcgctgtgcgctcggttccgtgaaaagtaacatgggccatctggataccgcggcgggcattgccggactgctgaaaaccgttctggcagtcagtcgcgggcaaattcctcccttactgaattttcacacccccaacccggcgctgaaacttgaagagagcccctttaccataccggtgtcggcacaggcatggcaggacgaaatgcgctatgcgggcgtctcctcctttggtattggcggcaccaactgccatatgatcgtcgcctcgctgcccgacgcgctcaacgcgcgcctccccaatacggatagcggcagaaaaagtaccgcgctgctgctcagcgccgccagcgacagcgcgttgcggcggctggcgacggattatgccggggcgctgagagagaatgcggatgccagctctctggccttcacagccctgcacgcgcgccgtctcgatctccccttccgcctggcggcgccattaaaccgtgaaaccgccgaggcgctcagcgcctgggccggtgagaaatcgggggcgctggtttacagcggccacggcgccagcggcaagcaggtgtggctgtttaccggccagggctcgcactggcgcactatgggtcaaacgatgtaccagcactcaacggcgtttgccgacacgctggatcgctgtttttccgcctgtagcgaaatgctcacgccgtcactgcgcgaagcgatgtttaaccccgattcggcgcagctggacaatatggcctgggcgcagccggcgattgtcgcgtttgaaatcgcgatggcggcgcactggcgtgctgaaggactgaagccagacttcgccattgggcattccgtcggtgaatttgccgctgccgttgtctgcggacactatacgattgaacaggtcatgccactggtttgtcggcgcggcgcgctaatgcagcagtgcgcaagcggcgcgatggtggcggtatttgcagacgaagacacgctgatgccgctggctcgccagtttgagctggatctcgccgccaacaacggtacgcaacatacggtattttccgggccggaagcccgtctcgcggtattttgcgccacgctctcgcagcatgacattaactatcgtcgcctgagcgtaaccggtgcggcgcactccgctttactggagccgatactcgatcggttccaggacgcctgcgcgggactgcacgcggagccggggcaaataccgattatttccacgctcaccgccgacgtcattgatgagtcaacgctcaaccaggcggattactggcgccgacacatgcgccagccggtgcgttttatccagagtattcaggtggcgcatcagctcggcgcccgcgtttttctggagatggggcccgatgcccagttggttgcttgcgggcagcgcgaataccgcgataacgcatactggatagccagcgcccggcgtaacaaagaggcgagcgatgtcctcaatcaggccctgctccagctttacgctgccggcgtcgccctaccgtgggccgacctgctggcgggcgatggacaacgtatcgctgcgccatgttatccgtttgatactgaacgttactggaaagagcgcgtctccccggcctgcgagcctgccgacgcagcgctgtctgccgggctggaggtggcgagtcgcgccgcgacagcgctcgatctccctcgcctggatgcgcttaaacagtgcgccacgcgactgcacgccatctacgtcgatcaactggtacaacgctgtaccggcgatgccattgagaacggcgtggacgccatgaccatcatgcgccgtggacgtctgctgccccgctaccagcagctactccagcgcctgctgaataactgcgtggtcgacggcgattaccgctgcaccgacgggcgatacgtccgcgcccgccccattgaacatcaacagcgggaatcactgctgacggaacttgccggttattgtgaaggttttcaggctattcccgacaccatcgcccgtgccggcgatcggttatatgaaatgatgagcggcgcggaagaaccggtggcgattatcttcccgcaaagcgcctccgacggcgtggaagtgctgtatcaggaattcagctttggccgctatttcaaccaaatcgccgccggggtattacgcggcattgtccagacgcgtcagccccgccagccgttgcgtattcttgaagttggcggcggaaccggcggcaccaccgcgtggctgctgccggaactcaacggcgttccggcactggagtaccatttcaccgatatctcggcgctgttcacccgtcgcgcccagcagaaattcgccgactatgattttgtgaagtatagcgagctggatctcgaaaaagaggcgcagtctcagggtttccaggcacagtcttacgatcttatcgtggcagcgaacgtgattcacgccacccgccatattggccgcacgctcgataatctgcgccccctgctcaagccgggcgggcgcctgctgatgcgcgaaatcacccagccaatgcgtctgtttgacttcgttttcggcccgctggttcttccgctacaggatctcgacgcccgcgaaggtgagttattcctcaccaccgctcagtggcaacaacagtgccgccacgccggattcagcaaagtggcgtggctaccgcaggatggcagcccgaccgccgggatgagcgaacatatcattctcgccacgctgcccggtcaggcggttagcgccgtaacattcaccgcgccatcagaacccgtgttggggcaggcgctgacggataacggtgattatctcgccgactggtctgattgcgcaggtcagcccgaacggtttaacgcccgctggcaggaggcatggcgtctgctttcacagcgtcatggcgacgctctgcctgtggaaccgccccccgtcgccgccccggagtggctggggaaggttcgcttaagctggcaaaacgaagccttttcccgcggtcagatgcgcgttgaagcccgtcatcctgctggcgagtggctgccgctatcgcccgccgcgcctcttcctgcgccgcaaacgcattatcaatggcgctggacgcccctcaacgtcgccagcattgaccatccgcttacctttagcttcagcgccggtacgcttgcgcgcagcgacgagctggcgcaatacggcatcattcacgatccgcacgcctcttcacgactgatgattgttgaggagagcgaggatacgctggccttagcggagaaagtgatagcagcgctcaccgccagcgcagccggattgattgtggttactcgccgcgcgtggcgagtcgaggaaaatgaagcactctctgcatcccatcacgcgctatgggccttgcttcgcgtcgcggccaacgaacagccggaacggttgcttgccgccatcgatctcgccgaaaacaccccgtgggaaacgctgcatcaagggttgagcgcagtctcactatcacagcgctggctcgccgcacggggtgacaccctttggctcccttcactgacgcccaatacgggatgcgccgctgaattaccggcaaacgtgtttaccggcgatagccgctggcatctggtgaccggagcgtttggcggattaggccgccttgccgtgaactggctcagagaaaaaggggcgcgacgcatcgccctgctggcaccgcgcgtggatgagtcatggctacgcgacgtggagggcgggcagacgcgcgtctgccgttgtgatgtgggcgatgccgggcaactggccacggttcttgacgatctggcggccaacggcggcattgccggagcgattcatgccgctggcgtattggctgacgcgcccttgcaggagcttgatgaccaccagctggctgccgttttcgcggtaaaagcgcaggcggcaagccaactgttgcaaaccctgcgcaaccacgacggacgctatcttattctctactcttccgctgccgccaccctcggcgcgccgggtcagagcgcccatgcgctggcctgcggctacctggacgggctggcccagcagttttccacccttgatgcgccgaaaacgctctctgtcgcctggggcgcatggggagaaagcggtcgggcggccacgccggaaatgctggcgacgctcgccagccgaggtatgggcgcgttaagcgatgccgaaggctgctggcacctggaacaggcggtgatgcgcggcgccccgtggcgactggcgatgcgcgtttttaccgacaaaatgcccccgttacaacaggctctgtttaacatcagcgccacagaaaaagccgcaacgccggtcattcctcctgctgatgacaacgcctttaacggcagcctgagcgatgaaacagcggtgatggcatggctgaaaaagcggattgcggttcagctaaggctgagcgatccggcgtcactgcatccaaaccaggatctgttgcaactcggcatggactcgctgctcttccttgaactcagtagcgatattcagcactacctgggtgtacgcatcaatgcggaacgggcgtggcaggatctgtctcctcatggactcacgcagcttatctgttctaagccagaggcgacgcctgccgcttcgcagccggaagtattgcggcacgacgccgacgagcgttatgcgcccttccctttgacgcccattcagcacgcctactggctggggcgaacccacctcattggctatggcggcgtcgcctgtcacgtcctgtttgagtgggataaacgccacgatgagttcgatctcgccatactggagaaagcatggaaccagctcatcgcacgccacgatatgttgcgtatggtggttgatgccgacgggcagcagcgaatcctggcgacaacgccggagtatcacatcccgcgtgacgatctgcgcgcgctttccccggaagaacagcgcatcgcactggaaaaacggcggcatgaactgagctatcgcgttttgcctgccgaccagtggcctctttttgagctggtggtcagcgaaatcgacgattgccattaccgtctgcatatgaacctcgaccttttgcagtttgatgtgcagagttttaaagtcatgatggacgacctggcgcaggtctggcgcggtgaaacgctggcgccgctcgctattaccttccgtgattatgtgatggctgaacaggcgcgccgacagacatcggcatggcacgatgcctgggattactggcaggaaaaactgccgcaactgcccttagcgccagagctgccggtggttgagacgcccccggaaacgccacacttcaccaccttcaaatcgacgatcggcaagacagaatggcaggccgtgaaacagcgctggcagcagcaaggcgtcacaccgtctgccgcgctgctcacgctgtttgccgccacccttgagcgctggagccgtaccacaacatttacgctgaacctgacgttcttcaatcgccagccgatccatccgcaaatcaaccagttgattggtgattttacctccgtcacgctggttgattttaacttctcagcgccggtgacgttgcaagagcagatgcaacagacccaacagcgcctctggcaaaacatggcgcacagtgaaatgaacggtgttgaggtgatccgtgagctgggccgcctgcgcggatcacaacgtcaaccgctgatgccggtagtgtttaccagtatgctggggatgacgctggaaggcatgactatcgatcaggcgatgagccatctgttcggcgaaccctgctatgtattcacgcaaacgccgcaggtctggctggatcatcaggtcatggagagcgacggcgagttgatgtttagctggtactgcatggacaacgtgctggaacccggcgctgccgaggcgatgtttaatgactattgcgccatcctgcaagccgtcatcgccgcccctgaaagcctgaagactctcgccagcggcatcgccaggcacattccccgccgacgctggccgctgaacgcgcaggcggactacgacctgcgggatattgagcaggcgacgctcgaataccccggcatccggcaggccagagcggaaataaccgaacagggcgcgttgacgctggatatcgtgatggccgacgatccttcgccatcagcggcgatgcctgatgagcacgaacttacccaactggcgctgccgttgcctgagcaggcgcagcttgatgagctggaggcgacctggcgctggctggaggcgcgtgcgctacaggggatcgcggctacgctaaatcgtcacggcctgtttaccacgccggagatcgcccatcgctttagcgcagtagtacaggcgctgtccgcgcaagcgtctcaccagcgtctgctgcgccagtggctacagtgtctgacggaaagagagtggttaatccgcgaaggtgaaagctggcgctgccgcattccgctcagcgagattcctgagcctcaggaagcgtgcccgcaaagccaatggagccaggcgctggcgcagtatctggaaacctgcatcgcccggcacgacgccctcttctccgggcagtgttctccgctggaattgctgttcaacgagcagcatcgcgttaccgacgcgctgtatcgcgacaaccccgccagcgcctgtctgaatcgctataccgcgcagattgccgccttgtgcagcgcagaacggattctggaggttggcgccggaaccgcagccactaccgcgccggtgctgaaggccacgcggaacacgcggcagtcgtaccacttcacggacgtctccgcgcagttcctcaatgacgccagagcccgtttccatgatgaatcgcaggtgtcttatgccttgttcgacatcaaccagccgctggatttcaccgcccacccggaggcgggttacgacctgatcgttgccgtcaatgtgctccacgacgccagccatgtcgtccagacgttgcgcagattaaaactgttgctgaaagccggcggacgtttgctgatcgttgaagcgacggagcgaaacagcgtattccagctggcgagcgtgggctttattgagggattaagcggataccgcgatttccgccgccgggatgagaaaccgatgctcacccgctccgcatggcaggaggttctcgttcaggccgggtttgcaaacgagctggcgtggcccgcgcaggaatcgtcgccgctgcgccagcatctgctggtagcgcgttcgcctggcgtaaatcgcccggataaaaaagccgtgagccgctatttacagcagcgctttggcaccggtctgcccattttacagatccggcaaagagaagcgttatttacgccgctgcatgccccgtctgatgcgccgactgagccagccaaacccacgccagttgccggggggaatccggcactggaaaaacaggtggctgaactctggcaatcgctgctgtctcgccccgtggcaaggcatcacgactttttcgaactgggcggcgacagcctgatggcgacaaggatggtcgcgcagctaaaccggagagggattgccagggctaaccttcaggatctgttcagccattcgacgctgagcgacttctgcgcccatctacaggcggctacgtcaggagaggacaacccgatacccctttgccagggcgacggtgaggaaaccctgtttgtcttccacgcttcagacggcgatatcagcgcctggctgccgctcgctagcgcgttgaacaggcgcgttttcggcctgcaagcaaaatcgccgcagcgctttgccacgctcgaccagatgatcgatgagtatgtcgggtgcatccgtcgtcagcagcctcacggcccttatgtgctggcgggttggtcgtatggcgcgtttcttgcggcgggcgccgcacaacgcctgtacgccaaaggcgagcaggttcggatggtgttaatcgatcccgtgtgccgacaggatttctgttgcgaaaaccgggcggccctgctgcgcctgttagccgaaggacaaacgcctctggcactgcccgaacatttcgaccagcagacgcccgacagccagcttgccgactttatcagcctcgctaaaacggccggtatggtgtcgcaaaacctgacgctgcaagcggcagaaacgtggctcgacaacatcgcgcatctgctgcgtttactgactgagcatacgccgggcgaaagcgttccggtcccctgtctcatggtgtatgccgccgggagacccgcgcactggacgccagcagaaaccgagtggcagggctggataaacaacgccgacgacgctgtgattgaagccagccactggcaaatcatgatggaagccccccacgttcaggcttgtgcgcaacacattacgcgctggctttgcgcaacctcaacgcaaccggagaacacgttatga

SEQ ID NO: 7872 - DNA, 6108 bp, Escherichia coli
atgatttctggcgcaccatctcaggattcgctgttaccggacaaccgccacgcggctgattaccaacaattacgcgagcggctcatacaggaactgaatttaacgccgcagcagttacatgaagagagcaacctgatccaggccggcctggattccataagattgatgagatggttacactggtttcgtaaaaatggctaccgccttacccttcgcgagctgtatgccgcccccacgctggcggcatggaaccagttaatgctcagccggtcgccggagaacgcggaagaagaaacgccgcccgacgaatcatcctggccgaacatgaccgaaagtacccccttcccattgacgccagtacagcacgcctacctgacgggccgcatgccggggcagacgcttggcggcgtgggttgccacctgtatcaggagtttgaaggccattgtctgacggcgtcgcagctggagcaggccatcacgaccttgctgcaacgccacccaatgctgcatatcgcctttcgccccgacgggcagcaggtctggctaccgcaaccttactggaacggcgtcaccgttcatgatttacgccataacgacgctgaaagccgccaggcctatctggacgcactgcgccagcgcctgagccaccgtcttttacgcgtggaaatcggcgaaacgtttgattttcagctgacgctcttgccggacaatcgccaccgcctccatgtcaatattgacctgctgattatggatgcctccagctttacgcttttcttcgatgagcttaacgccctgctggccggagaatcgctgccggctatcgacacccgctatgatttccgctcgtatttgctgcaccagcagaagatcaatcaaccactgagagacgacgcgcgcgcttactggctggcgaaagcatcgacgcttccccccgcgcccgtcttgccgctggcctgcgaacccgccacgctacgtgaagtccgtaatacccgacgccgcatgattgtcccggcaacacgctggcacgcctttagcaaccgggccggcgagtatggcgtgacgccgacaatggcactggcgacctgtttttctgccgtgctggctcgctggggcggcctgacgcgtctgctgcttaacatcaccttattcgaccgccagccgctgcacccggcggttggcgcgatgcttgccgacttcaccaatattcttctgctggataccgcctgcgatggcgataccgtcagcaacctggcgcgtaaaaaccagctcacgtttacggaggactgggagcatcgccactggtccggcgtcgaattactccgtgaactcaaacgccagcagcgctacccccacggcgccccggtggtatttaccagcaatctggggcgttccctctacagcagccgcgcagaatcgccgttgggcgagccggaatggggcatctcgcaaacgccgcaggtctggatagatcatctggcgttcgagcatcacggcgaggtctggctacaatgggacagcaacgacgcgctgttccctccggcgttagtcgaaacattgttcgatacctactgccagttgattaaccaactctgcgatgacgaaagcgcctggcaaaagccgttcgcagatatgatgcccgccagccagcgcgcgatacgcgaacgggtcaacgccaccggcgcccccattcccgaaggcttgctgcatgaaggcattttccgtatcgctctgcaacagccgcaggcgctggcggtaacggacatgcgttatcagtggaattatcatgagctgacagactatgcccgccgttgcgcgggcaggttaatcgagtgcggggttcagcccggcgataatgtggctatcacgatgtcgaaaggtgcaggacaacttgttgcggttctggccgtcctgctggctggggcggtttacgttccggtttcgctggatcagcctgccgcacggcgcgagaaaatctacgctgacgccagcgtccggctggtgctcatttgtcagcacgacgccagcgccgggtcagacgatattcccgtccttgcctggcagcaggccattgaggcggagccgatcgccaacccggtagtacgcgcccccacgcaaccggcctacattatctacacctccggctctaccggtacgccgaaaggggtagtcatttctcaccggggagcgcttaacacctgttgcgatatcaatacccgctatcaggttggcccgcatgacagggtgctggccctctccgccctacattttgatttatcggtttacgacatttttggcgtactgcgcgcgggcggcgcgctggtgatggtgatggaaaatcaacggcgcgatcctcacgcatggtgtgagctgatccagcgccatcaggtcacgctctggaacagcgtcccggcgctgttcgatatgctgctgacctggtgtgaaggtttcgccgacgccacgccggaaaacctgcgcgcagtgatgctttccggcgactggatcgggcttgacctccccgcccgttatcgggccttccggccacaaggacaatttatcgcgatgggcggtgccaccgaggcgtctatctggtctaacgcctgcgaaattcacgacgtccccgcccactggcgctccatcccttacggttttccgctaaccaaccaacgctaccgggtggtggatgaacagggccgggactgccctgactgggtgccgggtgaattatggattggcggcattggggtcgcggaaggctatttcaacgatcccctgcgtagcgagcagcaatttttgacgctcccggacgagcgctggtatcgcaccggcgatctcggctgctactggccagatggcacaatcgagttcctcggtcgtcgcgacaagcaggtcaaagtcggaggatatcgcatcgagctgggcgaaatcgaaagcgcgctcagccagctggcgggggtgaaacaagcaaccgttctggcgatcggcgaaaaagaaaaaacgctggcggcatacgttgttcctcagggcgaggctttttgcgttaccgatcatcggaacccggcactgccgcaggcgtggcacacgcttgcgggaacgttgccctgttgcgccatctcgccagagatctccgcagaacaggtagccgatttccttcagcatcgcctgctaaaactgaagccgggtcacaccgctggcgccgatcctctccccctgatgaactcactcgctatccagccgcgctggcaggccgtggtggaacgctggttagcatttctggtgacacaacggcgactgaagcccgctgctgaaggttatcaggtctgcgctggtgaagaacgcgaggatgagcacccgcacttcagcggacatgatttaacgttatcgcaaattcttcgcggtgcccgtaacgaactgtcgttactgaacgacgcgcagtggtcgccggaaagcctggcctttaaccatccggccagcgccccgtatattcaggaactggcgacaatttgccaacagcttgcacagcgcttacagcgcccggtgcgcctgcttgaggtgggaacccgcactggccgcgccgcagaatcgctgttagcacagctcaacgccggacagattgagtatgtcgggcttgagcagagccaggagatgctgctgagcgcccggcagaggctcgccccctggcctggcgcccgtctgtccctctggaatgcagacacgctggcggcgcacgctcactcggcggacattatctggcttaataacgccctgcatcgtctgctgccggaagatcccgggctccttgcgacattacaacagcttgccgttcccggcgcgctgctctacgtgatggagtttcgccagttaacgccgtccgccctactcagcacgctcctgttaaccaatgggcagccggaggccttgctgcataacagcgccgactgggcggcattatttagcgcggccggcttcaactgtcagcatggcgatgaggtcgcggggttacaacgcttcctcgtacaatgtcctgacaggcaggtgcgccgcgatccccgtcaacttcaggccgccctcgccgggcgtctgccggggtggatggtgccgcaacggatcgtcttcctcgacgccttaccgctgacggctaacgggaaaattgactaccaggcgctgaagcgtcgtcatacccctgaagcggaaaacccggccgaagcggatttaccccagggcgacattgaaaaacaggttgccgccctctggcagcaactcttatcaactggcaatgtcaccagagaaaccgacttcttccagcaaggcggcgatagcctgctggcgacccgtctgaccgggcaacttcatcaggcaggttatgaagcgcaattaagcgacctgtttaatcatccccggctggcggattttgccgccacgctgcggaaaaccgacgtcccggtcgaacaaccattcgtccactcccctgaagatcgctaccagccctttgcgcttaccgacgtgcagcaggcttacctagtggggcgtcagccgggctttgccctgggcggcgtcggctcacatttctttgttgaatttgaaattgccgatctggatctcacccggttggagacggtctggaaccgattaatcgcccgccacgatatgctacgcgccgtcgtgcgtgatggacagcaacaggtgctcgaacagacgcctcgctgggtaatacccgcacacatcctccatacgcctgaagaggcgttgcaggtgcgcgaaaaactggcccatcaggtactcaaccccgaagtctggccggtattcgatctccaggtcggttacgttgacgggatgcccgcccgcctgtggctgtgtctggataacctgttacttgacgggctgagcatgcagattctgttggcggagctggagcacggctaccgctacccgcaacagctgcttccgccgctgcccgtcaccttcagggattatctgcaacaaccctcgctacagtcgcccaatccagattctctggcatggtggcaggcgcagcttgatgatattcctccggcgcctgcgttgccgctgcgctgcttgcctcaggaggttgaaacaccgcgcttcgcccgcctgaacggcgcactggacagcacgcgctggcatcggctgaaaaaacgggcggctgacgcccatctcaccccgtcggccgtactgttgtcggtgtggtcaacggttctctctgcatggagtgcacagcctgagttcacgcttaaccttacgcttttcgacaggcgaccgctgcacccgcaaatcaaccagattctgggcgatttcacctcgctgatgctgctgagctggcatcccggcgaaagctggctgcacagcgcgcagtcactacagcagcggctgagccagaacctcaaccaccgcgatgtgtcagccatccgcgtgatgcgtcaactggcgcaacggcaaaacgtgccagccgttccgatgcccgtcgtctttaccagcgcgctgggctttgagcaggataacttcctcgcccggcgtaatctgctcaaaccggtctggggcatctcccagacgccgcaggtctggctcgatcaccagatttatgaatccgaaggcgaactgcgctttaactgggattttgtcgccgcgctgtttcctgccgggcaggtggagcgccagtttgaacagtattgcgcattgctaaaccgaatggccgaggatgaaagcggctggcaactgccgctcgccgcgctggtgcctcccgttaaacacgcagggcaatgcgcagagcgctcaccgcgcgtatgccctgagcactctcagccacacattgcggcggacgagagcaccgtcagcctgatttgcgacgccttccgcgaggtggttggcgagtctgtcacgcccgcagaaaacttctttgaggcgggcgcaacgtcgctgaatctggtgcaactgcacgttttgttacaacgtcacgaattttccaccctgacgttgcttgacctcttcacccacccttctcctgctgccctggccgattatctggccggcgtcgccacggtggagaaaacaaaacgacctcgccctgttcgccgtcgtcagcggcggatatag

SEQ ID NO: 7873 - DNA, 177 bp, Escherichia coli
atgcaggtagccagtgagcatattgcgccacttcaggatgctgtagatctggaaatcgcaacggaggaagaaaactcgttgctggaagcctggaagaagtatcgggtgttgctgaaccgtgttgatacatcaactgcaccggatattgagtggccagaagaaccagacaccgtgtaa

SEQ ID NO: 7874 - DNA, 774 bp, Escherichia coli
atggatattactgagtttccttctggagtaattgaacaccttggctggtatgtataccgattgattgatccgagggacggaagcaccttctatgtagggaaaggcaaaggtaaccgcgtatttgcccatatgcgcggtgaagtggcagcgactgatgatgacgagttactgagcaacaagctaaagcaaattagagaaataaggttagcaggacttgaagttatccatgtcatccatcgacacggaatgactgatgaaaagacggcgtacgaagttgaagcagcacttattgatgcctaccctgggttaacgaatatcatgaatggtgctggcagcaatgaattcggcgccgcgcatgtcaaagagttgatagcaacatatcagcccgaaaccataacatttcatcataaagcattaatgatatccgttaacagaagtgcaaaggattcagagctttatgatgcggttcgatttagctggcgcattaatgtctctcgcgccagccaagcagaaatcattcttgctactgtaagggggatcgttcgaggggttttcattgctgataaatggctcaaatcaacacgtgaaaatttcccttcgttgaaatactgggacgaggatcctgactttgaggcaacacaaagttcgcgctatggttttgaaggtcgagaagccccacctgaaatagcaaatctttatcttggaaaaaaaataccagatgaattaagaaaaaaaggagctatgtccccggtccgttactcacctaatttttga

SEQ ID NO: 7875 - DNA, 1434 bp, Escherichia coli
atgtctgaatttgaagtgttggcacagcatctgctgaaggaagccgaggcggaagaaaagctgcgacaggaaaatgataaaaagcttatcgagaaagtgctggaaatctatgatcagaagtatgtggctgaattactgagaaaagtcggaaaaaatgagtggagccgtgaaaccattaaccgctggattaatggcaagtgtttaccaaaatcgttgacttcagtagaagagtctcttctgcgtaagatgctaccagaaccacctgcaaaccatccggaatatgctttccgcttcattgacttatttgctggaattggagggatacggaaaggttttgaggccattggaggccagtgtgtttttaccagtgaatggaataaagatgctgtgcgtacatacaaggccaactggtttaacgatgaacaggtgcataaattcaatctcgatattcgggaagtcacgctgagtgataaaaccgatgtattggaaacggatgcttatgcatatattgatgagcatgtgccggatcatgatgtgcttcttgcggggttcccgtgccagccatttagccttgctggtgttagtaagaaaaactcacttggtcgtgcgcatggttttgaatgtgaagcacaaggaacacttttttttgacgtggcacgtattatacgagcaaaaaaaccggcaatttttgtgctggaaaatgtcaaaaatctgaagagccatgataagggtaaaactttcaaagtcattatggagacccttgacgagctgggctacgaagttgccgatgctgcagaaatgggaaaaaacgatccaaagattatcgatgggaagcattttttgcctcagcatcgtgaacgcattgttctggtcggatttagacgagatctgaatattcacaaggggtttaccttgcgtgatatcagtcgtttttatccggaacaccgcccatcatttggtgaattgctggagcctgtagtcgacagtaaatatatacttacgccaaaactatgggagtacctttataactacgccaaaaagcatgcagccaaggggaatggttttggctttgggttggtcaatcctgagaataaggaaagcattgcacgcacactttctgccagatatcacaaagacggatcagaaattcttattgatcgtggttgggatatggcaacgggagaggctgactttatgaatgagagtaatcaggctcgtcgaccacgcaggctgactccccgagagtgcgcacgccttatgggatttgaaaaacctggagggaaaccattccgtattccggtttcagatactcagtcatatcggcagttcggtaactcagttgtggtgccagtatttgaagctgttgccagacttctggaaccctatatcctcaaagctgtttctgctgatgctggtaagactgggcagccttga

SEQ ID NO: 7876 - DNA, 1209 bp, Escherichia coli
atgtcggtttttcataactggctgcttgatatcgcaagcgggaattactttatctacatcaaacgcctttctgcaaacgacacaggcgcaacaggtggccatcaggtcggactttatatcccctcaaatatcgttgaaaagctttttccatctatcaatcatactcgcgaactgaacccttcagtcttccttactgcgcatgtatcatcccatgattgccctgatacccaagcacgcgcaatttattacaacaaccgttattttggtaagacccgaaacgaaaaaagaattacgcgctgggggagaggaagtccattacagaaccctgaaaatacaggagccctcacaattcttgctttcaggttaaacgaacagaacactgactgttccgaggtagatatatgggtctgcgtcaatcccgatgaagaggatatcatcgagtctgctattggcgaaatcatacctggaaccctaatttccggccctgccggacaaattttgggcggattgtctcttcagcaaactccagtaaatcataaatatgttattcctgaagactggaagaagcgttttccttctggaaacgaaattattcaatatgctgctggccattatgctaaaaactccaaggatccagatgagcaactgattgaccgtcggcgtgtcgagtatgatatttttctactcgtcgaggaattacatgttcttgatattattaagaaaggattcgattctgtagatgagtttattgcattagccaactctgtcagtaatcgacgtaaatcaagggcaggcaaatcacttgaacttcacctagagaagctttttatcgagcacggactacggcatttctccactcaggcagttactgaaggtaataaaaaaccagatttcctgtttccttcagcagaggcatatcataacgttgaatttcctgtagaaaacttacgtatgctggcagtaaagaccacctgcaaagatcgctggcgtcagatactgaatgaagcagataaaatccatcaggtacatttatttacactgcaagaaggtgtttcttcagcacaataccgagaaatgaaagatgcgggtgtcagactcgttgtaccatcaactttacataaaaaatacccagaagcagttagagaagaattaataacgctcggagcattcattactgagctgatagagctttacgctgaactatcatag

SEQ ID NO: 7877 - DNA, 651 bp, Escherichia coli; identical to SEQ ID NO: 7677

SEQ ID NO: 7878 - DNA, 2376 bp, Escherichia coli
atgcatcgtatagacacgaaaaccgcgcagaaggataagttcggcgcgggtaagaacggttttacccgtggtaacccccagaccggcacgcctgccaccgatctggatgatgactactttgacatgttgcaggaagaactttgcagcgtggtggaggcctccggtgccagtctggagaaggcgcggcacgaccagctgcttaccgcgcttcgtgcgctgctgttaagccgcaaaaatccgtttggcgatatcaaatcggatggcacggtagaacgcgctcttgaaaatctggggttacaggatgtaaaagctggttcattgaacaatctgtacactaaccattcccgtagtgtcttaatggaattgccgttattattcccagactacgatacggtgctggctgctcagtctggtgcggaatatatgtatccacagggatttgtggtgacaggagaaaaaatctatctgagttataccgttgagccaaagcagacacggaacgttatagttcagtacacaacatccggcgaatatgagggatattattatgtcgataatggaggtcgtggcgttgtcagcgaaggccttgtggtgacaacggattacggtggattacgtttgttcatgtcaggagaaaatggattactgaaacagttttcgcttgatggggcaatttctggttcagtattgccgttaattgatgaacatgatgtcggtgtttacaaccagttcagctatcgtaaaaaccgctgggtggttgaacagtcagcgccggaagtgggaggcctgatcacccgcacagtatttgcggtgtatgattttcagtttcgtcggacagggacattcacattaccgttgcatgattccggatatatcacggaaagcacagacagctatgcaagacgcttcacaaaacgtcagggaattgctgtgggagacgattatattgcctgttcttatggtggctattttaataccggggcatcagccggatttaaccagtttcagggggttaaggtcttttctccggatggagtaaagcagcaggaatccattcttcatccccaaaaaatgatagatgtgcttaccaggcagggttttacaccttcgcgcattgagaacgaaggaatttgtatttctgacgacggcggcagtatatattcgctttatatctttctggagcgtgggttaccacaggcttatcagaaaggaattgttctgatgaaagagttcagtactggcagagatgctattgattttcgtcaggcagcctggttgtacacggggtttgatgtgtctcatgccagtattggaacatttccccgtagtgcccaggggttggtaaacccggtgttggggacggtattcacatccctgtctgaaattctggcatatatgcgttctgtgagtcagaaatggttttgtctgcatacaaccacgacaccgattaaagatctgagtggaaatgacattcctgctgacaattatgtgttcatcaagaatgctaataaccagacattctatataacgcaggagtcagctgaaggtggaataaaatataaagctgtcactacagacagcggagaatatggttttcagcgacaaagagaggcaatctggtccaatgttatcaccatcgcacaaaagagcgatggtgaggatcagtttaatcgtattatcgctgcctcgaaaagtggttcaggtaaaaatcaggataaaatactggtagttgaccaacaggcatcagaggggaataacacgctggtaattggcggtggttcatctgtgttcaggtcagcgacagtgattgattttgcaacgaatcaggatgcaaatgccacaggaggagaaaagagatggcgcatagattcatcaggaaatctccgcccttatacagataatacgtattcgatcggttatgcctcatggcgacccgcacaggtttattcagctacgggaagtatcagtacatcagaccggactcataaacaggacgaaacaattctgtcggatgcagaaaaaagggttgccagaaagctgctcgggtatatctgtcggttccgtttcagagatgcagtgtccagcaaagggaacgcagccagatggcatgtaggagtgattgctcaggacgtacagaaggtcttctctgaggaagggctggacgcttttgattacggtattttgtgtcgtgatgaatatccggcggaatatgaagtggtttacgggactcgtatggagcttggtcctgacggactccttacaatggaagaatacgataccggagagcgcaagctggtcagggaggctggtgaaataatgtctgtaaggaatgatgagctgcattatttcatgctggcatcgctgtctggccagtga

SEQ ID NO: 7879 - DNA, 489 bp, Escherichia coli
atgaagaaaatgtttatattgttgttggctgcaggactgccattaaactcctttgcgaagccagtaacggaaaagcagcttgctacatactttatagataacgttaaaacttcagcagataagaatatagatctagatgtaggtggaataaatagactgtctgtaatatgcccagcaaagtcggcaagtggaactcttttaataaaaaaagcatcctacgagtttaataaaggtattggtgtttttgattttgaaaataactcacaatctgcaccattggcttttattgtaccaattagtgaggatgaaaataactttgactcggaaattattggtttctcttttgcatttaaaatgccaagagggcaattctttgttgatgttacgaaatcagggaaggtaaaggctggcgtaaatattagtggtgaaagcggaattacttattcatcatgtagaatagatactcataatgttgattatgatctttaa

SEQ ID NO: 7880 - DNA, 1902 bp, Escherichia coli
atggctgataattttcagctgaaagccatcatcaccgccgttgacaggctgtccggcccgcttaaaggtatgcagcgtcagcttaaggggtttcagaaagaagtctccagccttgctctgggcgctgccggggcgggtactgcaataatgggggcactggcactccctgtaaaatcagccatcacccttgaatcgaagatggctgatgtccgcaaagtggtggacggtctggatacgccggatgcgtttaaggccatgacggagcaggtacgcgctttgtctactgagcttcccatgtctgcagacgggatcgcggaaattgtggcggctggcggtcaggccgggattgcacgtgatgaactgatgcagtttgccactgatgcggtgaagatgggcgtggcctttgataccacggctgaagagtccgggcagatgatggcccagtggcgtactgcgtttaatatgacgcaggatgaagtggctgggctggctgacaaaatcaactaccttggtaataccggcccggcgaatgcgaagaaaatctccgatattgttacgcgtattggtcctttaggtggtgttgcaggtgtggcttccggcgaaatcgcggcaatgggggcaaccattgccgggatgggcgtggagtcagaaattgccgccacagggatcaagaacttcatgctttccctgaccgcgggaaattcagcgacaaaatcgcagaaacaggcattacgttttctgcggatcaatccgaagaaattagctgctgatatgcagaaagatgcccggggaaccatgctgtctgtactggatgcgatggctaaagtgcctaaagaaaaacaggcagctgtgctgaatgccctgttcgggaaagagtctctgggcgcgatagcacctctgctgactaaccttgatttgttgcgtaccaacttcaggcgggttgcggattcccagcagtatggcagttcgatgcagaaggaatatgcttcgagggcagcgacgacggaaaaccagcttttacttctgcaaaatcaacttgatgccatttcttccactctgggggaaacgtttcttcctgaggttaatgatggtcttgaagcggtaaaaccgctccttgaggaagtgagaacgtttgtccgtgaaaacccggagctcgttaagaccattgctaaaatcggtctggctttactgacagtgggggccgctgcaggctctttgtccagaatcatgaaagttctcggcggtgtgatgaatatgacgcctgctaagggtctgattgctcttctggtcggtgccgcttacctcattattgataactgggaaaccgtaggtcctgtcataaaaaaagtctggcgcgtggtggatgaaacggcgcaggcgatggggggatgggaaactgttctgaaagcgatcgccctgtttatgacaaccaaatgggttgctgacgttaccaaatccattaccgcagtgaccagagagatgcgtacgctggggaaggtgtcggcagaaacgggattgatggggaaaggccgcggctttatcgggaaggccggggtatatggttttctgggaaccctgatgtatgagccggttaaagatactctggaaagtgttgttcctgaagatacagttaactggctggataataaagggctgtttctggcttcagactggacgcctttttttgatcgtaaagagtacgagcagtatcaggccagcctgagtcagtacaaacccaatgttccgctgttgaatccatcttcttccatgacacagcacagcgaactgaaagtcacgttcgagaatgctccgccaggcatgaagataattgatgtaccgggcaaagccgatcccctgatgaaaatcacgcacgatgtggggtattctccattcaggcgataa

SEQ ID NO: 7881 - DNA, 324 bp, Escherichia coli
gtgattgagcttgtacttaaaaaaccgatcatcgcccacaaagaaacactgcatgtgctggaaatacgtgagcctacgtatgacgagattgaggcgctggggttccctttctctgtttcgcctgatggtggtatgaaaatggacagtcaggtggcgctgaaatatatcccgcttctggccgggatcccgcgctcgtctgcagcgcagatgacgaagctggatattttcaaggcaggcatgattgtaatgcgtttttttaccggcttggagacggaagagacctccggaagcgattctacaatgtcgcgtggttctggaaattaa

SEQ ID NO: 7882 - DNA, 411 bp, Escherichia coli
atgaaaattcgtcaggcgcagaccagcgcaacctacattctgcctgaccctggcgagctgaataaacgcgtcctgatccgccagcgggtggatatgcccgcggataactttggcgtggagcctcaatacccggttgcgttccgggcatgggcgaaggttatccagaccagtgccaccacctggcaggaaaccgcgcagatcggagacgccatcacccattacatcaccattcgctaccgccgggggatcactgctgattatgaggtggtctgtgatgacagtgtgtaccgggtgaaacgtcagcgcgatctgaacggggcgcggcgctttctgctgctggagtgtacggaactgggcgaatttacgcagagtcacggaggcagcaatggcgactcccttttttcacgttga

SEQ ID NO: 7883 - DNA, 324 bp, Escherichia coli
atgctgttaaaaatggaagagattaagcttcagcttcgtctggatgatgatttctctgatgaagatgagttgcttgaactacttgggaaggccgctcagagtcggacggaaaacttccttaaccgtacgttgtatgcaaccgcagatgacaggcctgcggatgatcctgatgggcttgtgatatctgatgatgtgaagctggcgctcctgctacttgtcagccatttctacgaaaaccgctcaacggttacagacgttgagaaaatggagttgccaatgagctttaactggttggttgctccttatcgccttataccactatga

SEQ ID NO: 7884 - DNA, 1227 bp, Escherichia coli
gtgctgcttgatgctctgttcagaagtaaatcactggagaatccttccaccccgataaccggggatgccgttgatactgatgggctgttccgggcagacgtttatgtcagtcctgaaactgcgatgaaactggctgcggtgtattcctgtatctatgtcctgtcttccagccttgcccagatgccgttgcatgttatgcgcaggcacaatgggaaggttgagcccgcacgcgatcatccggcgttttatctggttcatgatgagcccaatacctggcaaaccagttacaaatggcgcgaactgaagcaacgtcacatccttggctggggaaatgggtatacctgggtgaaacgtaatcgtcgcggtgaagtcatatccctggattgctgtatgccgtgggaaacgacgctgatgaatactggtggccgatacacctacggtttgtacaacgaatatggggcgtttgcgatcagccccgacgatatgatccacatccgtgcgctgggtaataatcagaagatggggcttagtccgattatgcaacatgccgaaacaataggcatggggatgagcggtcagaaatacacagaaagcttcttcagcggtaatgcccgtccggcggggatagtatccgttaaaagcggactcaataaggacagctggggctggcttaaagatcagtggcagaaggcatcgcaggcgttacgcagccaggaaaacaaaaccatgctgctgccagccgatctggattacaaggcactgactgtgtcgccagttgacgctcaaatcattgacatgatgaaactgaaccgttcaatgattgccggtattttcaatattcctgcgcacatgattaatgacctggaaaaagccacattttcgaatattacacagcaggcgattcagtttgttcgctacacgatgatgccctgggttgcgaactgggagcaggagcttaaccgtcgcctgtttacccgtacagaacgggctgccgggtattacgttcgtttcaacctcacggggttgctccgtgggaccccacaggagcgtgcgcagttctatcactttgccattacagatggctggatgagccggaatgaagcgagggcatttgaggacatgaacccggttgatggtctggatgaaatgctggtcagcgtaaatgcagcaaatccgttgaatgattttaaagatacgaaaggcaaagaggaaaagaacgatgaatga

SEQ ID NO: 7885 - DNA, 162 bp, Escherichia coli
atgaaatcaataattgctgatgttatcgggctggctggttttggcctgcttacgtgcgggttttacctgcagtttggtatggctccggctctgatgctgtccggcggtttactgctggtgggcgcactggctatggccagaaggggggcgcgtgctgcttga

SEQ ID NO: 7886 - DNA, 1734 bp, Escherichia coli
atgagccggaaatcttaccccaacgtaaatgctgccaatcagtatgcccgtgatgtcgtgcgcggaaagattgtggcctgccagtttgtgattcaggcctgccagcgccatcttgatgacctgatggaggaaaaaagtaagttgtttcgttaccgcttcgacaaggacctggctgaacgggccgcgaaatttattcagctgttgccgcacaccaagggtgagtgggcattcaagaggatgcccatcacgctggagccgtggcagctctttgtgatctgctgtgcgtttggctgggtcaataaaggctcccggctgcgccgcttcagggaggtgtataccgaaatccctcgtaagaacggcaaatcggcaatctctgccggtgttgccctgtattgttttgcctgtgataacgagtttggcgcggaagtgtattccggtgccacgacagagaaacaggcgtgggaagtctttcgcccggctcgactgatgtgtaaacgcacacccatgctgacggaagcgttcgggattgaggttaacgcctcaaacatgaaccgtccggaggatggcgcgcggtttgaaccgctgatcggtaaccccggtgatggttcatcaccccactgtgcggtggtggatgaatatcacgagcacgccaccgatgcgctttataccacgatgcttaccgggatgggggcgcgacgtcagccactgatgtgggctatcaccaccgccggatacaacattgaggggccgtgctacgacaaacggcgggaagtcatcgagatgctcaacggttcggtacccaacgatgaactgttcgggatcatctataccgttgatgaaggtgatgactggaccgacccgcaggtgctggaaaaagccaatccaaatattggcgtgtcggtttatcgcgaatttttgttaagtcagcagcagcgtgcgaaaaataacgcccgtctggcaaacgtctttaaaacaaaacacctcaatatctgggtgtcggcgcgttcggcgtatttcaacctggtgagctggcagagctgcgaggataaatcattgacccttgagcagttcgaggggcagccgtgcattctggcctttgacctggcgcgtaagctggatatgaacagcatggcgcgactttatacccgcgagattgacggtaaaacgcattactacagtgtggccccgcgtttctgggtaccgtatgacacggtgtacagcgtcgagaaaaatgaagatcgacggacagccgaacgctttcagaaatgggtggaaatgggcgttctgaccgttaccgatggtgcggaggtggattatcgctacatcctcgaggaggccaaagcggcgaacaaaatcagcccggtcagtgagtcacccatcgaccccttcggggcgaccgggttgtcacatgaccttgctgatgaagacctgaaccccatcactatcattcagaactacaccaacatgtccgatccgatgaaagagctggaagcggcgattgaatcggggcgctttcatcatgacggcaatcccatcatgacctggtgtatcggcaacgtggtcggcaaaaccattcctggtaacgatgatgtggtgaagcctgtcaaggagcaggcggaaaacaaaatcgatggtgcggttgcactgattatggcgatcggtcgggcaatgctcaaagaacccgacgatttcctctcatctcttgatccggacgatgctctcttaattctatga

SEQ ID NO: 7887 - DNA, 609 bp, Escherichia coli
atggactatttttacatagcaactaaatcgcaaaatccttgggttaagtataggcctttggcagtaggagatttagctagcacctcattcccaaatcccttttttaattatttcttaagttcaaacatccctccaataccagtaaatgttaacgggcatctaactgactatacgagaatgcagtggctttatggcctaaagacagggtcacttactactaagtgttctgtacaggatatagcggcagttggtcaagaattggctatgcatttttgtaaatatactagagaactgatttgggaagccgttcgagttgaatattacccaaaaaagccttcaagacagaaatgcttatgggtttcacaaggtgaagaaagtctttactattggatttcgcagttgggattgggggacaatcagactgtgttcagagttgagttggatggagttatacatgaggcgagtgatgaacatttgatgaatgacgatataccgtatgatattgccttagaaaaagctcataaatattggagtggtgaaatagttgatccgttaaaaaaggaaatactttttgaaggaaatatgcggattctagagcacattttatag

SEQ ID NO: 7888 - DNA, 468 bp, Escherichia coli
atgagcagagtcaccgcgattatctccgctctggttatctgcatcatcgtctgcctgtcatggtctgttaatcattaccgtgacaacgccatcacctataaagaccagcgcgataaaaaagttagtgagctgcagctggcgaccgccaccattactgacatgcagcagcgccagcgtgatgctgatgcacttgatgctaaatacacgaaggagttagctgatgcgaaagctgaaaatgatgctcttcggcgcaagcttgataatggtggtagggtgctcgtcaaaggcagatgtccagtgccagccacaacaaaagcctccggcaccgccagcgtgggcaatgatgccaccgtcgaactctctccaattgctggacgaaaccttctcggtatcagatccggaattatcagagatcaagcatcattgagagcgttacaggaatatattgacactcagtgtcggaagtaa

SEQ ID NO: 7889 - DNA, 336 bp, Escherichia coli
atgcctcataacccaaatacttggccggactggctggagttgttccagagctggtggcgtggagacaccccgctgggggcagtgattatgtcgatcgttatggctggtttgcgtatcgcctattttggcggaggtggtggctggaagcgaaaaacgctcgagattttgctctgtggtgctctgacgctgacttttgcatccgcgcttgagtatgtcggatggcctaaatcgctttctgttgccattggtggtggcgttgggctgatcggtgttgatgccattcgtggagctgcaatgcgagtaatcggtaataagtttagtggctctaaggagtaa

SEQ ID NO: 7890 - DNA, 1392 bp, Escherichia coli
atgctctgtggaggtctttctttgcgagactttatgcataaactgcataaagttttgcgaccaacgggtccagttgtttctatggaactgttatttggacgtgaaaaacatgtaaccgatctcgaattggcgctttatgctacaggtcggcatgctttcatttatggtgatcgcggagtaggaaagacatccttagcgcaaactgttgcttttaagctgcaggaagatgctgaacctattttggttggctgcgagaaagaatccactttttcaagtgtcatgaatgacattattttgcgaggcacacctcaggataagaaaatcgatacacagggatggagctttggcttaaatgtggctggaattggtggtatcaatgctggtcaaaatcaaaaatataattatccagaactgaaaattgactcagtttctgcagccgttcgggcgttgcaatttttaactaaagttcactcaaagattccttatatagttatcgatgagtttgaccaaattgactctgatgaagaacgacaaaagtttggatcactcattaaacaacttggtgatcaggcgtgtgaagtaaaattaatttttacggggattggtgattctctcgttactttaatcggagggcataaatcaagtgagcgacaaatacatcaggtacatctcgatagtttaccatggaatggtcgttttcaaataattgataatgctttcgatgagtttggcctgactgtcgatgattctgtccgctataaaattgcgggtcttagtgacgggttcccgaactacattcatcttatttgtgaaaaaatccttttaacatgtcaaagctcaatacgtgaatacagctctgttgattacaaccttttcattaaagggttaaatgatgcaattgattcagtctcggaaactttaaggcaaagttacacggatgcaacagagggacgtgatgagtcatataagcatattctttgggctatgtccgatatggctgatttgaccagacataagactcatatatcagaatcgtacgttaaaatttgcaaatcgcttgatgtaacacctttagataaatccacgtttgagcgaaagttcaatgcattgaagaaaccgacatttggatgcatcatcatccctgctttagggaatcgtccatcttggtttcgatttagagaaaacatgcttcgtggttatattcgaatgagagcggagcagcatggacttgagttggacttccaaaattatcgtgttgctggagagcattctgctagggctataggcaaatactctgcttataaaccgttaactaatgttgaaggacgagtagccaagctaagaggtgataacgactggcttgacgacataaaaccaaatcctattaagtga

SEQ ID NO: 7891 - DNA, 579 bp, Escherichia coli
atgattaatccttctgaaattggcaaaacgggtgaaatggttcgtcttcgtactctggaaagtatctgggttcaggggaagctccgcatgtgggggcgttggtcttatatcagtggagggactagcggtaacatgtttaaccaactgcttgtatccagcaaaattaccaaaactgcaatcaacgatgcgctgcgccgtatgaaaaagtcaggcattacgaaaccagagctcgaagcttatttgcgcgaaatactcaacagtaaaaacaaaagtagtctggcgttttgctcggacgatgaaggcctgaagattgacggtgtgatcgcctcggtgctgatgaataatgattaccgttctctatacggtgtgattgttggccggtattgtctgcgtaagagcaagttgcaaatggccaatgagcttcatattaaacatcctgactgggcgctcattacctgtcgccgccgagttgacacatggataagtttggccgaatcgctcctgtacgctccactatgtgatgcgtttggcacaaatagcgacagatttaaattgcaaagtgagcaagaaagtgcttga

SEQ ID NO: 7892 - DNA, 267 bp, Escherichia coli
atgctggcaaaagataagactaacctaaagattgaagaaatacggatgcataaacatcatgagattcacagggttaagcctcttatgccagctttatgtcgtatccgtcagggaaaaaaagttatcaattgggagacgcatagtctaactgttgataataatcagataatattatttccctgtggaggtaatgactccaacttattgatagtgttttatgttcagataatgcccgatgactttgtcatgcagctccaccgattttga

SEQ ID NO: 7893 - DNA, 1536 bp, Escherichia coli; identical to SEQ ID NO: 5172

SEQ ID NO: 7894 - DNA, 198 bp, Escherichia coli
atgaaatcattaaccacggaaacagcactggatattctgattgcgtggctgcaggacaatatcgactgtgaatccgggattatcttcgacaacgatgaggataagacggattcagcagcactgttgccctgcatcgaacaggcccgggaggatgtccgtgctgttcgtcatctgcagcttctgcaccagaaccggtga

SEQ ID NO: 7895 - DNA, 435 bp, Escherichia coli
atggggcgcattgtcgttgacgtcgatggtgttaatctcagtgaactgattaacaaggtctctgaaaacggttatttactccgcgtggtcgataaatccgaccaacacgcaaccagtacaccaccaccgttaacaacccttacctgcatacgttgcagcaccgcacatatcacggaaacggacaacgcctggctgtactcgctgtcacaccagactaatgacgacggcgaatcagaatggattcattttacaggcagcggctatctgttacgtaccgatgcgtggtcatacccggttctgcggcttaagcgcctgggcctgtcaaaaacgttccgttgtctggttgtcacacttacccgacgttatggcgtcagtctcattcatctggatgccagcgctgaatgcctgccgggtttacccactttcaactggtaa

SEQ ID NO: 7896 - DNA, 3264 bp, Escherichia coli; identical to SEQ ID NO: 7527

SEQ ID NO: 7897 - DNA, 1572 bp, Escherichia coli
atggacacctcacttgctcatgagaacgcccgcctgcgggcactgttgcagacgcaacaggacaccatccgccagatggctgaatacaaccgcctgctctcacagcgggtggcggcttatgcttccgaaatcaaccggctgaaggcgctggttgcgaaactgcaacgtatgcagttcggtaaaagctcagaaaaacttcgtgcaaaaaccgaacggcagatacaggaagcacaggagcgaatcagcgcacttcaggaagaaatggcggaaacgctgggtgagcaatatgacccggtactgccatccgccctgcgccagtcttcagcccgtaaaccgttaccggcctcacttccccgtgaaacccgggttatccggccggaagaggaatgctgtcctgcctgtggtggtgaactcagttctctgggatgtgatgtgtcagagcaactggagcttatcagcagcgcctttaaggttatcgaaacacaacgtccgaaacaggcctgttgccggtgcgaccatatcgtgcaggcaccagtaccttcaaaacccattgcacgcagttatgccggagcggggcttctggcccatgttgtcaccgggaaatatgcagaccatctgccgttataccgccagtcagaaatataccgtcgtcagggagtggagctgagccgtgccacactggggcgctggacaggtgctgttgctgaactgctggagccgctgtatgacgtcctgcgccagtatgtgctgatgcccggtaaagtccatgctgatgatatccccgtcccggtccaggagccgggcagcggtaaaacccggacagcccggctgtgggtctacgtccgtgatgaccgtaacgccggttcacagatgcccccggcggtctggttcgcgtacagtccggaccggaaaggtatccatccacaaaattacctggccggttacagcggtgtgcttcaggccgatgcttacggtggttaccgggcgttatacgaatccggcagaataacggaagccgcgtgtatggctcatgcccggagaaaaatccacgatgtgcatgcaagagcgcccacctacatcaccacggaagccctgcagcgtatcggtgaactgtatgccatcgaggcagaggtccggggctgttcagcagaacagcgtctggcggcaagaaaagccagagccgcgccactgatgcagtcactgtatgactggatacagcaacagatgaaaacactgtcgcgtcactcagatacggcaaaagcgttcgcatacctgctgaaacagtgggatgcactgaacgtgtactgcagtaatggctgggtggaaatcgacaacaacatcgcagagaacgccttacggggagtggccgtaggccggaaaaactggatgttcgcgggttccgacagcggtggtgaacatgcggcggtgttgtactcgctgatcggcacatgccgtctgaacaatgtggagccagaaaagtggctgcgttacgtcattgaacatatccaggactggccggcaaaccgggtacgcgatctgttgccctggaaagttgatctgagctctcagtaa

SEQ ID NO: 7898 - DNA, 348 bp, Escherichia coli
atgatatctctccctgcaggttcgcgtatctggctggttgcaggtatcaccgatatgcgaaatggctttaacggcctggcatcaaaagttcagaacgtcctgaaggatgacccgttctccggacacctgttcatcttccgcggacgccggggtgaccagataaaagtgttgtgggctgacagtgacggactgtgcctcttcaccaaacgcctggagcggggccgcttcgtctggccagtcacccgtgacggcaaggtgcaccttactccggctcagttatccatgcttcttgaaggtatcaactggaagcacccgaaacgaacggaacgcgctggaatccgcatataa

SEQ ID NO: 7899 - DNA, 648 bp, Escherichia coli
atgaaacaccggacctggatcactgaagctttacgtcttcactttgaagaacatttaccccgggttgtggccgggcgtcgcctgggtgtaccaaaatcaacagtttgtagtatgttcgtgcgctttcggagagctggcctttcgtggcctttgcccgcaggcatgtcggagcaggaacttgatgcctgcctttacggacaattttccacggtaccagtcgtacgtcctgaaagcaccgttatatccgaagcccccgtggtaaaaaaacgtccccggcggcccaacttcccttatgagtttaaaatcgccttagtggagcagtcactgcagcccggagcctgtgtggcgcagatcgcccgggaaaacggaatcaacgataacctgctcttcaactggcgccatcaataccggaaaggtggcctgctgccttccggaaaaaatatgccggcactgcttcccgtgacgttaacgccggagccggataataaaatcccggcccccgcacaggaaccagagcagataaatacaccgtccgacagtctgtgttgtgagctggttctgccggccggaactctcaggcttaaaggtaaactgacgccggcgttattacagacacttatccgcgaaataaaagggagcagccactga

SEQ ID NO: 7900 - DNA, 252 bp, Escherichia coli
atggattcagaaacagttcacggaacggtcaggtctggtgctggcagcgtgccggaagccgggccgttattctggaggtcagtggacgctggatggaagcggcagaaggatggcgacgggctgcctgtgttgcgccccggacagactggcagcagtttgcccgaaaaagggctgaacactgccaccggcgctgccggggaagggtgtaacgaaaaaagcagccttcattactccagggattcagaaggctga

SEQ ID NO: 7901 - DNA, 747 bp, Escherichia coli
atgacaacggataacacgaacacgatacgtaacgattcactggctgcacggaccgatacctggttgcagtcatttctggtctggtcacccggacagcgggatatcatcaaaacggtggcactggtgctgatggtactggaccacatcaatctgatattccagctgaagcaggaatggatgtttctggtcgggcgtggggcctttccgctttttgccctggtgtgggggctgaatctgtcccgtcatgcgcatatccggcaaccggccattaaccggctgtggggatggggaattattgcccagttcgcatattatctggcaggctttccctggtatgaggggaatatcctgtttgcctttgcagtggtggcacaggtgctgacgtggtgtgaaacgcgcagtgggtggcgtacagcagcggccattctcctgatggccctgtgggggcctttgtccggcaccagttacggcattgccgggctgctgatgctggcagtcagccaccggctgtaccgggcggaagacagagcggaacgtctggcgctggtcgcctgcctgctggctgttattccggcgcttaaccttgccaccagtgatgcagcggcggtggctggtcttgtgatgacggtgctgaccgttggtctggtgtcgtgtgcaggaaaatcattaccccgtttctggcccggagactttttcccgacgttctatgcctgtcatctggctgtgctgggcgttctggcgctgtga

SEQ ID NO: 7902 - DNA, 510 bp, Escherichia coli
atgatcactcactatgatataaaaatggagatgcaaaaactaaaggaggtactctctgtagagggtgttaatatcccatcattattacaagtcataaagccgggaacttatgtgtttttatgggttttattatggccaacttttctgcgtttagtatcggttaaaagtgatgtcagggatgttggctttgatatatgtgctagtggaatgatggggttcctgctttttgtggctattacaaatggaatgatgttataccttgcgattcctgatagtttcagaaaggattcaaaaataataaattttatgtattctaagagtaagacatatattttgttgtttttgattgttttttctatggtttcgtttatgcattctatcttatatgtttttgcactaatgattacattcatattatttttcttggtgtataccatagatataaatcgttataatctctcagcaatagtctcagtaataggactgttcaaaaaagagtctgttagttaa

SEQ ID NO: 7903 - DNA, 393 bp, Escherichia coli
atgacaaaaaacaaaaagaatcaggaattcaaaatcagaaaaattagacggaatattgagtatagtttcagaggttctgacagatatttttatttgtttattgttttccttgttgccggaattgttttatgggctgttatgcacgttattttcgatgtctgtattgattcgtggatggccgacccgaaattacttaatttccagtatatgtggaatgttctgatgaaagtcattccgtttacgttatgggcgctggcagcaaggtttcttgttacattttttctgtccccaatgtgcgaattaatattcggaaatatcatgatattcctgctgaaacgccgtatgcgccgggagaacacattaagggagggcaagaatgatgccacgcattaa

SEQ ID NO: 7904 - DNA, 207 bp, Escherichia coli
atgcctgtctgcccgcgccgggaaaaaacgcgcgccggtggcgctgaaaggggccgcgctcacgcgccgcccctttcattacgcggacgttctgatgggggcttctgtttcttcatgcctgtcatttgtctgttactgatgttgttgttcctgctactgctactgctactgctactgctactgttcttctttttcctgctgctctga

SEQ ID NO: 7905 - DNA, 213 bp, Escherichia coli
atgaatccgccgttcagccacgggcaggatatccggcatatcctgcgggccttttccctgttgcgtccgggtggcgtgctggtcgccgtctgtctcaacggaccacgccagcaggagaagctgttaccgttttctgacgtccgcgaggagctgccgcgcggcacgtttgcttataccgatgtcccgacgatgattattcgtctgcgtgcctga

SEQ ID NO: 7906 - DNA, 357 bp, Escherichia coli
atgcacagtcagttaagagaacgtatccggctgatgcgcgcaaggctggataacgccgcgccggttgctgaaatccgggctgaatctcagctttttgtgactcctgccccggtctgtgatcgcctggtgatgctggcggagatcagcaaccgtgattacattctggaaccctctgccggcaccggggccatactgcgggcgattcgggataccgcgccgggggccatgtgtgatgcggtggaaatcaacagcgggctggttcggtatctgcgggaaaattttaacggtgtcagggggttcagtgtggcgacttcatggaatggcagccggtgcagtattacagccgggttatcatga

SEQ ID NO: 7907 - DNA, 231 bp, Escherichia coli
atgacagtaagtattgtttcaccttccgcagcggctgtaaagccccgccgtcatccccgtttcagacgcgaagacatccccgcgccggaaattgaccccgtgctgaaagccttcgggcgacacattgcccggagttttcaccgggggcgtggtgtacacatccccgccatgaaaaacacggccttcgggcaggtgctccgcacactcgaactgaaacgcgcttttaactga

SEQ ID NO: 7908 - DNA, 192 bp, Escherichia coli
atgaatatcagcacagaaacccgcgaaattctgcgcaattacaaagccgtgattaatgcgcgacgtcgtgaaatggggcagaaaccgctcaccaccgcgcagattgttgatgaaatctgcgattttgtggcgaatcagcaggctgttttcctgggcggtcactacatcttacagggcagcagaaacaggtga

SEQ ID NO: 7909 - DNA, 423 bp, Escherichia coli
atgtactgtactgttaaagaaatcatccgcgatgtactggatacagacgtgccggacagtgaatgcgtttttgccgtggtgctgacccgtggggatgtgcgccacatagcccaggactggaacctgtcagacgatgagctggaaaccgtcatgcagcggctggacgatgcctttgaatatggtgcggatgtcagcattgttcacgacgttgttcgtgagctgatggaagaaaagcgtgccagccgtcaggtgacagttccggcggtgatgctggaaaaagtgatggcgctggcaggcagtgaaatgaagcgcctgtatgccgtcgggagtgagaacgggggcgacggtgatgcgttcgtcagggaggaacgcgaagcaatggacgttgtgttacaggcgctggacggggagcacatgtcatga

SEQ ID NO: 7910 - DNA, 771 bp, Escherichia coli
atgaacgaaacgctgaatgcactgatttatcgccacgccagcaacctgctgctggcgcagggctggccggaagagacggatgttgaccagcgtaatccgaagtatccgggctggatcagcatttacgtgcggctggatgtgccccggctggcgacgttacttatcaaccgtcacggcggcgtactgccgccgctcctggcctccgccattcagaaactgaccggaaccggggcggaactggtactgtccggcagtcagtggcagtcgctgccggtacttccggcagacggaacacaggtgtttttcccgtatgccggagaatggctgaccgaagacgaaatcagggcagttcttgatgcagtgcgcaatgcagtacgaagcatctgttaccaagtggcagaagatgcccggcgtatccgggcggcgctgaccaccaccggtcagacgttgctgacccgccagacgcgccgctttcgtctggttgtgaaggaaagcgattacccctgctggcttgatgaagatgacgaaaatctgcccgtggtgctcgatgccattctgaaccgtggcgctcgtttttcgtcggtggaaatgtatctggtcagtgagtgtgtggagcatatcctgtccagtgggctggcctgcgatgtgctgcgtatacctgatgaaccgtcccgtcgctggtttgaccgggatattctgcgggagatggtcctggaagcccggactgaaatccgcagcatggcggatgcactggcgaaaatccggaaatga

SEQ ID NO: 7911 - DNA, 927 bp, Escherichia coli
atgccaaactggtgctcgaatcgtatgtatttttctggtgaaccggcacagatcgctgagattaaacgactggccagcggtgcagtcacaccactttatcgccgcgccacaaatgaaggtattcagctgtttctggccggaagtgccggacttctgcagaccactgaagatgtgcggtttgaaccatgccccggactgacggctgccgggcgtggcgttgtatcgccggagaatatcgcgttcacccgctggctgacacacctgcaggacggtgtactgctggatgagcaaaactgcctgatgctgcatgaactctggctgcagagcggtactggacagcgtcgctgggaaggattaccggacgatgtcagggataccatcaccgcacttttcaccgcaaaaagaggtgactggtgtggcttctggagtaacgaggctgtatcggtgtggtggaaccgtctgtgtgacaacgtactgccggaaaaaaccatgccgtttgacctgctgacggttctgcccacccgcctggatgttgaagtgaatggctttaacggtggtgttctgaacggtgttctttctgcatatcactggtatacggaacagtatggcgtgaagtggcctgtggggtatgaggtgaatatcagcagtcagggagacaacttcattcaggtggatttcgacacgccgtggtgtcagccggaaagcgacgttattgcagaattaagccgccgtttcagctgcacaatggagcactggtatgccgaacagggctgcaatttctgtggctggcagcgatatgagcgtggcgagcttgttgatgtgctgtggggggagctggaatggtcttccccgacagatgacgatgagctgccggaagtcaccggacctgcgtggatagtcgacaatgtggcgcattatggcggatga

SEQ ID NO: 7912 - DNA, 756 bp, Escherichia coli
atggcggaaacagcggttatcaatcacaagaaacgtaaaaatagcccgcgaatcgtccagtcaaacgacctcactgaggcggcatatagtctctcccgggatcaaaaacgtatgctgtatctgttcgttgaccagatcagaaaatctgatggcaccctacaggaacatgacggtatctgcgagatccatgttgctaaatatgctgaaatattcggattgacctctgcggaagccagtaaggatatacggcaggcattgaagagtttcgcggggaaggaagtggttttttatcgccctgaagaggatgccggcgatgaaaaaggctatgaatcttttccctggtttatcaaacgtgcgcacagtccatccagagggctttacagtgtacatatcaacccatatctcattcccttctttatcgggttacagaaccggtttacgcagtttcggcttagtgaaacaaaagaaatcaccaatccgtatgccatgcgtttatacgaatccctgtgtcagtatcgtaagccggatggctcaggcatcgtctctctgaaaatcgactggatcatagagcgttaccagctgcctcaaagttaccagcgtatgcctgacttccgccgccgcttcctgcaggtctgtgttaatgagatcaacagcagaactccaatgcgcctctcatacattgagaaaaagaaaggccgccagacgactcatatcgtattttccttccgcgatatcacttccatgacgacaggatag

SEQ ID NO: 7913 - DNA, 285 bp, Escherichia coli
atgcatatccggaatgatgttcattgcaccgggtgtgtgcatatgtttagtataggcagatgtcaggcatatggatatgttcagcctatgttattttctctctttccccgtgcagatccggtttctggtggttccggatccgcggatccttcgctgccgcccgctggtccgctttcacaggatgtggtgtcccgctccgctgacatgacactgtatgttgtgtttcttcccgtgttcccgagccagtcatcagcggcagaaaagatcgcttcgcttattcactga

SEQ ID NO: 7914 - DNA, 1566 bp, Escherichia coli; identical to SEQ ID NO: 7664

SEQ ID NO: 7915 - DNA, 177 bp, Escherichia coli; identical to SEQ ID NO: 3601

SEQ ID NO: 7916 - DNA, 153 bp, Escherichia coli; identical to SEQ ID NO: 7614

SEQ ID NO: 7917 - DNA, 468 bp, Escherichia coli
atgagcagagtaaccgcgattatctccgctctggttatctgcatcatcgtctgcctgtcgtgggcggtcaatcattaccgtgataacgccatcgcctacaaagaacagcgggataaaaaagtcagtgagctgaagcaggcgaccgccaccattactgacatgcagcaacgccagcgtgctgctgatgtactcgatgctaaatacacgaaggagttggctaatgcgaaagctgaaaatgatgctcttcggcgcaagcttgataatggtggtcgggtgctcgtcaaaggaaaatgctctgtgccatccgcagccgaaacttccagcgcctccggcatgggcaatgatgccaccgtcgaactctctccagttgctggacgaaacgttctcggtatccgggacggaatcatcagagaccagacagcactgagaacgcttcaggaatatatcaggacgcaatgccttcgatga

SEQ ID NO: 7918 - DNA, 498 bp, Escherichia coli
atgcctccatcattacgaaaagcagttgctgctgctattggtggcggagcaattgctatagcatcagtgttaatcactggcccaagtggtgacgatggcctggaaggtgtcagctacataccatacaaagatatcgttggcgtatggactgtatgtcacggacacaccggaaaagacatcatgctcggtaaaacgtataccgaagcagaatgcaaagccctcctgaataaagaccttgccacggttgccagacaaattaacccgtacatcaaagtcgatataccggaaacaacgcgcggcgctctttactcgttcgtctacaacgtgggtgctggcaatttcagaacatcgacgcttcttcgcaaaataaaccagggcgatatcaaaggcgcatgtgaccagctacgtcgctggatatacgctggcggtaagcaatggaaaggcctgatgactcgtcgtgagattgagcgtgaagtctgtttgtgggggcaacaatga

SEQ ID NO: 7919 - DNA, 216 bp, Escherichia coli
atgaaatccatggataagttaacaacgggtgtcgcctatggcacctcagcaggtagtgccgggtactggtttttacagttgctcgataaagtcacgccctcacagtgggcggcaataggtgtgctgggtagtctcgtatttggcctgctgacgtacctgacaaacctttatttcaagattaaagaagataagcgcaaggctgcgagaggtgaataa

SEQ ID NO: 7920 - DNA, 1053 bp, Escherichia coli
atgaaaaatactgtaaaaataaacagtgttgatttaatcaacgctgattgcctgcattttattcagtccctgcctgatgattccattgacctgattgttaccgatccgccttacttcaaggtgaaacccaacggttgggacaatcagtggaaaggggacgaagattaccttaagtggctggaccactgtctggcccagttctggcgggtgttgaaacctgccggaagcctttacctgttctgtgggcatcgcctggcatctgatattgagatcatgatgcgtgaacgtttcaacgtgcttaaccatatcatctgggcgaagccgtccggacgttggaatgggtgtaataaagaaagtctgcgcgcatattttcctgccacagagcgcgttctgtttgctgaacattaccaggggccatatcgtggcaaaagtgacggctatgcggcaaaagaaagggaactcaaacagcacataatggcaccgctgatatcgtatttcagtgatgctcgtgccgaactgggtataacggcaaaacaaattgccgaagccacaggtaagaaaaatatggtttcccactggtttggtgccagtcagtggcagttgccgaatgaggctgactatcggaagttacaggcactgttttcccgtatagcggcagagaagtttcaggaacaacaactggaacaaccacaccaccagctggtggcatcttatgattcactgaatcgcaaatattctgaattgctggatgagtttaaatctctccggcgctatttctccgtatcagtctccgtgccttataccgatgtctggatgcataaacccgttcagttctacccgggtaaacatccgtgtgagaaaccggcggatatgctcaggcaaataatcaatgccagtagtcgacctggtgatctggttgctgatttttttatgggatccggttccacaataaaagcagcaatggcgctggggcgtcgggccttaggtgttgagcttgagtcagagcggtttaaccagacagtgaaagagataaacgagctggtggggaaataa

SEQ ID NO: 7921 - DNA, 927 bp, Escherichia coli
atgaaagttagaagcataggatttacaataaataacaataacaaaaatattaataccgttgacgtaatgaatgcttttatcaacgcatcaaacagagaacacagtcgcacagactatactcgtaaaattctcatttcggatgtgaatgatttctattatggattagttgtcacattcagaaaccaaaaaaagaactgtaagtcgcaatttgttgatggtaaattccagcttaaaattgaagatcttcaaggaagtgacaaacttgctaatttcaactttttcttaattaaaaaatctaatctttctggtctctatatgtatcaccacggttcatgcagtctgaacactctcttttctcatttagaaacaataagtaatgaatttatcagaaatcaaaataaagaagaaataaaaaaacttggtgataaaccaaaacaaaaagaagtaactgcaataaataaaaaatacaaagaaagactgactttcagccttatgacaaataaaaacaacattcagagtgttttatgtcaattcaaagagattaaaagcacaagctttaaatttaattatatagattttaaaggtggaccaatgactgcgcttgaacaatttgttaacaccaccacaatagatatgaattttaattctagcgacagaacaaaagtgcaacaactatctcagaatctttcaaatatttataattctatgagtggagttgctaaagcacaggttattgcagtaaaccatgcaggaatagaaaaaaccattgattttatgaactgccctgttttttttgaaacatacgatttcgatataattgccgataaagtcaatggattgacaaacgataattatacaacaaaccctgtttttgatatgataaaagaagaaatgctgaacgggacgaataaaaatgcctttatatga

SEQ ID NO: 7922 - DNA, 549 bp, Escherichia coli
atgcctttatatgaatggctaataaataaaagattgaggtatcagtacattacactgcttgcattctcgatcctggcattgcttgcactttacctattgtacagaaacacacctaaagtaagtgttaacttttttgatttttatcataaaaacttacgaggctatctcttctccggttttatttccgtgggttcatttttattgagcctgcatacctttgtcataataaatttacgcgataaggtttttgcaactcaggaatataaggaaatttatagcattgccactggtatacctattgacaaaatcaatgatagtgtactttataaacctttagacaatttatcctcatttattaatacatcaatattatgttctatcacaacagcaattgcacaattcactattggactttcaactaatttatatgcatgcttattttgcgtatggcttgcaatactaacggtatttcttttattacattgcctcatcataatcagacaaaatattaaaattttattaaagcaacagagaaaaaaaggggggtaa

SEQ ID NO: 7923 - DNA, 342 bp, Escherichia coli
atgcgtgatatgtatgaagtattggaccgctggggtgcatgggctgcagcagataacagtggtgtggactggcagcctgttgctgcagggtttaaaggtttactacctcatggaaagaaaacacgccaacaatgcgatgatgatgaaggaatcatgattgacagctgtgttgcgcgattgcggaaatataagcccgaagagtatgagttggttattgctcattttgttatcggcatctcactaagagctattgcaaagaagcagaagtgttctgatgggacaataagaaaagagttgcaaacagctcttggttttctggatggtgtgctttcaatgttgtaa

SEQ ID NO: 7924 - DNA, 579 bp, Escherichia coli
atggatacggaaaatatctatcttccgcctcttgctcgtggcaataaccataattacgatggaaaaagcgttgtcgaaattagaaaacttgatattagtaaagagtcctggccatttaattatgtgacagaaacatgcagagaattcaatggtattacaacaacaggacgtatgctctatcgaaacttgaaaatcacctcagctttagacgaaatatatggtggtatatgtaaaaaggcgcatgctgccacagagttagcaaaaggattacggctaaatttatttatgaaaggccctttcgatcctgttgaggactatacagttcatgaaataacattaggccctggttgcaatgttcctggttatgccggaaccacgataggatatatttcaacccttccagcttctcaggcaaaaagatggaccaatgagcagccaaggattgatatctatattgatcagataatgacggtaacaggggtagcaaattcttccggattcgcccttgccgcattacttaatgctaatattgagttgggtaatgacccaataattggtatagaagcctatcccgggtga

SEQ ID NO: 7925 - DNA, 195 bp, Escherichia coli
atggtgttgtgtccgttaggtgcggttaatcaaatttttgccggatgcggcgtgaacgccttatccggcctacaacgggcaattttacggcacccgttaatctcaaactataccattagcactggaagttggcacgtacaggtgggcaaaaaaacgaaaactggtcaaccaaatatcagtttgattgaccagtaa

SEQ ID NO: 7926 - DNA, 354 bp, Escherichia coli; identical to SEQ ID NO: 7585

SEQ ID NO: 7927 - DNA, 399 bp, Escherichia coli; identical to SEQ ID NO: 7586

SEQ ID NO: 7928 - DNA, 342 bp, Escherichia coli; identical to SEQ ID NO: 7558

SEQ ID NO: 7929 - DNA, 495 bp, Escherichia coli; identical to SEQ ID NO: 7575

SEQ ID NO: 7930 - DNA, 567 bp, Escherichia coli
atgcctaaatcttacacaccaaactggttttttaccgctttacttgacaatcacatcaatcaaatgatggcacgctattcctgcctgcgggccttacggatggatttcttctacaggaaagatacgcccgatttcttacaacctgatcatcgctggcttgaattgcagttgcgtatgctgctggagcaggtggaacaatttgaaaatatcgttggtttcttctgggtgattgaatggacggctgatcatggttttcatgcgcatgtcgttttctggatcgatcgtcagagggttaaaaaaatatatccctttgcggagcggatagcggaatgctggcaggcaattacgtataactgtggttcggcgcaccgctgtacatatcagccgcattatgcatacaacatcaacattcctgtgcgccacaacgatcctgaaagcatcgataatattcgcggtgccctgcattatctggcgaaagaagagcaaaaagacgggctgtgtgcttacggctgcaatgaagttcctgaacgtcctgctgcagggcgtcctcgtaagcctcacttctga

SEQ ID NO: 7931 - DNA, 561 bp, Escherichia coli
atgaatgctattccttatttcgactatagcctggcacccttctggccatcttatcagaacaaagtcatcggcgtccttgagcgtgcgctgcgtgagcagtccggctcacggatacggcggatcctgcttcgtctgccgtgggaacatgacaacgccttcaacagcagacagacctggtttggtatggattttatcgaaaccgtcagtgcgctgatgaatgcgaaacccggacgcgacctttgctggctcctgacccgtcatccggaaaagccggaataccacgtggtgctgtgcgtcagacaggagtatttcgacggccccgaactggatcggttgatactggatgcctggagtaatgtgctgggtttcgcgtcaccaggtgaagcaaagccgtaccagaagcagatcacccgggatgtggtactggatcgccggtcaccggactgcgaagccctgtttaaggaccttatctgggcgttcagtgatttcgcccgcgatcgccgtggagtgtgcgatccggaagcccgttgccttgccggcaatcccggttggcagtgctga

SEQ ID NO: 7932 - DNA, 234 bp, Escherichia coli
atgttgaccacaacaagccacgacagcgtatggctgcgtgccgacgatcccctgatcgacatgaactacatcaccagtttcaccggcatgaccgataaatggttttacaggctgatcagtgaagggcattttcctaaacccatcaaactggggcgcagcagccgctggtacaaaagtgaagtggagcagtggatgcaacaacgaattgaggaatcacgaggagcagcagcatga

SEQ ID NO: 7933 - DNA, 549 bp, Escherichia coli
gtgcaaataaccgaagccttaatttcagagccgggagacatccggcgttttattcaacatgctgttgaccactggccgcgtctgctggcagtccacttcatactccattcgacagaaggaaacatctacgggcaacagattcatgcattctgcacttccttttatcgacaactgcatgaacgtattactgagagcaatcacactgccagtccatcatcgtcggtggtattacgctggttgcgggaacaacatggaggagcaacaattcgatgcctgttgctgctcagccagacgagtatttgtcacccgcgagccagtgtcacagttgatgaacaatgttcgcaagtggtggatttactgcaacatagctggcaggtgataagtgctggcggacaatgccgggtggaaaggtgttttcgggttgcccggggtgatacatccggtcagtatgttgcgttaaaaacagtcgcattgtctctggggttaccggttgtgaccgccattacccatcgtccggtacagcgctgtacattgattacagctcagtga

SEQ ID NO: 7934 - DNA, 624 bp, Escherichia coli
atgcgtacacgaattgactatctggcggataaatactcttttaccgaacggaatgaatctccacgccttcgccggcagtggcaggatgttctggaggagtgtcggctgacagaggccggaccagaagaacggctgcgtattgccctgctgaatgtggattacgtcaccagttttgaactgccttttcgcttgttgcttactcgtacaccacaactgattgccgcgcttcgggaagaatggggcctcagccagaaaaatgtggtgttcaacgataaacggtttggctgcgtgtacagcctgaaggccagtctttctggtgtaccggatacattccggtatcatctgtctcatcgtattcgccggatggttgggaatgaaaatacatcatcgccatatcagcagattgcccgggaagtgaaagtgccccgtgaacggctgaagtatgcgctggaagccggtttactggtgactgcactggacgggctgttctggtctggtagtcagcgcattgcggctgatatcctgagactgagaaagagcggaatgccggtggtgacaacgtccgtggaagcgagcgataacctgacgggaacaacccgcaaaataccggcataccatctctga

SEQ ID NO: 7935 - DNA, 234 bp, Escherichia coli
atggcaaggtccgattacgattttatcaatctgtctctgggacatgaactgaatgagtggctggcagagagaggttatgccggacaggcggataaccggaaccgactggcagaggtggttacccgcaaattgcgggacagtttttatgcggacgtctcctgggatgcgctgaatgtggcatacagtgaacaccctgagtggttttcagagcttgcctccggggatgaggattaa

SEQ ID NO: 7936 - DNA, 1767 bp, Escherichia coli
atgcagcaccggcaggataacttactggcgaacagaaatttgttgcctggtatggtttccggtcagtacgcattcaggatccgtaccttatctcaggtggtacgctatttttccctcctcccctgcctttgcattctttcattttcgtctccggcagccatgctgtctccgggtgaccgcagtgcaattcagcagcaacagcagcagttgttggatgaaaaccagcgtcagcgtgatgcgctggagcgcagtgcgccgctgaccatcacgccgtctccggaaacgtctgccggtactgaaggtccctgctttacggtgtcacgcattgttgtcagtggggccacccgactgacgtctgcagaaaccgacagactggtggcaccgtgggtgaatcagtgtctgaatatcacggggctgaccgcggtcacggatgccgtgacggacggctatatacgccggggatatatcaccagccgggcctttctgacagagcaggacctttcagggggcgtactgcacataacggtcatggaaggcaggctgcagcaaatccgggcggaaggcgctgaccttcctggccgcaccctgaagatggtttttccgggaatggagggaaaggttctgaacctgcgggatattgagcaggggatggagcagattaatcgtctgcgtacggagccggtacagattgaaatatcgcccggtgaccgtgagggatggtcggtggtgacactgacggcattgccggaatggcctgtcacagggagcgtgggcatcgacaacagcgggcagaagaataccggtacggggcagttaaatggtgtcctttcctttaataatcctctggggctggctgacaactggtttgtcagcgggggacggagcagtgacttttcggtgtcacatgatgcgaggaattttgccgccggtgtcagtctgccgtatggctataccctggtggattacacgtattcatggagtgactacctcagcaccattgataaccggggctggcggtggcgttccacgggagacctgcagactcaccggctgggactgtcgcatgtcctgttccgtaacggggacatgaagacagcactgaccggaggtctgcagcaccgcattattcacaattatctggatgatgttctgcttcagggcagcagccgtaaactcacttcattttctgtcgggctgaatcacacacacaagtttctgggtggtgtcggaacactgaatccggtattcacacgggggatgccctggttcggcgcagaaagcgaccacgggaaaaggggagacctgcccgtaaatcagttccggaaatggtcggtgagtgccagttttcagcgccccgtcacggacagggtgtggtggctgaccagcgcttatgcccagtggtcaccggaccgtcttcatggtgtggaacaactgagcctcgggggcgagagttcagtgcgtggctttaaggagcagtatatctccggtaataacggtggttatctgcgaaatgagctgtcctggtctctgttctccctgccatatgtgggaactgtccgtgcagtgactgcactggacggtggctggctgcactctgacagagatgacccgtactcgtccggcacgctgtggggtgctgctgccgggctcagcaccaccagtggccatgtttccggttcgttcactgccggactgcctcttgtttacccggactggcttgcccctgaccatctcacggtttactggcgcgttgccgtcgcgttttaa

SEQ ID NO: 7937 - DNA, 3165 bp, Escherichia coli
atgcatcagcctcccgttcgcttcacttaccgcctgctgagttaccttatcagtacgattatcgccgggcagccgttgttaccggctgtgggggccgtcatcaccccacaaaacggggccggaatggataaagcggcaaatggtgtgccggtcgtgaacattgccacgccgaacggggccgggatttcgcataaccggtttacggattacaacgtcgggaaggaagggctgattctcaataatgccaccggtaagcttaatccgacgcagcttggtggactgatacagaataacccgaacctgaaagcgggcggggaagcgaagggtatcatcaacgaagtgaccggcggtaaccgttcactgttgcagggctatacggaagtggccggcaaagcggcgaatgtgatggttgccaacccgtatggtatcacctgtgacggctgtggttttatcaacacgccgcacgcgacgctcaccacaggcaaacctgtgatgaatgccgacggcagcctgcaggcgctggaggtgactgaaggcagtatcaccatcaatggcgcgggcctggacggcacccggagcgatgccgtatccattattgcccgtgcaacggaagtgaatgccgcgcttcatgcgaaggatttaactgtcactgcaggcgctaaccggataactgcagatggtcgcgtcagtgccctgaagggcgaaggtgatgtgccgaaagttgccgttgataccggcgctctcggtggaatgtacgccaggcgtattcatctgacctccactgaaagtggtgtcggggttaatcttggtaacctttatgcccgcgagggcgatatcatactgaacagtgccgggaaactggtcctgaagaacagccttgccggcggcaataccaccgtaaccggaacgaatgtttcactttcaggggataacaaagccggaggaaatctcagcgttaccgggacaacgggactgacactgaatcagtcccgtctggtgacggataaaaatctggtgctgtcttcatccgggcagattgtacagaacggtggtgaactgactgccgggcagaacgccatgctcagtgcacagcacctgaaccagacttccgggaccgtgaatgcagctgaaaatgtcaccttgaccaccaccgatgataccacactgaaaggccgcagcgttgccgggaaaacactcaccgtcagttccggcagcctgaacaacggcgggacactggttgccgggcgcgatgccacggtgaaaaccgggacattcagtaataccggtgccgtccaggggaacggcctgaaagtcaccgccactgacctgaccagcaccggcagtattaaaagtggcagcacactcgatatcagcgtccgcaatgccacactgtccggtgatgccggtgcaaaagacagtgcccgcgttaccgtcagcggtacactcgaaaaccgcggcagactcgtcagcgatgacgtgctgacgctcagtgccacgcagataaacaacagcggtaccctctccggggcaaaggaacttgtggtttctgcagacacactgaccaccacagaaaaatcggtcacaaacagtgacggtaacctcatgctgaacagcgcgtcttccacactggcgggtgaaaccagtgcgggtggcacggtgtctgtaaaaggcaacagtctgaagaccacgaccactgcgcagacgcaaggcaacagtgtcagcgtggatgtgcagaacgcacagcttgacggaacacaggctgccagagacatccttaccctgaacgccagtgaaaagctcacccacagcgggaaaagcagtgccccgtcgctcagcctcagtgcgccggaactgaccagcagcggcgtacttgttgcttccgccctgaatacacagtcacagaccctgaccaacagcggtctgttgcagggggaggcctcactcaccgttaacacacagaggcttgataatcagcagaacggcacgctgtacagtgctgcagacctgacgctggatataccggacatccgcaacagcgggcttatcaccggtgataccggcagcgatatgcagcgcggtatccaggctgcaacggctgcacttcagggcctggtgggcggcaatatggcaggcgcgctggcaggtgcttcagcgccggagctggcgaacatcatcggtcatcacgcgggtattgatgacaatacagcggcaaaagccattgcccatgccattctcggtggtgtgacagcagcccttcagggcaacagtgcggcagcaggcgcaattggtgcgggtactggtgaagtgatcgcgtcagccattgcgaaaagcctctacccgggcgtagatccgtcgaaactgacagaagatcagaagcaaactgtaagcacgctggcaacgctgtcagcgggtatggccggcggcattgccagtggcgatgtggctggcgcggctgctggagctggtgccgggaagaacgttgttgagaataatgcgctgagtctggttgccagaggctgtgcggtcgcagcaccttgcaggactaaagttgcagagcagttgctagaaatcggggcgaaagcgggcatggccgggcttgccggggcggcagtcaaggatatggccgacaggatgacctccgatgaactggagcatctgattaccctgcaaatgatgggtaatgatgagatcactactaagtatctcagttcgttgcatgataagtacggttccggggctgcctcgaatccgaatatcggtaaagatctgaccgatgcggaaaaagtagaactgggcggttccggctcaggaaccggtacaccaccaccatcggaaaatgatcctaagcagcaaaatgaaaaaactgtagataagcttaatcagaagcaagaaagtgcgattaagaagatcgataacactataaaaaatgctctgaaagatcatgatattattggaactctcaaggatatggatggtaagccagttcctaaagagaatggaggatattgggatcatatgcaggaaatgcaaaatacgctcagaggattaagaaatcatgcggatacgttgaaaaacgtcaacaatcctgaagctcaggctgcgtatggcagagcaacagatgctattaataaaatagaatcagccttgaaaggatatggaatatga

SEQ ID NO: 7938 - DNA, 387 bp, Escherichia coli
atgattaccttacgtaaattgattggaaacatcaatatgacaaaagagcctgagcaacaatcaccgcttgaactctggttcgaacgtatcatagatgtgcctcttgaaaagttaacagtggaagatctttgccgcgctatccgacaaaatttatgtattgatcagttgatgccaagagtgttggaagttctaactaaagagccgttagcgggtgaatattacgatggtgaactaattgcagctttatcaacgataaaaggagaagatctaaaagatcagaaaagtacctttacccaaataaggcaacttataaaccagctagaaccgtcagatattaacgatgatttaagaaaagatatattaaaaatcaatcagataattgtataa

SEQ ID NO: 7939 - DNA, 378 bp, Escherichia coli
ttgtgtgccgggcatgttcagcagcttgggggtgaaagtcccctgtccagcctgatggtggcgaaggcgttcgcgtacgcacttaaccagtggccggcactgacgtactatgcgaacgatggctgggtggaaatcgacaacaacatcgctgaaaatgccctgcgggcggtcagtctgggtcgtaaaaacttcctgttcttcggctctgaccatggtggtgagcggggagcgctactgtacagcctgatcgggacgtgcaaactgaatgacgtggatccagaaagctaccttcgccatgtgcttgccgtcatagcagactggccggtcaaccgggtcagcgaactgcttccgtggcgcatagcactgccagctgaataa

SEQ ID NO: 7940 - DNA, 333 bp, Escherichia coli
gtggataactggcagaagagtgtaaggagtcgtgcgctcccggaagaggcgatgacgggctggaacgaaggcatgatccgcttacagcagttggctgagcgcctgaaccgtcaggatgaacagcggggaaaatacatgacggtcagtgaactgaaaacggaggtgtttggcatcatgcaggcttttaaccggcatatcccggcggaagagcagttacgtcgctacggtgaagtccgtaaccagaatggcagtgaacagcagcaaaaacaggctgaaatggcgctaaatcagttaattaaccgttatcagatgatacgtgcaggcaaacaatag

SEQ ID NO: 7941 - DNA, 528 bp, Escherichia coli
gtgcaggcaaacaatagtggtagccataatgcaggagcaaagcctgaatcaggaagagttattctgactgagtttggttttctggcgattcttgtgatggtgggatgtgcttggttagctgaacaggccttttccgaccatgcgctttcaccacacagtgcttggccgtacagtgcatcgcgcgatgccgggctggccgatacgggcgcgggcggctatcccacttgtaaacagcggtgggccgacgacaccgttgggctgaaagcccgtctactgcaacttcctgccctagatatctggacggcgtttaaaaaaatcgaccagtcgcaggtagtgtatgaagaggccgtgctgcgctcgcgggtcagtgaacgaaatatgcaggtatcgcagaatgggcgcgtttatccaagctatggcggtaacgttgatggcaccgtcgccaatgccgccacccggttggcatccggcgctagaaatatcctcggcagcatagcggcatgtacggcattcgacagcgtgcgttag

SEQ ID NO: 7942 - DNA, 357 bp, Escherichia coli
atggtacaggcgcagctgcaaatagcgctggtgatctgtattccgctgataacgctctgttcggcgtgggatgtgaaagtagtgatgacgctgacgtttgtgcagtttgcactatttttcctcaccttttggtgggaactggcacggtggcttgatagctggctgctggatgtgctctacaacagcgatacccacagtagcaggaatttagccgggatccagaatacgcaggatgacgtgattatcaatctggtgatgaggttgatgtttctggtgttgccgacattctggctgggggcgatgacgtgggctggagtgagggttggcgtggcgctgaatggagcgctggcgggatga

SEQ ID NO: 7943 - DNA, 1047 bp, Escherichia coli
ttgatagttatagattttttttgtggctgtggtggagccagtgaagggctacgtcaggctggctttgatatcgagcttggattagatattgaccaacaagcatcagaaacatttaaagctaatttccctgatgcaaaattcatccaagatgatattaggaaaatcgaacctcaagatatctccgacatcattgatattaaagctaaacggcctttgttactgagtgcatgtgcaccatgtcaaccattttcgcaacagaataaaaataaaactagtgacgactcaaggagaaatctactaaatgaaactcatcgttttattagagaacttcttcctgaatatattatgcttgaaaatgttcctggaatgcaaaaaattgatgaagaaaaagaaggcccatttcaggagtttattaagctacttaaagagttagagtataactatatatcttttatagccaatgctgagaactatgggattccccaaagaagaaaaagactcgtgctcttagctagtcgagtaggtaaagttaccctaccagagataacccatggtaaaaataaaatcccattcaaaactgtacgagattatatccaggacttcacaaagttatgttcaggagaaaccgaccccaaagatcctttacatagggctggaacactgagccctcttaacctaaaaagaattatgcacactccagaaggaggggatagaagaaattggccagaagagttagttaataaatgccataaaaattatgatggccacacagatacttatggaagaatgagttgggataagcctgcgcctacacttacgacgaaatgtaatagttactccaatggtcgttttgggcatcctgaccccactcaacatagagcaattagcataagagaagcatcaagattacaaacatttcctttaagctatgtttttaaaggttcgctgaattcaatggcaaagcaaatcggcaatgctgtaccttgcgaactcgctagactatttgggctacatctcatagaaaattgtactaataaggattcatag

SEQ ID NO: 7944 - DNA, 744 bp, Escherichia coli
atgaataaagcattactgccactgttactctgctgctttatttttccggcgtcaggaaaagatgcaggctggcagtggtataacgagaaaataaatccgaaggaaaaagaaaataaacctgtacctgcagccccccgtcaggaaccggatattatgcagaaactggccgcactgcagacggcaacaaagcgggcgctgtacgaagccattctgtatcccggcgtggataattttgtgaaatatttccggctgcaaaattactggactcagcaggccgggcttttcaccatgagcgccagaaaggccatgctggcacatcctgaactggactataacctgcagtacagccattacaacggcacggtacggaaccagctggcagcagaccaggcgcagcagcgacaggccattgcgaaactggctgaacactacggcatcatgtttttttaccgggggcaggaccccatcgacgggcagctggcgcaggtcattaatggcttccgggatacctatggtctgagtgttattcccgtttccgtggatggcgtgattaatccgctgttgccggattcccggactgaccaggggcaggcgcagcgcctcggcgtgaaatatttcccggccatgatgctggttgacccgaaacagggtagtgttcgtccgttatcatacggttttatttcgcaggacgacctggcaaaacagttcctgaatgtctctgaggattttaaaccgaatttttaa

SEQ ID NO: 7945 - DNA, 222 bp, Escherichia coli
gtgagtgatgaagccgatgaagcatattcagtgacagaacaactgaccatgacaggaataaaccggatacgccagaaaataaatgctcatggtattcctgtttatctctgtgaagcatgcggaaatcctattccggaagcccggcggaaaatatttcccggtgtgacgttgtgcgttgaatgtcaggcgtatcaggaaagacagagaaaacattatgcataa

SEQ ID NO: 7946 - DNA, 516 bp, Escherichia coli
atgaaacagatttctttctttattcctctgctggggaccttattactttccggctgtgccggaaccagtacggaatttgagtgtaacgccaccacatccgatacctgtatgacgatggagcaggccaatgagaaggccaaaaaactggagcagtcctcagaagcaaagccggttgcggcatcactgccgcgcctggctgaagggaacttccggacaatgccggtgcagaccgtcaccgcgaccactccgtccggcagcagacctgcggtgacagcacatccggagcagaaactgctggcacctcgcccgctgtttaccgctgcccgggaagtgaaaacggttgttccggtcagttcagttacgccggtaacacctcctcgtccgctaagaacgggtgagcagacggcagcattatggatagcgccttatattgataaccaggatgtttatcatcagccatccagcgtgttttttgttattaaaccgtctgcgtggggaaaaccacgtattaattaa

SEQ ID NO: 7947 - DNA, 252 bp, Escherichia coli; identical to SEQ ID NO: 5331

SEQ ID NO: 7948 - DNA, 591 bp, Escherichia coli
atggcaaataatatgtcgtcccgtcaggcgtgccatgccgcccggtatgttgtcgcccgggttctgcgaggactgttctggtgtctgaagtacaccgtcattctgccactggccacaatggccctgatggctctgtttgttttatggaaggacaacaccacgccggggaaattactggttaaggagattaacttcgtaagacaaacagcacctgccggacagttcccggtcagtgaatgctggttttcttcctctgattcttcaggcagatcagaaatacaggatatctgccattaccgcgcggctgatgctgcagattatgtcagggagactgaccggtcactgatgcaactggtcaccgcattatgggcaacactggcactgatgtatgtctcgctggcagcgatcaccgggaaatatccggtgcgaccaggaaaaatgaaatgtatccgggtggtaaccgcagatgaacatctgaaggaagtttatacggaagacgcttccctgccgggaaaaatcaggaaatgccctgtttatcttcctgatgacagaacaaacagaaacaacggagataaaaatgaacatgcgtaa

SEQ ID NO: 7949 - DNA, 312 bp, Escherichia coli; identical to SEQ ID NO: 5263

SEQ ID NO: 7950 - DNA, 378 bp, Escherichia coli
atggacgaacagtggggctatgtcggggctaaatcgcgccagcgctggctgttttacgcgtatgacaggctccggaagacggttgttgcgcacgtattcggtgaacgcacgatggcgacgctggggcgtcttatgagcctgctgtcaccctttgacgtggtgatatggatgacggatggctggccgctgtatgaatcccgcctgaagggaaagctgcacgtaatcagcaagcgatatacgcagcgaattgagcggcataacctgaatctgaggcagcacctggcacggctgggacggaagtcgctgtcgttttcaaaatcggtggagctgcatgacaaagtcatcgggcattatctgaacataaaacactatcaataa

SEQ ID NO: 7951 - DNA, 468 bp, Escherichia coli
atgaaccgcgtactgtgcgtggtcatcattgccctgctggtggcctgtggtgcgcttagtctggggctgaatcattaccgtgataacgccataacctacaaagagcagcgcgataaaaaagtcagtgagctggagctggcaaatgcaaccattactgatatgcagcagcgccagcgtgatgttgctgcacttgatgccagatactcgagggaattagccgatgcgagagctgaaaatgaaactcttcgcgctgacgttgccgctggtcaccgcagcctgcggatcaacgccacctgtccaggtcccgtgcgtgaagccaccggcaccgcccgcgtggataatgcaaccggcccccaactggcagacaccgttacacgggattatttcaccctcagagagcggctgatgacgatgcagaagcaactggaaggggcacaggactatatccgcactcagtgcctgaaataa

SEQ ID NO: 7952 - DNA, 141 bp, Escherichia coli; identical to SEQ ID NO: 7044

SEQ ID NO: 7953 - DNA, 549 bp, Escherichia coli
atgaacgtcaataagaaaaaactggccgatatttttggcgttgatgtcaggaccatcaccgcctggcagagtcaggggttaccactagtttctggtggagggaaagggactgaatcagtttttgatacaactgctgccattcagtggtatgcgcagagggaagctgatattgaaaacgaaaaactccgtaaagagatcgaggatttgagggctgccagcgaatcagaccttcagcccggcaccattgattacgaacgttaccgactgacgaaggcacaggccgatgcacaggagctgaaaaatgctcgtgaggaaggccttgtcctcgagacggagttatttacctacatctttcagcgagtggcacagaatatatcagggatccttgtccgtgtccctcagacactgcagcgtaaataccctgatatatcacccgtacatcttgatgctgtgaaaactgaaatcgcgaaagcatccgatgtggcttctgaagccggtgagaatgtgcgcaggtggattgatgatttcagacgaactgagggcggctaa

SEQ ID NO: 7954 - DNA, 1506 bp, Escherichia coli
gtgagacgtaatctttcacacattattgccgcagcattcaatgaaccgctgcttctggagcccgcctatgcgcgggttttcttttgcgcgctcgggcgcgagatgggggcagcaagtctttcggtaccacaacagcaggtacagcttgatgctcccggaatgctggctgaaacggacgagtacatggccggaggtaaacgaccggcccgtgtttaccgggtggtgaacggtattgcggtactgccggtgagcggcacgctggtgcaccggctgggggggatgcggccattttccggaatgactggctatgacggcattgtcgcctgtcttcagcaggcaatggcagatagccaggtgcggggcatactgctggacattgacagtccgggcgggcaggccgccggcgcgtttgactgcgctgacatgatttaccgcctccgtcagcagaagccggtctgggcactgtgcaatgacacggcctgttctgcagccatgctgctggcgtcggcctgctcccgacggctggttacccagacatcccgtatcggctccattggcgtgatgatgagccatgtcagctatgccggtcatctggcgcaggccggtgtggatatcacgctgatttatgccggggcgcacaaggtggatggcaatcagtttgaagcgttgccggcagaggttcgccaggatatgcagcagcggattgatgcggcgcaccggatgtttgccgaaaaagtggcgatgtataccgggttgtctgtggatgcggtcacgggaacagaggccgccgtttttgaaggtcagtccggcattgaggccgggctggcggatgaattaatcaatgcgtcggatgccatcagtgtgatggccacggcgctgaacagtaatgtcagaggaggcactatgccgcaattaactgcaacggaagccgccgtgcaggagaaccagcgagtgatggggatcctgacatgccaggaagcgaaaggacgtgaacagcttgccacgatgctggcagggcaacagggcatgagcgttgaacaggcccgggcgattctggccgcggcggcaccgcagcagccggtggcatccgcgcagagtgaagccgatcgcattatggcgtgtgaagaagcgaacggtcgtgaacaactggcagtaacgctggcggcgatgccggagatgacggtggaaaaagcccgcccgatcctggctgcttcaccgcaggcgaatgccggaccatcactccgtgatcagatcatggccctggatgaggcaaaaggggctgaggcgcaggctgaacagctggctgcctgcccgggaatgaccgtggagagcgcccgggctgtgctggctgcgggatcaggtaaggcagaaccggtctctgcatccacaaccgccctgtttgaacatttcatggcgaaccattcaccggctgcggtccaggggggcgtgtcacaggcgtcagaagacggtgatgcggacgtgaaaatgctcatggccatgccatga

SEQ ID NO: 7955 - DNA, 348 bp, Escherichia coli
atggtgacgaaaaccatcactgaacagcgtgcggaagtacgtatttttgccggtaatgatccggctcacaccgccacaggcagcagcgggatttcctcggcaacaccggcactgacacccctgatgctggatggggccaccgggaaactggtggtctgggacggacagaaagccggtagtgcggttggcatactggtactgccgcttgaaggcacagaggcggtgctgacctattacaagtcggggacctttgcgacggaggcaatccgctggcctgaaagtgtggatgaacacaaaaaggccaacgcctttaccggcagtgccctgagtcacgcggcgctgccgtaa

SEQ ID NO: 7956 - DNA, 1029 bp, Escherichia coli
atgggattgtttacgacccgccagttactcggttataccgaacaaaaagttaaattccgtgcgctgtttctggagctgtttttccgccgtacggtgaatttccacaccgaagaggtgatgctggacaaaattaccggaaaaacgccggtggcggcctatgtctccccgatcgttgaaggaaaagtgcttcgccatcgcggtggtgaaacccgcgtgttacgtccgggctacgtcaagcccaaacacgaatttaattaccagcaggcggttgagcgccttcctggtgaagatccggctcagctgaacgacccggcctaccgtcgtctgcgtatcattaccgataacctcaaacaggaagagcacgccattgtccaggtggaagaaatgcaggcggtgaatgccgtgctgtatggcaaatacaccatggaaggggaacagtttgacacggtcgaggtggatttcggacgctctgaaggaaataacattgagcaggccgacggtaaaaaatggtctgagcaggaccgtgatacgtttgatccgacgcatgatattgacctttactgcgatcaggccagcggtcttgtaaatattgccattatggacggtacggtctggcgtctgctgaatggctttaagctgttccgcgaaaaactggatacccgtcgcggctcaaattcacaactcgaaacggcagtgaaagacctgggagcggtggtgtctttcaaagggtattacggtgatctggccattgtggtggcgaaaacgtcttatgtggcagacgacggtaccgaaaaacgttatctgccggtgggcacactggtcctggggaatacggcagcagagggcattcgttgctatggtgccattcaggatgcgcaggcgttgtccgaaggtgtggtggcctcttcccgttatccgaaacactggctgactgtgggcgatccggcccgtgaattcaccatgacgcagtccgcaccgctgatggtgctgccggatccggatgagtttgtggtggtgcaggtgaaataa

SEQ ID NO: 7957 - DNA, 384 bp, Escherichia coli
atggcaacaaaagaagaaaatctgaatcgtcttcgtcaactggctggcctgctggggcgcgaggcggatatgtcggggagtgctgcggatattgcgcaacgtgtgtctgagtgggaagaggagcttgctgtttccccggagggcattatgcactctgatgagagcggggctgatcaaaatcacacagacgatggtgagcagttgaacaacacggatgctccggatgatgttaaagccgtccgggtacggaagtgcctgcaagtaatggggtattgcccggagacaggtcgtcccgttgagctggcgttacggggtatgcgtgttctggtgccatcatcactggcaacggccatgatacagcacggaacggctgaatatgcgtga

SEQ ID NO: 7958 - DNA, 579 bp, Escherichia coli
atgcttctgcctatgaatacagaaacccaacatcgtaaaaaagatcccatccgtctgtatcagcagttgctggagtctgcagctatgattgctggtcgtgacggtatcgctgccctctcgctgaatgcggttgcccgcgaagctggcgtgagtaaaggtggattactgcatcactttccgaacaagcaggcgctgatctacgccttgtttgcccggttgttggcaataatggaagaggccatcgctgccctgatgcaaaaagacaatataagctatggccgttttactcgcgcatatgtgaactatctttctgcgctgactgacacacaagaaagccgtcaattgatggtgctttcgctggcaatgcccgatgaaccggtgctgcgaaaatgctggcgagactggatgcttggtcatttagcgaatggcgatgaactggataatagcccaaccggaacgctggtgcgctataccgcagatggcatctggttgtctgagttaacggaagggatcaccatgagccccgaacatcgtcaggcactggttgattcactgaataagatgacacttcccgcgtga

SEQ ID NO: 7959 - DNA, 819 bp, Escherichia coli
atgcgctataacatcaatgcccgtttcatttatgacgctacggatggcacgcttacgctaccgcaaagcactgagccagactgccaactctcgataacgtcctgcgcgctgctcaacttttttttgcatcataccgatatcgttagtcgcgaagaggtactgacaaaagtttgggataacaacggattaacttcttctaacagcaatctgaatcagtatctcagtatgctgcgcaagacgttccgtcactatggtattgataatattatcattaccgttgcacgcggctatctgcagctaaacccgaatgtatccatcgaaccactggatgaagcccctgcgccacctgcaattatagagccatccataatccctgatgttgacgtaccaacatccagtgaggataccgagtcttcaccaccaacattagcgccagtcacccatcgtcacgacgcttactggtattttgcaggtgcctgtttgttaaccatttcgattctgttggtagccttcaatttgttcggtatcagcgaggcgcgccccatcgctttgacgcaactttctcatagccagtgcgaattactggcaagcgacgaaatgcgccgttcagtaagcgtgaaggcatatgagaaaaattatgacgaagtccgtaagcgtctaaatatcgcctgtaaaccaagtgagcgttttctttttttctacggtgacaggctggaaaccaacggccttgggcgagtgttcctcgcgcactgcgctatgcatgaaaataacccgtttagttattgcgataactacttttattactcttggaaactgtaa

SEQ ID NO: 7960 - DNA, 519 bp, Escherichia coli
atgagaatcgcaccgcgtaccttctttgctatttccgccctggcgtttattgtcgcctccggatttagtttctggcggttgtcccctgctgaaaatacagggattatgagttgttcaacaaaaggcatcatgcgttttgagaatatggaaaaggagaacgttaacggtaatattcactttaactttggcagccagggtaaaggttcgatggtgctcgaaggctacacggactctgccgctggctggctgtacctgcaacgctatgtcaaatttacctataccagtaaacgtgtttccgccacggaacgccattaccgcatcagccagtgggaatccagcgcctcatcgatagatgaatcaccagatgtgatttttgactactttatgcgtgaaatgtctgacagccatgacgggctgttcctcaacgcccagaagctgaacgataaagcgattttgctcagttctattaattcaccgctttggatctgtacccttaaatctggcagcaaattagactag

SEQ ID NO: 7961 - DNA, 279 bp, Escherichia coli
atgggtgatgcattagggcttatcgaaaccaaaggcctggtggcctgtattgccgcagcggatgcgatgtgtaaatccgccaacgttgaactgattggctatgaaaacatcggctctggtctggtgaccgtgatggtgaaaggcgacgttggcgcagtgaaagcatctgtcgattctggacttgagtccgcacagcacatcggggaagtggtgacgtcgctggttatcgcgcgtcctcacaacgacatcaacaaaatcgttattaaacataaagcttaa

SEQ ID NO: 7962 - DNA, 285 bp, Escherichia coli
atgggtgatgcattaggtctgattgaaaccaaaggtttggtggcttgtattgaagcagctgacgcgatgtgtaaggccgccaacgttgagttgattggctatgaaaacgtcggttctggtctggttaccgcaatggtgaaaggtgatgtcggcgcagtaaaagcggcggtggattccggtgttgagtccgcacagcgcattggcgaggtggtgacgtcgttggttatcgcgcgtccacacaatgacatcaacaagattgtctcgcactacaaaattaccgattaa

SEQ ID NO: 7963 - DNA, 279 bp, Escherichia coli
atgagagaagcgcttggtctgatcgaaaccaaaggtctggtggcctgtattgaggcggcagacgcgatgtgtaaagccgccaacgttgagttgattggctatgaaaacgtcggctctggcctagtcaccgcgatggtaaaaggcgacgttggcgcagtgaatgccgcggtggattccggtgttgaagcagcaagacgtatcggtgaagtggtgacctcccgtgtcatcgcccgcccgcataacgacatcgaaaaaatcgcgtcgcagcataaagcatga

SEQ ID NO: 7964 - DNA, 1587 bp, Escherichia coli
atgattgaactggataccgatttgcgctcccgtcagaacgcgcgggtgctggtgcgtaacgccaaaaaagcgcaagcgattatggccactttttcgcagcagcaaatcgacgccatcgtgaaaaacgtggcccaggaagcagcacaccacgctgaagcactggcaaaaatggccgcagaagaaactggcttcggcaactggcaggataaagtcctgaaaaaccgtttcgcctcgctgcgtgtttacgatgccatcaaagatatgaagaccgtcggcatcattcatgacgatcaacagcaaaaagtgatggacgtgggcgtgccgctgggtgtgatttgcgccctggtgccgtcaaccaacccgacttccaccatcttctacaaaacgctgatcgccctgaaagccggtaatgcgattattttctctccgcatcccggcgcacgtcagtgtagctggaaggcgatagaagtcgttaagcgtgccgcagaagctgctggtgcacctgcgggtattgtcgatggtgtaaccgagctcacgctggaagcaacccaggaactgatgcatagcaaagatgtttcgctgattctggctaccggtggtgaaggaatggtacgagcagcatatgcttctggcacaccgaccatcagcggtggtcctggtaacggtccggcatttattgaacgcagtgcggatatccaccatgcggtgaaagatatcatcaccagcaaaaccttcgataatggtgtgatctgcgcttctgaacagtcgattattgttgaacgctgcatttacaacgaagtacaccgcgaactggaagctcagggtgcttactttatgaacgaagatgaagcggcaaaaatggcagctctgctgctgcgcccgaacggcacgattaacccgaaagtggtgggaaaaaccgcactgtatttaagccagatggccggtttttgtgtgcccgccagtaccagagtactgattgccgaacaaactaccgtttctcacaaaaacccctactcacgtgaaaagctgtgcccggttcttggtctgtatatcgaagaggactggaaagctgcctgccaccgcgtggtggagttgctgactaacgaaggtctgggccacacactggtgatccatacccgcaaccaggatgtgatccgtcaattctgccttgaaaaaccggttaaccgcattctgatcaatacccctgcggcgcttggcggtattggcgctaccactaacattacccccgccctgacgcttggatgcggtgcggtaggtggtggttcctcttccgataacgtcgggccaatgaatctgctcaacattcgtaaagtgggctatggcgtgcgttccatcgatgagttgcgttctccgggtagccgtgcagaaccgcagccagccatcgccgcgccgatagtggatccgcatcgcagcattcttgacgatgcccgcttcacctcccctgccccggcaaccacatctgctgatgatcgttttactgtggcaacgactgatcccgaaggcgagatcaacgagcagaacgttgagcgagtcatccgccaggtgcttgagcgcttaggcaagtaa

SEQ ID NO: 7965 - DNA, 258 bp, Escherichia coli
atgattctcgcaaaggtaaccggacatgtcgtcgccacgcaaaagtgcgatgagctgcgcggcagcaacctgttgttgatcacccaactggatgataaccaacagctgatgaaggaccgctcctgggtcgctgtcgatagcgtcggtgcaggcgttcatgacgttgtgctggcggaggagtacttcgcactcaataaagatcgttacaaagcgatgtcagtggtcgccattgtcgagaaggtttttcgggacgcttaa

SEQ ID NO: 7966 - DNA, 1155 bp, Escherichia coli
atgagtgagtttttgctgaaaccccggatctgcttcggtcaagacgcgctgtcagtcctggacgagctaaccgcctgtcatgttttgctggttaccgatcaggcgatggtcaaattcggtcttgctgaacgtgtcacgcagcgtctctgtgcgcgcggcattgactggcaggtgtgggatgacgttgtcgccgatccggatatcgctaccgtggtccgagggatgaagttgatggacagctgctacccggatctggttatcgcactcggcggtggttcggtcattgacgcagccaaagcggttattttcgccctggcgcaaacccgtccggaagcaggacgtgaacgcccctgctttgtggctattccaaccaccagcggtacgggctcagaagtgaccagtttctcggtggtgaaagcccatgccgaaaaactggtgctggttgactcgtcgctgctaccggatatcgccattcttgatccgtcactggtggcatccgtgccacctgctatcaccgctgacaccggaatggatgtgttgtgccacgctctggaggcttatgtctcccttgccgccagcgacttttccgatgcacttgctgaaaaagtggtgcaacaggtgttcagctacctgccgggctgctggcgtaacggccaggatttgcaggctcgggagaaaatgcacaacgcctcatgtatggcaggaatggcgtttaccaatgcctctcttggcatcacccatagcctggctcatgcccttggtggtgttttccgtgtccctcatgggcgcgcaaatgccctgttaatggcacacgttgtggcatggaatgctgactaccacggtcaatgcgacacccttgctgcgcggaaatatgcacgtctggcacatctgttggatctgcctgccagcacgcctcgtgaaggagtaacaagcctgctggtcgcaatccaaacgctgaaagatgaaatgaatatgcccagggggattaacgacaccggcgtgaatgccgctgatttcgatcagcgcctggcggagatggttgcccaggcactgcgtgacagttgcaccccaaccaacccgcgcgaaccggatgcccgcgccctgactgaactttatcgccaggcctggagcggcaatatcgctcaatgccactga

SEQ ID NO: 7967 - DNA, 3387 bp, Escherichia coli
atggcaaactacaatttaacaccgcgcgtaaaagtgctggctgaacgtttactggctcaccccagtaccctgtgcgttgaacatgccgggatcctgagtgggctggatggtgatatcgcgggcattcccgccgcagtaaaacccgctcgccgtttctatgaactgatgcgccagctaccgctcgctgttagccccgatgaactgattgttggcaatcagactcatcgtccgcatggtgcgattttccacgacgaaagtacggcccaccgcccgtctgtttttcagtttcttaatctaaatagcgaccttgatgccccggattataaactggtgatcgaaaaaggcgtgctggcaatcaaacagcaattggaagagaaaacccgctcactgggcagcgccgttagccgcagtggtatggatgaagtcaacgcttgccgcgccgcgatttatgcctgtgatgccctgatgcagttagcgcaaaatctggccaccagcgccgaaaaactggctgcaactgagacaaatgcgtatcgcaaagctgagttatctgaaagtgccgccattttgcaccatatcccagcgcgtcctgctcgtagttttaaagaggcttgccaggcattttatctgttccagttagcactccagttagataatggtagctatgctgttaacccggaaggcgcagataaagcgctgctggcgtattatcagcatgatattgccaacggtctgctgaccgaggcgcaggcttacgaaattgtcgaatgtttgtggtttaaactggcagaactgagtgaagtccgcgcagcttgtgctatcgatggctacccgatgttcgatgctctgttgcacggtgcaagccttgagaacgcagtgattaaccctctttcagagatgttcctcaatgcacaacgtaacctgagcgcgctaaatctgcccatacgtctgttccatggcgcccacaaaaccgttaccacactatgtgccgcctgtaacgaaacgccagtgctggaaggcctgacaccacgtatccaacgtctgcgtaaccactacctgactgtccgcccgagtgtttctatttaccgtgcactggcttttaccgaagtagtgaaagcgaatccaggaatgccaaccatcctgctgcgtgctaaagcgttccgtcacgcctgtgaaactgcgccgattttgattcaggacgatgagctgatcgtcggtcatccttgcggtaaaccgcgtgctggcgcattttcacctgatattgcctggcgctgggtgcgtgacgaactcgataccatgagtactcgcccgcaggatccgtttgaaatcagcgaagaagataaaaaaaccattcgcgaagagattgtaccgttctgggaggggcgctcgctggatgaaatttgtgaagcacaataccgcgaagctggcgtttggtcgttcagtggcgaaacattcgtcagcgacctctcctatcatcaggttaacggtgggggtgatacctgtccgggctacgatgtgctgctgtttaccaaagggatgaatggcatcaaagccgatgccgaggcgcatcttgccgaactgagcatggaaaacccggaagatatcgatcgcatttactactacaaagcagcgatcgacacctgtgaaggggtgatcaactatgcgcatcgtattgccgcccgtgcccgtgaactggctgccgttgaacagaacgcccagcgtcgagcagagctactgactatcgcagaagttaaccagaacgttccggcgaatccgccgaaaaccttgcaggaagcgctgcaaagtatctggacggtagagtcactgtttgagattgaagagaaccagacaggcctgtcacttgggcgtgttgaccagtactgctacccgatgtttgaagcagatatccgtgaaggtcgcctgactcatgaaggtgcactggagctgatgcaggcatttatcatcaaatgtgccgagctgatgtggatgtccagcgaactgggagcgaaatattttgcgggttatcagccatttatcaacctgactgtcggtggtcaaaaacgtagcggtggcgatgcctgcaacgatctcacctatctgattatggatgcagtccgttttgtgaaagtgtatcagccatcactggcttgccgtatccataaccagtcgccgcaaaaatatatggaaaaaattgtcgatgtggtgaaagcggggatgggcttcccagcctgtcacttcgatgactcccatatcaaaatgatgctgcgcaaaggctttgactttgaagatgcccgtgattactgcctgatgggctgcgtggaaccacaaaaatcaggtcgtatttaccagtggacttccaccggctacacccaatggccaattgccatcgagtttgtcctcaaccgtggtcgtatggtgctgtttgatagctatcaggggctggacacgggcgatctgaaagatctgcgcacattcgaagattttgatgccgcggtgaaaaaacaagttgctcatatcatacgcttgtccgccatcggtacggtcatcagccagcgtgtgcaccgggacgtggcaccaaaaccgctgatgtcgctactggttgaaggctgcatggaaaaaggcaaagacgtctctgccggtggcgcaatggtaaaccacggacctgggctgattttctctggtctggctacctacgtcgattcaatggcggccatccgcaaactggtttacgaagataagaaatatacccttgaacagatacgggacgctctgctggcaaactttgaaggttatgaaggcttgcgtcgcgactgtctgaacgcaccgaaatacggcaacgacgataactacgttgaccagtacgctctggatatcaccgagtggactgaacgtgaatgccgcaagtacaagatgctctactccaccctcagccacggtacgttgtcgatctccaacaatacgccgattggtgagctgaccaatgccacaccaaatggtcgtctggcgtggatgccgctttctgacgggatcagcccgactcaaggggcggataagcatggcccaacggcgattatcaagtctgtgagcaaaatgaacgttgaaaccatgaatatcggcatggtgcataacttcaaattcctcaaagggttacttgatacacctgaaggacgccacggcctgataactctactgcgtacagcatcaattctcggcaacggtcagatgcagttcagctacgtcgataacgaagtactgaaaaaagcacaacaggaaccggaaaaataccgtgatttgatcgtccgtgtagccggttacagcgcctacttcgtggaattgtgcaaggaagttcaggacgaaatcatcagccgtacggtgattgagaagttctga

SEQ ID NO: 7968 - DNA, 948 bp, Escherichia coli
gtgagcgcaaataaagaattaagcggacgaattttcaatatccagaaatattcgatctacgacggtgacggtatccgcacactgattttttttaaaggctgcaatcttcgctgcccgtggtgtgccaacccggaagggttaagcagccagtttcaggtgatgttctctcaggataaatgcatcaactgcggcgactgcgtcaatgtatgccctgcggggatccactaccgcgcggaagtcaacggagaaatgaagcatttcgtcaaccgtaataaagactgcattggttgtcgcaagtgtgaagaaatttgcacccaaaatgcactggatatcatgggtaaagatgtcacggtcagtgaattgatggagatcatcatgcaggactatgacttttacgtctcctccggcggtggtgtcactattgggggcggtgagatgagcttgcaaactgattttgccgttgccctgttcagtgaatgcaaaaagatgatgatcaacaccgccgtcgagacccagggtacaaccccgcttgcaaactatcagaagctggctccggtcaccgacaccttcctgttcgatatcaaacagatcgatagcaatcaccataaaacgctgttcggaattggcaacgaaggcgtgcgtcgcaatctggagtggctggtggattcgggggccaacgtgattgttcgtatgccgctgattcgtggttataacgattcgtgggaagcgattaccggcgctatcgactacgtccagaaactggccaaacgcggcaatattcgccgaatcgatatactgccgtaccaccagctggggcgcaaaaagtatgaacgactggagatgccctacccgattgttgaagacccgtcatacagcgtggaagagctggacaaactggaggcgtttttcgcccagttcgattttgatattcgcttagttcgtcattaa

SEQ ID NO: 7969 - DNA, 465 bp, Escherichia coli
atgaacagtttaggcgtaattgaaacacgtggtcttgtagccgcaatccaggccgtagatgccgcctgcaaagcagccggggtgacctgtattggttatcgcaaagtaggttccgggctggtaaccgtctgttttgatggggaaatcagcgcagtttacacggccattgaacgtggtattgctgtggcatccgcaaccgaccatcaggccaaatcactggtgatcgctcgcccggaacgctgcgtggttgaggctctcagcaacctgaaaggtcatccgccacgtgtcgaatcaggccagaaacctcatgcagagctgccgacagttgcagaaatggctgtctgcgaggaaaccgctgaagtttctacagatactgaaactgcaatgcctgtacctgagaaagaagtgcaagcccccatcgtggaagtgaaaagccacgggcataagaaagggaagaaagcatga

SEQ ID NO: 7970 - DNA, 621 bp, Escherichia coli
atgattgacgcactgctacaggaaaaaatcaccacgcgactgatcgatactgctcccactattccggtcggtgtttctaatcgtcatgtgcatctgtcgcaacaggatgttgaagcactttttggtgttggctaccaacttacgccctttaagccgttgcgccagcctgggcaattcgccgctgaagagtgtgtaacggttgtcggcccgaaaggttctctgactcacgtccgcgtacttggaccggttcgcccgacaagccagctggaaatctcacgtgccgattgttttactctcggcattaaagcgccagtgcgtgaatccgggcaactggaaaatgccggtgacgcactgttggtggggccgaaaggtcatgttgagttgcattcacaagtcatttgcgcctggcggcatattcatatgtctccccaggatgctcgtctgttgaatgtcagcaatgggcagaaggtgagtgttcgcagtcatggtgaacgccagttaacgttcgatgaagtggtggtacgggtgcgcaatgattttgcccttgaactgcatatcgatacggaagaagccaatgctgccggactgaaaaacggggcgcaggtaacactgattcgctaa

SEQ ID NO: 7971 - DNA, 666 bp, Escherichia coli
atgaccgaacaacagatcgacaccatcgtcaacctgatcctccagcggctgcaacctgcggtactggtcatggtgacatctgcggatggctatcgggatctgattcatcagcggttggctcgttgtggcgaacggttgcatctggcgctggatgaaacaatcagtgatagcgaacggtggcagcaaattggtgacgtgatacccgctaaaacatggcaacacaaattgccttcaacgccctataaagcgttattgctgccgtttttgagttacccgctggctgtagatattgtcaacggtacgctgcaaagcccggtagcgcaaagggttcacgatgcgctactggcgggtattccggtactggcactgcgttattactgcgatccgcacagcgaattaaacgcgcttcgcggtactgttcacagcgactacgcggcgcatctttccgccacgcttaccggccttagcgagtgtggcattacgttatgttccatgaatgaaatgctggaaaaactggcaacagacgtcagcagtcaatcgcctgtaagtcatcatcggcgttatctgactgtcaccgatatcgtcaataatccggcactggcaaaatcacccgacgccgtactgaccgatgctgcggtcgattttttgaaagcacagaaaaaataa

SEQ ID NO: 7972 - DNA, 402 bp, Escherichia coli
atgtcttcgaaaacaaaatgctggctatggatgttactggtcatcctttctgaaacctctgcaacatccacacttaaaatgttcgataacagtgaggggatgacaaaaacgctgctgctggccctaatcgtcgtactgtattgcatttgttactactcgctttcacgggcagtaaaagatatccccgttggtctggcttacgccacatggtccggtactggcattttgatggtttcaacccttgggattttattttacggtcaacacccggataccgccgccattattggtatggtcatcatagccagcggtattatcattatgaatctgttctcaaaaatgggcagtgaagaggcggaagaaactccagttaccaacctcgataaaaaaatcgctaactga

SEQ ID NO: 7973 - DNA, 330 bp, Escherichia coli
atgtttaatattggatttttatggctggcactttccatcggttctgaaataaccggtacgtcaatgatcaaaaaaaccaatggttttaggcgactgtggccttctgttctggtggtatgtgcttattcaacgtgttatttcgctctgaccagagcaatgagtactattccggttggtgttgcctattcactctggtgcggctttgggattgttggcgtgacaattttctcgatgattctttataaacaaaagcccgatttacctgccatattctccatgttgctgattattagtggcggcattattatgaatgtattttcaaacatgtaa

SEQ ID NO: 7974 - DNA, 2448 bp, Escherichia coli
atgataagtttatcaccaccgactatttgcaacagtgccctcgacagcctgctcatatcagagggtgaacaaccttcccgtctggcatggctgctacagcctccgggtaaaataaacggtaaaaatgtgctgcaacatatcgaccggcttaattccatcgctgcgctggggttgcctgatggtattgcactttccgttcaccagaacaggttgcttaaactggcgcgtgagggccggaaaatgagcagcagagatctggctaaattcaccgatgtcagacgttacgctacgctggtttgtgtcattcaggaagcgcgggccacactgactgatgaggttatcgaactgcacgaacgtattctgggcactctgttcagccaggcaaaacgcacacaagccgagaggcttcagctgacggggaaactcatccagagcaagttgaagcaatattttactgtcggtcaggcactactgcatgccagagaatccggtgaagatccctgggcagcgatagaagatgtccttccctggcaggagttcatcaacagcctggaagaaacacggtttctgtcccgtaagggcaatttcgacccgcttcacctgatcaccgaaaaatacagtacgctgcgtaaatacgccccgcgtatgctgtcagcattgcagttcatggcgacacctgcggcgcagacgctcagcgatgcgctggacaccatcagggaaatgtaccgtaaacaacttcgtaaagtgccgctatcggcgccaacaggatttatccctgaaagctggcgaaaactggtactcacgccttcaggaatcgaccgcaagtactacgagttttgcgtaatgaatgaactcaagggggcgctacgttccggtgatatctgggtaaaaggatcgcgccgctacagaaattttgatgattatctcatcccgactgctgagtttgagaaatcccgccacaatgaccagttacagttggccgttcagaccgattgccaggcatatcttcaggcccgtatgacgcttcttgcatcgcgtctggaagaagttaacgcgatggcgcttgccggtgatttgcccgatgttgatatttcagataaaggagtaaaaatcactccgctggagaacagcgtcccttcgggtgtttcgccctttgccgatttggtttatggcatgcttcctcatccgaaaattacagagatactggaagaagtggacagctggacggggtttacgcgtcacttcgcgcacctcaaaaataataacgtcagaccaaaagacggaagactgttgctgaccaccattctggccgacggcatcaatctggggctgacaaaaatggcggagtcctgcccgggggcaacaaaatcgtcactcgaaggtattcaggcatggtacatcagagatgaaacttattcagcggcactggccgagctggtcaacgctcagaaagcgcggcctctggccgcattctggggcgacgggacaacatcatcgtcagacgggcagaactttcgggtaggcagtcacggacgttatgccggtcaggtcaatcttaaatatggtcaggagccgggcgtgcagatttatacgcatatctcagaccaatacagcccgttctatgccaaagtgatcagccgggtgcgcgactcaacccacgtgcttgatggcctgctgtaccatgaaagcgatctggaaattaccgagcattacaccgataccgcaggcttcactgaacatgttttcgccctgatgcacctgctgggattcgcttttgcgccgaggatccgggatcttcatgacaagcggctgtttattcatggaaaggccgaacgctatccggggcttcagtccgtcatatcaacaaccagcctgaatatcaaagacattgaggcacactgggatgaggtattgcgcctggcaacctcgattaagcaggggacagtcaccgcatcgctgatgatgaaaaagttagccagttacccaaaacagaatggacttgccaaagcgctgagagagattggccgcattgagcggacactatttatgctggactggttccgtgatcccggtctgcgccgacgcgtacaggcggggctgaataagggtgaggcccgtaatgcccttgcgcgagcggtctttatgcaccgtctgggtgaaataagggatcgtgggctggagaatcagagttaccgcgccagcgggctgacgttactgacagcggcgatcacgttgtggaacacggtatatatagaaagagctattgagtcactaaaacgaaaaggtatcccgataaatgagcaactggtatctcatctttctcccctgggctgggaacatatcaatctgagtggagattacgtctggcgtaataatcttaagctgggatccggaaaataccgctcattacgcacagtcgacaccatattgtacaaaaaacagtcttag

SEQ ID NO: 7975 - DNA, 456 bp, Escherichia coli
atggttgtgtccgctattgccagtacacctcaaactgagttctcatggttccgatacggacagtataacgaaacgggtatttacatctcgatcgagaagaccattatcattacaatcaccgtttctggtgggtgctttaaaaaagaatacagcattgtctcccacatgctggtcactgacaccataacagaggccaccctgtacgaaaacgggctgtatacgcgccacatcagactcagtcgcccagtatctgacagcaaataccccttgccacccggatctcagctcattaaaaatatgaccttacgactgcgcctgcaggatcagcaggaagaaacatccgtgacattatttcagggaaaaataagtaccgacggaaataactattccatcatcaaaggtaaagtaagctcagtacttctgttattaaaaatgctgcagattaatcatgcctga

SEQ ID NO: 7976 - DNA, 672 bp, Escherichia coli
atgactgacggcaaactccatgccgatgataccccggtccaggtactgctgccgggtaataagaagacgaagaccgggcggttgtgggcgtatgttcgtgatgaccgcaatgccgggtcagcgttggcacctgcagtgtggttcgcttacagcccggacagaaaaggcatccatccgcagactcatcttgcttgcttcagcggtgtgctgcaagcggatgcgtacgccgggttcaacgagctgtatcgcaatggtgggataacggaagctgcctgctgggctcatgcccgccgaaagatccacgatgtgcacgtccgcatcccgtcagcactgacggaagaagccctagagcagatcggtcagttgtacgccatagaggcggatataaggggaatgccggcagagcagcggcttgctgaacgtcagcgaaaaacgaaaccgctgttgaaatccctggaaagctggttgcgtgaaaagatgaagaccctgttcttcggctctggccatggtggtgagcggggagcgctactgtacagcctgatcgggacgtgcaaactgaatgacgtggatccagaaagctaccttcgccatgtgcctggcgtcatagcagactggccggtcaaccgggtcagcgaactgcttccgtggcgcatagcactgccagctgaataa

SEQ ID NO: 7977 - DNA, 2166 bp, Escherichia coli
atgaaaactcaaataactttcgctgcgcttttgccagcattagcgtctttcataccgcttcatgctcatgcctcgtctacttctgaagatgaaatgattgtcacgggcaacaccgccgccgacaccaccgattctgccgccggtgccggtttcaaaacgaacgatatagatgtcggcccgctgggaacgaaatcctggatcgaaacaccatattccagcaccactgttactaaagagatgattgaaaatcagcaggcgcaaagcgtcagcgagatgctgaaatactctcccagtacgcaaatgcaggcgcgcggtggaatggatgtcgggcgtccgcaaagtcgggggatgcagggcagcgtggtggccaacagccgtctggacgggctgaatatcgtttcaacaaccgcgtttccggtggaaatgcttgagcgcatggatgtgcttaacagtttgaccggcgcgctgtacggcccggcgagcccagcagggcagtttaatttcgtggcgaagcgcccaaccgaagagacgctgcgtaaagtgacgctgggctatcaaagccgcagtgcgtttaccggccatgccgatctgggtggccattttgatgaaaacaaacggtttggctatcgcgtgaacctgcttgatcaggaaggggaaggcaatgtgcatgacagcacgctgcgtcgcaaactcgtttccgttgcgctcgactggaatattcagccgggcactcagctacagctcgacgccagccattacgaatttatccagaaaggctatgtcggtagctttaactatgggccgaacgtcaaactgccgtctgcgccgaatccgaaggacaaaaatctggcgctcagcactgcgggcaacgacctcactaccgataccatcagcactcgcctgatccactactttaacgacgactggtccatgaacgctggcgtgggctggcagcaggctgaccgcgcgatgcgtagtgtttccagtaaaatactcaacaatcagggcgatatctctcgttcgatgaaggattccaccgctgccggacgttttcgcgtcctgagcaacaccgccgggctgaatggtcatattgataccggctctatctgccacgatctgtcactttctaccacgggatatgtctggtcgctttatagtgccaaaggaacaggttccagctatagctggggtacaacaaatatgtatcacccggatgcgatagatgagcagggcgatggcaaaatccgcaccggcgggccgcgataccgctccagcgtaaatactcagcagagcgttacgctcggcgatacggtgacatttacgccgcagtggtcggcaatgttctatctcagccagagctggctgcagactaaaaactacgataagcacggtaatcaaacgaaccaggttgatgaaaatggtttaagtccgaacgccgcgctgatgtataaaattacccctaacacaatggcctacgttagctatgccgattcgctggagcagggcggtaccgcaccgacggatgagagcgtaaaaaatgccggtcaaacgctaaacccgtatcgcagcaagcagtatgaagtggggctaaaatcggacatcggcgagatgaatctaggcgccgcgctgttccgactggaacgtccgtttgcctatcttgatacggataacgtgtataaagagcagggtaaccaggttaacaacggccttgagttaaccgctgccgggaatgtgtggcaggggctgaatatttacagcggcgtgaccttcctcgacccgaaactgaaagatacggcgaatgcctcaaccagcaataaacaggttgtcggcgtgccgaaagtgcaggccaatctgttggcggaatacagtttgccgtccataccggaatgggtttacagcgctaacgtccattatacgggcaaacgcgcggcgaacgataccaacacctcttacgccagcagctataccacatgggatttgggaacgcgttacaccacgaaagtgagcaacgtcccaaccactttccgcgtggtggtaaacaacgtgtttgataaacattactgggcttctatcttcccatcgggtaccgatggcgataacggttccccaagtgcgtttatcggcggcggccgcgaagtgcgtgcatccgtcaccttcgatttctga

SEQ ID NO: 7978 - DNA, 231 bp, Escherichia coli
atgaccggagcattgcgccgggatgcgtatgttctccctggacagacagtctcagttcgtagaatctataaattactgctactgatgctgccggggaaaggcgtaacgaaaaaacagcctccgttaccggacagcaaggaggctgaatggagtttacaggatttgcttttttataatgtctggccatgcagtaaaaccggacaggttttattatcatgtgaggtattctga

SEQ ID NO: 7979 - DNA, 369 bp, Escherichia coli
atggcagaatccgggtttatttctctcgaattatcccgctcacaggcgcctgttacaattagcaagacagctatactctttgcagaagcagacaatgataccccggagtcaactcatctacattgcgttggtggtatcactcataccgtaaatggtgtttttaacgatattgcagaattacttccgcgattcattaagacgcaccgtcgggataatggtcagcccgcagtggctatccatgactggaatgtttcatacattgaaaaaggcaacgatgcttctgctgttgtttacttcacagaatcaggctcaagtataaccgtccgtgaatcttacgaagacataatagcaaagtttcacgctctttag

SEQ ID NO: 7980 - DNA, 210 bp, Escherichia coli
atggcagatagtgcagatattgcttatgaaaatgaacaattcagcatgagcatcagactaaaaaatcgtatccggaatagactccctgaaacaggattctgctataactgcggagaacctgttaagactggattgttttgtgatggtgactgtcgggaagattatgagaaacgtgaacgatttggacaaataaatactgacaatgtttaa

SEQ ID NO: 7981 - DNA, 477 bp, Escherichia coli
atgctgattattattatgacccgggacagatatctggaatatggcctgatgcgtatactgagcggatatcaggtcacgacaggcagagagctgtttaatgccggaaagcaacgtcagtcacttcccgaagacagttatgtgattctctgtgaccgtaatctggaaaggcttacatactctatgttctgtgggcgtcggtttcttgtcattcctgtttcctctgtgagatgcctgacagatatcaggcaaaccatccgccgtggagcgtggctgttcggacatacggcaaggccactgacccggacagagatggtggtggtcttcggggttgttttccatgactacgggtttacctttctggcagaccggctggggataaccatgaagacggtatgtgcgcatctttacaatgcgatggagaaaaatggtatgcgcggcgtcagtattaaatatctctgcaacaccatagaccggtaa

SEQ ID NO: 7982 - DNA, 207 bp, Escherichia coli
atgctgaactatcgcataaggtcagtgcagctatttattgtaaacggtcgggctgacagggcgcaggtgcgtctggaatgcgacgatgaagccgtttttgaatgttatcttcttgctgaaggggaaggggaactgaaagaactgagcctgtcagagctggaagagcgggcgctgatgtatgcggcagacagtttccgttatgaatga

SEQ ID NO: 7983 - DNA, 411 bp, Escherichia coli
ttgcatccggacgtagcaccactgctgttggttcgtgaatgcatgccagaccagttcgcatcgctgggaactgcagcatgcgttgtcgacaaagccggaaacggcatggctctcagcagttggtcggcgtcagatgcaactggtgccgtgacggtgggagttgtggcgaagggcacacatcagaattcaatggcacagggggagttttcctgtacaacccgtgaaaatgaagtttacatcagatatgactcaggtgtcacaaaccctgtcagtccgcggggaccggataaaatccggggtcccggtggtatcagtgatggtgcatgggatacggaagcagccactatcaggcaactgaacccgctgacggatgaggtgtacagtggcatcagtggacggattacagcataa

SEQ ID NO: 7984 - DNA, 1080 bp, Escherichia coli
atgaaaagaatctttttcataccattgtttttaattttactccctaagctggcggtagcgggtccggatgattatgtgccttcgcagatagcggttaatacatccacattgccaggtgttgtgattggtcctgctgatgcccatacctatccccgggtgataggagagctggcgggaacaagtaaccagtatgtttttaatggcggtgccatcgctctgatgcgtggaaagtttacacccgcactgcctaaaattggaagtattacgtatactttccatcaaggaaacagccgtgattcatctgattttgatatctatgatattggtgtatccggactgggtattattattggcatggcgggctattggcccgcaacgcctctggtccccataaatagctcaggtatatatattgaccctgtaggtgccaatacaaaccccaatacttataacggtgcgacagcaagcttcggagctcgtttgtttgttgcttttgtcgcaacgggaagattacccaatggatatataacaatacccaccaggcagcttggtactattttgttggaagcaaaacgtacaagtttaaataataaaggactgacagcacctgttatgttaaatggtgggcgcattcaggtacagagtcagacatgtaccatggggcaaaaaaactatgtggtgccattaaataccgtatatcaatcacagttcacatctttgtataaagaaatacagggaggtaaaattgacatacacctacaatgcccggatggaattgatgtttatgctacattgacagatgcatcacagccagtgaacagaacagatatattgaccttaagcagtgaatccactgcaaaaggatttggcatcaggctatataaagacagtgatgtaactgccatcagctatggtgaagactcccctgtgaaaggaaatggcagtcaatggcacttctccgattacaggggagaggtaaatccacatatcaatttaagagccaattatataaaaattgctgatgcaactacacctggaagtgtgaaggctattgcaactattactttctcatatcaataa

SEQ ID NO: 7985 - DNA, 2535 bp, Escherichia coli
atgaacgctaataatctgtcatgcctgatttactgtcgttgttctcttctgctttttgctgcattagggttaacagtaacaaaccattcatttgctgctgaagaggctgagtttgattctgagtttttgcatttggataaagggataaatgctattgatatccgccgctttagtcatggtaaccctgtgcctgagggcaggtattattctgatatttatgttaataatgtatggaaggggaaggctgatttgcagtatttacgtactgccaataccggtgctccgacgttatgcctgacgcctgagctgctttcattgattgatttagtcaaagatactatgtcgggaaacacctcctgctttccggcgtcaacagggctttcttcagccagaattaattttgacttatcgactttaaggttgaatatcgaaatccctcaggcactgctgaatacacgtccaagaggatatatttcccctgctcagtggcaaagtggtgttcctgcagcatttataaactatgatgctaactattaccagtatagctcttccgggacgagtaacgaacagacttatctgggattaaaagctggattcaatttgtggggatgggctttgcgccaccgtggcagtgagagctggaataatagctatcctgccggatatcagaatatagaaacaagtataatgcatgaccttgccccattgagagcacaattcacattaggggatttttatacgaatggtgagctaatggatagcctcagtttgcggggagtcaggttagcatcggatgaacgaatgttacccggctctttacgtggctatgctcctgctgtccggggaatagctaacagtaatgctaaagtaaccatttatcaaaatgctcatatcctctatgaaacgacggtgccagccggaccatttgtcatcaatgatttatatcccagtggatatgctggtgaccttctcgttaagataacagagtctaatggccagacacgaatgttcacggttccttttgcggccgttgctcaactcattcgtcccggatttagtcgctggcaaatgtcagtgggaaagtatcgttatgcgaataaaacatataatgatttaatagcacaaggcacctatcaatacggcctgacgaatgatattactttaaacagtggtcttaccacagcttcaggatatacagcggggttagctggcctggcctttaatacccctctgggtgctatagcatctgacattacattgtccagaacagcattcaggtattccggtgtaacgcgtaaaggttatagtctgcactcaagttatagcatcaatattccagcctcaaacacaaatataactctggcggcttatcgttattcatcaaaagatttttatcatctgaaggatgcgctatcagctaatcacaacgcgtttattgatgatgtttctgtaaaaagtacagcgttttatcgtcccaggaatcaattccagatttcaatcaaccaggaattaggtgaaaaatggggtgggatgtatttaacaggaacaacctataattactggggacataaaggaagtcgtaatgaataccagatggggtacagcaacttctggaaacaactcggctatcaaattggattgtctcagtcaagagataatgagcaacaacgccgtgatgacagattttatattaattttactctccctctgggaggaagtgttcaaagcccggtgttttccactgttttaaattatagcaaagaagagaaaaatagtattcagacatcaattagtggtactggcggggaggataatcagttctcttatggtatttcaggaaacagccaggaaaacgggccttccggttatgcaatgaatgggggttatcgttcaccttatgtaaatataaccacaacagtcgggcatgatactcagaataataatcaaaggtcatttggtgcgtcgggagcggtggtcgcacacccctatggagtgacattgagtaatgacctgagtgatacttttgccattatccatgctgaaggagctcagggggctgtcatcaataatgcctctggtagtcgtctggatttttggggaaatggtgttgttccttatgttacaccctatgagaaaaatcaaattagcatcgatccctccaatttagatttgaatgttgaattatcggcgacggagcaggaaatcattcctcgtgctaatagcgccacgttagtgaaatttgacactaaaacaggaagaagtctgttatttgatattcgtatgtctactggcaatccccctccaatggcttctgaagttctggatgaacatggacagttggccggatatgtcgctcaggccgggaaggtatttaccaggggactccctgaaaaaggtcatctcagcgttgtatggggaccagataataaagacagatgttcatttgtatatcatgttgcacacaataaagatgatatgcaatctcagctcgttcctgttctgtgtatacagcaccctaatcaggaaaaaacatga

SEQ ID NO: 7986 - DNA, 726 bp, Escherichia coli
atgctaaggtttgtgctgtttttttttactctatctgtatctgcagttgttcagggtagtgtagttatcatgggaacccgtgttgtttatccggcgactcaaaagagtattagcatacgtttaaataatgacaatgaatctccggcattagtccagtcctggttagacgatggagatgcagcagctccccctgagtcagtccacgttccttttatcattactccgccaatatttcgtatggactctaaatcaggacaaacagtcagaattgtatatacaggcgagtcactaccgaaagaccgagaatctcttttctatctaaatgttctggatattccagcaaagcccagggcaaaaaaagactccgataactcagagcagcggaataataattatttgcaactagctattcgtagtcgcataaaatttttctttcgtcctgctcacctgaagttaacaccaaatgatgcttatctgaaagtgacctggcaccaggaggaaggccgaattaaagcagttaatccaacaccttattacataacctacaacaaaattgcagttgaccagaataagcacttaacgcctgttgaacatggtggaatgattccccctttctcttcaacagtatttgcacttaaaggcagaactgcgccagccagcaaagtttcctgggttattgttaatgattacggaggatatcagcaaggagaatctgttctggagtaa

SEQ ID NO: 7987 - DNA, 549 bp, Escherichia coli
atgaaaataaaagttatagcattggctacatttgtttctgctgtgtttgctggttcagctatggcctatgacggaacaattacgtttaccggtaaagttgtagctcagacctgcacagttaatacaagcgacaaagacttagcagtaactttacccactgttgccacttcatctctaaaagacaatgctgctacgtcagggctgacaccctttgccattcgtttaactggttgtgcaactggtatgaatagtgctcagaatgttaaagcgtactttgagccttcaagtaacattgacttagctacacataatttaaaaaatactgctactccaactaaagcggataatgtacagattcagttgctaaatagtaatggaacttcaactattcttttgggggaagcggataatgggcaagatgtccagtctgagacaatcggatctgatggaagtgccacattgcgttatatggcccagtattatgcaacaggacaatctaccgcaggggatgtaaaagcgacggtccattataccattgcctacgaataa

SEQ ID NO: 7988 - DNA, 399 bp, Escherichia coli
atgggaaattacacgtcggcattgttgctccttgcccgtctgatgctggcatgcctttatatgatatccggcgttcccaagctgctatcattcactggcactatcgataaaatggcctctcttgggcttatatttccggcgattactgcagcaatagtggtccttgtcgaaatcgttggagcattaatgattgtttttggttttttcacccggccagtgagcattattctgtgcctgtataccgtgcttgcttcatttcttggacacgcattctggacgatgccagctgaacttgcacatggaaatatgatccatttttataagaatatctgtatttcgggtggttttcttgcccttgttgtatcagggcccggacgaatctccgtcgacagacgctga

SEQ ID NO: 7989 - DNA, 1218 bp, Escherichia coli
atgcctctttcccgacgtaattttattcagaatgccgttttaggaatatctgccgcagggctgtcagctgcaccggcccttgccaaaaatatctcatcttcaacggcacatatcatcagtaaaacgtctggacatgctgatacatcgaccaacaaatctcttcatatcatcagtctggacagactggagacttcagcaaaagatgtgatgacggaagctgcgtatgcatatattgctcatggtgctggagatgagtggacgtatcatgagaaccgcagggcattcagtgattatcctttgttacctcaccgactcagtggagttgctgcccacagcattgatatccggactgaccttttgggccatcatctggaacatcccctgctgatagcacctatgggcgcgcatatgttcgtccatccggaaggggaggtgattgctgcagcgggtgcagaaaaggccggggcactttatgaatcatcaggggcatccaaccgctctctggaggatattgcaaaagccagtaaaggacctaaatggttccagctgtattttaacgcggatgccggtgtgacccgaagtttactggagcgtgcaaaagcggcaggctattcagccattattatcacagcggatgcgcttggtcccgggacaagtgatgcttttctcagcatgagctcgcctttccctgcaggagcgacgttcggtaatcatgacccccgttacggtggcaaaggtgatttttttaaccaaaaagttgagctgaccccggctgatattgagtttgtaaaaaaaatcaccgggctgccagtcattgtcaagggcatcctcaggggtgaggatgcagtggttgccattgatgcaggagcagatgccatccaggtgtctaatcatggtggtcgccagattgatggtgttccttctgccatcagccagttgcaggaagttgctgcaagagtcgggcacaaagttccggtcatttttgacagcggtattcgcagggggattgatgttgtaagggctatctctcttggggcaacggctgttgcggtcggacgtcctgttctttatggcatcgcagcaggtggtgtcgggggcgttgccggtgtcattgagcacctgaagacggaactgaggacggcaatgttactgagtggtgctcgtacacttaaggatttggctcagggctttatcagaaacaaggagactgagcattga

SEQ ID NO: 7990 - DNA, 384 bp, Escherichia coli
gtgtatgacacgataatcaagtatcagaacgcactgaatgccggggatacaaaaaccatcctgggcctgtttgctgatgaaagttattcccagtggaatgataagttgacggctgacaatacagaaaaacgccaggggcagtacgatgatctgttcaagcgtgaaaagtttgagaccgattttgcgtttgactctatctggatcaacggagataccgcggttgtccgcactcaccaccatgtgggttctgttgtaacgaactttaaagagcagaaaaccattattgacctgaaccgtgaagtttttgtcctcagtaaaattaatggtgaatggaaaattttcctttataccttcaacaccaacccgcttcagggcgtggcatga

SEQ ID NO: 7991 - DNA, 1197 bp, Escherichia coli; identical to SEQ ID NO: 5901

SEQ ID NO: 7992 - DNA, 525 bp, Escherichia coli
gtgattattgatgaaagtgccggtgaggttgttatcggcgcgaatacccgtatttgccacggtgccgttattcaggggccggtagtgattggcgcaaactgcctgataggtaattatgcgtttattcgtcctggcacaataatcagcaatggcgtaaaaattggttttgccaccgaaattaaaaatgcggttattgaagcggaagcaacgattggtccgcaatgctttattgccgactcggtagttgcaaaccaggcatatttgggcgcacaagtacgtaccagtaatcatcgtctggatgaacaacccgtgtctgttcgaactccagagggaattatcgctaccggatgcgataaattaggttgttatatcgggaagcgttcacgccttggcgtacaagttattattttgcctgggcgaattatttctccgaacacacaacttggcccgcgcgtgattgtagaacgtaatttacctagtggaacttactcactccgacaagaacttatccgtacaggagattaa

SEQ ID NO: 7993 - DNA, 435 bp, Escherichia coli
atgtccggtaatatctatacgctgtacaaatcccactgtgaaaatgttggaaagtatcggggcattgaaatcagtggggtagtgtcatcagtcgaaataagcaaagttgaatcaagggcaacattacttactcttttggaccttgtcttacatgagcaccggaagaaattcggcactccctataatcagttgaatgggaaaaaggctctggttcaccttattctgatgaagcatcactggatgccaaaacagattaatgagatgaaatttgatgaacttcttctttcaattcaggatgaactcacacttgataaaataagcgtaaccgcccagaaatttttagattatcgagactggagatcacaaattcatcactttgatgattttgacgaaaatgaatgggatcctaatttgtctgcacaatatctaaagtaa

SEQ ID NO: 7994 - DNA, 207 bp, Escherichia coli
atgcacaaaacagaacccaaaatcgtcgcgcctggctacacagatgaggaaatttatgagtggatgacaaagaagctggcagctataaaccagcttcgtgaagtgctgtcttatcgacaggaaacaatagactccttaaaaaaactggatcaggaaatcacggttttatcacaggatgttactttagatattgtgcagacaaattag

SEQ ID NO: 7995 - DNA, 369 bp, Escherichia coli
atgattttgcaacgtgctggtggaactcacttcattgcagatgctgtggcgcagtctgcaaatggcgtctttgtgtctcttcctgacgtcgaggatgtggacaacgctgatattaaccagcgtctgctggaagtcattgaacagatcggcagttattcaaaacagattcgttcagcaatcgaagacggtgtagtggaaccgcatgagaagacagcaattaatgacgagctctacctctcaatttcgaagctgcaggagcatgcagcactggtctacaaaattttttgcatttcagaaagtaatgacgcccgcgagtgtgcagctccgggcgccgtggcgtgtcgtgactgtggagaaactaacgcatga

SEQ ID NO: 7996 - DNA, 339 bp, Escherichia coli
atgaacagtttaacaacacactaccgtcgctcgcaactgattgcgcttcctgtaccgggtggaaaagcgaaggtggaatattgctatgcagtgaatgtaccaggtgacagggaaattgtaacccacagctttgcagagtgggctgtgggtgatttcaaccggcagaaggagacagtcctttgcgacaagttaaccgctggttcaaagatcactacggagtgcccgtcagagtcattcgttgggagccggaaacacaacgtgttatctacctccgcgaaggctatgagcatgagtgcttcagcccgctcgaacagtttcgtcgtaaattcagggaaatag

SEQ ID NO: 7997 - DNA, 942 bp, Escherichia coli
atgagcactaaattaaccggctatgtatgggatggttgcgctgcatcaggcatgaaattatccagcgtggcaattatggcccgcctggctgatttcagtaatgacgaaggtgtgtgctggccatcaattgaaaccattgcccgccagattggcgcgggaatgagtaccgtcagaacggctatcgcacggctggaagcagaaggctggttaacgcgtaaggcgcgtcgccagggtaaccgcaatgcgtcgaatgtttatcagcttaacgttgcgaagcttcaggcagcggcattttctcaactgtcagattctgacccgtcaaaatctgacgcatcaaaatctgacccgtcaaaatttgatgcgtcgaaatctggcaaaaaagcgggttttcacccgtcagaatctggcggggatccgtcagtaaaatcaaaacatgatccgtcagataaaaaaacttctcgtccggacgcttcgcaaccggacacgcagacggctgaacaggagtttttaactcgccatcctgatgcggttgtattcagccctaaaaagcgccagtggggaacgcaggatgatttgacctgcgcacagtggctctggaaaaaaatcatcgccctgtacgagcaggccgccgaatgtgacggcgaggtggttcgtcccaaagaaccgaactggacagcctgggcaaacgaaattcgcctgatgtgtgtgcaggatggtcgtactcataaacaaatctgcgagatgtacagccgcgtcagtcgcgatccgttctggtgccgtaacgtgctcagcccgtcgaagctgcgggaaaaatgggatgagctttccctgcgcttatcgccgtccgtcagcacgtacaccgaaaaacgcgaagacccgtacttcaaagccagttacgacaacgtggactacagccagatcccggcaggattcagggggtga

SEQ ID NO: 7998 - DNA, 495 bp, Escherichia coli
gtgagcatgagtcttttgaatgacgttcagaaattcattgaagcccatccgggctgtacttccggagatattgcggatgcttttgccggttactcacggcagcgcgttctgcagtcagcaagcaagttacgtcagagtgggcgtgtggctcaccgttgtgaaggagatacacgcagacatttcccgcgcctgactgagagagcgcaggaaccggaaccacaaccagttcgtgaaaccagacctgtgcgcaatttctatgtcggcactaacgatccccgtgtgattttgtgcctgacccgccaggcggaagaactggagtccaggggcttataccgtcgtgctgcaaccgtgtggatggcggcattccgtgaaagccactcccagccagaacgaaacaattttctggcgcgtcgtgagcggtgcttacggaaaagcagcaagcgcgctgcatcgggtgaagagtggtatctgtcagggaattacgtgggggcttaa

SEQ ID NO: 7999 - DNA, 654 bp, Escherichia coli
atgagtaataaatattgccaggcgctggtggaactgcggaacaaaccagcccatgaactgaaggaagtgggcgatcagtggcgcacgccggacaacattttctggggaattaacaccctgtttggcccgtttgttctggatctgttcactgacggtgataacgccaaatgtgccgcgtattacacggcggaagacaacgcgctggcgcatgactggtcagaacgtcttgcggagcttaaaggtgctgcctttggtaatcccccatacagccgcgccagtcagcatgaggggcaatacatcaccggcatgcgttacatcatgaaacatgccagtgccatgcgtgataagggcgggcgctatgttttcctgatcaaagctgccaccagcgaagtgtggtggccggaagatgcagatcatattgcttttattcgcgggcgtattggttttgaactgcctgtctggtttatcccgaaagacgagaagcaggtaccgacaggagcttttttcgctggtgctattgctgtttttgacaagacctggaagggaccggcaatcagctacatcgggcgcgatgaacttgaggcatgtggtgaggcgtttctggcgcaggttcgccagcaggcggaaaaactggtcagggagatggcggcatga

SEQ ID NO: 8000 - DNA, 390 bp, Escherichia coli
atgaagctgatcctgccttttccgcccagcgtgaacacgtactggcgacaccccaacaaaggggcgtttgctggtaagagcctgataagcgcggcggggcgaaaattccagagcgcggcgtgcgcagcaatagttgagcagttacgtcgtctgccgaaaccaacgtcggcacctgcttcagtggagatcgtgttgtttcctccggataaccggatccgcgatctggacaactataacaaggcgctgtttgacgccctgacccacgcgggtgtgtgggaggacgacagtcaggtgaaaagaatgctggtggagtggggaccggttatcccggaagggaaggtcgagatcactatcagtaagtatgagaaaacggcgggtgcagccgcctga

SEQ ID NO: 8001 - DNA, 156 bp, Escherichia coli
atgcagcaactggaagccatactgttcacgcagctcaacgaagcgatcgatcagcttttcttgcagactgttaaactggtcgctgccctccggcaagttaccggcgttaagctgatcttccagccagatccactgaaagaacgccgcctcgtatag

SEQ ID NO: 8002 - DNA, 567 bp, Escherichia coli
atgcttgaacttaatgctaaaaccaccgcgctggtggtgattgatttacaagaaggcatcttgccttttgccggtggtccacatactgccgatgaggtggttaatcgcgccgggaagctggcggcgaaatttcgcgcgagcggtcagcccgtgtttctggtgcgtgttggctggtctgccgattatgctgaagcattaaaacagccggttgatgccccttcccccgctaaagtgttgcccgaaaattggtggcaacatcctgtagcattaggtgcaaccgacagcgatatcgaaatcatcaaacgtcaatggggtgcgttttacggtacggatctggaattgcagttgcgccgccggggtatcgatacaatagtgttatgtgggatctcgaccaatatcggtgttgaatccaccgcccgcaatgcctgggaactcggttttaatctggtgattgccgaagatgcctgtagcgccgctagcgccgagcagcacaataacagcattaatcatatctacccgcgcatcgcccgtgtgcgtagcgttgaagagatcctccacgcgttatga

SEQ ID NO: 8003 - DNA, 552 bp, Escherichia coli
atgcatgaaaatatttggtttacatataaagcccgtattcaagcgcaccatagactagaatggcttgaaaaacactctcaatttatcctcgtttggtatgctatattgagtgcggtactttcaattataacgttacgatttccaaaatttctaggagataatacagatatcgttgcggcaatactttcagtggctctactgggtatttctctgatcgtatctaacctagattatcgtggtcgagcaatagccatgagaaggaattatattgcactacagagactctattttgatattaataacggccaacagttaactcttgaacagaaagaaaaatattttaatttgctcaatgaggttgagaatcatcgtgacatagatgataaagtttcaagggtaactcaagttggacttacgactagactccccacacaaaaagaaaaaataattgttaaattatggatattacgtcgaatgtttattactgtcggcctttatatcctcccattaatatgtctttggattgactatgaatgcaagcagagtttttaa

SEQ ID NO: 8004 - DNA, 3801 bp, Escherichia coli
atgagacactttatctatcaggacgaaaaatcacataaattctgggcggtggagcagcaaggcaacgagttacatgtcagttggggcaaagtcggcactaacgggcaaaaccaggtaaaaagctttgctgatgctgcggcggcggaaaaagcaaagcttaagctgatcgcagagaaaacgaaaaaaggctatgtggaaaatgcttctgcaaacgtgcatatcacccccatcaccaaagccactcctgaagttgaaacttctcctgagagtaaaaaccaacgcccctggctggctgatgatgcggtcattcggctaactgacgatattaatcgatttgcttttcctcatcgctctcgccccagagagatcaattatctgcacaaagatagtcaaatatggcagcgcatcgcgaataacaccagggcatatgatcccgccaacaattaccgttcttatccagaaaactggcagcaggcttttgctgagttacaaaggcgaattctggataatcaacagacagggagtgcgcaatctgatgcggcattgctctggagtttctggaattcttactctgcagatgaactagtcgatgacttaatcattcgctgtggtatggaaagtgccgttgaaattgcccttctcgctcttcaactgagatataaaccagtaaaaggcgcagtaaccaccatcattccacctaatcacgaagcagaatcgctaccgagttggcatcaacgcctatgtcatcatctttcactcgcttcagaagatgagtggcaacgctgtgtagataaagtactcgcggctattacgacgctatccccagcacggcaaccttttgcggcgttactgctccctgaacgcccggatattgccaatgctatggctctacgctatgcagatcaaaacgttccggcgatgacctggttaagactggtagtaaccgatgaagccgctctgactgcagccgaaaaatacgactttccaccgttatatcgtgattttcgcgcttatctggcaatgttgctggcaaataatggggtgagcggtgtaagccggatacttactgagtttgtggaagagcattctgacaatcccacttatctcttcgagcgcatcagcgagactgaagatcttgtcaaatggttatggaaaacgaatcacccggatgcgattcaaattctgatcctcggtgtaattggcaagaaaaagcacctggaatacttaagcaaagcatgtcaaaaacatcccgctgcggctattgccgcttatgcaactttgctggcaatacatgaagataaagagtggcataaagcgcttgtcaaattgattaccatcacgccagagttagtatgcgacgtcattccctgggttagtgctaaagcggcaggcatcttatctgaatgtcgtcctcagtcagtagctgaagaatgtgagtatgccactgcggatatgttgccagagctgtttgtttcgccgccctggatgactaaagagaaaaagaaaaattcgccggtgtttgatcttcctgtactgccagttccttctgtttctgacgtcactccagagattgccaaaaaactaacccgtacataccttgtcacccgcttccagcaaatagcccaacagcaggcaacaaaacaaatattgtttaccgacctgccgctgatggaaaaagcaagctgggagagacacttagtccccctcacaccagaacagcaaattctgtggtgtctgggttttgacaaatggcgggagagcggagaaaaaatatacgaaaaaattccggcgccacaaagtgccgttgatgccctgctacgcttcgattttccagcactcaatgctgaatttgcgcaataccataacaatgcttacaaaagctggaatctcattgccctctgttatctacctggtcaacaggccatttcttttcttaaccagatagtcaaagaagataactactctggtgagggatatattctggccatttttggtagcgccgccattcctgcatttatgacctgcctgcaacgtgagccacaacggttgtggtttttcaccttcttccttggtgtcaatgaactggcattgccaatggcgcaacgacttcagaaaaaaatgtcgtatgaagatgcacgaaactggctaacggattacccacgccatgccgccgccgggctacttcctgtggcactgggcaaacaaggaaaagatcgtgattgtgcccgccaggcgctccgtctgctggtgaatttaaaccagcgagaaacgattgaggaaatcgcccaaggatacaaccaacctgatgttttagctgcgctggcaacattatttgatagcgagccgctggaagaatatcccgctaaaatcgccccactgcccggcttttatcagttcaccttatggcgcagaccacggcttaaaagtaacaaccagcctctgccagatgacgctatgcgccacctcggcataatgctgagctttccacgcgacattaccccctacgcagggcttgcgatcatcaaagaaaccttcacccgcgaatcactggctgaatttggctgggatctgtataccgcctggacagaagctggcgcacccgcaaaagaaaactgggcatttacctcgctggggattttaggcaatgacgacaccgcgcgtaaattaaccccgctcatccgcacctggccgggtgaatcccagcataaacgcgcggtttacgggctggatgtgttagccagtatcggtagcgacattgcgctaatgttgcttaatggcattgcgaaaaagattaaattcgttgcattacaggaacatgcctgcgacaaaatcaacatggtcgctgaaaatcgcgggctgactatggctgaactggaagaccgcctggcaccggatttaggacttgatagcagtggctcgttgacactggatttcggcccacgtcaatttaccgttggttttgacgaaactttaaaacccgtggttcgcgacgcaaacggcaaagttctgaaagatttacccaaaccaaatcagagcgatgataaaacgctggcaactgacgcggttaatctcttcaaacagttgaaaaaagatgtacgcgccatagccagccagcagattgatcgtctggagcaggctatgtgccagcgcagacgctggacggcagagcagttccgcctgttcctggtggagcatccgctggtacgtcacttaacccgacggttgttatggggggtatatactgaggaaaacacgctgattgcctgcttccgggtcgcagaagacagcacttacagcgatgcgcaggatgagctatttacgttgccagcaggaaacatcggtattccgcatgtgctggaaatatctcctgaatccgccgctgcatttgggcaaatttatactgattacgaacagcttcctccgttccgccaactcgatcgtggttattaccaccttgctgataatgaacgtgattcccatgaattgatacgctggcaaggacgtctttgccaggccgggcgcattgtcgggctggaacgccgaggctggcaacgtctggaagaaagcggcagcgtttacgcgatgcgcaaatctactccttatggcgatctcgaacttgaaacagaacctttttcattaatttatggtgaaacggggtatggcgaccagctaccggttgaaagcgtaaaaatcacctcgcctgataatcgctacggtaaacaatcctcactcactttttccgcgctcgacgacatcaccgccagcgaactcattaacgacattgaatcactgtttgattaa

SEQ ID NO: 8005 - DNA, 906 bp, Escherichia coli
atgaaaacctatatttatcaggacgaaaaatcacataaattctgggcagtagagcagcaggaaaatgaactgcatatcagttggggcaaagtcggcactaacgggcaaagccagataaaaagctttgctgatgcggcggcggcggaaaaagcggagctgaagttgattgcggagaaaacgaaaaagggctacgcagaagaagtatccgtgacgacaccgacatctgcccccgtccaggttatcgcatgctctgaaaaagcccctttgccgcaagacaaaccaccatttgctgaagaccaccttccctggctggcagacgacgcccaaatcattttaccgacagaggtcgcaccaaccacactaagtcatcgacgctggcctggcgattctgtgccacaggagaatgaattaactctgctacgctccgtcgccgcgcatactcaccggcgttttaaaaaggtgatcaccttcgattacagcacctgttcactggactggcagcaggcgattacacaagcagtgggccttatcgactcaccgattagcaccgcactaccaccgatggttctggcggtactggttgcgctggaacaaggcttcaatcgcaacgatcacgaagagttaatggatcaaattgtccaggagggtggtctggaatatgccactgaggttgtcattgcattgcaagccatccgctttgactggaattatgatgcccacctcattacgtttaccccggataacaagcagcctggctatctgtcacgctttgcctcggttgaaatgcgtctgcgtaaacatctctcactagcaaatgacgatgtatggcagcgctgcgccgacaaactgattgcggcactgttgcaaatagtcggtggtgataaacttatcatccccttttgctga

SEQ ID NO: 8006 - DNA, 1179 bp, Escherichia coli
atgaaagtttataattttgataaagttatttcacgcgacggaacctatagcgctaaatataataacaaggggcatgacatcattcctctgtctgtagctgatatggatattcctgtagctgattttatagtttctgaattatctgtcgcaaatcagaaaggtatctacggttatacattattaagtgatgactggcagcaagtggcagcacagtggtatcaacgccattactcgtggaaggtcaaccctgaacacattgttttttgcccacgggtagtacaggccgtctcattatttatccagaactttacccaaccgggagatgctattgtcagcctgacaccagcctatcatcctattagtcatgcagttgaagtcaaccatcgagtattgctggaaagtgcgttactttatcgtgaccaccactatgaaatagactttgcggatctcgaagataagtttaaaatggcttgttgtttcattctaatatcgccgcataatccaacaggaacaatctggtcagaagacaatctaaggaaaatagcttcattagcagaaaaatataatatttttattatttctgatgatgttcatgcagacttcaacttcacccaaaaacaacatcaaacaatttcttctataagctcatacgttgcacaaaactcgtttatttgtacatctccagcaaaaacttttaatatggccggacttgaaatcgcaaatattgttattgctaacgataaatatcgtgaacagtttaaattagctcttattgcagcaggtatccataatcctggttatttctctgttcctgcatttctctgtgcttaccgccatggcgattcttggttagcagcattaaaagattatttggtcgaaaacaggagctgggttcaatcattctgccaagctcattttccagactggtttgtcgcctctggtggcggaacttacatgttgtggatcgactaccgggcaatgaacatcagcgaagagcaactacgccattggtttgtctcgctcgcaggtgttgagatgagctggggatcagattttggcgatgaaggacttggttttttccgtgtgaacatagccacgccgagaagcaatcttacacaagcatttgaacggatttatcagagcatccccttcactacaggagtttcccttcatgaataa

SEQ ID NO: 8007 - DNA, 1452 bp, Escherichia coli
atgaataataacaatactccaagatccccaactctggtggaatcattattaccaatactagcgatgatactattgctgggatttggttatgcggcattcgatctgccacctgagccattaatggttctttcaaccgtcattgctgcactgttagttaagcggttggggtatggctacaatgcaatccttgaatcaatatcgcagaaaatcgctaaaacaatgcctgctctgctaattttgatcagcgtgggcctcctgattgggacatggatgataggcggtactattccgctgatgatttattacggccttaatctgataaatccttccatgatctatgtgacggccctgctcgttactgccatcgtttctgtatgcacagggacatcctggggatccgcaggcaccgtcggtgttgcgtttatgggtgtggctatcggaatggaggctaatctggcagcaactgcaggcgctattgtggcaggggcttacttcggggacaaactgtctcccctttctggcgatactaacttagccgcaatggcagcccagatagatctctatgaacacatcgctcatttactttatacaacccttccttcattgatactgtcagcctttgttatgacgctctatgggatgaatagcgagctcggcggctcaaccattcccgaaaaaattcagctaatcactgaaggattaaaaggaatttatcattttaatttattgttattgctacccattgccattgtcctgtacggttcgattaccaagaaaccaaccattccaattatgcttgtttcggcactggtagccatgatcaacgccagcgttattcaggggttcgcactacacgacattgttaaaagtgcagtagacggatttaacgtttcaatgcttaccgataaagatgttaatccgctattaggtaatttgttaaaccgcggtggcatgaactcgatgatgagtacgttgcttatttgtttctgcgccctttcatttgcgggaacattagccttgagcggcgctttagaagtcatcgtccataatctgctcaaattagttcattccacaggaaccatgattcttgcgactattgcctgtggtttaacaatgattagcgtgacctgtaatggtcagatatcaatcctgattccgattgaaatgctacgaagtgcttatattgagcgcggcctacatccaaaaaatctggcaaggactgtagaagactctgccaccatatttgaaccaattctgccctggactgccgcgggtgcctacatggcaggtacacttggcgttgctacattaagctatcttccgtgggctattctctgctggagtggcattttctttgcgacgctgtgggggttcacaggctttggtatcgctcgactgtccaaagaaaagcagcaacagctcatgatggaaaccataaatgaaagcaaatag

SEQ ID NO: 8008 - DNA, 180 bp, Escherichia coli
atgattgatgtcttaggaccggagaaacgcagacggcgtactacacaggaaaagatcgctattgttcagcagagctttgaaccgggaatgacggtctcccttgttgcccggcaacatgatgtagcagccagttacttctctggcgcaagcaataccaggagggaagtcttactgcggtga

SEQ ID NO: 8009 - DNA, 354 bp, Escherichia coli
atggacatgcaaaaagtggatagcgcacgctcccttattgccggggtgatgcactgggcggtcactaccggcggcttcaacagtgaaacagtacaggacgtcatgccaggagcggtggaacgccgcttcggcaacgagcttccggcgtctccagtggagtggctgacagataatggttcatgctaccgggctaatgaaacacgccagttcgctcggatgttgggacttgaatcgaagaacacggcggtgcggagtccggagagtaacagaatagcagagagcttcgtgaaaacgataaagcgtgactacatcgttttcatgcccaagccagaccctgtacacgattctgtgtga

SEQ ID NO: 8010 - DNA, 879 bp, Escherichia coli
gtgaaacttaaaatgcaggatttgaggctgtttaatattgtgttcgagagcgatcctggctggatactggatttctctaaccgcaccttgtctgcttttttcgatgaagaattgaacattgatattgatgatgaacgttatcagaaagaggggacgtcaaaagccaaacgagttagatgcttgctgaaacaggttgatcgtgagaccgctctgcgggttcttggtgcgctctggcagtataaaacggaatccatgcctgaacaggctgaacaaagccgtaatgactatcttgcactgatttcccgcttagaaaacgctgacaccgatgaagccaaaggcgttaagcctgtccaggcatggcatggtgttgactggcattcacttatcgctgaaatgaacgagatgaaatctctgccgccacatccacgtggttttcggtttgaagcctggcttgctgaactgttcagtatctttaagcttgctcctcgttcgtctttccgaaatacaggcgaacagattgacggaagtttccgactgaatgatgaattttacctgatggaggcaaagtggcatcagaaaagaacgtcggctgccgacctccatgtatttgaaggaaagctcagtaccaaggcaacctggacacgcggtgtttttatcagttggatggggtttacgcctgaaggcctgacggcttttggtaaagggaagcgggttatctgtgtcagtggttatgatctttaccactcactgaatcataggatccctttacccgaccttctggatgctaaaacccggcacgcggctgaaacgggagagccctatgctgagttcggccgactatatgcactgaaagacaaacagttcggcacgctgaaataa

SEQ ID NO: 8011 - DNA, 732 bp, Escherichia coli
atgaatcaaccaatacacaatgcttactggttatcccgttttgacatccttctcgacagtgccctggcgcagcaccgtgccgtctcgttaatccgagtggatttacgtttccctgagtatatgcctgtcaccatcatggatcccgatccggattcagcggtgatttctcgtttttttgcatccctgaaagccaaaattcaggcttaccagcggaaaaaaagatgtgccaatcagcgtgtgcatgcaaccagcctgcgttatttctggtgccgggagtttggcaaggaaaaaggcaggaaacattatcacgtgatattactgctcaacaaagatacctggtgctcgccaggggatttcaccgttccttcttcgctggcgacactgatcaagctggcatggtgtagtgctctgcatcttgagccctggcagggtaatggactggttcatttttccaggcggacgcctttccgtaaaccgacatcatctgatgctcgcccttcttccgatgatacgcctttgtcgggtggatgttctgaaaccaggaaggcttcagacaaaaagccgggtggatccgctgtgctctgggtcaagcgtggtgatgtggaagcgatgcagaaagcccggaacagagccagttatctcgtgaaatatgagacgaagcagcatgacggttccgggcaacgtaattatggttgcagtcgtgggctggggcgtctactggatggcaggtga

SEQ ID NO: 8012 - DNA, 381 bp, Escherichia coli
atggaacggattaagttagcagaaaaaatcatttccacttgtcgggaaatgaatgcgtcaggtcttaatcaaggaacatcaggtaatgtgagtgccaggtataccggtggcatgttgattacgccgagtgggatcgcttattcaaagatgacgccggacatgattgtctttgtagacgataagggaatacctgaagcgggtaaaataccatcaagtgaatggttatttcatctggcgtgttataaagccagaccagaattgaatgctgtcatacatacgcatgcggtgaattccacggcggtggcaatacataatcattcaattccggccattcattatatggtgggtaagcgtaaactgaccgccgtatgtagccattaa

SEQ ID NO: 8013 - DNA, 741 bp, Escherichia coli
atgaataaggtttttgttgtttcagtggtggccgcagcctgtgtatttgcagtaaatgcaggagcaaaggaaggtaaaagcggtttttatctgaccggtaaagccggtgcctctgtgatgtcactttcagaccagcgtttcctgtcaggagatgaggaagaaacatcaaagtataaaggcggcgatgaccatgatacggtattcagtggcggtattgcggtcggttatgatttttatccgcagttcagtattccggttcgtacagaactggagttttacgctcgtggaaaagctgattcgaagtataacgtagataaagacagctggtcaggtggttactggcgtgatgacctgaagaatgaggtgtcagtcaacacactaatgctgaatgcgtactatgacttccggaatgacagcgcattcacaccatgggtatccgcagggattggctacgccagaattcaccagaaaacaaccggtatcagtacctgggattatgagtacggaagcagtggtcgcgaatcgttgtcacgttcaggctctgctgacaacttcgcatggagccttggcgcgggtgtccgctatgacgtaaccccggatatcgctctggacctcagctatcgctatcttgatgcaggtgacagcagtgtgagttacaaggacgagtggggcgataaatataagtcagaagttgatgttaaaagtcatgacatcatgcttggtatgacttataacttctga

SEQ ID NO: 8014 - DNA, 591 bp, Escherichia coli
atgaaagtagcaaaagacctggtggtcagcctggcctatcaggtacgtacagaagacggtgtgttggttgatgagtctccggtgagtgcgccgctggactacctgcatggtcacggttccctgatctctggcctggaaacggcgctggaaggtcatgaagttggcgacaaatttgatgtcgctgttggcgcgaatgacgcttacggtcagtacgacgaaaacctggtgcagcgcgttcctaaagacgtatttatgggcgttgatgaactgcaggtaggtatgcgtttcctggctgaaaccgaccagggtccggtaccggttgaaatcactgcggttgaagacgatcacgtagtggttgatggtaaccacatgctggctggtcagaacctgaaattcaacgttgaagttgtggcgattcgcgaagcgaccgaagaagaactggctcatggtcacgttcacggcgcgcacgatcaccaccacgatcacgaccacgacggttgctgcggtggtcatggccacgatcacggtcatgaacacggtggcgaaggctgctgtggcggtaaaggcaacggcggttgcggttgccactaa

SEQ ID NO: 8015 - DNA, 528 bp, Escherichia coli
atgaaaaagataagaggtttgtgtcttccggtaatactgggggcagtgttaatgtctcagcatgcacatgcagctgataatctgacctttaaaggaaaactgattattcctgcctgtactgtacaaaatgctgaagttaactggggtgatattgaaattcagaagctggtacagagtggcggaaatcagaaagactttactgtccagatgacatgtccttatcatttgggaacaatgaaggttacgatatctacatcggcagcgacttataacaagggaattatagttaagggtacctcatcccggaccgatgatggattgcttatttatctgtacaatcgtcatcaaaatggcagtatcggtgatgctataactctggggacaccattcacaccagagcatgtctcaggtcaggttccggccagaaacatttctctctatgcaaaacttggatataaaggagatatacagaatttgcgggcgggaacattttctgcaacggcaacgctggttgcatcatattcgtaa

SEQ ID NO: 8016 - DNA, 1473 bp, Escherichia coli; identical to SEQ ID NO: 6003

SEQ ID NO: 8017 - DNA, 3888 bp, Escherichia coli; identical to SEQ ID NO: 7600

SEQ ID NO: 8018 - DNA, 243 bp, Escherichia coli
atgaaaaatattatttctgtaactgtactatccgcgctgttcatgttcaatgctcaggctgcagacacaatggataaaacacatgaagtaaaaggcagcatgtccagcgcgcatgataaaatgtgcaaggatggtatgtgcaaaaatgcaatggataaagagaaaatggagaaagaacacatgagcaaaacggatgggatgaaaaatgaccacatgggtaaaaaagacaatatgtctcaataa

SEQ ID NO: 8019 - DNA, 411 bp, Escherichia coli
ttggaaatacgggggctggtacgtgataaccgtaactggtttttgtctgaattgtataacatgcagcatgtgagtcagataacccgtcatatctgtgttgaaggatggagtgcaataggaaaatggggagggataccattccggcatttcctgacgctgattggtgccgatatgcgggcaaaatacgtcagttttcgttgcgtcgatggttactacaccagtattgatatggcgacagcactacattcacaaacattgctgacattgacatggaataacagggtattgccaaaagaatatggctatcccataaagatacgtatccctactaagctgggatataaaaaccccaagcatgttcaggttatagaggtcactaatcattttccgggggggtactgggaagactag

SEQ ID NO: 8020 - DNA, 324 bp, Escherichia coli
atgaagaaaaaacattttttgtctgacagtgatgcccattacgtggtgaaagatgcagaaaaaatccttgcgccggacagacgtcgtttactccaacagggactgacgcttgggggaattatgatgctgactggctgtgatataagcaataatgatgatattgaaaaagcattgttccgtatatccagatttaatgaccggattcaaagttttctgttcagcaaaaacagtgtggcaccagaatatcttccagaggacattaccactccattcccttttaatgccttctatggagaagaagagatcccagtaattgatggctag

SEQ ID NO: 8021 - DNA, 396 bp, Escherichia coli
atgcagccattaccgttaaaacaaatacatcctctgtggttacgctgttgccaccggattaatgctgttactgtcgcaggcatgatatgtagtggatggcgcatttataatgcttctcctttgttttcttttaactatccggcagcattaactctcggtggctggcttggtggtgcgttactgtggcacttcgccctgatgtggattctgctgattaatgccaggatctatcttactctgggaatttgtagcggacgtttccggagcaagtttttcccgctgtcatggacctcactgaaagaatcccttacgcaggcactgtatggaaagctgcatcatacgaatatgcaggaatacaatatggtgcaaaaagtcgcctatattctgttattttag

SEQ ID NO: 8022 - DNA, 720 bp, Escherichia coli
atgaataacgtaaaaaaaatactgctgatggaagatgattatgatattgcagctctgttgcggcttaatctgcaggatgaagggtatcagatagttcatgaagcggatggcgccagagctcgtttattactagacaagcagacctgggatgccgtaatacttgatcttatgctgcctaatgttaatgggctggagatttgccgttatatccgtcagatgacccgttatctgcctgtgattatcatcagtgcccgtaccagcgaaacccaccgcgtcctgggactggaaatgggggctgatgactatctaccgaaacccttttccattccggagctgattgcccgcatcaaagcgttgtttcgtcgtcaggaagccatggggcaaaatattctcctggcaggtggactgatttgctgtcacgatctgtgcatcaatccattttcacgtgaagttcatttgcataataaacaggttgatcttaccccacgcgagtttgatctgctgctctggtttgcacgtcatcctggcgaagttttttcccgtctttcactgctggataatgtctgggggtatcagcatgaaggatatgagcatacagtcaacacgcatatcaaccgtcttcgtgccaaaattgaacaggatgcagcagagccaaagatgatccagaccgtctggggaaaagggtataggttttcagttgacaatgcaggaatgcgataa

SEQ ID NO: 8023 - DNA, 1473 bp, Escherichia coli
atgaattgtagcctgacattaagccagaggttaagcctagtatttacagtcgttttgctgttttgcgcagcagtgacatgtggcgttcatatttacagcagtaatctgtatggcaatgcaatggtacagcgtttatctgcagggctggcgcaacagattgtcatcacggagcctctgctggataatcgtgggcaggtgaatcaccggacattaaagagtctgtttgagcgtctgatgacgcttaatcccagtgtggagctgtatattgtctcgccggaaggtcggctgcttgtggaggccgcccctccaggtcatatcaaacgtcggtatatcaatatagcgcccttgaaaaaatttctctccggtgctgtctggcccgtatatggtgatgatccccgaagtgtaaataagaaaaaagttttcagtaccgcaccgctttacctgagggatgatctgaaaggatatctgtatattattttacagggagaggaacttaatgctcttactgatgcagcctggacaaaggcactatggaatgcactgtactggtcgctgtttctggtagtgatatgtggtctgctgtcgggtatgctggtctggtactgggtaacccgtcccatacagcaactaactgaaaatgtcagcgggatagagcaggacagtattagtgccattaaacaactggcaattcagcgccctgccaccccccctagcaacgaggtcgagatattacacaatgccttcattgaactggcccgtaaaatatcctgtcagtgggatcaactttcagaaagtgatcaacagcgccgtgaatttattgccaatatctcccatgatttacggacgccattaacatcacttctgggatatctggaaaccctgtcaatgaagtcggattcgctatcatcagaggactgtcataaatatctgacaacagctctccggcagggacacaaggtgaggcatctatcctgtcagctttttgagctggcacgtcttgagcatggtgctataaaacctcaactggagcaattttctgtctgtgaacttattcaggatgtagctcaaaaatttgagctcagcatagaaacccgtcgattgcaactaagaattatgatgtcacattccctgcctcttatcagggcagatatttcaatgatagagcgtgtgataacaaatttactggataatgctgtacgccacacacctccggaaggctcgatcaggctgaaagtctggcaggaagataatcggttgcacgtcgaagtggctgacagcggccctggactaactgaagatatgcgaactcatcttttccggcgggcatcagtgttatgtcatgaaccgtcagaagagccccggggaggactgggattgctgattgtacgcaggatgctggtactacacggtggtgatatcaggttgactgattcaacgactggagcctgctttcgtttttttcttccattataa

SEQ ID NO: 8024 - DNA, 321 bp, Escherichia coli
atgatcaaaactcgtcggactaaacgtaccttttccccggagttcaagcttgaagctttcgagcaggtggtggttaaataccagcgtgatgtcagagaagtcgcgcaggcactcgagctcaaccctgaccatttgcgtaaatggatacggttgtataagcaggaacttcagggtattgagccagctggtaatgctattacccctgaacaacgcgaaattcagcagcttaaagcgcagataaagcgcgttgagatggaaaaagaaatactaaagcaggctgccgtgctgatgagcgaaatccccgggaagctgtcgcgctaa

SEQ ID NO: 8025 - DNA, 267 bp, Escherichia coli
atgaaacaccggacttggatcactgaagctttacgtcttcactttgaagaacatttaccccaggttgtggtcgggcgtcgcctgggcgtaccaaaatcaacagcttgtggtatgttcgtgcgctttcgcaaagctggcttttcatggcctctgcccgcaggtatgtcggagcgggagcttgatggccgtctttacgggagtacctccacagtacctgtcgtactttgtagtggatcggtaattcaggacacctcgaaatcctgttaa

SEQ ID NO: 8026 - DNA, 510 bp, Escherichia coli
atggtcgggaagcgctgtcatgagcgcactgaccagcgtatccacttcccagccggtgcgggccgatacggccacaaccggatgtacaggccggaacagacggaataccgcctccgttttttcgcgaatgttctgtgcctgtgcgggagagggctgaatgccggccatatcccattcatggcagggctccgttttgtcggcctgtgtcaccacaaacagcacctgctgatgtccgcactgcaggatgtgtcgccagaaatactcatccacagacagggcccggtcatcggctttaatcagccacagcaccaggtccagttcaggcagaatgtcacggtacagggcttcatactctgcatccctgtcccggctctcgcccaccccgggcaggtcagtgataaccatgctgtaaccgtgaccactcagacggaagcgctgcacttcccgggtgccggcgtgaacatcactgaccggtgtgacctccccctgaaacagggcattacagagtga

SEQ ID NO: 8027 - DNA, 1491 bp, Escherichia coli
atgccatactttcagtatcctgatgagtttcccctgagctcgctgcctccactcattcgtgatgccgttattgaagctcagcaaatcacgcaggctcccctggggcttgtggcagcatctgccctgggcgctgtttcacttgtctgccagaatctgattgatgtctgcagactgaatacactacgggggccggtttctcttttcttactgacgcttgctgagtccggagaacgaaaaaccgcagtggacaaattattaatggagcccctgtaccagcaggagatgctgttatattccagacacaaaaatgaactgacgacatggaaaaataaggaagagcttttaaaggcgcagaaaaaagcattgttgtcaaaactgaataaagaactccgcaaaggcgcggatgagtcagaaacgctcagacaactggaagcgcttcagaaaaacagaggggaaaaacctgtaagatataaattcatttttaatgatgccacgactgcggcaattaagaatcagctttgtggtaaatggcgttcagtgggtattatgtcagatgaagccggtataatatttgatgggtataccctgtctgagctgccttttattaacaaaatgtgggatggctccgtattgtcggtggacagaaagaatgaacccgaacagatgattgaaaatgccagaatgacattatccctcatggtacaacccggtctttttgaccgatatatggagcgaaaaggttctgttgccagggacagtggttttcttgcccgttgtctaatcagtaaacctgccaccacgcaggggaaacgctttattaacggagctgtgaccccgggaggatcattaacggcatttcatgaacgattaatggagctggccagaggcagtattgaaaaatccagtaaggatgaacgttattgtctgcatttttctcctgaagcgcaaaaaatatttattgatcactataatgttctggagcaggatttgtctccttccggacccttaagccagtttcggggacatgtttcaaaaaaaacagaaaacattgcgagaattgctgcgttattgcagtatttcagtcagggtgaagggaaaatctctgccgatatcatgacgtctgctgtcgtaataagttcgtggtacacagatgaatataaaaaattatttgcgttacctgatgaatctgaactgcagctgcaggacgcccgggagctgctcgactggctcattgaggagtgccgcggagaatgcccgccccgtgtcaggaaaaattatattctccagtgtggcccgggccggttccggaacaggaaaaagctgaacgtcctgctgaacattcttgcatctcaactcaggctctctgtcgtgcaggaaggaaaaaccacctatgtcctgctttccgaaataaacaatatcacgctgcctgaactgaatgcgtgctacagccagaaactgataagatggcatgagcaatcctttggcttataa

SEQ ID NO: 8028 - DNA, 573 bp, Escherichia coli; identical to SEQ ID NO: 7694

SEQ ID NO: 8029 - DNA, 207 bp, Escherichia coli; identical to SEQ ID NO: 6172

SEQ ID NO: 8030 - DNA, 477 bp, Escherichia coli
atggattacgaagatttctctcccaaagagcaactacagctaacggtctgccaacgtctgattgcagaaaagagctatttttcccaagaggagcttcgccgcgacttacaggagcgtggttttgagacaatcagccagtccaccgtttctcgtctgctcaatttgttaggtgtcataaaaattcgaaatgccaaagggctaaaagtctattcgctgaatccacagttgcgtccggctcctgatgccgcgcgcactgtgtccgaaatggtggtgagcgttgagcacaatagagaatttatccttatccataccgttgctggatatggccgcgcagtggcacgtgtccttgattatcaccagttaccagaaattttaggcgtggtggccggaagcagtatcgtctgggtcgctcctcggatggtgaagcgtgtcgctctggtgcataagcaaattaattatttactaagaacgtattaa

SEQ ID NO: 8031 - DNA, 1404 bp, Escherichia coli
atgggtaagttcaaatttccctccgcatataccattctcttttttctgattgccatcgttgccgtcctgacgtggatcattccagccgggcagtatcacatggcaatgaacgaagctctcggcaaggaggttcctgttgccggcacctatgcacacgtagaggccaatccgcagggactgatttcagtgctgatggccccaattgccgggttgtatgatccagactccggtcaggctagggcgatagacgttgcgctgtttattctgatcatcggaggattcctcgggatcgtcaccaaaaccggggccattgacgccggaatcgagcgcgtcaccacccgactacgtggtcgcgaagagtggatgatcccgatccttatggcgctgtttgctgctggcggtacaatttacggcatggccgaagaatccctgccgttttataccctgctggtgccggtgatgttggcagcacgcttcgaccctgtggtagccgcctccaccgtgctgctcggcgccgggatcggcacgctcggctccaccattaaccctttcgcgacggtgatcgccgccaatgcagccgggatccccttcaccaacggtatcaccttgcgtgtggtggtgcttgtcatcggctggataatctgcgtgacatgggtgatgcgctatgcccggaaagttcgcaaggagccgtctctctccattattgcggataaacaagaggagaacctcgcccacttcctcggcaataaaagcgaacaggctctggagttcaccccggtacgcaaaattattctggtgattttcgcccttaccttcgcggtcatgatctacggcgtggcggtgctgggttggtggatggcggagatctcaacggtatttctggccagcgcaattatcatcggtctgatcgcccgcatgagcgaagaggaactgacctctacctttatcaacggcgcgcgagatttgctgggcgttgcactgattatcggtatcgcgcgcggtatcgtagtgatcatggataaaggtatgattacccatactattttgcactacgccgagggaatggttactggattatcgacagtagcattcatcaacgtgatgtattggctggaagtggtgctgtcgtttcttgtgccttcttcgtccggtctggccgttctgacgatgccgatcatggcacctcttgccgacttcgctaacgtcaaccgcgacctggtagttacggcttaccagtctgcgtccggtatcgttaacctgatcactcccacctctgccgttgtgatgggcggactggctatcgcccacgtgccttacgtgcgatatctgaaatgggttgcgccgctgcttgggatattaacagtggtaattatggtggcattaagtctgggggcattgttgtaa

SEQ ID NO: 8032 - DNA, 1005 bp, Escherichia coli
atgaccatcaatttgaaaaaacgcaacttccttaaactgctggactacaccccggcagagatccagtacctgatcgatctcgcgatcaaactgaaagcggccaaaaaagccggacgagaaaaacagaccttggttggcaaaaacattgccctgatttttgaaaaaacctccacccgtacccgctgtgctttcgaagtggctgcgttcgaccaaggggcgcaggtgacctacctcggcccaggcggatcgcaaatcggccataaagagtcaatgaaagacaccgcccgtgtgctgggccgtatgtatgacggcatcgaataccgtggttacggtcaggccatcgttgaggagttgggcaaatacgcgggcgtaccggtgtggaacggtctgaccgacgaatttcacccaacccaaatcctcgcagatttgatgaccatgctggaacattccccgggcaaaaaactgtcggaactgagctttgcctaccttggcgacgcacgcaacaacatgggtaactccctgatggtgggggctgccaaaatggggatggatatccgtcttgtagccccaaaatccttctggccggatgtggtgcttgttgaacagtgccgttccatcgcggaagagacgggcgcacgtatcaccctgaccgatgacgtggaagaaggcgtgtggggaacggatttcctctacaccgatgtttgggtctcaatgggtgaaccgaaagaggcgtggaccgaacgcgtcagcctgatgaagccttatcaaatcaacgctgacgtgatgaacgccaccggcaacccgaacgtcaagttcatgcactgcctgccagccttccacaatgagcacaccaaagtgggccgagaaattgagatggcatacggcctgaagggactggaggtgacggaagaggtcttcgaatcccctaactctatcgtctttgatgaagcagaaaaccgcatgcataccattaaagcggtcatggtggcgacactcggcgactaa

SEQ ID NO: 8033 - DNA, 912 bp, Escherichia coli
atggaacgaaaacccactttggttgtggcgttgggcggcaacgcattattgaagcgcggcgaaccactggaagcagaaatccagcgccagaacattgagttggccgcccgtaccatcgccgggctcacggtgaattggcgcgtggtgttggttcacggcaacggtccacagatcgggctgctggcgctgcagaacagcgcctacgacaaagtgaccccttatccactggacgttcttggcgccgaaagccaggggatgatcggctacatgctccagcaggcgctgaaaaacagcctgccacagcgtgaggtgagcgtcctgcttactcaggtggaagtggacgctactgacccggcgttcagcaacccgaccaaatatatcggaccggtgtacaacgaagaccaggcaaaaacactggcagcagaaaaaggttgggggtttaaggccgacggcagctacttccgtcgcgtggtgccatctccacagccgaaacgcattgtcgagagcgatgctattacggcactgatccagcgcgaccatcttgttatctgcaacggcggcggtggtgtaccagttgtggaaaaggctaacggctatcgcggaattgaggcggtgatcgacaaagacctctctgctgccctgctggcataccagataggggccgacgcactactgattctcactgatgccgacgcggtttacctcgattggggcaaaccgacccagcgtccgctagcgcaggtgacgccagaactgctcagaggcatgcagtttgacaccggatcgatggggccgaaagtggccgcctgctgcaagtttgttgaagcttgcaacggtattgccgggatcggcgctctggtcgacggggctgagattttggcgggcaataaaggcacattgattcgtaactga

SEQ ID NO: 8034 - DNA, 1221 bp, Escherichia coli
atggaaaaacattacgtcggttctgaaattggtcaattgcgtagtgttatgctgcaccgcccaaatttaagtctgaaacgtttgacaccatcgaattgtcaggaactgcttttcgatgatgtactctcggttgaacgggcaggtgaagagcatgacatcttcgcaaatacgctgcgcgatcagggggtggaagtcctgctgttaacagacctcctgacacaaacccttgatattaaagaagcgaaaacttggttactggagacgcaaatttctgactaccgcctcggacctacctttgcgggcgatgtgcgcagctggctggcggacatgccgcaccgtgaactggcgcgaagattaagcggcggattaacttacggtgaaattccggctgccattaacaatatggtggtggatacccacacgtctaatgactttattatgaagccgctaccgaatcatttatttacccgcgatacctcctgctggatttataacggtgtttctattaacccgatggccaaaccagcccgtcaacgtgaaaccaataacctccgggcaatatatcgctggcacccggcatttgccgacggcgattttattaagtatttcggcgacgaaaatatttattacgaccacgccactttggaaggtggcgacgtattagtgattggtcgtggggcggtattgatcggcatgtctgaacgcacaacaccgcagggcgtggagttcctcgccaacagcctgttcaaacatcgtcaggccgagcgagtgatcgccgttgagctgccaaaacaccgctcctgtatgcaccttgacaccgtcatgacccacatcgacgttgacactttctccgtttacccggaagtggtgcgcaaagacgcccagtgctggacgctcacttcgaacggacgcgatggcctacaacggacccaggaaaccgacctgttgcacgccatcgagaaagcactcggtattgaccaggtacgcttgatcaccaccggcggcgacgcctttgaagccgaacgtgagcagtggaacgacgccaataacgttctgaccatccgccccggtgtggtgattggttacgagcgcaacgtctggactaacgagaaatacgacaaagccggcatcaccgtgctgcccatcccgggggacgaattgggacgaggccgcggcggcgcacgctgcatgagctgtccgcttgaacgcgacggaatttaa

SEQ ID NO: 8035 - DNA, 414 bp, Escherichia coli
gtggtacagggaatggacgccgggctttatcaaaaactgaaaccgttggtctgtgcgctgccgatggcccgccagcaaatcaacatcaatacattagatgtcacgcaaagtgtgattcttgaggcgctgtttgacccgtggttaagccctgttcaggcgcgggcgttattacaacaacgtccggcgaagggctgggaagatgtcgatcagtttcttgcacagccgctacttgcagacgtcgatgagcgtactaaaaaacagctaaaaaccgtcctgagcgtggacagcaattacttctggctgcgttcagatatcaccgtgaatgagattgaactgacgatgaattcgttaattgtccgcatgggcccacaacacttttctgttctctggcatcagacaggagaaagtgagtga

SEQ ID NO: 8036 - DNA, 777 bp, Escherichia coli
atggcaagaagtggatttgaagtccagaaagtcaccgtagaggcattatttctacgagaaatacgaacacgctttggtaagttccgtctgggatatctgtgggcgattctcgaaccctctgcgcatttgctgatactgttgggcatttttggttacattatgcaccgcacgatgccagacatctcgttcccggtgtttttacttaatggcctgattcccttttttatctttagcagtatcagcaaacgttctgtaagtgctattgaagcgaaccaggggctgtttaattatcgcccagtaaaacccatcgatacgatcattgcgcgcgccctgcttgagacgctgatttacgtttctgtttatattctgcttatgctcattgtcaggatggcaggcgaatatttcgagataacaaattttttacaacttgtggctacctggagtctgctgatcattctttcatgcagcgtcggcttaatattcatggtcgttggtaaaaccttccccgaaatgcaaaaggttctgccgatacttcttaagcccctttatttcatctcctgcatcatgttccctctgcactcaattccaaagcaatactggtcatatctactctggaacccactagtgcatgtcgtggagttaagccgtgaggctgttatgcctggctatattagcgaaggtgtgagtctgaactacctggcaatgttcacattgataactctgttcattggtctggcgttatatcgaactcgtgaggaggcaatgctgacatcatga

SEQ ID NO: 8037 - DNA, 672 bp, Escherichia coli
atgattaagattgagaatttgacgaagtcatatcgcacgccaacgggtcgacattatgtgtttaaggatttaaacctcgaaatcccttcaggaaaaagtgttgcctttattggtcgtaatggtgcgggtaaatcaacgttactgagaatgattggtggcattgaccgccccgacagtggaaagatcatcactaataaaacaatatcatggccagtcggccttgcaggtggatttcagggaagtttaaccggacgcgaaaacgtaaaatttgttgcgcggttatacgcgaagcaagaagaactgaaagagaaaattgagtttgttgaagaatttgccgaacttggcaagtacttcgatatgccgattaaaacttactcatcaggtatgcgatcgcgtttaggctttggtttaagcatggcatttaagtttgattattatatcgtcgatgaagtaacggcggtcggtgatgccaggtttaaagaaaaatgcgctcaattgtttaaagaaaggcataaagaatctagctttttaatggtttcacatagtttgaattcattgaaagagttttgtgatgtggcgctattcatacctagagatcatcagacttgtctttatcagaatattaatgacgcaattaagttatatcaaaatgatgaaaatttgaacatttag

SEQ ID NO: 8038 - DNA, 396 bp, Escherichia coli
atgcgtaaagttatcacctttggtacatttgatgtattacatataggtcatataaatatcttaaaaagggcaaaaaaaatgggggactatctaatagttggcgtctcatccgattatttgaatttctcaaaaaaacagaggtatcctgtttatccggaaactgagcgtcttgaaataattaggtccttaaaatttgtagatgaagtttttattgaagagtcattggaattaaagggcgagtatattaaaaaatttaaggcagatatcttagtgatgggagatgattggctagggcgatttgatgaatataaggaattatgtgaagtatcatatctgccaagaactgttggtatttcaacgacagaactaatttctcaaatcaaaagatatggttaa

SEQ ID NO: 8039 - DNA, 204 bp, Escherichia coli
atgaacacattattcatactcattctgactgtatatctcaatactggtgagtcgcttgatgcaatcaccggcatgtacaactcaatgaaagaatgcatggctgccgcagcggaacagaaaattcccggcaactgttatccggtcgataaagttattcacatggacaataacgaaatcccggcaggattaaaaacagcgccgtaa

SEQ ID NO: 8040 - DNA, 189 bp, Escherichia coli
atggaaacgtcactaccaaacgttaatacgtctgacgggtgctttaatattggtgttctgctcagtaacagggatttcaccgaggatgcaatcaatatgagaaaatatgaaccctacctgctgaatgacaattccatactctccagaattgcccttcttaaactcggtattttcggagagtggcgatga

SEQ ID NO: 8041 - DNA, 855 bp, Escherichia coli
atgttgaatgtagctattgaaaaccagaacgggtggaattatagtgcacctgcacctcataaaacgggtgccgggcgtggaaacccgaaatcattcacggcgcataaccgcgctcaggcggtttttttatgcgttaagcacagccacattcgcattatggtggggcgtgcagggcagccgcaaggctggccgggttccgtgatgaccggtatttccacccctgtacgtctcaccacccttatggtcgtggaaaacctcggtggtgagttaatcaaattcatcgcggaggctgccatcatggctactatccttaccctttctcaccctgacgtaaccatcgaaaatggtcgcgctgtcactacgtctgttgcgatcgccgagttctttggcaaacgccacgaacgagtgttggataaaattcgcaatctggactgttcagcaaaattcactgagcacaattttgtgtcgagcgaatacaccgactcaaccgggcgcaaactcccaatgtaccaaatcaccaaaaacggcttcgttttcctggtgatggggttcacaggtaaaaaagccgcaactttcaaagaagcctacatcgctgagttcgatcgcatggaggaagaactgcgccagaataacgccccgtctcccgacaaaatgattcacggggacggacgcaccctggttatccgtctcgacgaacacggcaatatcaaattcactgaaaccgttcctgacggcgcaatggtctgcaccctggataccttccggttttatctggagaaacaaggatggactcttgtaaaccggagcgcaattaaaaatatgactgtggagcaattgctaaaaattcattgttga

SEQ ID NO: 8042 - DNA, 375 bp, Escherichia coli
atggaatttaaagatttaccagtaccattccaggaaatggcagcgaatatagttcgttcccaactggcgactcttgacctgagtaccgtagaaaaagaaaccatcgatactatatccggtaacgttcgtcgtgcctttatcggtctgtgcgaagagaagcagctctctgataaccaggatttacatgaaaaatacttcctggaattaatggacatcattaataaaggatttggcttgttaatgaaaaagaaagggattcgaatagctccccttgaaaatcattttacagcaagcagtattaattcctgtgatttaaagcatcacacatccgatgggaaagttgaatcaaacaacaaaatatcaattaatcattaa

SEQ ID NO: 8043 - DNA, 153 bp, Escherichia coli
atggatactatcgatcttggcaacaacgaatctctggtatgcggcgtgtttcccaaccaggacggcacgtttaccgcgatgacgtataccagaagcaaaacgtttaaaactgaagctggcgcgcgtcgctggttaaccagaaacactgactga

SEQ ID NO: 8044 - DNA, 408 bp, Escherichia coli
atgaaaaacgaaaccttcggtgctcgcctcttatacaggcgtaaaaaattaaaactgtctcaggccgcattaggtaagctggtcaaagtggctcacgtaacaatttctcaatgggaaagagatgaaacacagccagcggggaagagattattcgcactgagccaggcgcttcagtgctcgccgacttggcttctttttggagatgaagataagcaaccaggcgaaccgatcccagataatcagccagttaatctgacagaagatcaaaaagagttgcttcaactgttcgacgcactgcctgagtcagagcaaaaggctctgttgtcagagatgcgtgctcgagttgagaatttcaacaaactttttgaagaactactcaaagctcgcaaaagaagcgcaaataaataa

SEQ ID NO: 8045 - DNA, 228 bp, Escherichia coli
atgttgaaaattgatgctatagcgttttttggcagcaaaacaaagcttgccaatgccgcaggagttaggctggcaagcgttgctgcatgggggaaactggttcctgaaggtcgcgcgatgcgtctacaggaggcatccggcggggaacttcagtacgaccccaaagtttatgacgaatatcgtaaggcaaagcgggcggggcggttgaacaatgaaaatcacccctga

SEQ ID NO: 8046 - DNA, 552 bp, Escherichia coli
atgaaaatcacccctgaacaggtttgtgaggctctggatgcctgggtatgtcgaccaggaatgacacaggagcaagcgacgatattaatcacggaagcattctgggctctgaaagaacgcccgaacatcgatgttcaacgcgtcacgtttaatgatggcgaggttgatcaacgggcgctgggcgttaaccgggtgaagatattcgaacgctggaaagctatcgacaccagggataagcggaaaaaattcacggcgctgattccggcaattatggaggctatccgaattagtgatttcaggttgtatcgtgagatcagtgatggaaaaagcattacgtacatgatcgccggattaaacaaagaatatggcgatgtggtggagtccgggttgctttttgcggatccagctgttgtggaacgtgagactgacgagcttatagaaaaagctattgctttcaagcatgcgtatcgtcagcaatatcaatattactttgcagataaacaaatgtctgccaggggtttgtatgagtatcgatgcactacgatgggctaa

SEQ ID NO: 8047 - DNA, 1041 bp, Escherichia coli
atgagtatcgatgcactacgatgggctaaaaaggtgaaaaccggcagttcatccagtaagtctgtattgacctggcttgctgatatgtgcggtgccgatttgtgtgcatacccgtctgtatctgcactggcagaagtaacggaactaaacaaaaagactgtgcaggacagcttacgacacctgatggagattgggttaattgttgataccggtgagagaaaaggcagaacaaagcaaattgtggtgtaccgacttatcggtgtagaagaaagtgttgccgagcctgaatacacccaaaaacgggagtctttaaaggtgggtaaaattggtgctgttaataaaaacagtaccgaaaatggttatgtttcagcacaaaacagacccaaaaatggaactcttagctgcatggaaaataaccaaagacacccaaattttccatcaaagacacccaaaaacggatcacggaacccaaaggaacccaaagatctaaaccccacacataacgcacgcgagagtgctccgaccagtgagcaggaagttttgtcgttacaggcagcaccccttgtattcctggatggcctgagcgaacccatcggaaaatttccgatgaccgatagctggtatccgtcacgggattttcgacgacgggctgcgttgtgggggatggctttgccggagacagaatttacacctgctgaacttgccgccttccgggactactgggcagcggaggggaaagtgtttacgcagattcagtgggagcagaaattcgcccgtcacgtaaatcacgtcagggcgcaggttaaaccagtcagcaagggggtaaaccatgcagcagcaccaggtggcaccgcatcacgggcagttcaggaaattcgggcagcacgtgagcagtgggaacgtgaaaacggatttatcagcgacggaaacagtctggaagctgtgggaactcatgggggaggtttattcgaaccgctggacccagaagaacggggccgcaccttcgaagctctggattgcacagattggcgcgatgactga

SEQ ID NO: 8048 - DNA, 423 bp, Escherichia coli
atggaccgctgccgggcgggtgaaacatggcctccggacctggctgagtttgtggcgctgatttcagaaagcggggccaatccatttggcctgacggtggatgctgtgatggaggagtaccgccgctggcgtgatgagtcctggcgatatgacggaagcgacaaatatccgtggcctcagcctgtgctgtaccacatctgcctcgaaatgcgtaccagagggattgagcgccagatgacgcagggtgagttaaaacgacttgcggaacggcaactgacgaaatgggcaaagcatgttggtaacgggatgagtgttccgccagtgcgacgacaactggaaggggcgaaacacccgcaagggccaacgccaattgaacggctgaaacaggaatacgaacgccggaaggcagctggttttatttga

SEQ ID NO: 8049 - DNA, 1902 bp, Escherichia coli
atgctgcctgatgaacttgagaaaagattagatggaattgaggatgcttcaaaaaaagggtatccagtacgtaatctatacaaaattgcgtgtgagcccggactgtggctgcaagcctacgtgaatatacgggccaatgcaggtgcactgactcaaggtgtatcaacagataccattgatggcttctctatcgaaagagcagagaagctggcaaaaacattgcggagtagagaatacgtagcgaaacctgtacgcagagttcagatcccaaaaaaggacggaaaaaccagaccgctggggattccaggtggagacgataaactggcgcaagaagtagcaagaattattctggaaagggtttatgaaccagtattctctgaacactctcatggattcagaccaaaacgttcgtgtgaaactgcgctcagatctattcgtccagtctggaacggagttaaatggatcgtggatgttgatatcaaaggtttctttgacaatatcccccacaaactattgctgaatacactggcagagaaaattaaggataagaatttcctgaaattaatcgaacagtggctgaaggcaggatatgtggacaattggaaataccatcgctcatattctggcacgccacaaggtgggataatttctcccttactggcaaatatatacctcgacaaactggaccgttttgtagaacagaacttaattcctgcatatacaagcggtacaaaacgaagagcgaatccagatatgaacaggctggcccataagattcataaactacgaaagaaagtagacggtatggcaactgattctgaatcagaaaaagaagccataaagaaagaaattgaacgactgcttgaagaaaaacgttctataccatctcaggtcatgaacgatccaaacttcaggcgtatgtactatgttcgatatgctgatgacttcgtaattggtgtcatcggctcgaagaaagatgctgaacatatatcaagacaggtcagaaactttattactacttcactgggattggaagttaatgaagcaaagaccaggatccgccatatctcagaaggagttaattttttaggctatgaaatcagacaggcagatgcaaagaaattgctgaagcagaaaatgcaagggcggcacgctctccggagatccaccacaggaattgtgcagctcttcgttcctgacaatatagccgctaaattttgtcaccaaaagaaatatggctgttatgagaatgtgaaggctgtacatcgttcaagtctacaaaatctcagtgaagctgaaattgttctgactttcaacgcggaaatgcgcggattggcgaactactacagtctggcgctggacatgaaatataaattatcaaaattatatttcatatggcaaataagcctttttaagaccctagcgaataaacgacgtagttcagtgaataaagtcgccaaatcgctacggcaaaataatggagatctggctattaccgttcaggccaaaaatggatcccgaaagattgaggttttcaaactcaaacatgtcaatcgcaaccgaacaacgattgtcgatacggaaccgagaaccgcacatatcacaacccgcacaacagagatcatgcgtcgattaggggcaaggatctgcgagtattgtgcgaagactgggcgctgcgaagtacatcatgtcagaaagctaaaagacctgaagaaaggtcgtaaggccggatataaacccagcctgtggcaactaatgatgatcgcacgccgccggaaaacgatgattttgtgcgcaagttgccacgacaagttacatagcggaaaactacccgatctgagacaggaaaagggaagaatactcctgcaaccacctgtctcaagtggggattctgctaaatga

SEQ ID NO: 8050 - DNA, 603 bp, Escherichia coli; identical to SEQ ID NO: 6114

SEQ ID NO: 8051 - DNA, 768 bp, Escherichia coli
gtggatgccggaaaacagcagcgcggggaaggttttgaactgcgtaccgatctgtggggtgcagtacgggcaaagaaaggcatctttatcagcgccgacgcgcaggataaggcgcagggtcaggtacgcgaaatggccgacattatcagcgaactgaacagcctgagcgataaaatccagaaactgtctgacgatgcggccacggcgaacgccgatccggcggatatggccgcgcaggtggcgctgataaccagccggataaatgacctgaccgcctcggtgattttgatgcacgcgccgaaaggtgtggcggtcgccagcggcgagcacctgcaactggccgcagtgaaaaacctccagataaatgcgggaaacaacgccgatatcggcgtggtgaagaatatgtttatcggcgtagggcgggcgctgagcgtgtttgtgcgcaaggcgggtatcaaactgattgccaataaaggcgcagtatcggtacaggcgcagcacgatctgatggagttactggcgaagaagtcgatagagatcgtcagtactgaggacgagatcaggatttcagcgaagaaaaaaataacgattaatggtggtggaagttatatccggattgagggtagcggcattgagccgggaacgccgggggattataacgtcaaagcggtgcattacgggcgtatgggaaaagcacatgagcctgttgagttacaaatgttggcagagaaagtagatgagccacccgtaaaatttttcttttcttaa

SEQ ID NO: 8052 - DNA, 1590 bp, Escherichia coli
atggacaaagtattagtacacagggggttttcaacccttaatgttattactgtcgcattatctgttgtggtggtgtttgagattatactcagcggtttaagaacttacatttttgcacatagtacaagtcggattgatgttgagttgggtgccaaactcttccggcatttactggcgctaccgatctcttattttgagagtcgtcgtgttggtgatactgttgccagggtaagagaattagaccagatccgtaattttctgacaggacaggcattaacatctgttctggacttattattttcattcatattttttgcggtaatgtggtattacagcccaaagcttactctggtgatcttattttcgctgccctgttatgctgcatggtctgtttttattagccccattttgcgacgtcgccttgatgataagttttcacggaatgcggataatcaatctttcctggtggaatcagtcacggcgattaacactataaaagctatggcagtctcacctcagatgacgaacatatgggacaaacaattggcaggatatgttgctgcaggctttaaagtgacagtattagccaccattggtcaacaaggaatacagttaatacaaaagactgttatgatcatcaacctgtggttgggagcacacctggttatttccggggatttaagtattggtcagttaattgcttttaatatgcttgctggtcagattgttgcaccggttattcgccttgcacaaatctggcaggatttccagcaggttggtatatcagttacccgccttggtgatgtgcttaactctccaactgaaagttatcatgggaaactggcattaccggaaattaatggtaatatcacttttcgtaatatccggtttcgctataagcctgactctccggttattttagataatatcaatctcagtattaagcagggggaggttattggtattgtcggacgttctggttcaggaaaaagcacattaactaaattaattcaacgtttttatattcctgaaaatggccaggtcttaattgatggacatgatcttgcgttggccgatcctaactggttacgtcgtcaggtgggggttgtgttgcaggacaatgtgctgcttaatcgcagtattattgataatatctcactggctaatcctggtatgtccgtcgaaaaagttatttatgcagcgaaattagcaggcgctcatgattttatttctgaattgcgtgaggggtataacaccattgtcggggaacagggggcaggattatccggaggtcaacgtcaacgcatcgcaattgcaagggcgctggtgaacaaccctaaaatacttatttttgatgaagcaaccagtgctctggattatgagtcggagcatatcatcatgcgcaatatgcacaaaatatgtaagggcagaacggttataatcattgctcatcgtctgtctacagtaaaaaatgcagaccgcattattgtcatggaaaaagggaaaattgttgaacagggtaaacataaggaactgctttctgaaccggaaagtttatacagttacttatatcagttacagtcagactaa

SEQ ID NO: 8053 - DNA, 1437 bp, Escherichia coli
atgaaaacatggttaatggggttcagcgagttcctgttgcgctataaacttgtctggagtgaaacatggaaaatccggaagcaattagatactccggtacgtgaaaaggacgaaaatgaattcttacccgctcatctggaattaattgaaacgccggtatccagacggccgcgtctggttgcttattttattatggggtttctggttattgctgtcattttatctgttttaggtcaggtggaaattgttgccactgcaaatgggaaattaacactaagtgggcgcagcaaagaaattaaacctattgaaaactcaatagttaaagaaattatcgtaaaagaaggagagtcagtccggaaaggggatgtgttattaaagcttacagcactgggagctgaagctgatacgttaaaaacacagtcatcactgttacagaccaggctggaacaaactcggtatcaaattctgagcaggtcaattgaattaaataaactacctgaactgaagcttcctgatgagccttattttcagaatgtatctgaagaggaagtactgcgtttaacttctttgataaaagaacagttttccacatggcaaaatcagaagtatcaaaaagaactgaatctggataagaaaagagcagagcgattaacaatacttgcccgtataaaccgttatgaaaatttatcgagagttgaaaaaagccgtctggatgatttcaggagtttattgcataaacaggcaattgcaaaacatgctgtacttgagcaggagaataaatatgtcgaggcagcaaatgaattacgggtttataaatcgcaactggagcaaattgagagtgagatattgtctgcaaaagaagaatatcagcttgtcacgcagctttttaaaaatgaaattttagacaagctaagacaaacaacagacaacattgagttattaactctggagttagagaaaaatgaagagcgtcaacaggcttcagtaatcagggcccctgtttcgggaaaagttcagcaactgaaggttcatactgaaggtggggttgttacaacagcggaaacactgatggtcatcgttccggaagatgacacgctggaggttactgctctggtacaaaataaagatattggttttattaacgtcgggcagaatgccatcattaaagtggaggcctttccttacacccgatatggttatctggtgggtaaggtgaaaaatataaatttagatgcaatagaagaccagaaactgggactcgtttttaatgtcattgtttctgttgaagagaatgatttgtcaaccgggaataagcacattccattaagctcgggtatggctgtcactgcagaaataaagactggaatgcgaagcgtaatcagctatcttcttagtcctctggaagagtctgtaacagaaagtttacatgagcgttaa

SEQ ID NO: 8054 - DNA, 177 bp, Escherichia coli; identical to SEQ ID NO: 4925

SEQ ID NO: 8055 - DNA, 885 bp, Escherichia coli
atgtcattcagccattcttccctctccgcacaagtgaaatcatatctgacgtttcttcctgaagaaattcgccagaaaatccttgaacatctccacagtgttattcattacgagcccgtgattggcattatgggtaaatccggcaccggcaaaagcagcctgtgtaatgccatttttcagtcccgtatctgcgccacgcatcccctgaacggctgcacccgccaggctcatcgtcttaccctgcaactcggtgaacgcagaatgacgctggtcgatctgcccggcattggtgaaacaccgcagcatgatcaggaataccggacactttatcgtcagctgctaccggaactggatctgattatctggatcctgcgggcagatgaacgcgcgtatgccgccgacattaccatgcatcagtttttactgaatgaaggcgcagatccctcgcgttttctgtttgttctcagccatgccgatcgcgtgtttcctgctgaagaatggaatgccacagaaaaatgcccgtcccgtcagcaggcgctctcactggcgacggtgacagcccgggtggcaaccctgttcccttcatcatttccagtactctccgttgctgcacctgtcggctggaaccttccggcgtttgtgtcgctgatgatccacgcactgccaccacaggcaaccagcgcggtgtattcacatatccggggagaaaaccgctctgaacaggcccggaaacacgcacaacagacttttggtgaaaccatcgggaaaagttttgacgacgccgttgcccgtttcagttttccggcctggatgttacagcttctgcgcaaaacccgggaccgcattatccacctgctgatcacactgtgggagcgtctgttctga

SEQ ID NO: 8056 - DNA, 951 bp, Escherichia coli; identical to SEQ ID NO: 4923

SEQ ID NO: 8057 - DNA, 2391 bp, Escherichia coli
atgcttttcattcctggtgcaaaaaaaccttttttattcaagaagaatatcgctgatttgcggcttacccttaaagaacttattaaggatagtgacaacaaacaattactttcccaacatttttcattatatagtcgtcaagatggagtttcctatgcaggagtaaattctgttctacatgcaatagaaaatgatggtaattttaatgagtcttactttctgtattccaataagacacttagcaataaagatgtttttgatgctatagctatttctgttaagaaacgcagtttcagtgatggtgatatcgttataaaatcaaacagtgaagctcaacgagactatgctctgactatactccagacgattttatcaatgacccctatatttgatatcgtagtcccggaggtatctgttccgcttggactggggattattacttccagtatggggatcagttttgatcaactgattaatggtgatacttatgaagaacgtcgttctgctatacctggtttggcgacaaatgcagtattgcttggtctgtcttttgcaattccactcttgattagtaaggcaggaataaaccaggaggtacttagcagcgttataaataatgagggcaggactctgaatgaaacaaatatcgatatatttttgaaggaatatggaattgctgaagatagtatatcctcaactaatttgttagacgttaagcttaaaagttccgggcagcatgtcaatattgtaaagcttagtgatgaagataatcaaattgtcgctgtaaaagggagttctctgagcggcatctactatgaagtggacattgaaacaggatatgagattttatcccgaagaatttatcgtaccgaatataataatgaaattctctggactcgaggtggtggtctaaaaggggggcagccatttgattttgaaagtctcaatattcctgtattttttaaagatgaaccctattctgcagtgaccggatctccgttatcatttattaatgatgacagctcacttttatatcctgatacaaacccaaaattaccgcaaccaacgtcagaaatggatattgttaattatgttaagggttctggaagctttggggatagatttgtaactttgatgagaggagctactgaggaagaagcatggaatattgcctcttatcatacggctgggggaagtacagaagaattacacgaaattttgttaggtcagggcccacagtcaagcttaggttttactgaatatacctcaaatgttaacagtgcagatgcagcaagcagacgacactttctggtagttataaaagtgcacgtaaaatatatcaccaataataatgtttcatatgttaatcattgggcaattcctgatgaagccccggttgaagtactggctgtggttgacaggagatttaattttcctgagccatcaacgcctcctgatatatcaaccatacgtaaattgttatctctacgatattttaaagaaagtatcgaaagcacctccaaatctaactttcagaaattaagtcgcggtaatattgatgtgcttaaaggacggggaagtatttcatcgacacgtcagcgtgcaatctatccgtattttgaagccgctaatgctgatgagcaacaacctctctttttctacatcaaaaaagatcgctttgataaccatggctatgatcagtatttctatgataatacagtggggctaaatggtattccaacattgaacacctatactggggaaattccatcagactcatcttcactcggctcaacttattggaagaagtataatcttactaatgaaacaagcataattcgtgtgtcaaattctgctcgtggggcgaatggtattaaaatagcacttgaggaagtccaggagggtaaaccagtaatcattacaagcggaaatctaagtggttgtacgacaattgttgcccgaaaagaaggatatatttataaggtacatactggtacaacaaaatctttggctggatttaccagtactaccggggtgaaaaaagcagttgaagtacttgagctacttacaaaagaaccaatacctcgcgtggagggaataatgagcaatgatttcttagtcgattatctgtcggaaaattttgaagattcattaataacttactcatcatctgaaaaaaaaccagatagtcaaatcactattattcgtgataatgtttctgttttcccttacttccttgataatatacctgaacatggctttggtacatcggcgactgtactggtgagagtggacggcaatgttgtcgtaaggtctctgtctgagagttattctctgaatgcagatgcctccgaaatatcggtattgaaggtattttcaaaaaaattttga

SEQ ID NO: 8058 - DNA, 453 bp, Escherichia coli
atgggcgtttcgcgtgatacattttatcgttaccgcgaactggtcgatgaaggcggtgtggatgcgctgattaatcgtagtcgccgcgctcctaaccttaagaaccgtaccgatgaggcaactgaacaggctgttgttgattacgccgtcgctttcccggcacacggtcagcaccggaccagcaacaagctgcgtaaacagggcgtttttatctccggcagtggtgtccgttctgtctggttacgccataaccttgagaatttcaaaaaacgtctgaaagcactggaagaaaaagtagcccgtgatggcattgagctaactgacagccagatcgcagcactggagcgtaaagccagtgatgacgaggcctgtggcgaaatcgaaacggctcatccgggatatctgggttcgcaggacacgttctatgtaggcaacctgaaaggtgtcgcgtaa

SEQ ID NO: 8059 - DNA, 300 bp, Escherichia coli
atgacaaaaccagtatcaatcagcaagaagccccgtaaacaacatacgcctgaatttcgtaacgaagccctgaaactcgctgaacgcatcggtgtggccgccgcagcccgtgaactcagcctgtatgaatcccagctttatgcctggcgcagtaaacagcagcaacaaatgagttcgtcagagcgcgaaagcgaactggccgctgaaaatgtccgccttaaacgacaactggcggagcaggctgaggaactggccatcctccaaaaggccgcgacatacttcgcgaagcgcctgaaatga

SEQ ID NO: 8060 - DNA, 237 bp, Escherichia coli
atgaagtatgtcttcatcgaaaatcatcgggcagagttcagcatcaaagcgatgtgtcgtgtacttcgggttgcccgcagcggctggtatgtctggctcaggcgtcgtcaccagatgagcctgcgccaacagtttcggctcacctgcgatgccgctgtccataaggcattctttgaggcaaagcagcgatacggtgctccccgccttgctgacgaaatgctggagttcaatatttaa

SEQ ID NO: 8061 - DNA, 1683 bp, Escherichia coli
atgaagtctgcattaaagaaaagtgtcgtaagtacctcgatatctttgatactggcatctggtatggctgcatttgctgctcatgcggcagatgatgtaaagctgaaagcaaccaaaacaaacgttgcgttctcagactttacgccgactgaatacagtaccaaaggaaagccaaatattatcgtactgaccatggatgatcttggttatggacaacttccttttgataagggatcttttgacccaaaaacaatggaaaatcgtgaagttgtcgatacctacaaaatagggatagataaagccattgaagctgcgcaaaaatcaacgccgacgctcctttcattaatggatgaaggcgtacgttttactaacggctatgtggcgcacggtgtttccggcccctcccgcgccgcaataatgaccggtcgagcgcccgcccgctttggtgtctattccaatactgatgctcaggatggtattccgctaacagaaactttcttgcctgaattattccagaatcatggttattacactgcagcagtaggtaaatggcacttatcaaaaatcagtaatgtgccggtgccggaagataaacaaacgcgtgactatcatgacaacttcactaccttttctgcggaagaatggcaaccgcaaaaccgtggctttgattactttatgggattccatgctgcaggaacggcatattacaactccccttcactgttcaaaaaccgtgaacgcgtccccgcaaaaggttatatcagcgatcagttaaccgatgaagcaattggcgttgttgatcgtgccaaaacacttgaccagccttttatgctttacctggcttataatgctccgcacctgccaaatgataatcctgctccggagcaatatcagaagcaatttaataccggtagtcaaacagcagataattactacgcttccgtttattctgttgatcagggtgtaaaacgcattctcgaacaactgaagaaaaacggacagtatgacaatacaattattctctttacctccgataatggtgcagttatcgatggtcctctgccgctgaacggggcgcaaaaaggctataagagtcagacctatcctggcggtactcacaccccaatgtttatgtggtggaaaggaaaacttcaacccggtaattatgacaagctgatttccgcaatggatttctacccgacagctcttgatgcagccgatatcagcattccaaaagaccttaagctggatggcgtttccttgctgccctggttgcaaaataagaaacaaggcgagccacataaaaatctgacctggataacatcttattctcactggtttgatgaggaaaatattccattctgggataattaccacaaatttgtccgccatcagtcagacgattacccgcataaccccaacaccgaggacttaagccaattctcttatacggtgagaaataacgattattcgcttgtctatacagtagaaaataatcagttaggtctatacaaactgacggatctacagcaaaaagataaccttgccgccgccaatccgcaggtcgttaaagagatgcaaggcgtggtaagagagtttatcgataacagccagccaccgcttagcgaggtaaatcaggagaagtttaacaatatcaagaaagcactaagcgaagcgaaataa

SEQ ID NO: 8062 - DNA, 1158 bp, Escherichia coli
atgcacgttacagccaagccctccagttttcaatgtaatctcaaatgtgattactgtttttaccttgaaaaagagtcgcagtttactcatgaaaaatggatggatgacagcactctgaaagagttcatcaaacaatatatcgcagcgtctggcaatcaggtctattttacctggcaaggcggtgaacccactctggctggcctggattttttccgtaaagttattcactatcaacaacgctatgcaggccaaaaacgtatttttaatgcattacaaacgaatggcattttattgaataatgaatggtgtgcctttctcaaagaacatgagtttctggttggtatctcgatcgatggcccccaagaactacatgaccgttacagacgcagtaattcaggtaacggtacttttgcaaaagtgatagcagccatcgagcgtctgaaatcatatcaaatagagtttaatacgttaaccgttattaataacattaatgtccattaccctcttgaggtttatcattttttaaaatctatcggcagtaaacatatgcaatttatcgaattgctcgaaaccgggacgccgaatattgatttcagtggtcatagtgagaacacattccgtatcattgatttttctgtgcctcccacggcttatggcaagtttatgtcaaccatttttatgcaatgggttaaaaacgatgtgggtgaaattttcatccgtcagtttgaaagctttgtcagccgttttttggggaatgggcataccagttgtattttccaggagtcctgcaaggataatctggttgttgaaagtaatggagacatttacgaatgcgaccattttgtctatccacagtacaaaattggaaacattaataaatcggaactcaaaacgatgaacagtgtacaactgacagcgcaaaaaaaacggatttcagcgaaatgtcagcaatgtgtatataaacctatctgcaatggtggttgccctaagcatcgtattactaaagtaaacaatgagactgtttcctatttttgcgaaggttataaaatccttttttcaaccatggtaccttatatgaacgccatggtggagttagctaagaacagagtaccgctttaccacattatggatgttgcaaaacaaatggagaataattaa

SEQ ID NO: 8063 - DNA, 393 bp, Escherichia coli
atggcaaaagtatttacaccagaagagcgggaagaagtgaaggcgcgcattgtggaattcgtgcgcctgagcggacgagaaacttttcgacaactggcagataaaacgggtgtcagtaagaccgctattcgtcgtttatctggtgcgcttgcggccagtggtgatgtctggctctctggttgcggggtatttccatcagagcaggcgtatcgcgtatggcgtaagacaccggagaaggctgctgacccgacactgattcgaaagttacctgacggagaaatacgtcgttacaacagacggcagaacataatttgtcgtgagtgccgccagagcgaagttatgcagcgtgtgctggcgttctatcggggaaactttcaggaggtgatggagtga

SEQ ID NO: 8064 - DNA, 297 bp, Escherichia coli
gtgagggtcagagtttatattgccggtccaatgacgggatatgaaaatttcaaccgtgaggcgtttcacaaggcggaagaggaactgaaacgggaagggcataccgtcttaaacccggcagtacttccggacgggctgacacagccgcactacatggatatttgcatggcaatgattcgttgtgtggatgcgatttacatgctgaatggctggcagcggtcagcgggcgctaaggcagagctggcactggcggagaaactggggcatgcagtgatttatcaggaggtggctcaatga

SEQ ID NO: 8065 - DNA, 462 bp, Escherichia coli
atgagagaggttaactatgaggcgcttcgtgaggcagcacaaaactatcagtcgacgctggcgtggtatcaggctatcccggacagcccaaatgctgaacgggattgtgatgcggctcttgctgcgtttaagcgtcacatccgtcatcgggaagcggatattatcgctgatttgctggatggactggaagaagcaaaatcacaactcaaagagcagcgtgagtattacgaaggcgttatctctgatgggagcaagcgtattgctgaactggaagcgcgggaagttcaattaccgactcgctacgaccttcgatatggacacccgataaatgcagatgagcgacatgtcatgatacctaaagaaaatggcagttggctttacctgattgacctagaacacgcattacgcgtctctggcattcgcatcaaaggagaggagcatggaaataaaaccagaggatga

SEQ ID NO: 8066 - DNA, 516 bp, Escherichia coli
atgagcgagattaattatcaggaagggcatgaaacggcagggcaggcaaaaccagttgcatggcgatatcgctacgtgaaaaaagacgttacagactttcaggggaagccgtgggctggtgactggaaatatgtaccgacaaaagaggattgtaacgacaggccgaactatgaaattcaggccttattcatcggcccgccagtcccggtgacatcagaaggactggttaaagccgtgcgcttttatgaacaggtaaagcgtgagaatccgccagtcgaaacaggagcatggaaggatgctgttgactgggtgctcagagaggcctgctgcgctgccattctgggtaaagccgacaatccaccagcatccggcaatcaggttagcgaattaacaatgtgggttaaacgactggtcagtcaactgaaaaaagctcagccggactgcaaattaccggagaaggcgatggattacctgaaacgaaatggactgataagcgtggaggatgttttacgatga

SEQ ID NO: 8067 - DNA, 156 bp, Escherichia coli; identical to SEQ ID NO: 7036

SEQ ID NO: 8068 - DNA, 252 bp, Escherichia coli
atgatgaacatcgaagaactgcgtaaaattttttgtgaagatggcctctatgctgtgtgcgttgaaaatggaaatattgttagtcattaccgcattgtgtgtttgcaaaaaaatggggctgcgttaattaattttgtggatgcccgagtgacggacggatttatcttgcgcgacggtgagtttgtcacttcattacaggtattgaaagagatcggaataaaagctgggttttctgctttttcagaagaataa

SEQ ID NO: 8069 - DNA, 279 bp, Escherichia coli
atggcacgcaacgcaaaatattacaaacatgataattcgaccgttcttgcccacacgcacgagcggtattctcacgcatttaagtcagactggtaccagcatcccccatgcactgaagaacaggccgaatggctcattcagtgttaccgcaggcgcggatgcgaggttaaaaaagcccttagcctcgactaccgtcactggataatctccgtcaggcttccttactccgaacgcccaccgcgtctgtcccgcacattccagcaacgcatctggaggtaa

SEQ ID NO: 8070 - DNA, 510 bp, Escherichia coli; identical to SEQ ID NO: 7745

SEQ ID NO: 8071 - DNA, 435 bp, Escherichia coli
atggggcgaattgtcgttgacgtcgatggtgttgagcttgccgaactgattaacgtggtctgcgataatggctactcccttcgtgttgttgatgaatctgaccggacctcaacagacagcatacccccctctgctgccctgagcggtatacgctgtagtaccgcgcatatcacggaaacagacaacgcctggctgtactcgctgtcgcatcagacgaatgacaccggcgaatcagaatggattcattttacaggtagcggatatctgttacgtaccgatgcgtggtcatacccggttctgcggcttaaacgcctggggctgtcaaaaacgttccgccgtctggttgtcacacttacccgacgttatggcgtcagtctcattcatctggatgccagcactgaatgcctgccggatttacccactttcgactggtaa

SEQ ID NO: 8072 - DNA, 1338 bp, Escherichia coli
atgcactctcaaatctgggttgtgagcacgctgcttatcagcatcgtgttaattgtactgaccatcgtgaagttcaaattccacccgtttctggcgctgttgctggccagcttcttcgtgggaacgatgatgggtatgggaccactggatatggtaaatgctattgaaagtggaattggcggaacgctggggttccttgctgcggttatcggcctgggcacgatactgggaaaaatgatggaagtatccggggccgcagaaagaattggtctgacacttcaacgctgtcgctggctttcagctgatgtcattatggtgctggttggcctgatttgcggcatcacgctgtttgttgaagtgggcgtcgtgctattgattcctctggctttttcaattgccaaaaaaaccaatacctcattgttaaagctggccattccgctgtgtaccgcattgatggcagtgcactgcgtggttcccccacatccggctgctttatatgttgccaataagcttggcgcagatatcggttcggtgatcgtctacggtttgctggttgggctgatggcatcactgatcggtggcccacttttccttaaatttctgggtcaacgactgccctttaaacctgtacccacagagtttgccgatctcaaagttcgcgatgaaaaaacactaccgtcattaggcgcaacgttattcaccatactgctacccattgcgctgatgttggttaaaacgattgccgaattgaatatggcgcgtgagagtggtttttataccttgcttgagtttattggcaaccctattactgccatgtttatcgccgtgtttgtcgcctattatgtgttgggtatacgtcagcatatgagcatggggacgatgctcacacatacggaaaatggtttcggttctattgctaatattttgctgattatcggggccggaggcgcattcaacgccattttaaaaagcagcagtctcgctgatacgctggcagttattctctccaatatgcatatgcacccgattcttctggcctggttggtggcacttattctgcatgctgcagtgggctccgctacggtggcaatgatgggggcaacggcaattgttgcacccatgctgccgctgtatcccgacatcagcccggaaattattgcgattgctatcggttcaggtgcgattggctgcacgatcgttacggactcgcttttctggctggtgaagcaatattgcggcgctacgctcaatgaaacatttaaatactatacgacagcgacatttatcgcttcagtcatcgctctggcgggcacattcctgctgtcatttatcatctaa

SEQ ID NO: 8073 - DNA, 1020 bp, Escherichia coli; identical to SEQ ID NO: 5522

SEQ ID NO: 8074 - DNA, 1125 bp, Escherichia coli
atgcaacatcgtattattctccccggagccactacgctgacccggttgatttcagaggtaagggaaaaggcgacgttgcgcctgtggaacaaactggcactgataccgtcagccgaacagcgttcacagctggagatgctgctggggccaactgattgcagccgcctgtctttactggaatcactgaaaaagggccctgtgaccatcagtggtccggcgtttaatgaagcaattgaacgctggaaaactctgaacgattttggcctgcatgctgaaaacctgagtacactcccggctgtgcgcctgaaaaatctcgcacgttatgctggtatgacttcggtgttcaatattgccaggatgtcaccgcagaaaaggatggcggttctggttgcctttgtccttgcatgggaaacgctggcgctggatgatgcattggacgttctggacgccatgctggccgttatcatccgtgacgccagaaagattgggcagaaaaaacggctccgctcgctgaaggatctggataaatctgcattggcgctcgccagcgcatgttcgtacctgctgaaagaagaaacaccggacgaatcgattcgtgctgaggtgttcagctacatcccaaggcaaaagctggctgaaatcatcacgcttgtccgtgaaattgcccggccctcagacgataattttcatgaagaaatggtggagcagtacgggcgcgttcgtcgtttcctgccccatctgctgaataccgttaaattttcatccgcacctgccggggttaccactctgaatgcctgtgactacctcagccgggagttcagctcacggcggcagttttttgacgacgcaccaacggaaattatcagtcggtcatggaaacggctggtgattaacaaggaaaaacatatcacccgcaggggatacacgctctgctttctcagtaaactgcaggatagtctgaggcggagggatgtctacgttaccggcagtaaccggtggggagatcctcgtgcaagattactacagggtgctgactggcaggcaaaccggattaaggtttatcgttctttggggcacccgacagacccgcaggaagcaataaaatcggcactgttgcaaagttag

SEQ ID NO: 8075 - DNA, 273 bp, Escherichia coli
gtggtgctgaattttgacgatcggggtaccgtcacccatcgggcgatattgggggaaacctgtacggtgctggagatggccgcaggaacctggcatgccgtgctgtcgctggataccggtggcataatttttgaagtaaaacacggtggctatcaacccgtggctgccgatgactatgcgcactgggctccagcggaaggagaaccaggaaccacggagcttatggcctggtatgcgcaagcgcaggtgggcgacagcacttttgccgtctaa

SEQ ID NO: 8076 - DNA, 876 bp, Escherichia coli
atggttaaaaaatcactgcgccagttcacgctgatggcgacggcaaccgtcacgctgttgttaggaagtgtgccgctgtatgcgcaaacggcggacgtacagcaaaaacttgccgaattagagcggcagtcgggaggcagactgggtgtggcattgattaacacagcagataattcgcaaatactttatcgtgctgatgagcgctttgcgatgtgcagcaccagtaaagtgatggccgcggccgcggtgctgaagaaaagtgaaagcgaaccgaatctgttaaatcagcgagttgagatcaaaaaatctgaccttgttaactataatccgattgcggaaaagcacgtcaatgggacgatgtcactggctgagcttagcgcggccgcgctacagtacagcgataacgtggcgatgaataagctgattgctcacgttggcggcccggctagcgtcaccgcgttcgcccgacagctgggagacgaaacgttccgtctcgaccgtaccgagccgacgttaaacaccgccattccgggcgatccgcgtgataccacttcacctcgggcaatggcgcaaactctgcggaatctgacgctgggtaaagcattgggcgacagccaacgggcgcagctggtgacatggatgaaaggcaataccaccggtgcagcgagcattcaggctggactgcctgcttcctgggttgtgggggataaaaccggcagcggtggctatggcaccaccaacgatatcgcggtgatctggccaaaagatcgtgcgccgctgattctggtcacttacttcacccagcctcaacctaaggcagaaagccgtcgcgatgtattagcgtcggcggctaaaatcgtcaccgacggtttgtaa

SEQ ID NO: 8077 - DNA, 123 bp, Escherichia coli
atgaaaaatgtctggtataataagaatatcatcaataaaattgagtgttgctctgtggataacttgcagagtttattaagtatcattgcagcaaagatgaaatcaatgatttatcaaaaatga

SEQ ID NO: 8078 - DNA, 648 bp, Escherichia coli
atgtgttttcccgatttctcctttgaaaaaatccaggtaaccttccgcatcatcgctcgcccgaccgacagcctccacgaatgccgatttgccaacagtattcacactgcggatataaaaataataatcatggcccggtttgatattgatactggcagctatccagtacagcgccgagccaagatagcgggctgcggtttcaacctgcctgatatccgcaatccgcttttccgagaaccagaactcaaactgtaccgtcgggtcataaacggcaagatgtggcgttgcggttatctgaaaatagcccggcgtcagctcaatccgcgacggtgctgccggtgcggtaatccggaaggtggtggtggcaggttcaccctgctggccatagctgtttatcgcccgcaccgtcagggtgtattccccgagcggcaggccgctgaaacggtgctccgtgtctgcggtgatggcggtggtcaccagtctggcatccgttcccttaccactggtcaggcgcagactgaagcacacacccttcaccacccgcggcgtgtcccatttcgcctgcgccagatactggccgtcagctgcgctcacctccaccgtcaggtgctgcactgccggtgggatgacgctgttcagggaacctga

SEQ ID NO: 8079 - DNA, 1191 bp, Escherichia coli
atgactaaaagtgaaacatttatgattcccaatcacaaggcagcaaagctaagtgaattggatatgatgattgttaactcagtaccgccaggtggcaactggaaaaatattcctttagatgtaccgtctaaaagaatagagcaaattagggatagttatgcacaaggaaaaggaagccgttcaacatactacggtagattacttccagatatgcctgcatatactatcaatacatattttaaccgacctgggaatggttgccatattcactatgagcaagatcgtgttctatcccagagagaagctgcaagactacaatcgttcccggatgattttattttcttcggaggtcaaacagcaattaatacccaaatcggtaatgcagtgcccccatttttagcttttctgattgcgaaagaaatagagaaggcgataggtaatactggttattatatcgatttattttccggagctggagggctgggactaggattcaaatgggctggatggactccattattggcgaatgatattgaagaaaaatatctacaaacatattcaaacaatgttcacaaagaagttttatgtggcagcatttctgataatgaaactttttcaaaaatagcagataaaatatcaggatttaagaaattatattttgataaacaattatggatacttggtggacccccatgccagggattttctacggcaggaaatgccagaacaatggatgatccaagaaattcactttttatgcattataaatctctcttaaatgagataaaaccaaacggttttatttttgaaaatgttgctggtttgttgaatatggaaaaaggtaaggtctttgaaagagtcaaagaagaattctcatcaaccatgaaaactatgaatggatggatattaaactctgaacattatgcaatccctcagcgccgaaaaagggttatattggttggttcaaacgaccctttattttcaattgaacctccacaaaaattaacagaagataaggaatcttgggtatctgtaaaggatgcattatctgatctgcctcctttgcaacatggtgaagatggaagtggtaaatattatatccatcaccccgaaaatgactatcaattattcatgagaggtaatattactccttcagaatattatgaaaggaatataaaaccctctttataa

SEQ ID NO: 8080 - DNA, 1518 bp, Escherichia coli
atgatagagaagttattaccattgataaattcctgtgataaaaaaagttataatgtcgcagatccattttcaggggatggtcgacttattacattgcttattaaacaatggatgataaatggttttccagatgtagagtggaatgtttatctgttcgatatagaaaatacaggcctcacttatgctaaaaatgcgttgtctgaacttaagttagcaggtgcaaatattaacattactataaaaaatagtgatgttttttatgaatttaaaaaatatgttgattattttgattgtgttataaccaatccgccttgggagaatataaaaccagattctagagagctcgatttttttgaaccatctatgaaatcgatgtatatagactctcttcgtgagtttgatgattatttgtcaagagtattgccatattctcagccgaagcgtaaatttgctgggtgggggactaatctttcacgtgttggtgcagaacttagcttagaaatatgtaataaaaatggattggtagctatagttatgcctgcatcttttttcgcagatgaacaatcgtacatattacgtgaaaagttttttaattcagggaggattgattgcataaattattatccagctgaggctaaattattcggcggtgctgatgtttcttcatgttcttttatttttaataaaggtgaatcccttaatgataatattcaacttagtgtgtatgataaaaacttaaatattaaatcactaggtttttttgatttgtctagtatagattctcaatatcttagcattccggtatctcaaggtgttcatgccgttcatttgttaagaaagctgcaagagggatacccaacatggggtagtctggaaaaaaatggagagatatgggcaggaagagaaatagatgaaactggtagtagtgactggacacaaaaaagtggcggcggattattattcattaaaggaaaaatgattgggaggtataattttcataatgagaagagcttaagaataacgaaaaaaattgataaggttctatccaattctaatttcgtaaggattgcatggcgtgacatttcacgcccgagtcaaaaaaggcgaatgattgcaacgataatacctcctaactctttggcagggaattcattaggggtggtctattataaaagtggttcgcaagattcgctctttagtttgcttggtattataaactccctttgttttgaatttcaattaagaagctttttagctactggtcatgtatcattgtcagccttacgaaaaactgcaataccgtctgaaaaaatattattacaacattctgaattaaaacaacttgtgatttcttgcatagagggatgttgtgatgctgagttgaaaattgaggcttatgttgccaaaaatatttacaaattggatttgaatgaatttaataagcttctgtcttcatttgataagattgagttagctgaaaaagaaagtttattgaggatttttcaacattatgactaa

SEQ ID NO: 8081 - DNA, 1146 bp, Escherichia coli
gtgggaaaggaactggatgatatctgcaccagctgtccgtatatcgatgctgtaaaacggcacaaacaacagctcggtgccatagaggaatatacaaagtggttaaaaaaagaaccacgggcatcttatttttttctgttccggctgtatacccgcattcacaatacatttttcccccaaaagcaacaactcccgttcactcccggtggcactcactgcccggaacctgatgtcacccttcgggacttaacgctttccccgggctaccacagtgattatgcccctcaccccattccggagatggacagttctattgttgttccccccactaatgaaaacacctcgcctccggaagatactcccgacaacactccggccggaggcaataccggacaagcggaaaagaccagaaacgcaggactcacacccattcctgaaaaacgttcaggaatgcccccggaacatctgcggtttgccatgggttttccatcgcaaccgaagattgccggtcccagagaaaagccgatgcgcaccgtgcatccggataatatctaccgtgaaattatatggttctgctccagttacctgctgaaatccggaccagaggctacgaggacgattatcaactcagtattctctgaatgggccagcataaacaatgattacccctcccccttttcgtgggtggacagcagggacagtgaacagtgtgactggttatggaacgccatgcaggtccggtgtgtgggaaccccgctgaatccccttaccccggagcagaaatactggttcgcctgcgccacgtttgataactgggaaggctggaatgagcaacaggtacagtttttactggaaagtaatcccagacggaacagagcgaagtttacgcaggcctccttccaggcccccaggattcagcataaagcgattcttcttgatgagctgaaaagtgcccgggagcaacaaaaaaggcgtgatgaacgtgctgatggttccgtcccgctgaaactgtccggaaaaatccacaaacagcttgaaagtattgcccgaagtcgtggtgtcctcccaaaaaaactgctgaatgaaatgattgagcaggcgtaccaggactttgtggcaaatgagcaacacaagacactgagttaa

SEQ ID NO: 8082 - DNA, 642 bp, Escherichia coli
atgccagcaaatatgaatcgtcctcatcatgcacgaaagactcgtagttgcagcccggaaaaaactgccaggacacgacagcagatagcccgggcagcacttgaggagttctctgcacaagggttcgctcgcgccagcatcagcaatatcagcaagcgcgcaggagtagctaaaggcacggtatataactacttcccgacaaaggaattattgtttgaagcggttctgaaagagttcattgctaccgtccgtactgaactggaatcttccccccgccgcaacggggaaaccgtaaaagcctatctgttgagagtgatgttacctgccatcaggaaaattgacgacgcatcaacaggcagagccagaatagcccacctggttatgacagaagggagccggttcccggtaatcgctcaggcttatttacgggaaatacatcagccactacagcaagccatgacccaactgattcaggaggcagcatcagccggagagttaaaagcagagcaactgctctgcttcccctgtttattgctggctccaaactggtttggcatggtgtataacgaagttctgaacccggcagcaccggtcagtacaggcgatctttttgaagccggaattggtgcttttttccgatag

SEQ ID NO: 8083 - DNA, 873 bp, Escherichia coli
atgactccggtgaatgatgccctgtaccgttacgtgatgaacacccgcaaggttcacactgacgacataccagtaaaagtgctggcaccgggcagaaaaaaggcaaaaacaggacgcatctggacgtatgtccgggatgaccggaatgcgggctcatcagagccaccggcggtctggttcgcctactcaccagacaggcagggaaaacatccggtacaacaccttcgtcccttccggggtatcctgcaggcggatgcattcagcggttacgatcggctgttcagtgccgaacgtgaaggtggtgcactgacagaagttgcgtgctgggcccatgcccggcgaaaaatccacgatgtatacatcagcagcaaaagtacgacggcagaagaagctctgaagcgcatcagtgaactgtacgccattgaggatgaaatacggggcttaccggagtctgaacgtcttgcagccaggcagcagcgaagcaaagcgttactgacgtcgctgcatgaatggatggtggagaagaatggcacgttgtcgaaaaaatccagactgggcgaagcgttcagctatgtcctgaatcagtgggacgccctctgttattacagtgatgacggtctggcggaggcggacaataacacagcagaaagagcgcttcgtgccgtctgtctcgggaaaaagaattacatgttcttcggcaacgatcatggaggcgagcgcggagctctgctgtgcggactaatcgggagctgtcggttgaacggtatcgatccagaagcgtatctgcgccatatcctgagcgtactgccggaatggccctccaaccgtgttgacgaactgctgccatggaacgtagttttcaccgataaataa

SEQ ID NO: 8084 - DNA, 312 bp, Escherichia coli
atgacgagacgaccgcgccggaaccatagcccggctttcaaggcgaaggtggcacttgccgccatccgaggtgagcagacgctggtggagttgtcccagcagttcgatgtgcacgccaaccagatcaagcaatggaaagaccagctccttgagggggcgacaggtgtgttcggcgatgaaacgaaagcggagccgtcgggtccgaccatcgatgtcaaaacgctgcacgcgaaaatcggcgaactgacactggagaacgattttttatccggtgcgctcggcaaggcgggattgctgggcggaaagaaatga

SEQ ID NO: 8085 - DNA, 543 bp, Escherichia coli
atgataatctggatcaacggacctttcggcgccggaaagacgactctcgctgagcggctgcgcgatcggcgtccgaaatcgctgatctttgaccctgaggaaatcgggttcgtggtgaaagaaacggtccccataccagcgagcggagactatcaggatctccccttgtggaggggacttacgatcgctgcggtcagcgagattcgcaggaattactcgcaggacatcatcatcccaatgacgctcgtgcacccggactatctgactgagatactcgacgggttaaggcagatcgacgatcagctgctgcacatctttctgatgcttaacgaggacctattgcgtcaccggatctcgaaccagaccatgcatcctgacccgaatcggaatgcggagattcgagagtggcgattagcgaatgtcgcccgatgcttggccgcaagggaacggcttccgtccacaacccgtgttctcgatagtggtgcacacaccagcgatgaacttgcagcgatggtgctcgacagactcgatcagcgcacctga

SEQ ID NO: 8086 - DNA, 861 bp, Escherichia coli
atgcatacgcggaaggcaataacggaggcaattcgaaaattaggagtccaaaccggtgacctgttgatggtgcatgcctcacttaaagcgattggtccggtcgaaggaggagcggagacggtcgttgccgcgttacgctccgcggttgggccgactggcactgtgatgggatacgcgtcgtgggaccgatcaccctacgaggagactctgaatggcgctcggttggatgacaaagcccgccgtacctggccgccgttcgatcccgcaacggccgggacttaccgtgggttcggcctgctgaatcaatttctggttcaagcccccggcgcgcggcgcagcgcgcaccccgatgcatcgatggtcgcggttggtccgctagctgaaacgctgacggagcctcacgaactcggtcacgccttgggggaagggtcgcccgtcgagcggttcgtccgccttggcgggaaggccctgctgttgggtgcgccgctaaactccgttaccgcattgcactacgccgaggcggttgcggatatccccaacaaacgatgggtgacgtatgagatgccgatgcttggaagaaacggtgaagtcgcctggaaaacggcatcagaatacgattcaaacggcattctcgattgctttgctatcgaaggaaagccggatgcggtcgaaactatagcaaatgcttacgtgaagctcggtcgccatcgagaaggtgtcgtgggctttgctcagtgctacctgttcgacgcgcaggacatcgtgacgttcggcgtcacctatcttgagaagcacttcggagccactccgatcgtgccagcacacgaagccgcccagcgctcttgcgagccttccggttag

SEQ ID NO: 8087 - DNA, 198 bp, Escherichia coli
atgacccgcctgcaggacgagctgcgcacggaatctgtccgcgctcaggcccgtgagcagtttaccggtgcggtggaccggatatttgacacagcggagagcgtctgtgttgcctctgttgcacgcacggttctgcgtgccgtccgtgacacagtggtctctgttgcccgcgcggtatggaactggatcttcttctga

SEQ ID NO: 8088 - DNA, 930 bp, Escherichia coli; identical to SEQ ID NO: 7703

SEQ ID NO: 8089 - DNA, 273 bp, Escherichia coli
atgaatctgtccggcatggctgaggtcatccaccaccgactgaaccgtggcgttatcggggatattccaggtggcaccggatgtcagggtgacattcgtggggtcaatggcaccgttcagcactgtgctgccggtcagcttcagggctgtaccgcgctgagcaatgacatccgtggtgacggtactgtcgttcagcgtcagcgtgccttcattcaggttgacggctttctgggtgagtgtggtgttgctgacagtgagtgtgccacttcctga

SEQ ID NO: 8090 - DNA, 903 bp, Escherichia coli
atgattacgctcattctttctgcaccagtaaccgaaatggctgaagcatttaagcgggtatttgcaaatgcagataatgtgaatattgtcggaaagccatttgaaacaatcagagaatttgactgcatggtaagtgcggcaaatagtttcggcctgatggatggcggtgttgatgccgccattaccacattcttcggttctcagctacaggcccgcgttcagaatcatattcttcgtgaatatctcggcgagcagcctgtaggttctgcatttgttattgaaacggggcataattatcacccctggctggtacatgcgccaacaatgcgtgttccgttgacaattgacggaacagacgctgtatataacgcaacttgggcagctctacttgctatctttcagcacaataaaaacgcaacgacagacaggaaaataaagacggtggtattccctgcaatgggagccggatgtggtcaggtgccgtttgaaagcgttgcccggcagatgaagcaggcatgggataactttaataaaaaaacagaatcaattaactgggaatacgcacaatcccgccagtcggcagtatttggcacatatgcatactgtccgggtaattctgtttgccgttatgcggatactaaatatattggatgcggcgattatcggacgtattgctcacgctccgggcaggtctgtattaaccctgaacatcaggctgatgatgtactgatacaacatcaggctaataaccggtttcgccctggttcgcatatacaccggattaatccagaaaatcctgtaggtaatgtcatctctggcgcacatagccacggaagtagcatcgttattggtgctcacacccatacgctcaataaacaatattctgtctctgatattaagtag

SEQ ID NO: 8091 - DNA, 1662 bp, Escherichia coli
gtggcgcttgaggatgcgagcacgacgaaaaaggggatagtacagctcagcagtgcgaccaacagcacttccgagtcactggcggcaacgccaaaagccgttaaggccgcgtatgacctggctaacgggaaatacaccgcacaggatgcaacgacagcacagaaagggataatccagctaagcagcgcgaccaacagcacgtctgaaacgctggcggcaacgccaaaggcagtaaaagcagccaatgacaatgctgagaaacgtctgcagaaagatcagaacggtgcggatatccctggcaaagacacctttacgaaaaatattggtgcctgccgtgccttcggtgggtcagtaagcacaacaacaggaaactggacgactgcacagtttatcgagtggctggattctcagggagcatttaaccatccatactggatgtgcaagggttcctggtcttatggcaataataaaatcattactgatactggctgcggtaatattcatctcgccggagctgtcattgaagtaatggggataaagtcagcgatgacgatccgcattaccactccgaccacatccagcggtggcggaacaaccaacgcccagtttacctatattaatcacggaacagattattcacctggctggcgaagggactataactccagaaataagccaacggcatcagagatcggggcgctaccgtcaggtggaacagcagtatcatcagttaatctggcttcaaaaggtcgggtagccgcgctgacagacaatacgcagggggcagcaggtcttgagttatacgaggtgtataacaacggatatccaacaacgtatggaaatatcattcacctgaaagggatgacagccgttggcgaaggtgagttactcatcggctggagtggtacaagcggtgctcatgctccggcatttattcgttcacgacgggatacgaccgacgcaaactggtcgccgtgggcgcagctttacacctcggctcatcctcctgcagagttttatccagtcggtgcaccaatcccgtggccatcagataccgttccgtctggttatgtcctgatgcaggggcagacttttgacaaatctgcatacccgaaacttgcagccgcttatccgtcaggcgtgatccctgatatgcgtggctggacgattaagggcaaacctgccagtggtcgggccgtattgtctcaggaacaggacggcattaaatcgcacacccacagcgccagcgcatccagtacggatttggggacgaaaaccacatcgtcgtttgattacggcactaaatccacgaataacatcggggcgcatacgcacagtgtgagcggtacagccgcaagtgccggaaaccatactcatagtgtcacaggcgcatcagcagtcagccagtggtcacaaaatgggtcagtacataaggtagtgtctgcggccagtgtgaatacaagtgctgcaggagcgcacactcatagtgtcagcggcacagctgcatctgcaggtgctcacgcacatactgtcggtattggtgctcatacgcactcggttgcgattggctcacatggacacaccatcaccgttaacgctgctggtaacgcggaaaacaccgtcaaaaacatcgcatttaactatattgtgaggcttgcatga

SEQ ID NO: 8092 - DNA, 807 bp, Escherichia coli
gtgattaatgaaataagaaaactaaccgaccagattgcaataattagtgatagtaccacttctgaaaatttatcatcggctcaagtaactgaagcaatcgaaactgaacttgaacatttacgagaccaacaagcaaataacgcagagttaatactacttggcatggctctttctgtagtacatcatgaatttaatggtaatattagggcaattagaagtgcgctaagggaattaaaagcatgggctgacagaaatcctaagcttgatattatataccaaaaaatcagaactagttttgatcacttagatggttatttaaaaacctttacaccattgacaagacgtttaagtcgctctaaaaccaatataactggaactgccattttagaatttatcagagatgtattcgatgatcgtcttgagaaagaaggaattgaattattcactacctcaaagtttgttaatcaagaaattgtaacttacacatcaaccatttaccctgtctttataaatctaattgataacgcaatatactggcttgggaaaacaactggagaaaaaagacttatacttgatgctactgaaacaggatttgttattggtgatactggtcccggtgtttcaactagagatcgagatataatatttgatatgggatttacacgaaaaacaggagggcgtggaatgggattattcatttccaaagagtgtttatctcgagatggatttactataagattggatgattacactcctgaacagggtgctttctttattattgagccatcagaagaaacaagtgaatag

SEQ ID NO: 8093 - DNA, 1668 bp, Escherichia coli
atgacaagctctactgattttcataaactttctgaagactgcgttcgccgttttttacattctgtagttgctgtagatgacaatatgtcttttggagctggtagtgatactttccctacagacgaagatattaatgctttagttgatcccgacgatgatcctacaccaataataacagcatcagcatccccaaggatagaatcaactaaatcaaaagcaaaggtaaaaaaccatccttttgattaccaagctctagcagaagctttcgccaaagatggtattgcttgttgcggattattagctaagagttttaatgttgaagaaagagatataattacagcatcatcccacaaggcagatataacaatacttgactgggatatgcaaagcgatagtgggcaatttgctattgaaataataaaatcgataatcgtttcagatataaattctggaggacgtttacgtcttctttctatttatactggtgaacatgttactgctgttataactaagttgaacaatgagttaaagaaaacataccgtagcgtaataaaaaatgatgatagtatttttattgaagataactatgcactcgaacaatggtgtatagttgttattagtaaagacgtttatgaaaaagatcttccaaatgtgttaataaaaaaattcactaaccttacagctgggttgctatccaacgccgcactctcttgcatttctgaaataagagaaaaaacccatgggatattaacaaaatataataataaattagacactgcatatgtttcccacatcttaaatttaataaaatccaaggagtcaagggcatatgcttatgaaaatgctcatgattatgcagtagatttaatttctgaagaaataagatcaatattgcaaataagtgaaaacttaaagaaatctctaagcaaaaactccttatcccattggcctatttttcactatgcagaaaatggttgtaagaattttctattaactggaaaaaaacaaaaagacttatcagtagaacatctaaggaatatactctctgctgattctttagaagaaattcaacacgctattgaacacgcatctttaggtaaaaaggaatacttaagccaagatggtgaagaagataaaaagttaatgcaattatgctctctggaaatcacgcgcaggagtttaagatatcattctcatatagataatgtgtccttaaaacaaggaactttacttttagatgcatataattttgtctatctatgcatacaaccattatgtgatagcgtcagattgcatgaaaaagccgattttttattcctcaggggaacactggacgataataattacaatttgttaatcgaagatgaatatggcggtttttataaaattaaaatgccggcaaaagcttctaatattatttcattttcatttggagtcgaaaatggaaacggtgtcatcatagggaaaaagaacaatctagttaatactgactatatctcattcgttcctttactcgttgaaaaaatatctactccaaaagtattgaaatggatcggggaaataaaaacaacgtacgcgcaaaaaataacaactgatattgttgctaatctgtcaagaataggtttagatcaacatgagtggttacgaataaaatcaaaagatatataa

SEQ ID NO: 8094 - DNA, 1023 bp, Escherichia coli
atgaccatcactactatcggtatcgatcttgctaaaaatgtgttcgctgttcatggggttgaccaaaatggcaaaaccgttctggtgaaatccagagtaacccgcgcagctcttcccgggctgattgcaagtttaccgccctgtgttatcgggatggaggcgtgctccggggcttattactgggcaagattgtttctgcaatatggtcatgagccgcgtctgatggccgctaaatttgtatctccataccgcatggccggtaaatcagggaaaaatgatgcagctgatgctcaggctatctgcgaagcggttcgtcgcccacatatgcggtttgttccagttaaggacgagagccagcaggcgatgcagtgtctgcatcgtaaccgacagggttttatcgaagagaaaacagcaacatataatcgtcttcgagggttgatatcagaattcggcgtcattgccccacaaagtacagatgctttgcggcacatggtttctgcgcagaagagctctttacctcttcaggttcagcaatgtgtagatgatttactggaacacgttgatcgcattgaagctaacatcactgaatatgaccgaattttgtcccgcatagccaaaacagatcaccgcagtcagcggctgatgaagctaaaaggagttggtcccacaactgcctgtgctctggttgcctgtatcggtaatgcacatgattttaaaaatggacggcaactggcggcctggctggggttgactccatcgcaatacagtagcggcggaaagtcgaagttaggcaggataacaaaagccggtgattcgtatctgcgaacgcttctggtacagggggctcgttcagtactgattggcgctgagaaaaggactgacttattcagtcgttgggtctgttcactggtcgaacgcagaggatactggcgcgctgttgtggccatcgccgccaaaaatgcaaggctgtgctgggcatcattgcattacggtgatgatttcaggctgtattcagcaagctaa

SEQ ID NO: 8095 - DNA, 258 bp, Escherichia coli
atgtcgcagacagaaaatgcagtgacttcctcatctggtgcaaaacgagcatacagaaagggtaaacctttgagtgaagcagaacgacagagagcagcttctgcgcgcaaacgatctgtatgtaaagagatcaaggttttcgtcagaccagaactgaaaaactgccttaccagtctgtgtgcagaggaaggggtaactcaggcagagttgatagaaaggcttatcgagaaagaggcctgtcaccggaacatgatgtga

SEQ ID NO: 8096 - DNA, 465 bp, Escherichia coli
gtggcactggctgaggcctgcccggcacttgttgacgctgcactggcagacgacgcagccgctgtttttgagcctgccgcagctgaggcgctctgtcccgctgccgtttcagaagacttagcgttcgtctctgacgtttttgccgccttcgcggaatttcctgccgctgttgccgaggaagctgcgctactggcgctcgaggatgcgttcgtttctgatgattttgccgcctcttttgaagccgccgcatcccgggctgaagtggcagcttctgacgctttcgtggtcgcggtggatgcagaagtggctgctgattgttgtgacgctgcagcattcgtttctgacgttttcgcggcactggcactggtagctgccgcgctttttgaggactctgcagcggcagcactttttgatgcttcagtggcctttgttgatgccgttcctgcgctggaagtcgctgactga

SEQ ID NO: 8097 - DNA, 600 bp, Escherichia coli
atgcgtaaagtttgtgcagccattttgtccgcagtagtctggcaggtcgccgctgctacgccagcgagtgcagcagaacatcagtccacgctgagcgcggggtatcttcatgcctcgatgaacgtccccggcagtgatgatctgaacgggattaacgtgaaataccgttatgagtttacggacacactggggctggtgacgtcattcagctatgcaggagacaagaatcgccagctgacccgttacagcgatacccgctggcatgaagattccgttcgtaaccgctggttcagcgtaatggcggggccgtctgtgcgcgtgaatgaatggttcagcgcgtatgcgatggcgggtgtggcttacagccgtgtgtcgactttctccggggattatctgcaggtgaccgacaatacggggaaaacgcacgatgtgctgaccggaagtgatgacggtcgccacagcaacacgtctctggcgtggggggctggcgtgcagtttaacccgaccgaatccgtggccgttgatgtcgcttatgaaggctccggcagcggtgactggcgcactgacgggttcatcgtgggtgttggttataaattctga

SEQ ID NO: 8098 - DNA, 672 bp, Escherichia coli
atgtttgttggtcagggcgatcagatattcatgaatgaagtgttcctgaaacgcctgacggcccccaccattaccagcggcggtaatcctccggcattttccctgacatcagacgggagactgacggcgaaaaatgcggatatcagtggcagtgtgaatgcgaactcaggaacgctcaacaatgtcacgattaaccagaactgtacgattaagggcatgctggaggcgacccaggtcagaggagatttcgttaaagctgtatcaaaagccttcccgaaaaaagtcggtacgtggggtaacacggaaacaccaaacggtacggttacagtcaccatcagcgatgatcataactttgaccgccagattattattccgcccattatttttaacggtatagcgtatgacgatccggggagcggaaataacccaggaggcacgcgatacacgggttatggttttgaagttcgcaaaaacggcgtattaatcgcatccagagaaactaaaggggccattcccggtagttacagtgcggttattgatatgccgagtggcaggggaagcgtcactctggagtttaagattttccagaaaggcaatcagggggcaggcaatatcaccgactgtacggtgattgtgaccaaaaaagccgcttccggcatcagtattcgttga

SEQ ID NO: 8099 - DNA, 381 bp, Escherichia coli
atgactgaacgcatagaatttgttttgccttacccgccaacggtgaacacttactggcgtcgtcgtggcagcacatattttgtatcaaaagccggggagcgttatcgccgggcagtggcgcttattgttcgccagcagcggctgaaattaagcctgtccggaaggttggcaataaaaattattgcagaaccaccggataagcgccgccgtgatctggacaatattctgaaagcgccgctggatgcgctgacgcatgcggggttgctaatggacgatgagcagtttgatgaaatcaatatcgttcgtggtcagccagtatctggtggacgtctgggggtgaagatttaccccataatgcatgaagagcaggtcaaaaaatga

SEQ ID NO: 8100 - DNA, 714 bp, Escherichia coli
atggtgttgtgctggcactgcgacaaccagctgcgcgaccagacctccgaatcactcgggcaacttgctcaccaaaacctgtttgcatggatgattgacgtcatacgccatgcaatgaatggctcgcaggaacgggaattatcgctggctgaattatcctggtgggcggtccgcaatcaggtggcggacgcgctaccggaagcggtattacgtcgttcgctggggttgcgtgcggaaaaaatccgctcaatgtaccgtgaaagcgacatcgtaccgggagagcagaccgccaccagcatactgaagcagcgcacaaaaaatcttgcgccgctgcctcacgcccaccagcaaaacccgccacaggaaaagacggtggtcagcattgccgttgatccggagtcaccggctcagtatctccagcgccagaaatcacaacgggaagagatgcctgtatacacgcgttgggtaaaaacgcagaaatgcatgacgtgtggcaatcaggcagatgatccgcatcacatcattggtcatggactgggagggatgggaacaaaggctgatgatttgtttgttattccgctgtgccgtaaatgccatagcgaactacacgccggggtaaaagattttgaagaaaaacacggcagccagctgttgttgctgattcgttttttaatgcacgcgagaaattcgggtgttctgaagtggaaagcataa

SEQ ID NO: 8101 - DNA, 600 bp, Escherichia coli
atgagcaacgcaaaaacaaagttaggcatcacaaagtacagcatcgtgaccaacagcaacgattccgtcacactgcgcctcatgactgagcatgaccttgcgatgctctatgagtggctaaatcgatctcatatcgtcgagtggtggggcggagaagaagcacgcccgacacttgctgacgtacaggaacagtacttgccaagcgttttagcgcaagagtccgtcactccatacattgcaatgctgaatggagagccgattgggtatgcccagtcgtacgttgctcttggaagcggggacggacggtgggaagaagaaaccgatccaggagtacgcggaatagaccagttactggcgaatgcatcacaactgggcaaaggcttgggaaccaagctggttcgagctctggttgagttgctgttcaatgatcccgaggtcaccaagatccaaacggacccgtcgccgagcaacttgcgagcgatccgatgctacgagaaagcggggtttgagaggcaaggtaccgtaaccaccccatatggtccagccgtgtacatggttcaaacacgccaggcattcgagcgaacacgcagtgatgcctaa

SEQ ID NO: 8102 - DNA, 876 bp, Escherichia coli
ttgttagccgttaaaattaagccctttaccaaaccaatacttattatgaaaaacacaatacatatcaacttcgctatttttttaataattgcaaatattatctacagcagcgccagtgcatcaacagatatctctactgttgcatctccattatttgaaggaactgaaggttgttttttactttacgatgcatccacaaacgctgaaattgctcaattcaataaagcaaagtgtgcaacgcaaatggcaccagattcaactttcaagatcgcattatcacttatggcatttgatgcggaaataatagatcagaaaaccatattcaaatgggataaaacccccaaaggaatggagatctggaacagcaatcatacaccaaagacgtggatgcaattttctgttgtttgggtttcgcaagaaataacccaaaaaattggattaaataaaatcaagaattatctcaaagattttgattatggaaatcaagacttctctggagataaagaaagaaacaacggattaacagaagcatggctcgaaagtagcttaaaaatttcaccagaagaacaaattcaattcctgcgtaaaattattaatcacaatctcccagttaaaaactcagccatagaaaacaccatagagaacatgtatctacaagatctggataatagtacaaaactgtatgggaaaactggtgcaggattcacagcaaatagaaccttacaaaacggatggtttgaagggtttattataagcaaatcaggacataaatatgtttttgtgtccgcacttacaggaaacttggggtcgaatttaacatcaagcataaaagccaagaaaaatgcgatcaccattctaaacacactaaatttataa

SEQ ID NO: 8103 - DNA, 969 bp, Escherichia coli
atgaccggagaactgaaaattggcacggtgaatgcgctgcgaattttcaatgatgccttcggtcttattttccgtcgttcagaagattttcttcatttcattccgacggctgaaggacaaggcgaaaacggtgatatcggcccattaaggccattcgctataaatctgagaacaggtgctatatctgtcagccacggggccaaaattgatggtgggctggcgcttggtacagataacgcactgggcggtaattccattactctcggagataacgacactggtattaaacagggcggcgacggtgtccttttattctattcaaatggacaactggcatttgggcttcaacccgcatctgctgatttttataagcgggttgcatatattcatcagggaataattcctgatggaagtggcgcatttgcagaccagttgaataatgccaccgcgccttttgttcagacgcagtttgcctggaatcccactcctggtggtctttacgtgccgatagttaagggcttgtccattcgcaatggacagggctatcccggcgcggtcagctttgggtatttactgacagaacagtatggatttccggttccatgtattcatatgcgtggcgatggcggtaatgatgctttatggcagtttaacccgaacgataaatcctttatttcaccgggtgctcttattgcgggtggcgtccgttataacaccgatggaaatatatttggtgggtgctgggggtcaaacttaaatgattacctgaatagttcttttatcagaaatgtgcgtctgggaggcagacgttctgacacattatatcgcggaggactttgcgaaccaggtaatggtcatgtgacaacaggattgcaaattattggtgaggttgatggagatgactggatggtgtcacgaccactacaaaaatacatttctggtaactggtataacgttgaacaggcatag

SEQ ID NO: 8104 - DNA, 699 bp, Escherichia coli
atgcaggatattcgagaagaaagtctgaacgagtcggttaagtcagagcagtcaccgcgggtggtactctgggaaatcgacctgacggtacagggtggtgagcggtattttttctgtaatgagctgaatgaaaaaggggagccggtcacctggcaggggcgtaagtatgaggcatacccgattgacggcagcggctttgagatgaacgaccggggcagcagtgccagaccgtcgctgacggtgtccaatctgttcggtctggtcaccgggatggcggaagacctgcagagtctggtgggggccacggtggtccgccgccgggtgtatgcccgttttctggatgcggtgaatttcgttgcgggcaatccggaggcggacccggagcaggagctgagtgaccgctgggtggtggagcagatgtcgcagctgacagccatgacggcctcgtttgtgctggctacaccgaccgagacggacggggcgctgtttcccggtcgcatcatgctggcgaacacctgtatgtgggattaccggggagatgaatgcgggtataacggtcctgcggtggcggatgagttcgacaaccccaccacggatatccgtaaggacagatgcagcaagtgcatgcgcgggtgtgaactgcgcaggaatgtcggcaattttggcggtttcctttccattaataaactttcgcagtaa

SEQ ID NO: 8105 - DNA, 744 bp, Escherichia coli
atgacacagactgaatcagcgattctggcgcatgcccggcggtgtgcgcctgcggagtcgtgcggcttcgtgataagcacgccggagggggagtggtatatcccttgtgtgaatatttctgcagagccggaggcgtattttcgtatcgcaccggaagactggctgcgggcagagatgcagggggagattgtggcactggtccacagtcatcccggtgggctgccctggctgagcgaggctgaccggcggctgcagataaaaagcgcactgccctggtggctggtctgccggggtgacattcacaaattccgctgtgtgccacatctgacaggacggcgctttgagcacggggtgacggactgttacacgctgttccgggatgcttatcatctggcggggactgaaatgccggattttcatcgcgaggatgactggtggcgcaacggtcagaacctttacctggacaatatggcggtcaccggcttttaccgggtgcccctgtcctctgcacaggcgggcgatattctgctgtgctgctttggtgcttcggtaccgaaccatgccgccatttactgcggcaacggtgagctgcttcaccatctgcctgaacaactgagtaaacgggagaggtattccgaaaaatggcaacgacgaacgcattctgtctggcgtcaccgccactggcacgcatctgccttcacggggatttacaacgatttggccgccgcctcagcctgtatgtga

SEQ ID NO: 8106 - DNA, 300 bp, Escherichia coli
atggctctgctctggaaccaggccgcaggaagcatcaatctggagtttatcagctactggaattccggtgtattggcagcccctgataatcacctgacccacgaagagcgctctgctttgcagaaactctggggcggtttggagacaggagatgtaacgattataggacgttctgatgaagtccatgattttacctccgccttaattaactgttttctttctgaagaagaaattgtctggtggcaatcaggtggcattttcccggatccctggcccgctaatatatcccggctgaactga

SEQ ID NO: 8107 - DNA, 351 bp, Escherichia coli; identical to SEQ ID NO: 6245

SEQ ID NO: 8108 - DNA, 1032 bp, Escherichia coli
atgaaaattaacaagatattatcatctgcaacactattgtatggtatgtcaatggccatgtcggtcgggagttgtgcaacacctgtccagactaatcttcctggttacaccccgggtgcagatatcattagtgtttcaccgaccagaaaccaggtcgatctcattggtgatgttgtttattcccagataaaaggaactcgttctgtcagacagcttcacatgtcagttcttgtcccgcgaacaaatgatttaaaaccagccattatttattatcccggcggcggattcatgtcttctgaacatgacaaatttattgaaatgagaatggctctggcagaagctggttttgttgtggccgctgtagaatacagaacaattcctgatacatttccagcaccagttgaggatggaaaagctgcaatacgttacctgagagagcatgccagcaattatgggattgatcctcaaagaatcggagttctgggtgactctgccggtggatggcttgcccagatgatgggaactacaaatggtgacaaaacctttgataaaggtgactttcttcagcaatcctcagatgttcaggcagttgccacactttatgggatttctgacttgttgaatattggcgaggggttccctgaatcagtgcaggaggttcatcgctctcctgccgtaaccgaagccttaatgatcaatggccctgcattcagaaattttgcgggagcccccatcacagcgtcaaaagaaaaagcgctaaacgccagtccaatcggacatatgaaaggagtaaaacccccatttcttattatgcatggtagcaaagacactctggtttcacctgagcaaagcgccaaactattcaggatgttgaagaagaacggtgataacgctgagtacgtgctggtagaaggggccgagcatggcgataagacatggtatcagccaattattataaacagagtcgttgagtggtttactaaaaacctgggagcgcctataaaaacagctccccaacaacaaaacccgtaa

SEQ ID NO: 8109 - DNA, 222 bp, Escherichia coli
atgaaaatcatcacccgtggcgaagccatgcgtattcaccgtcagcatcctgcatcccgtctttttccgttctgtaccggcaaataccgctggcacggcagtgctgaagcgtataccggtcgtgaagtgcaggatattcccggtgtgctggccgtgtttgctgaacgccgtaaggacagttttggcccgtatgtccggctgatgagcgtcactctgaactga

SEQ ID NO: 8110 - DNA, 645 bp, Escherichia coli; identical to SEQ ID NO: 7672

SEQ ID NO: 8111 - DNA, 369 bp, Escherichia coli
gtgtcagacaaactccatgagacaaattatcccgacgaccataacgaccgcctctggtggggactgccctgcaccgtgacgccctgtttcggggcacgtctggtgcaggagggtaaccggttgcattaccttgccgaccgcgccggtatcagaggccggttcagcgacgcggatgcataccacctggaccaggcctttccgctgctgatgaaacaaccggaactcatgctcaccagcggtgaactgaatccccgccatcagcataccgtcacactgtatgcgaaagggctgacctgcgaagccgataccctgggctcctgtgattacgtttatctggctgtttatccgacgcccgaaatgaaaaattaa

SEQ ID NO: 8112 - DNA, 666 bp, Escherichia coli
atgactattgctgatttcaaacggcctaaattggagctcccaaacggggcaaacaaactactactgcactcttgctgtgctccatgttccggtgaagtgatggaggcgcttcaggcctcgggaatcgactacaccatctttttctacaacccgaacattcatcctcagaaagagtatttaattcgtaaggatgaaaatattcgctttgctgaacaacacggcgtgccgtttatcgatgctgattacgacaccgacaactggtttgaacgtgccaaaggaatggaatgggagcctgagagggggatccgttgtaccatgtgttttgacatgcgttttgagcggacagcgttgtacgctgctgaaaatggtttcagtgtgatcagcagttcactgggcatttcacgctggaaaaatatgcagcaggttaacgagtgtgggcggcgagctgttgcgcattatccgggtatggtgtactgggattataactggcgcaagcagggcggctcgtcccgtatgattgaaatcagcaagcgcgaaaaattctatcagcaggaatattgtggctgtgtgtattctctgcgcgataccaatctacaccgcaaatctcagggacgccctcttatcaaaattggccaactccactacggaaaagaagagaaggagtga

SEQ ID NO: 8113 - DNA, 426 bp, Escherichia coli
atggcaaaagtatttacacaagaagagcgggaaaaaattaaagggcaggttgttgaacttgtacgtctgagcggtcgcgagacgttgcggcaactggaagccaagacaggtgcgacaagatatctgatgagtgttctcgccagagagctggttgccagtggcgatgtatacaactctggttacgggttattcccgtctgaacaggcgcgtaaggactggcaaaatgctcgcaaaaaactctcaagggcaaaggtgaagaaacctgcagtggttgatccggaccttatctggtcgttaccagacggcgaaatacgccgctacgacaggcgcctgaatataatctgtcgcgagtgccggaagagcgaagctatgcagcgtgtactggcattttatcaaggaaatgttaggtattttagacgttactag

SEQ ID NO: 8114 - DNA, 303 bp, Escherichia coli
atgattaagtcggttattgccggtgcggtagctatggcagtggtgtcttttggtgtaaatgctgctctaactactccacaggggcagggtagagtaacctttaacggaactgttgttgatgctccatgcagcatttctcagaaatcagctgatcagtctattgattttggacagctttcaaaaagcttccttcaagcaggaggcgtatccaaaccaatgaatttagatattgaattggttaattgtgatatcacttcatttaaggggggggaggagtctcggcagcaaaaaaagggactgtga

SEQ ID NO: 8115 - DNA, 384 bp, Escherichia coli; identical to SEQ ID NO: 5266

SEQ ID NO: 8116 - DNA, 852 bp, Escherichia coli; identical to SEQ ID NO: 5508

SEQ ID NO: 8117 - DNA, 393 bp, Escherichia coli
gtggtccggcgtaaggtttacgcccgttttctggatgcggtgaacttcgtcaacggaaacagtgacgccgatccggagcaggaggtgatcagccgctggcgcatcgagcagtgcagcgaactgagcgcggtgagtgcctcctttgtactgtccacgccgacggaaacggatggcgctgtttttccgggacgtatcatgctggccaacacctgcacctggacctatcgcggtgatgagtgcggttatcacggtccggcagtcgcggatgaatatgaccagccgacgtccgatatcacgaaggataaatgcagcaaatgcctgagcggctgtaagtttcgcaataacgtcggcaactttggcggcttcctttccattaacaaactttcgcagtaa

SEQ ID NO: 8118 - DNA, 600 bp, Escherichia coli
atgtcgccggaggactggctgagtgcagaaatgcagggtgagattgtggcgctggtccacagccaccccggtggtctgccctggctgagtgaggctgacaggcggctgcaggtgcagagcgatttgccgtggtggctggtctgccggggtgagattcataaattccgctgtgtgccgcatctcaccgggcggcgctttgagcacggggtgacggactgttacacgctgttccgggacgcttaccatctggcgggaattgagatgccggatttgcatcgcggggatgactggtggcgtcacggccagaatctctatcttgacaatatggaggccacggggctgtatcaggtgccgttgtcatcagcacaaccgggcgacgtgctgctgtgctgttttggttcatcggtgccgaatcatgccgccatttactgtggcgacggcgagctgctgcaccatattcctgaacaactgagtaaacgagagaggtacaccgacaaatggcagcgacgcacacactccctctggcgtcaccgggcatggcacgcatctgcctttacggggatttgcaacgatttggtcgccgtatcgaccttcgtgtga

SEQ ID NO: 8119 - DNA, 258 bp, Escherichia coli
atgtcgcagacagaaaatgcagtgacttcctcatcgggaaaaaaacgaccttacagaaggggtaatcctgttcctgcgagagaacgacaaaaagcgtctcttgcaagaaggagtgccactcataaagcgtttcatgccgtcattcagcttcgactgaaagaaaagttaagtgagcttgctgatgaagacgggatcactcaggcacagatgcttgagtggctgatagagtcagaggttaagcgcagaaaatctttgtga

SEQ ID NO: 8120 - DNA, 384 bp, Escherichia coli
atgaaaggactgttcagaattgtggatatgaagcggtggtatctgtgtccgcaggtacgggtcgcggatatcgtccagctgaacgggaatatccggccacgatcacgccagtggtggcagttattcaggatggtgtctcagtggcatgttgatgtggttatcgttgagcggcgttcgttcagtattgttgcagcagtagagctggatgatgccagtcatttacgaccggaacgcagacgccgggatattcttctggaagaggttctgaggcaggctggtattccgttgctcagaagccacgatgccagaaaactgctgcagatgaccggagaatggctgaatacaacaggggctgatcagcagtccccggaacatcgtagctga

SEQ ID NO: 8121 - DNA, 216 bp, Escherichia coli; identical to SEQ ID NO: 7765

SEQ ID NO: 8122 - DNA, 1176 bp, Escherichia coli
atggatttgtcgatcaataaaaactggatcgacaaagaagaatatccgcaatctgcagcaatcgacctgcgttgcgtaaacatggttgccgatctgtggcatgcgcctgcaccgaaaaatggtcaggccgttggcaccaacaccattggctcttccgaggcctgtatgctcggcgggatggcgatgaaatggcgttggcgcaagcgtatggaagccgcaggcaaacccacggataaaccaaacctggtgtgcggtccggtacaaatctgctggcataaattcgcccgctactgggatgtggagttgcgtgagatccctatgcgccccggtcagttgtttatggacccgaaacgcatgattgaagcctgcgacgaaaacaccatcggcgtggtgccgactttcggcgtgacctacaccggtaactatgagttcccgcagccgctgcacgatgcgctggataaattccaggccgacaccggtatcgacatcgacatgcacatcgacgccgccagcggtggcttcctggcaccgttcgtcgccccggatatcgtctgggacttccgcctgccgcgtgtgaaatcgatcagtgcttcaggccataaattcggtctggctccgctgggctgcggctgggttatctggcgtgatgaagaagcgctgccgcaggaactggtgttcaacgttgactacctcggcggtcagattggtactttcgccatcaacttctcccgcccggcgggtcaggtgattgcacagtactatgaattcctgcgcctcggtcgtgaaggctataccaaagtacagaacgcttcctaccaggttgccgcttatctggcggatgaaatcgccaaactggggccgtatgagttcatctgtaccggtcgcccggacgaaggcatcccggcggtttgcttcaaactgaaagatggtgaagatccaggatacaccctgtacgacctctctgaacgtctgcgtctgcgcggctggcaggttccggccttcactctcggcggtgaagccaccgacatcgtggtgatgcgcattatgtgtcgtcgcggcttcgaaatggactttgctgaactgttgctggaagactacaaagcctccctgaaatatctcagcgaccacccgaaactgcagggtattgcccagcagaacagctttaaacacacctga

SEQ ID NO: 8123 - DNA, 732 bp, Escherichia coli
atgcatgacatatggtacatgcgatacgttgatgacattcttattttaacgcaaaaagatcaagcaacaaaaattgcatctcatatcattgataagcttcaatcattaaatttaaacccacatccattaaatgaagagaactcaaaatccaaagtaggcagcttggatgaaagtttcaactttttgggctaccacataaaaaatcgagaattattgataaaacatgagagcattcttagatttgagtcatccttagcaaaaatttttactgcatatagacacgctctactacaagctaaaaataagcacgataaagaacgagctgttgcatattgtcagtggaaactaaatcttagaattacgggatgtgtgtttgaaggtaaacgattgggatgggtatcgtacttctcacaaataacgtcaacagctcaacttcgagctgttaatcatacgatcaataatcttatccgccgattcggcctttcatcagaaataaaaccaaagtctttgattaaaactttctatgaactccgcaggggtagagcggagacttttaaatacatacctaactttgacaatctacatatatctcagaaacgagaaattgtttctatgtggatagggaaagagaatgaaaaaaaacttagcaatagtgaaatagagagaaaatttaaatttaaaattgcgaaatcagtaaaagagcttgaagaggacatttcagggatatcatag

SEQ ID NO: 8124 - DNA, 255 bp, Escherichia coli; identical to SEQ ID NO: 7767

SEQ ID NO: 8125 - DNA, 654 bp, Escherichia coli
atgtttgttggtcagggcgatcagatatttatgaatgaagtgttcctgaaatatctgacggctcccaccattaccagcggcggtaatcctccggcattttccctgacaccggacgggcggctgacggcgaaaaatgccgatatcagcggtaacgtgaatgcgaactccgggacgctcaacaacgtcacgattaacgagaactgtcgggttctgggaaaattgtccgcgaaccagattgaaggcgatctcgttaaaacagtgggcaaagctttcccccgggactcccgtgcaccggagcggtggccatcaggaaccattaccgtcagggtttatgacgatcagccgtttgaccggcagattgttattccggcggtggcattcagcggcgctaaacatgagaaagagcatactgatatttactcctcatgccgtctgatagtgcggaaaaacggtgctgaaatttataaccgtaccgcgctggataatacgctgatttacagtggtgttattgatatgcctgccggtcacggtcacatgacactggagttttcggtgtcagcatggctggtaaataactggtatcccacagcaagtatcagcgatttgctggttgtggtgatgaagaaagccactgcaggcatcacgattagctga

SEQ ID NO: 8126 - DNA, 762 bp, Escherichia coli
ttgcgacagtcgcgccatcgtcgtccgttaccggcacaccttccccgtgaaatacaccgcctggagccagaagaaagctgttgcccggagtgtggcggtgagctggattatctgggggaagtcagcgctgaacagctggaactggtgagcagtgccctgaaagtgatccgcacagaacgggtaaaaaaagcctgtacaaaatgtgactgtattgttgaagcaccggcgccgtcccgcccgatagagcgtggtatcgcgggccccggattacttgcccgcgtgttaacgggaaaatactgcgaacacctgccactgtatcgtcagagtgaaatctttgcccgacagggtgccgaactgagccgtgcattaatctccaactgggttgacgcgtgctgccagttaatgactccgctaaatgatgccctgtaccgttacgtgatgaacacccgcaaggttcacactgacgacacaccggtaaaagtgctgacaccgggcagaaaaaaggcaaaaacaggacgcatctggacgtatgtccgggatgaccggaatgcgggctcatcagagccaccggcggtctggttcgcctactcaccagacaggcagggaaaacatccggtacaacaccttcgtcccttccggggtatcctgcaggcggatgcattcagcggttacgatcggctgttcagtgccaaacgtgaaggtgatgcacagacagaagttgcgtgctgggtccatgcccggcgaaaaatacacgatgtatga

SEQ ID NO: 8127 - DNA, 762 bp, Escherichia coli
ttgcgacagtcacgtcatcgtcgtccgttaccagcacatcttccccgtgaaatacaccgcctggagcctgaagaaagttgttgcccggagtgtggcagtgagctggattatctgggtgaagtcagtgctgagcagctggaactggtgagtagcgccctgaaagtgatccgcactgttcgggtaaaaaaagcctgtacaaaatgtgactgtatagttgaagcgccagcgccgtcccgcccgatagcgcgcggcatcgcgggctccggattacttgcccgcgtgttaacgggaaaatactgcgaacacctgccactgtatcgtcagagtgaaatctttgcccgacagggtgccgaactgagccgtgcattaatctccaactgggttgacgcgtgctgccagttaatgactccgctaaatgatgccctgtaccgttacgtgatgaacacccgcaaggttcacactgacgacacaccggtaaaagtgctgacaccgggcagaaaaaaggcaaaaacaggacgcatctggacgtatgtccgggatgaccggaatgcgggctcatcagagccaccggcggtctggttcgcctactcaccagacaggcagggaaaacatccggtacaacaccttcgtcccttccggggtatcctgcaggcggatgcattcagcggttacgatcggctgttcagtgccaaacgtgaaggtgatgcacagacagaagttgcgtgctgggtccatgcccggcgaaaaatacacgatgtatga

SEQ ID NO: 8128 - DNA, 762 bp, Escherichia coli
ttgcgacagtcgcgccatcgtcgtccgttaccggcacaccttccccgtgaaatacaccgcctggagcctgaagaaagttgttgcccggagtgtggcagtgagctggattatctgggtgaagtcagtgctgagcagctggaactggtgagtagcgccctgaaagtgatccgcactgttcgggtaaaaaaagcctgtacaaaatgtgactgtatagttgaagcgccagcgccgtcccgcccgatagcgcgcggcatcgcgggctccggattacttgcccgcgtgttaacgggaaaatactgcgaacacctgccactgtatcgtcagagtgaaatctttgcccgacagggtgccgaactgagccgtgcattaatctccaactgggttgacgcgtgctgccagttaatgactccgctaaatgatgccctgtaccgttacgtgatgaacacccgcaaggttcacactgacgacacaccggtaaaagtgctgacaccgggcagaaaaaaggcaaaaacaggacgcatctggacgtatgtccgggatgaccggaatgcgggctcatcagagccaccggcggtctggttcgcctactcaccagacaggcagggaaaacatccggtacaacaccttcgtcccttccggggtatcctgcaggcggatgcattcagcggttacgatcggctgttcagtgccaaacgtgaaggtgatgcacagacagaagttgcgtgctgggtccatgcccggcgaaaaatacacgatgtatga

SEQ ID NO: 8129 - DNA, 279 bp, Escherichia coli
atgctgctggtcaaccgggatacctggtgtcgtgccggcgattaccgcgctccgggatcactggccgggatgattaaacaggcgtggtgcagtgccctgggagtggatgccggacgttatgacacgctggcacattttccggtcaggccggcggtgtggctggaacgcgatgatgacaccggctttcagcaggtgctggagcgtgctgactatctggcgaaggagagtaccaaagcttacggcaccggtgagcgcaactttggctgcagtcgtggctga

SEQ ID NO: 8130 - DNA, 378 bp, Escherichia coli; identical to SEQ ID NO: 6181

SEQ ID NO: 8131 - DNA, 957 bp, Escherichia coli
atgataagtttatcaccaccgactatttgcaacagtgccataaaatctctgggtcatcagcttgatagtcgttacagacaggttgctgcacgtctttgcgaaaatgaggctgtcgaactcgatgtttctggcccgaagccccggttgacaatttctcccctcgccagtcttgatgagccggacagtctgaaacgactgagcaaaatgatcagtgatctactccctccggtggatttaacggagttgctgctcgaaattaacgcccataccggatttgctgatgagtttttccatgctagtgaagccagtgccagagttgatgatctgcccgtcagcatcagcgccgtgctgatggctgaagcctgcaatatcggtctggaaccactgatcagatcaaatgttcctgcactgacccgacaccggctgaactggacaaaagcgaactatctgcgggctgaaactatcaccagcgctaatgccagactggttgattttcaggcaacgctgccactggcacagatatggggtggaggagaagtggcatctgcagatggaatgcgctttgttacgccagtcagaacaatcaatgccggaccgaaccgcaaatactttggtaataacagagggatcacctggtacaactttgtgtccgatcagtattccggctttcatggcatcgttataccggggacgctgagggactctatctttgtgctggaaggtcttctggaacaggagaccgggctgaatccaaccgaaattatgaccgatacagcaggtgccagcgaacttgtctttggccttttctggctgctgggataccagttttctccacgcctggctgatgccggtgcttcggttttctggcgaatggaccatgatgccgactatggcgtgctgaatgatattgccagagggcaatcagatccccgaaaaatagggcactgttgcaaatag

SEQ ID NO: 8132 - DNA, 369 bp, Escherichia coli
gtgtcagacaaactccatgagacaaattatcccgacgaccataacgaccgcctctggtggggactgccctgcaccgtgacgccctgtttcggggcacgtctggtgcaggagggtaaccggttgcattaccttgccgaccgtgccggtatcagaggccggttcagcgacgcggatgcataccacctggaccaggcctttccgctgctgatgaaacaactggaactcatgctcaccagcggtgaactgaatccccgccatcagcataccgtcacactgtatgcgaaaggactgacctgcgaagccgataccctgggctcctgtgattacgtttatctggctgtttatccgacgcccgaaatgaaaaattaa

SEQ ID NO: 8133 - DNA, 285 bp, Escherichia coli
gtgcagaaacgtaacttctggcaactgcaggctgaaatccaccaccggggacgttactgccatccgtacagcatggatatcactgttacccggaacagtccgactggtcaggctatgacagccgatgcggaagccgctgtcagcgaagccctgcgcgacctggccttctggttgtaccgtcagctggaaaacgagtacgacaggctgacctctgatgccgctgtggatgaggcccttctcatcaacgaatacaccttcaccgaagccggtctgcgcgccggctga

SEQ ID NO: 8134 - DNA, 222 bp, Escherichia coli
atgaaaatcatcacccgtggtgaagccatgcgtattcaccgtcagcatccggcatcccgtctttttccgttctgtaccggcaaataccgctggcacggcagtgctgaagcgtataccggtcgtgaagtgcaggatattcccggtgtgctggccgtgtttgcagaacgccgtaaggacagttttggtccgtatgtccggctgatgagcgtcaccctgaactga

SEQ ID NO: 8135 - DNA, 327 bp, Escherichia coli
atggcgggactggagcgtgaagaattccgggtgctgtatctgaacaaccagaataagctgattgccggtgaaaccctcttcaccggcaccatcaaccgcacggaagtccatccccgggaagtgattaaacgcgccctgtaccacaatgccgctgctgtggtactggcacacaatcacccgtccggtgaagtcacacccagcaaggcagaccgccttatcacggaacgtctggtacaggcactgggcctggtggatatccgggtgccggaccatctgatagtcggtggcagccaggttttctcctttgcggaatacggtctgctttaa

SEQ ID NO: 8136 - DNA, 645 bp, Escherichia coli
atgagcagcattatcaccatcacagtgtatacgctggatgaactttcctgcccggcacggggaaaagcccgcgactggtaccgtcagcatcatgctgacagcaactggtatgaaaacgtgtatgaagacttcagggaggtctgtggcattttcgggattgacctccgccagcgcgttttccggctcagcaatggcaggtttatggaagagccgtgcatctggttcagcggattctgcagccagggggacggagcctgttttgaagggcgctggcactggcagccagcgacaccccggaaaatcagggaatatgcccctcaggaccgtgagcttcatcgtatcgcggataccctgcaggcggtgcagaaacgtaacttctggcagcttcaggctgaaatcagtcaccggggacgttactgccatccgtacagcatggatatcaccgtcacccggaacagtccgactggtcaggcaatgacaaccgatgcggaagccgctgtcagcgaagccctgcgcgacctggccttctggctgtaccgccagctggaaaacaagtacgactggctgacctcagacaccgctgtggatgaggcccttctcatcaacgaatacaccttcaccgaagccggtctgcgcgccggctga

SEQ ID NO: 8137 - DNA, 351 bp, Escherichia coli
atgatctcgctcccatcagacactcgaatctggctggttgccggcgttaccgatatgcgtaaatccttcaacggtctgggtgaacaggtacaacatgtgctggatgagaaccccttctccggtcacctgtttatctttcgcggccgacggggtgacaccgtcaaaattctttgggctgatgctgatggtctgtgcctgttcaccaaacgtctggaggaaggccagtttatctggcctgcggtgcgtgacggtaaggtatccattacccgctcgcagctggcaatgttcctcgataaactggactggcgtcaacccaaaacatcccgccttaatgcactgacaatgttgtaa

SEQ ID NO: 8138 - DNA, 363 bp, Escherichia coli
atggttaaactggcttcacaaccaggagcctctgttgcccgtattgccagggaacacgatatcaatgataacctcctgttcaaatggctcaggctctggcagaacgaagggcgtatatcgcggcgtcttccggtaacaacctcttctggcgctggcgttgaattattacctgttgagataacgcctgatgagcagaaagagcctgtggcggctcttactccgcttttatccactccttcacaaagcacagtcagtgccagttcctgtaaagttgagttccgccacggtaacatgacgctggaaaatccatcgccagagctgctcacggtgttgatccgtgaactgaccgggagaggacgatga

SEQ ID NO: 8139 - DNA, 351 bp, Escherichia coli
atgatctcgctcccatcagacactcgaatctcgctggttgccggcgttactgatatgcgtaaatccttcaacggtctgggtgaacaggtacaacatgtgctggatgagaaccccttctccggtcacctgttcatcttccgtggccgacggagtgacatgattaaaatcctctgggctgatgctgatggtctgtgcctgttcaccaaacgcctggaggaaggcctgtttatctggcctgcggtgcgtgacggtaaggtatccattacccgctcgcagctggcaatgctcctcgataagctggactggcgtcagccaaaaacatccagccgtaactcactgacaatgttgtaa

SEQ ID NO: 8140 - DNA, 351 bp, Escherichia coli
atgatctcgctcccatcagacactcgaatctcgctggttgccggcgttactgatatgcgtaaatccttcaacggtctgggtgaacaggtacaacatgtgctgaatgataatcccttctccggtcacctgtttatcttccgtggccgacggggtgacaccgtcaaaattctttgggctgatgctgatggtctgtgcctgttcaccaaacgcctggaggaaggccagtttatctggcctgcggtacgtgacggcaaggtatccattacccgctcgcaactggcaatgctcctcgataagctggactggcgtcagccaaaaacatccagccgtaactcactgacaatgttgtaa

SEQ ID NO: 8141 - DNA, 426 bp, Escherichia coli; identical to SEQ ID NO: 6000

SEQ ID NO: 8142 - DNA, 351 bp, Escherichia coli
atgatctcgctcccatcagacactcgaatctcgctggttgccggcgttactgatatgcgtaaatccttcaacggtctgggtgaacaggtacaacatgtgctggatgagaaccccttctccggtcacctgttcatcttccgtggccgacggagtgacatgattaaaatcctctgggctgatgctgatggtctgtgcctgttcaccaaacgcctggaggaaggccagtttatctggcctgcggtacgtgacggcaaggtatccattacccgctcgcaactggcaatgctcctcgataagctggactggcgtcagccaaaaacatccagccgtaactcactgacaatgttgtaa

SEQ ID NO: 8143 - DNA, 426 bp, Escherichia coli
atggaacagaaaatattatccgcagaaccccgcagaacattttcaaatgagtttaaacttcaaatggttaaactggcttcacaactaggagcctctgttgcccgtattgccagggaacacgatatcaatgataacctcctgttcaaatggctcaggctctggcagaacgaagggcgtatatcgcggcgtcttccggtaacaacctcttctgacgctggcgttgaattattacctgttgagataacgcctgatgagcagaaagagcctgtggcggctcttactccgcttttatccactccttcacaaagcacagtcagtgccagttcctgtaaagttgagttccgccacggtaacatgacgctggaaaatccgtcaccagagctgctcacggtgttgatccgtgaactgaccgggagggggcgatga

SEQ ID NO: 8144 - DNA, 819 bp, Escherichia coli; identical to SEQ ID NO: 6059

SEQ ID NO: 8145 - DNA, 351 bp, Escherichia coli; identical to SEQ ID NO: 6245

SEQ ID NO: 8146 - DNA, 228 bp, Escherichia coli; identical to SEQ ID NO: 7763

SEQ ID NO: 8147 - DNA, 330 bp, Escherichia coli
atgaaaacctttcgctggaaagtgaagccggatatggaggtgaactcgcagccatcggtgcgtgaagtgcgttttggtgacgggtactcacagcgtatggcggcagggctgaatgctgacctgaaaacatacagggtgacgctttccgtgacccgggaggaggcccggcatctggaagcgttcctggcagagcacggtggctggaaggcatttttgtggaagccaccctatgcataccggcagataaaggtgacctgtgccgggtggtctgcgcgggtcgggatgttgcgcgttgagttcagcgcggagtttaagcaggtggtgaactga

SEQ ID NO: 8148 - DNA, 240 bp, Escherichia coli
atgcggggctatgcggaaggtggttatgtcggcggtgccggaagtccggcgcagatgcggcgggcggaaggcattaattttaatcagaacaatcacgtggtgattcagaacgacggccccaacgggcgggcagggccgcagctgatgaaagcggtgtatgagatggcccgcaagggggcacaggatgaactccggctgcagttgcgtgatggcggtatgttatcagggagcggtggatga

SEQ ID NO: 8149 - DNA, 645 bp, Escherichia coli
atgaaatacgtctgggttctgaataatgatactgaagtggataaagaggctttaactcatttaattagtaaatgtgattcagataaaagtatagggatttgcggttctcgtttagtctattttgccgacagagagatgcagcaaggactaggtggggtgcataacaaatggttatgcactacaaaaaattatgaaatgggaagattagtttccaaaaaatatgatgatgaagtcattagtaatgatatagattatataattggcgcatcgatgtttttctctagagaatgtttggaaacagttggattgatgaatgaagaatattttttatactatgaagagttagatatttgcctcagagcaaaagcaaagaactttaaattaggtatttgctcagaaagtttggtttatcataaaataggtgcaagtactgatgggggaaagagcatgatggctgatctttgctcaataaaaaataggctggtcattacagaaaggttttatccccaatattattggacggtatggttgtcactttttgttgtagcatttaaccgtgctagaagaggtgagtttaataagatgaaaagatgtttgaatgttatgtttaacttcaaacgaaacaaaggtagcaaatgccattag

SEQ ID NO: 8150 - DNA, 222 bp, Escherichia coli
atgaaaattatcactcgtggtgaagccatgcgtattcaccaacaacatccgacatcccgtcttttcccgttctgtaccggcaaataccgctggcacggcagcactgaagcgtataccggtcgtgaagtgcaggatattcccggtgtgttggccgtgtttgctgaacgtcgtaaggacagttttggcccgtatgtccggctgatgagcgtcaccctgaactga

SEQ ID NO: 8151 - DNA, 213 bp, Escherichia coli; identical to SEQ ID NO: 5358

SEQ ID NO: 8152 - DNA, 360 bp, Escherichia coli
atgacaccggtgaatgatgccctgtaccgttatgtaatgaacacccgcaaggttcacactgacgacacaccggtaaaagtgctgacaccgggcagaaaaaaggcaaaaacaggacgcatctggacgtatgtccgggatgaccggaatgcgggctcatcagagccaccggcggtctggttcgcctactcaccagacaggcagggaaaacatccggtacaacaccttcgtcccttccggggtatcctgcaggcggatgcattcagcggttacgatcggctgttcagtgccaaacgtgaaggtgatgcacagacagaagttgcgtgctgggtccatgcccggcgaaaaatacacgatgtatga

SEQ ID NO: 8153 - DNA, 318 bp, Escherichia coli
atggttaacttttatcaagattcagatattatttgtttcccatcgaaactagaaacgtggggattaccattatcagaagctaaaacatacaaaaaatggatatttgcggcagacttaccttatgctcatgaagttttatataactattcaaaaactagatattttccatttgacgatgagaaaatacttgttcgctacatattagagtacacaagtaaaaatatgcatgaagatataaaaaatagtagggtgaattttaataatgatgcattgactggttttgaacagtttattgaatatatcctcaaggggaactga

SEQ ID NO: 8154 - DNA, 279 bp, Escherichia coli
atgctgctggtcaaccgggatacctggtgtcgtgccggtgattaccgcgctccgggatcactggccggaatgattgaacaggcctggtgcagtgccctgggggtggatgccggatgccatgccacgctggtgcattttccggcctggccggcggtgtggctggcgcgtaatgatgacaccggctttcagcaagtgctggaacgtgctgactatctggcgaaggagcataccaaagctcactgcaccggtgagcgcaactttggctgcagtcgtggctga

SEQ ID NO: 8155 - DNA, 351 bp, Escherichia coli
atgatctcactcccatcaggtacccgtatctggctcgttgccggcgttaccgatatgcgtaaatccttcaacggactgggagaacaggtacaacatgtgctgaatgataatcccttctccggtcacctgttcatcttccgtggccgacggagtgacatgattaaaatcctctgggctgatgctgatggtctgtgcctgttcaccaaacgcctggaggaaggcctgtttatctggcctgcggtgcgtgacggtaaggtatccattacccgctcgcagctggcaatgctcctcgataagctggactggcgtcagccaaaaacatcccgtcttaacgcactgacaatgttgtaa

SEQ ID NO: 8156 - DNA, 210 bp, Escherichia coli
atgattaaacaggcgtggtgcagtgccctgggagtggatgtcgggtgccatgccacgctggtgcattttccggcctggccggcggtgtggctggaacgcgatgatgacactggctttcagcaggtgctggaacgtgctgactatctggcgaaggaacataccaaagctcactgcaccggtgagcgcaattttggctgtagccggagttga

SEQ ID NO: 8157 - DNA, 450 bp, Escherichia coli
gtgccaccgccgccggaaaatcggcagaaagcgccgcatcatccgcttcaacagccacaacgaaggctggcaaagccactgagcaagccactgcagcagcgaggtctgcttctgcagcaaaaacctctgaaacaaatgcaaagacttcagcagacaatgctgcttcctctaaggcggcagccgcatcgtcagccagttcagcggcgtcatcggcatcatctgcgtctgcttcaaaagatgaggcgaccagacaggcgtcagcagcaaagggcagcgccacgacggcatccacgaaggcgacagaggcagctggcagtgcgacggcggcagctcagagcaaaagtacggcggaatccgcggcaacgcgcgccgagacagcggcaaaacgggcagaggatattgcatccgccgtggcgcttgaggatgcgagcacgacgaaaaaggggatag

SEQ ID NO: 8158 - DNA, 294 bp, Escherichia coli
atgagaaacggcttcaacggcctggcggcaaaggtgcagacgacgctgaaagacgatccgatgtcaggtcacgtttttatcttccgtgggcgtaatggcagtcaggtaaagctcctctggtctaccggcgatggactgtgtctgctgaccaaacggctggagcgcggccgcttcgcctggccgtcagcccgggatggcaaagtgttcctcacaccggcacagctggcgatgctccttgaaggtatcgactggcggcagcctaaaagactgcttacgtccctgactatgttgtaa

SEQ ID NO: 8159 - DNA, 495 bp, Escherichia coli
ttgaaagcaattgaatatgtaaggcagttatatgggatcgatgttagactaaaaatttgtggatgtactccgaatcaaaagattttacctacttgggttgaattaattgataaagtagataaaaataacgttgacgaatatcagaaattcatcgatgtgttatctaacgctgatatacttcttttaccaaccattgctgaatgttatggaatggtattttgtgaagctgctgcttttggattgcctgttgtcgctacagatacaggtggagtcagttctatagttatcaacgaaaggacggggatattaattaaagacccgttagactataagcactttggaaatgcaattcataaaataattagttccgtagagacttatcaaaactactcccaaaacgcaagaattagatataataatatattgcattgggacaattgggctaaaaagataattgagattatgtatgagcataagaatagaagaatcaaatag

SEQ ID NO: 8160 - DNA, 336 bp, Escherichia coli
gtgaccctggagccccgtgtcttcggctggatggaccgtctgtgtgaagactactgcgggggtatctggaatctgtacaccctgaacaacggtggcgcatttatagcacctgaaccggatgaagatgatggagaaacctggatactgttcaatgccatgaacggtaaccgcgctgaaatgagcccggaagccgccggcattgcagcctgtctgatgacgtacagccatcatgcctgtcgtacggagtgttatgccatgacggtccattattatcggttgcgggattacgccctgcagcatccggaatgcaacgccattatgcgcatcattgactga

SEQ ID NO: 8161 - DNA, 303 bp, Escherichia coli; identical to SEQ ID NO: 5063

SEQ ID NO: 8162 - DNA, 141 bp, Escherichia coli; identical to SEQ ID NO: 7328

SEQ ID NO: 8163 - DNA, 228 bp, Escherichia coli; identical to SEQ ID NO: 7768

SEQ ID NO: 8164 - DNA, 249 bp, Escherichia coli
ttgcattaccttgccgaccgtgccggtatcagaggccggttcagagatgcggatgcgtaccctctggaccaggcctttccgctgctgatgaaacaactgaaattaatgctcaccagtggtgaactgaatccccgccatcagcataccgtgacactgtatgcgaaggggctgacctgtgaagccgacaccctcggctcctgtggttacgtttatctggctgtttatccgacacctgaaacgaaaaagtaa

SEQ ID NO: 8165 - DNA, 351 bp, Escherichia coli
atgatctcgctcccatcagacactcgaatctcgctggttgccggcgttactgatatgcgtaaatccttcaacggtctgggtgaacaggtacaacatgtgctggatgagaaccccttctccggtcacctgttcatcttccgtggccgacggggtgacaccgtcaaaattctttgggctgatgctgatggtctgtgcctgttcaccaaacgcctggaggaaggccagtttatctggcctgcggtacgtgacggcaaggtatccattacccgctcgcaactggcaatgctcctcgataagctggactggcgtcagccaaaaacatccagccgtaactcactgacaatgttgtaa

SEQ ID NO: 8166 - DNA, 426 bp, Escherichia coli
atggaacagaaaatattatccgcagaaccccgcagaacattttcaaatgagtttaaacttcaaatggttaaactggcttcacaactaggagcctctgttgcccgtattgccagggaacacgatatcaatgataacctcctgttcaaatggctcaggctctggcagaacgaagggcgtatatcgcggcgtcttccggtaacaacctcttctgacgctggcgttgaattattacctgttgagataacgcctgatgagcagaaagagcctatggcggctcttactccgcttttatccactccttcacaaagcacagtcagtgccagttcctgtaaagttgagttccgccacggtaacatgacgctggaaaatccttcaccagagctgctcacagtgttgatccgtgaactgaccgggaggggaagatga

SEQ ID NO: 8167 - DNA, 426 bp, Escherichia coli
atggaacagaaaatattatccgcagaaccccgcagaacattttcaaatgagtttaaacttcaaatggttaaactggcttcacaactaggagcctctgttgcccgtattgccagggaacacgatatcaatgataacctcctgttcaaatggctcaggctctggcagaacgaagggcgtatatcgcggcgtcttccggtaacaacctcttctgacgctggcgttgaattattacctgttgagataacgcctgatgagcagaaagagcctatggcggctcttactccgcttttatccactccttcacaaagcacagtcagtgccagttcctgtaaagttgagttccgccacggtaacatgacgctggaaaatccttcaccagagctgctcacggtgttgatccgtgaactgaccgggaggggaagatga

SEQ ID NO: 8168 - DNA, 426 bp, Escherichia coli
atggaacagaaaatattatccgcagaaccccgcagaacattttcaaatgagtttaaacttcaaatggttaaactggcttcacaactaggagcctctgttgcccgtattgccagggaacacgatatcaatgataacctcctgttcaaatggctcaggctctggcagaacgaagggcgtatatcgcggcgtcttccggtaacgacctcttctgacactggcgttgaattattacctgtagaaataacgccggatgagcagaaagaacctgtggcggccattgcgccgtctttatccacttccactcagaccagagtcagtgccagttcctgcaaggtggaattccgtcacggtaacatgacgctggaaaatccatcgccagagctgctcacagtgttgatccgtgaactgaccgggaggggaagatga

SEQ ID NO: 8169 - DNA, 141 bp, Escherichia coli
atgctgaaaggcgggatttccggtcgcagtgccagaggaaaacgtatccatacccgggccattcacagcatcgataccgacattaagctcaaccgggcgttgtgggtgatggcagaaacgctgctggagagcatgcgctga

SEQ ID NO: 8170 - DNA, 201 bp, Escherichia coli
atgttccaggaattgccagtgaaattttgcgcgggcgcgacgttcatcaccggcttcaatggcagtggctacagcgacggcaccttcttcctttattgcctgttcgtccggaatggcggcgcaaataaagactttactcattttgttttacctcattacagatttaagggtgaacaaatccctgccattgctggcatataa

SEQ ID NO: 8171 - DNA, 258 bp, Escherichia coli; identical to SEQ ID NO: 5174

SEQ ID NO: 8172 - DNA, 276 bp, Escherichia coli; identical to SEQ ID NO: 6180

SEQ ID NO: 8173 - DNA, 1206 bp, Escherichia coli
atgaccctaccaaaaatcaaacaggttcgcgcctggtttactggcggtgcgacagcagaaaaaggcgctggcggcggtgattatcacgaccagggggcgaatcactggattgatgatcatattgccaccccgatgagtaaataccgcgaatacgagcagtcccgccagtcatttggcattaacgttcttggcacgttgattgttgaagttgaagcagaaaacggccagaccggattcgctgtttcgacagccggtgaaatgggctgttttattgtcgaaaaacatcttaaccgtttcattgagggtaaatgcgtcagtgatatcaaactgatccacgatcaaatgctcaatgccaccctgtattactccggctctggtggcctggtgatgaatacgatttcctgtgtcgatctggctctgtgggatctgttcggcaaagtggtcgggcttccggtttataaacttttaggcggcgctgttcgtgatgagattcagttctacgccacaggtgcgcgtccggatctggcaaaagagatgggctttatcggtggcaaaatgccgacgcactgggggccacatgatggcgatgcggggatccgcaaagatgccgctatggtcgcggatatgcgtgaaaaatgcggtgaggatttctggttaatgctcgactgctggatgagtcaggacgtgaattatgccaccaaactggcccacgcttgcgcgccctataacctgaaatggatcgaagagtgcctgccgccacagcagtatgaaggttatcgcgaactgaaacacaacgcaccagcggggatgatggtcaccagcggtgagcaccacggcacactgcaatctttccgtacgctttcagaaaccggtatcgacattatgcagccggatgttggctggtgcggtggcttaaccacgctggtggaaattgccgcaatcgccaaatccagggggcaactggtggtgccacacggttcgtctgtttactcccaccatgcggtgatcaccttcaccaatacgccattcagcgaattcctgatgaccagcccggattgttcaacgatgcgtccgcaatttgatccgattctgcttaatgagccagtaccggtgaatggtcgtattcataaatcagtgcttgataaacccggtttcggcgtcgaactcaatcgtgactgcaatttgaaacgcccctacagccactaa

SEQ ID NO: 8174 - DNA, 465 bp, Escherichia coli
gtgattttcgaaggcaccgaaggactgcccgcgcagatcagtcgcgaattgcagagccgccagttcagcctgacgctgagcgagcaattcaccggtggtttattggctttgcaactttctcgcgcaggtgctccattgctggcgtgtgaagtggttccttcacaggaggaaaccctggcgcaaactgcgcactggattacagaacggcgggcgaaccattttgctgggttggcactggctgtttctggtctggaagatgagcatctcaactttgcactagccacgccagacggcactttcgctttgcgtgtacatttcagtgccacacgctacagtctggctattcgccaggaagtgtgcgcaatgatggcgcttaatatgctacgccgttggttaaacggccaggacatcgccagcgagcatggctggattgaggttgttgagtccatgaccttatctgtctga

SEQ ID NO: 8175 - DNA, 1158 bp, Escherichia coli
atgacggatggaaaaacaatgtcaggatttttgcctttttcgcgaccagcaatgggcgtagaggaactcgctgcagttaaagaggttctcgaatccggttggatcacaaccggtccgaagaatcaggcgcttgaacaagctttttgccagttgacgggaaatcagcatgccatcgcggtcagttcagccaccgccggaatgcatatcacgctaatggcgttggaaattggcaagggcgatgaagtgattacgccttccctgacctgggtttcaaccctcaatatgatttccttgctgggtgcaacgccggtaatggtggatgtcgaccgcgatacgctgatggtcacgcctgaagcgatcgaagcagccattacaccacgcactaaagccatcattccggtgcattatgccggtgcgccagcagatattgacgccattcgcgccattggcgaacgttacggcatcgcagttatcgaagatgctgcccatgccgtaggtacgtattacaaagggcgacatattggcgcaaaaggtaccgctattttttcgtttcacgccatcaaaaatattacctgtgcggaaggtggcctgattgttactgataatgaaaatcttgcccgccagctgcggatgctgaaatttcacggtctgggtgtcgatgcctatgacagacatacctggggccgtgcaccgcaggctgaagtcttaacgccgggctataagtacaatctgaccgatattaacgccgcgattgccctgacacagttagtcaaattagagcacctcaacacccggcggcgcgaaattgcccagcaatatcagcaagcactggcaactctcccctttcagccattaagccttcccgcctggccgcacgttcacgcctggcatctgtttattattcgtgtcgatgaacaacgttgtggtatcagtcgcgatgcgttgatggaagcgttaaaagaaagaggcattggtaccgggttacatttccgcgctgctcacacacaaaaatattatcgcgagcgttttcccacgctgtcgttaccgaataccgaatggaatagcgaacgcatctgttcattgccgctgttcccggatatgaccaccgccgatgccgaccgcgtcatcacagcccttcagcaactcgcaggacaataa

SEQ ID NO: 8176 - DNA, 3909 bp, Escherichia coli
atgaccactgtgaataaaaagttaaaaaaaactgcatctggcgcgattacatggtcggtaattgttacccagatattatctccagtttctctttctttgatcccagcaaacagttttgcatcatctggtaataaagatgttacgcaaatttatgccagcgatgagcatgcaaataaagtggcctcatttgcagcaagtgcaggtcagagcctggcgaataataatgcaagtagttttgctgtaaatactttatcaactcaggcgacaaaagaggtcgtcgactggttgcaacaatatggcaatgcgcgcatcaagcttaatgtcgatgattctttttccttgaaggattcatcattcgactttttatatccatggctggatactcaggattatgtgttattcagtcagacatcactacatcgtactgatgaccgaaatcagaccaatattggtttggggattcgtcatttcactcctgataacgcaatgttgggtgcgaatgttttctatgattacgatttaagtcgtagtcactctcgtgcaggttttggggttgagtactggagggattatttcaggcttggtgtaaatacctattttggtctatctgactggaagaacagtcgtgatattgatgattatctggaaagacctgcaaatggctgggatttttctgctgaaggatggctacctgcttatccgcaattaggggcatctattcagtttgaaaaatattatggtaaaaatgtcgggttatttggaagcgataacctgcaggaaaacccttacgcagttactgggggaatttcttatacaccagttcctctgattaagttttctgcacagcataagcaaggacagagcaacactcacgatacaacctttggtgttgagtttaattatcgcccgggcgtttccttggctgaacagcttagcagcgataatgttgcagttatgcgagaagtccagaaccggcgttatgattttgttgaacgaaataacaacattgttctggagtacaagaagaagcatgcactgaaaatcagtttgccagagtctgttcagggggagggggaatcaatcatccctgtaacactgacaatcaacaatgctagtggtggtatcaagtctgtacagtggaatgatagtgcattcactgcggctggcggcaagatcagtggaaatggcacatcatggcagatcactttaccggcttataaaagcgaaggtgtaaattcgtggaatgttggagccacagtacaggataacagaggcaacgtttccaactatgccgtgatgaatattagcgttactgatagtggtgtctcgacggctgattcgtcttttacactggatggagattcgtcgccgacaatctctgctgatagccaatccacttatccgatagtattaagcctgaaagatagtaacggtaaggcattaaccggactggctgatgacattgaaatgtcagtggaatttacagcagatagcaatagtgctcgacagcgtgaaacggtaactgctccgtcattaggcgcggtagaggaaatctctgctggggtatatcgctctgttctgactgctggttcgcaggctggtacggtacgtgtaactgcaaaagttcagggaaaaacctttactctgaatattaagcaggcagccattactgatagtgatgtatcgacagctgattcgtcttttacactggatggagattcgtcgccgacgatctctgctgatagccaatccacttatccgatagtattaagcctgaaagatagtaacggtaaggcattaaccggactggctgatgacattgaaatgtcagtggaatttacagcagatagcaatagtgctcgacagcgtgaaacggtaactgctccgtcattaggcgcggtagaggaaatctctgctggtgtatatcgctctgttctggctgctggttcgcaggctggtacggtacgtgtaactgcaaaagttcagggaaaaacatttactctcagtattaagcaaacagcaacaacagaacctgattctgaggtcagtgctgttttaaccgctgcaccagcagaacaggtagttggttacaatatcaatctacaactggcagtgaaggattcacaaggaaatgcaatcactggtgataacactctgagcttttatgctcttaaccaggcagaaggagtcgagtttgggactgtaacggaaaaagacggtgtctatagcgcgacagtaacttcaaaacgagctggtaagattactatcggtgttaaatctgatagtcatgatttctcaggtgttaagaaagaaatcacctttattgaggaccggcagcaggttacattctctcagtttgaagccagccaaaataatgcattggctgatggaaaacagagaaatatggtaactgtaagccttgcggaccgtttcggcaatgttgttcctggttatgctgtcacattgtctttaccagcagggataactcaagttggtggtgaacatgctgtttcaactgacgaaaatggtaatgctatttttgcgttaataagctccactccggggtcttacgtgattacagctcatgctggttctcagatgtctactgagttaacagtgacctttgcatcaaatatgaccggagcttcactgtcactgacgcctgaaagcagtagtttaatttccaatattcctgctaatggtaaggatgcagcggtattagatgtgcagctgacaaatacgaatgcgtcggtcaatgggcaaaagattcagctcatcacctcatctgaaggattatctgtaccaacaaatatcgtgactgattcaacagggcatgtttctgttccgcttacaacggtgaaagctggtgagtacacggtgactgcacgggtgactgacggttcccatagcgtggaatctggcagcgttaagttaacttttgtgcccgatgttgcttctgcagaactgaatatgagtgtatcaaaacaggagattgtggccgatggcagtgaaaacgcaacagtaaacattcagttggttgatgcgaataacaatgcgtttacaggcgaggtggatttaacgattacaccatcgacgggagcatcattgaccagtagtaatctgcaactggatgctcatggacaggcaacaacgcagttcactgcatcgaaatcaggccagtacacaattcaggccgagtatgttctggatgggaaacgcataaccgcaagccagaatattgatgccgtgacggatgtgaagggggctgtgttggagatcacatcatctgcatcttcggctgtagtgagcgataccaacaatctggtatttacgttactgttgaaaagtaagtcaggcgaagcattaagtggtcgagcattgaatgttaagacatctgggccgtctaaatatggtgcgttggtggttgataaaaccacagtaacgactgatgagaacggtcaggctacggtaagcgtacatggtcgaacggttggttcgtataaattaacggcgaccttaaacgaacttggcagtgatgttagcgcggtgaaatcattctccctgtacgctgatgacgcaaatggagtattgactctaacaaaagatcctggttatgagacaaacgatggatctccagtaggtatttatgctcgatttgtcgatcattttggaaacccattatctggtacggttgagttttctgctggtagtgaagatagtccagactctcaacgggtcaaaatggagcctgctacagtaacgttacactggacaggtaatgcagcttcggaattcagcacctatgaaagtggttatcactggattaaggccaaaataacgaatagcaaaaatacatatgagaaaacaataaggacttatgttgtaaaactacctgaaaaggatagttaa

SEQ ID NO: 8177 - DNA, 741 bp, Escherichia coli; identical to SEQ ID NO: 7582

SEQ ID NO: 8178 - DNA, 699 bp, Escherichia coli
atgcaggatatccggcaggaaacactgaatgaatgcacccgtgcggagcagtcggccagcgtggtgctctgggaaatcgacctgacagaggtcggtggagaacgttattttttctgtaatgagcagaacgaaaaaggtgagccggtcacctggcaggggcgacagtatcagccgtatcccattcaggggagcggttttgaactgaatggcaaaggcaccagtacgcgccccacgctgacggtttctaacctgtacggtatggtcaccgggatggcggaagatctgcagagtctggtcggcggaacggtggtccggcgtaaggtttacgcccgttttctggatgcggtgaacttcgtcaacggaaacagttatgccgatccggagcaggaggtgatcagccgctggcgcattgagcagtgcagcgaactgagcgcggtgagtgcctcctttgtactgtccacgccgacggaaacggatggcgctgtttttccgggacgtatcatgctggccaacacctgcacctggacctatcgcggtgacgagtgcggttatagcggtccggctgtcgcggatgaatatgaccagccaacgtccgatatcacgaaggataaatgcagcaaatgcctgagcggttgtaagttccgcaataacgtcggcaactttggcggcttcctttccattaacaaactttcgcagtaa

SEQ ID NO: 8179 - DNA, 600 bp, Escherichia coli
atgcgtaaactttatgccgccattttgtccgcagccatttgtctggccgtatccggtgcgcctgcatgggcgtctgaacatcagtccacgctgagcgcgggctatcttcatgcctcgacgaacgtttccggcagcgatgatctgaacgggattaacgtgaaataccgttatgagtttacggacactctgggaatggtgacgtcattcagctatgcaggagacaagaatcgccagcttacccgttacagcgatacccgctggcatgaagattccgtgcgtaaccgctggttcagcgtgatggcggggccgtctgtacgcgtgaatgaatggttcagcgcgtatgcgatggcgggtgtggcttacagccgtgtgtcgactttttccggggattatctccgcgtaactgacaacaaggggaaaacgcacgatgtgctgaccggaagtgatgacggtcgccacagcaacacgtctctggcgtggggggctggtgtgcagtttaacccgaccgaatccgtggccattgatattgcttatgaaggctccggcagtggcgactggcgcactgacggtttcatcgtgggtgtcggttataagttctga

SEQ ID NO: 8180 - DNA, 1068 bp, Escherichia coli
gtgctgttggtcgcgctgcttagctggattatccctttctgtgctgtcgttgcatcctgtgcggtgtatttcccgttagccaggtcatacgcggccttaacggcttttggcgttgccgccagtgactcggaagtgctgttggtcgcactgctgagctgtactatcccctttttcgtcgtgctcgcatcctcaagcgccacggcggatgcaatatcctctgcccgttttgccgctgtctcagcacgcgttgctgcggattctgccgtacttttgctctgtgctgccgctgtcgcactgccagcagcctctgtcgcctttgtggatgccgtcgtggcgctgcccttcgctgctgacgcctgtctggtcgcctcatcttttgaagcagacgccgatgatgccgatgacgccgccgaactggcggatgatgcggcagccgtttttgaggattctgcgctggtttccgacgctttcgcgttcgtctcggatgtcttcgctgcggaagctgacctcgctgctgcgctggcctgtacagcggcttcgccagcattcgttgtggctgttgaagcagacgatgcagcactttctgccgactttccggcagcggtggcactggctgaggcctgcccggcacttgttgacgcggcactggcagatgatgcagccgctgtttttgagcctgccgcagctgaggcactctgtcccgctgccgtttcagaagacctggcgttcgtctcggacgtctttgccgccttcgcggaatttcctgccgctgttgccgaggaagctgcgctactggcgctcgaggatgcgttcgtttctgatgattttgccgcctcttttgaagccgccgcatcccgggctgaggtggcagcttctgacgctttcgtagtcgcggtggatgcagaagtggctgctgattgttgtgacgctgcagcattcgtttctgacgttttcgcggcactggcactggtagctgccgcgctttttgaggactctgcagcggcagcactttttgatgcttcagtggcctttgttgatgccgttcctgcgctggaagtcgctgactga

SEQ ID NO: 8181 - DNA, 1455 bp, Escherichia coli
atggcggtaaaggcagcatatgaccttgctaacgggaaatatactgcgcaggatgccaccacagcgcggaaaggccttgtccagctcagtagcgccaccaacagcacgtctgaagcactggccgcaacaccgaaagcggtaaagacagcatatgaccttgctaacgggaaatataccgctcaggacgctacgacagcacaaaaagggattgtccagctaagcagcgcgactaacagcacatctgaaacgcttgccgcgacaccgaaagcagtgaaagcagctaatgacaatgcgaatggtcgggtaccttctgcccgtaaggtgaatggtaaggcgctttcagcggatattacactgacgccgaaagatattggtacgcttaactcagcaacaatgtcttttagtggtggtgctggatggttcaagctggcaactgtaaccatgccacaggccagttccgtggtttacataagcctgattggtggtgcagggtataacgttggctccccgcatcaagcaggcatctctgagctggttctgcgtgccggaaatggaaatccaaaaggtattactggtgcattatggcgacggacctcggttggatttactaattttgcatgggtgaatacatctggtgatacctatgatgtttatgttgaaataggtaattacgccacaggtgttaatattcaatgggattataccagtaatgccagcgtaacgattcatacttcaccagcatattctgctaataagccggaagggttaacggacggtacagtttattcactctatacgccaccagagcagctttatccgcctggcgcaccaatcccgtggccatcggataccgttccgtctggctatgccctgatgcaggggcagacttttgacaaatctgcttacccgaaacttgcagccgcttatccgtcaggcgtgatccctgatatgcgtggctggacgattaagggcaagcccgccagtggtcgtgccgtattgtctcaggaacaggatggcattaaatcgcatacccacagcgccagcgcatccagtacggatttggggacgaaaaccacatcatcgtttgattacggcactaaatccacgaataacactggtgcgcatacccatagtgttagcggtacggctgcttcagccggtgcacatacccattcgatgacatttgtttcaggtggttccagtggtgctccgggaagtggatcacctgattattctaaatacagtgttaacacttcttctgcaggcgctcatacgcactctgtatcgggtactgctgcaagcgcaggtgcacacgcacatactgtcggtattggtgctcatacgcactccgttgcgattggttcacatggacataccatcaccgttaacgctgctggtaacgtggaaaacaccgtcaaaaacatcgcatttaactatattgtgaggcttgcataa

SEQ ID NO: 8182 - DNA, 585 bp, Escherichia coli
atggcattcagaatgaatgaacaaccacggaccataaaaatttataatctgctggccggaactaatgaatttattggtgaaggtgacgcatatattccgcctcatacaggtctgccagcaaacagtaccgatattgcaccaccagatattcctgctggctttgtggctgttttcaacagtgatgaggcatcgtggcatctcgttgaagaccatcggggtaaaacggtttatgacgtagcgtcaggggacgagttatttatttctgaactcggtccgttaccggaaaatgttacctggttatcgccggaaggggagtttcagaagtggaacggcacagcctgggtgaaggatacggaagcagaaaaactgttccggatccgggaggcggaagaaacaaaaaacagcctgatgcaggtagccagtgagcatattgcgccgcttcaggatgctgcagatctgaaaatcgcaacggaggaagaaaactcgttgctggaagcctggaaaaagtatcgggtgttgctaaaccgtgttgacacatcaactgcaccggatattgagtggcctacagtacctgttatggaataa

SEQ ID NO: 8183 - DNA, 423 bp, Escherichia coli
atgaaagaaacagaaaactttgatgtttttatatgccatgcaagcgaagacaaaaaagacattgcaattccaatatatgacgagttaactaaacttaaaatttcagccttcatagatcatgttgagataaaatggggcgactccttaattgataaaataaatgcagcactagttaaatcaaaatatgtcatcgctattttatctgctaattcagtcaataaggaatggcctcaaaaagaattaagagcagttttagccagcgaaatatcgagtggcgacgtaaaacttttgactttattaaaaaaagaagacgaggaggtcgtaaacctatcattacctttacttagtgataagttttatatggtctatgataataatcctgaagtagtcgccaacaatattaaatcactcttacaacgataa

SEQ ID NO: 8184 - DNA, 753 bp, Escherichia coli
ttgtcgctacatgataaattattaatgcataacttcgcattagccaataaaaaaagccctgacttcatatctgaacttcctcaaattgaacctaaaccatacagcaatggacataaaattaaatggataaaccacacacttactagcactgaagttactccccctgataacctgattaaaatatgcatattgattgagtcaggggaaattgctataacatcagtaagtgatattgccaatttacttggagttcctgctggccaattactttatatactatatcgtaaaaaagataattatcgtacttttgaaatagaaaagaagaatggtaaaaaaagagtcattaatgctccttgtggcggtctatcgatactccaaacgagactaaagcccgttcttgaatatttctacaggccaaagaaatctgctcatggttttataaaaggaaagagcatcattactaatgctgggatgcatattaaaaaaaattttgtcgtaaacattgatctagaaaactatttcgaatcaataagttttgctagggtttatggaatatttaaaagtaaaccttttaattttgctcatccagctgctactgttttagctcagttatgtactcacaatggaaaattacctcaaggtgcgtgtacatcgccaatattagcaaatattgcatcagcttctctagacaaacagctcacccaatttgcaggaagaaaaaaatatcttattctaggtatgctgacgacataa

SEQ ID NO: 8185 - DNA, 693 bp, Escherichia coli
atgaaaaaatacaatattacaatattatctttcatatttttttctcatatttcgctagctgagactggtggtatttatcttgatactaccagagttatatttgatagtaatgacttaagtactaaagtaaagttcaataataacacagataaaaactggctattgcgagcatgggtgtctgattataattctaaaaataaaaatgataatttcataataacgccgccgttatataaaatttcagcaaatgaaagctttcaatttaagattgacaaattaaaagaaaattttcctaacgacagggagagcatattccatatcaatgttatggctattcctccaatcacaaatgacgaaaaggatagtaacaatgctgttcaatttgccatcaacacaaggataaaattaatatatcgcccacataagataaacaacaaaaaccaagtttctgatgcttataaaaacttaaaaataacatcttcaaaagaaacattaactgtctcaaaccctagcccatactatattaccatgaacgatgtaaagattaatgggaaaaatattacatctataaaggattttatggtttcaccattttcaacattaatcatcccggaaaaaaatgctaaaacaattagttattctacgataaatgattacggcggagaaacgccgattcaaaacattaaactttaa

SEQ ID NO: 8186 - DNA, 489 bp, Escherichia coli; identical to SEQ ID NO: 7427

SEQ ID NO: 8187 - DNA, 1020 bp, Escherichia coli; identical to SEQ ID NO: 5522

SEQ ID NO: 8188 - DNA, 192 bp, Escherichia coli
atgaatacagcatttgcacttgttctgacagtttttcttgtttccggagagccagttgatattgcagtcagtgttcacaggacaatgcaggagtgtgtgactgcagcaaccgaacagaaaattcccggtaactgttacccggtcgataaagttattcaccaggataataacgaaatcccggcaggtctttaa

SEQ ID NO: 8189 - DNA, 381 bp, Escherichia coli; identical to SEQ ID NO: 8099

SEQ ID NO: 8190 - DNA, 198 bp, Escherichia coli; identical to SEQ ID NO: 7712

SEQ ID NO: 8191 - DNA, 2277 bp, Escherichia coli
atggccgttaaagcctccgggcgttttgtccctccgtcagcatttaccgcaggcaccggtaaggcgtttaccggtgcttatgcatggaacgcgccacgcgaggctgtcgggcgcgaaagacctcttacacgtgacgagatgcgtcaggtgcaaggtgttttatccacgattaaccgcctgccttactttttgcgctcgctgtttacttcacgctatgactacatccggcgcaataaaagcccggtgcacgggttttatttcctcacatctacttttcagcgtcgtttatggccgcgcattgagcgtgtgaatcagcgccatgaaatgaacaccgacgcgtcgttgctgtttctggcagagcgtgaccactatgcgcgcctgccgggaatgaatgacaaggagctgaaaaagtttgccgcccgtatctcatcgcagcttttcatgatgtatgaggaactctgcgatgcatgggttgatgcgcatggtgaaaaagaatcgctgtttacggatgaggcgcaggctcacctgtatggtcatgttgctggcgctgcacgtgctttcaatatttccccgctctactggaaaaaataccgtaaaggacagatgaccacgaggcaggcatattctgccattgcccgcctgtttaacgatgagtggtggactcatcagcttaaaggccagcgtatgcgctggcatgaggcgttactgatagctgtcggggaggtcaataaagaccgttctccttatgccagtaaacacgccattcgtgatgtgcgtgcgcgccgccaggcaaatctggaatttcttaaatcgtgtgaccttgaaaacagggaaaccggcgagcgcatcgaccttatcagtaaggtgatgggcagtatttctaatcctgaaattcgccggatggagctgatgaacaccattgccggtattgagcgttacgccgccgcagagggtgatgtggggatgtttatcacgctgaccgcgccgtcaaagtatcacccgacacgtcaggtcggaaaaggcgaaagtaaaaccgttcagcttaatcacggctggaacgatgaggcatttaatccaaaggatgcgcagcgttatctctgccgtatctggagcctgatgcgcacggcattcaaggataatgatttacaggtctacggtttgcgagtcgtcgagccacaccacgacggaacgccgcactggcatatgatgcttttttgtcatccacgccagcgtaaccagattatcgaaatcatgcgtcgctatgcgctcaaagaggatggcgacgaaagaggagccgcgcgaaaccgttttcaggcaaaacaccttaaccggggcggtgctgcgggatatatcgcgaaatacatttcaaaaaacatcgacggctatgcactggatggtcagctcgataacgacaccggcaggccgctgaaagacactgcagcggctgttaccgcatgggcgtcaacgtggcgcattccgcaatttaaaacggttggcctgccgacaatgggggcttaccgtgaactacgcaaattgcctcgcggcgtcagcattgctgatgagtttgacgagcgcgtcgaggctgcacgcgccgccgcagacagtggtgattttgcgctgtatatcagcgcgcagggcggggcaaatgtcccgcgcgattgtcagactgtcagggtcgcccgtagtctgtcggatgacgttaacgagtacgaggaagaagtcgagagagtggtcggcatttacgcgccgcatctcggcgcgcgtcatattcatatcaccagaacgacggactggcgcattgtgccgaaagttccggtcgttgagcctttgactttaaaaagcggcatcgccgcgcctcggagtcctgtcaataactgtggaaagctcaccggtggtgatacttcgttaccggctcccacaccttctgagcacgccgcagcagtgcttaatctggtagatgacggtgttatcgaatggagtgacccggaggtcgtgatggcgctcaggggcgcattaaaacacgacctgcgaacgccaaaccgtcagcagagaaacggaatcccgttaaaaccgcatgaaattgcaccatctgccagactgaccaggtctgaacgattgcaaattacccgtatccgcgttgacctcgctcagaacggtatcaggccgcaacgatgggagcttgaggcgctggcgcgtggcgcgaccgtaaattatgacaggaaaaaattcacgtatccggttgctgatgagtggctggggttctcgttacccatttga

SEQ ID NO: 8192 - DNA, 1035 bp, Escherichia coli
atgagtaagaaaaaagggaaaacaccgcagccagcggtgaaaacaatgactgccagcgccccgaaaatggaggcattcacctttggtgagccggtgccggtactcgaccgccgtgatattctggattacgtcgagtgcatcagtaacgacagatggtatgagccaccggtcagctttaccggtctggcaaaaagcctgcgtgctgccgtgcatcacagctcaccgatttacgtcaaacgtaatattctggcctcaacgtttatcccgcacccgtggctttcccagcaggatttcagccgttttgtgctggattttctggtgttcggtaatgcgtttctggaaaagcgttacagcaccaccggtaaggtaatcagactggaaacctcaccggccaaatatacccgtcgtggcgtggaggaggatgtttactggtgggtgccgtccttcaacgagccgacagccttcgcgcccggctccgtgtttcacctgctggagcctgatattaatcaggagctgtacggcctgccggaatatctcagcgcccttaactctgcctggctgaatgagtcggccacgctgttccgccgcaagtattacgaaaacggcgcacatgccggatacatcatgtacgtcaccgatgccgtgcaggaccgcaacgatatcgaaatgcttcgcgaaaacatggttaagtcgaaaggccgcaataactttaaaaatctgtttctctatgccccacaggggaaagccgacggcattaaaattatcccgctcagtgaagtggcaacgaaggacgatttttttaatatcaaaaaagccagcgccgctgacctgctggacgcgcaccgtatcccctttcagttgatgggcggcaagccggagaacgtcgggtcactgggagatattgagaaagtggcaaaggtctttgtccgcaatgagcttatcccgttacaggacagaattcgggaaataaacggctggctcggtcaggaggtcatccgctttaaaaactactcactggacactgacaacggttga

SEQ ID NO: 8193 - DNA, 1773 bp, Escherichia coli
atgaccatcaccacagacaccactcttttacacgacccgcgtcgtcaggcggcgctgctgtactggcaggggttttccgtgccgcagattgccgccatgttgcagatgaaacgcccgacggtgcagagctggaaacagcgcgacggctgggacagcgttgcccccatcagccgtgtcgaaatgagtctggaagcgcggctgacccagctcatcatcaaaccgcagaaaaccggcggtgacttcaaggaaattgacctgctcggacgccagattgaacgactggcacgggtcaaccgttacagtcagaccggcaacgaggcagaccttaatccgaacgtcgctaaccgcaacaaaggcgggcgtcgcaaaccgaaaaagaattttttcagtgacgaggccatcgaaaagctggagcagattttctttgagcagtctttcgaatatcagttgcactggtatcgcgccgggcttgagcaccgcatccgcgatatcctgaaatcccgccagattggcgcgacgttttatttttcccgcgaggcgctgctgcgcgccctgaaaaccggtcataaccagatttttctgtcggccagtaaaacgcagacgtatgtgttccgcgaatacatcatcgcctttgcccggctggttgacgttgacctgaccggtgacccgattgtcctgggcaataacggcgcaaaactgatttttctcggcaccaactccaacaccgcgcagagccataacggcgacctgtacgtcgacgagattttctggatcccgaattttcaggtactgcgtaaggtggcatcaggtatggcctcacagagtcacctgcgttcgacctatttctccaccccgtccacgctggcgcacgacgcctacccgttctggtcgggtgaactgttcaaccggggacgcgccagcgccgccgaacgcgtggaaatcgacgtcagtcataacgcccttgccggaggtcttctctgtgcggacggccagtggcggcagattgtcaccattgaggacgccctgaaaggcggctgcacgctgttcgacattgagcagcttaaacgcgaaaacagcgccgacgattttaaaaacctgttcatgtgtgaatttgttgacgacaaggcgtcggtgttcccgttcgaggagctgcaacgctgcatggtcgacacgctggaagaatgggaagactatgcgccgtttgccgccaatccgttcggctcccgcccggtatggattggttacgacccgtcacaccgtggcgacagcgccggatgcgtggtgctggcaccgccggtggtggccggaggtaaattcagaatacttgagcgtcaccagtggaaaggcatggactttgccacccaggctgaatccatccgcaaactcaccgaaaaatataacgtcgaatacatcggaattgatgccaccggcctcggtgtcggcgtgttccagctcgtgcgctcgttctatcccgccgcgcgtgatatccgctacacaccggaaatgaaaaccgcaatggtgctcaaggcaaaagacgttatccgtcgtggctgtctggaatatgacgtcagcgccaccgacatcaccagctcgtttatggctatccgcaagaccatgaccagcagcggacgcagcgccacctatgaggccagccgcagcgaggaagccagccacgccgacctcgcctgggcgaccatgcacgccctgttaaatgagccactcaccgccggtatcagcactccgctgacatccaccattctggagttttactga

SEQ ID NO: 8194 - DNA, 855 bp, Escherichia coli
atggcaaaaaaagtctcaaaattctttcgtatcggcgttgagggtgacacctgtgacgggcgtgtcatcagtgcgcaggatattcaggaaatggccgaaacctttgacccgcgagtctatggttgccgcattaacctggaacatctgcgcggcatcctgcctgacggtatttttaagcgttatggcgatgtggccgaactgaaggccgaaaagattgacgatgattcggcgctgaaaggcaaatgggcgctgtttgcgaaaatcaccccgaccgatgaccttatcgcgatgaacaaggccgcgcagaaggtctatacctcaatggaaattcagccgaactttgccaataccggcaaatgttatctggtgggtctggccgtcaccgatgacccggcaagcctcggcacggaatacctggaattctgccgcacggcaaaacacaaccctctgaaccgcttcaaattaagccctgaaaacctgatttcagtggcaacgcctgttgagctggaatttgaagacctgcctgaaaccgtgtttaccgccctgaccgaaaaggtgaaatccatttttggccgcaaacaggccagcgatgacgcccgtctgaatgacgtgcatgaagcggtgaccgctgtcgctgagcatgtgcaggaaaaactgagcgccactgagcagcgccttgctgagatggaaaccgccttttccgcacttaagcaggaggtgactgacagggcggatgaaaccagtcaggcattcacccgcctgaaaaacagtctcgaccacaccgaaagtctgacccagcagcgccgcagtaaagccaccggcggtggcggtgacgccctgatgacgaactgctga

SEQ ID NO: 8195 - DNA, 1074 bp, Escherichia coli
atgcgccaggaaacccgctttaaatttaatgcctacctgtcccgtgttgccgaactgaacggcatcgacgccggtgatgtgtcgaaaaaattcaccgttgaaccgtcggtcacccagaccctgatgaacaccatgcaggagtcctctgactttctgacccgcatcaacattgtgccggtcagcgaaatgaaaggggaaaaaattggtattggtgtcaccggctccatcgccagcaccagcgacaccgccggtggcaccgagcgtcagccgaaggacttctcgaagctggcgtcaaacaagtacgaatgcgaccagattaacttcgatttttatatccgctacaaaacgcttgacctgtgggcgcgttatcaggatttccagctccgtatccgtaacgccattatcaaacgccagtcccttgatttaatcatggccggttttaacggcgtgaggcgtgccgaaacctctgaccgcagcagtaatccgatgctacaggatgtggcggtcggctggctgcagaaataccgcaatgaagcaccggcgcgcgtgatgagcaaggtcactgacgaggaagggcacaccacctctgaggttatccgcgtgggtaagggtggtgattatgccagccttgacgcactggtgatggatgcgaccaacaacctgattgagccgtggtatcaggaagaccctgaccttgtggtgattgtgggacgtcagctactggcggacaagtattttcccatcgtcaacaaggagcaggacaacagcgaaatgctggccgctgacgtcatcatcagccagaaacgcatcggtaacctgccggcggtacgcgtcccgtacttcccggcggatgcgatgctcatcacaaagctggaaaacctgtccatctactacatggatgacagccatcgccgcgtgattgaggaaaacccgaaactcgaccgcgtggagaactacgagtcaatgaacattgattacgtggtggaagactacgccgccggttgtctggtggaaaaaattaaggtcggtgatttctccacactggctaaagcgaccgcagagcctggagcgtaa

SEQ ID NO: 8196 - DNA, 744 bp, Escherichia coli
atgacgagtcccgcacagcgccacatgatgcgggtctcggcagcgatgaccgcgcagcgggaagccgccccgctgcgacatgcaactgtctatgagcagatgctggttaagctcgccgcagaccagcgcacactgaaagcgatttattcaaaagagctgaaggccgcgaaaaaacgcgaactgctgccgttctggttgccgtgggtgaacggcgtgctggagcagggcaaaggtgcacaggatgacattctgatgacggtcatgctgtggcgtctggataccggcgatattgccggtgcgctggagattgcccgttatgccctgaagtacggtctgaccatgccgggtaaacaccgccgtaccccgccgtacatgttcaccgaggaggtagcgcttgcggccatgcgcgctcacgctgccggtgagtctgtggatacccgcctgctgacggagacccttgaactgaccgccacggctgacatgcctgatgaagtgcgcgcaaagctgcacaaaatcaccggtctgtttctgcgtgacggtggtgatgccgccggtgcgctggctcacctgcaacgtgcgacacagctcgactgtcaggcaggcgtcaaaaaagagattgaacgactggagcgggagctgaaaccgaagccggagccgcagcccaaagcggccacccgcgccccgcgtaagacccggagcgtgacaccggcaaaacgtggacgcccgaaaaagaaagccagttaa

SEQ ID NO: 8197 - DNA, 318 bp, Escherichia coli
atgaacatcgataccaataaaaaaactaccacactgaaatattttgtcgaagcctatccagagagaatcactgttcaagcgtgggaatgcctagtcaatgaaattggtgatttaaaagaagtttatggatatatcgcctttctgcatgacgatgggtatcttacaggaaaggtaatcttcgatggttctcctgaaagtattgatggatggagtgtagatactgcctctctaaggattacatcacaaggttatcattattggaaaaaattaaaccctacaacacaagggagtagcggaatcctcagaaggaacagataa

SEQ ID NO: 8198 - DNA, 1164 bp, Escherichia coli
atgctggatgcactgacatttgatgcaggcagtacgctgacgccggattacatgctgatgctcgacagcagggatattaccggcaatatcagcgaccgtctgatgagtatgaccctgacggataaccggggctttgaggctgaccagcttgatattgaactgaacgatgccgacgggcaggtcgggctgccggttcgtggcgctgtcctgacggtgtatatcggctggaaaggttttgccctggtatgcaaagggaaatttaccgttgatgaggttgaacaccggggcgcaccggatgtggtcaccatccgcgcccggagtgcagattttcgcgggacgctcaattcccgccgggaaggctcctggcatgacaccacgctcggtgcgattgttgaggcgatagccacccgtaacaggctggaagccagtgtcgctccgtcactggccggaattaaaatcccgcacatcgaccagtcgcaggagtccgatgtgaaattcctgacccgtcttgctgaacgcaacggcggcgaggtgtcggtaaaaatgggaaaactgctgtttctcaaagcggggcagggggtgacggccagcggtaaaaaaatcccgcagatcaccatcacccgcagcgacggtgaccgtcatcattttgcgattgctgaccgtggagcctataccggcgtaacggcaaagtggcttcacaccaaagacccgaagccgcaaaagcagaaggtaaaactgaaacgcaaaaagaaagagaaacacctgcgcgcactggagcacccgaaagcgaaaccagtcacgcagaagaaagcgccaaaagtaccggaagcgcgcgaaggtgaatacatggccggtgaggctgacaacgtttttgccctgaccacggtatatgccacgaaagcgcaggccatgcgcgccgctcaggcgaagtgggataagctgcaacggggcgtggcggagttctccatcagcctggctaccggtcgggcagatatttacacggaaacaccggtcaaagtgtcaggctttaagcgcgtcatagacgagcaggactggacaatcactaaggtgacacattttctgaataatagcggcttcacgacgtccttagagcttgaggtcaggctttctgatgtggagtatgaaacagaagatgatgagtga

SEQ ID NO: 8199 - DNA, 642 bp, Escherichia coli
atggaaaaagttataattgagcttgataatcgttgggagttagctgatttcgcggtcttaacgaaagagtatttgcagctatatggttttttttatggcctaaaaggaggatcaagaggatattcaacaatgccttgggagggtgggcacagtgtggtgaacttttttagaggggcttacagtgcgactccaccagatttacgtcctgtagtgaaaaaaattcagtatgcctctcctggctttattgaattgtctgctcttattgatatctcttggcagattgctgagttagttactgctgttggtggaagtattctggctgccaacaaagtttacgatcaggtgatgcgtacatatcgacaaagagaatgggcaaagttgaaatcagagaagctgcgtatacagaatcaaattaaagagattgaacttgtttctgacgcagttaaatcacttgaatctgtgatggcacttagtgaagaacaacgtaaaaacttggttcaactatcgggggcagatgaactggttcagttaaagatacttttggctgtttaccgacggttatctcctcttgttgagttgcaaaacagcgggaaagctaatttttctgctgggaaaaataaaaatttaaaagcgtccgattaa

SEQ ID NO: 8200 - DNA, 303 bp, Escherichia coli; identical to SEQ ID NO: 6057

SEQ ID NO: 8201 - DNA, 1620 bp, Escherichia coli; identical to SEQ ID NO: 7529

SEQ ID NO: 8202 - DNA, 1227 bp, Escherichia coli
atgaaagatgtcagtattttgaatgaaatgatcttcagcacatcaacagaaaatgaactacaggaaaaatttaaagatatatatcaccgtatcaacaacgagagtgaatatgatgattctggttcagtcgaatttctgccacttccaagactgaattcccgttctgaacgctcagaagtacaggacatcatttcagttgtaattgaaagcggattttttaccagtggcccctatattggaaaagtagaagagacattaagattattttatggtgctcatacctgtattgccaccagtagcggcaccgatgcgttaaaaatagctcttaaatctgttggagtggaacccggagatgaggtcatcgttccgctgaactcctttgcagctacggagaatgcagtgatggccgtgggagccgttccggtcttcgctaatattgacagttctttcaatatgcttccggatgaagtggatcgcctcaggacttcaaagacaaaagccgtgttgccggtctgcctttatggctcatgcatgtacattgatgccattcaccggattgcccgcaaagccgacattccagttatcgtggatgcagcacagtgctttggtatcaggtcactcatcaaccactgtgatctgctggcgttgagctttaatccattcaagaatattggttctcttggtaaatccggtgcagttctaaccctttctcctgaactggcacgcctagcaaggcaatattcatatcacggatttgctgaaggtaaaaagaatattaaggcccagaactggggattaaacagccgtatggataatctgcaggctgccacgcttagtgtcaaacttcaccattttgaaaataatgcaaaaaaacgctgccttcttgcagcccgttaccatcttttactgtctgacctgtcacataacataatacttccgacagagacccatcagaatacatggcaccttttccctattctgctctgcaaaggcgaacgtgattctctgttcgcctttgctcgtgaaaagggagtggagttagatatttactatcccgtcctttcacattgcggagagcatccattggcaaccggatattcccgtcgagagcagttcagtgattctgaaaaaatacattctgcattacttcatctgccgctgcataaccatatgtcgctccaggagcaaaacatcgttatcgaggtactgcatgaccattttaaataa

SEQ ID NO: 8203 - DNA, 828 bp, Escherichia coli
atgaccattttaaataaagactggcccgtcgaattcccgttcccgacagtaatccgcactgtggtgtgcagcgatcttgatgaaacttatattccttcggacagcgataaaaaaaaactgagtgggatcgttcagctggaatcctatattacatcccatgccgaaaaaaaggggattctcgctggctggatcacaggaacaaatctggattcagcctggcgaaaatccaggggatatatatcgcgaagccctcactttatatgttgcagtctcggcaccgaattttactgggtgaaaaatggtcgtctcatcccctctgaaacctgggcagaaagaataagccgttcaggctacagtcgtcagaatgtcaactgtctggttaagattctgatggaaaaagagatcccccttctgaaacaaccagaggattatcagggcccctttaaagtgagctattactaccctgagagcccatctattgccagcgattttgccaccatccaggaactggctgacgagcgacgaattcgtgttgtgtttacccgctgtaacccggcggctggcgatccctctggctgttatgacgttgaatttatccccctctgttgtggcaaggatcaggccgtgtcttttctgatggaggaaaccgggctgccgaaagaagccattattgcctttggtgacagtgcgaatgattttgccatgtttgcacaggccggaagtggctatctggtgggtaatgccgacccgtttgcagtcagccagtacggaaacagactggacagtgcttactgccacgggatactgagcgttcttaaggagctatag

SEQ ID NO: 8204 - DNA, 1068 bp, Escherichia coli
atgaataaaccacttcatcaacatattaacaacttaccacaattaccttctgatttttcctttggaaaggatattgattctatacataaatttatattcaaagagacagatgataatataattgaaaaagagctaagaaaatgggcatcagtaaatcaaccgtgtgtttttggtaaacttgcatgtaagaaaatcaaaggccttgattttcacttatcaataataaaagatccatcattgtatactaatgatagtaaactcttcgagtttttacgtagagaacggattatcttcaaagaacgagctcttaaaggggaagtaagtgctcatcttatctactttatacatcagaaaattgcttttgcaaaaccctctaaagaacttgttgatatacagaaacatatatgttccttacatatgcctgagtattatcctgtaagagaagatataatctacacagaaagcataccattgcaggaaaatgaaaacgtgatggtatataaagctggagttaatattttttactcttctgctcacagaacccgaaatcatgaccgacgaatccccggtgggatgcttatatctgtaaatgcacctggacattttatgagactggcaattgcaaaaggattctataaagatcaggagcaagctttatctgatatccgtaatatgactattcaatccataggtaaaggaggatattctcatccagaaaaaatatcaaccacatggcactcagataataaaatgaatcgctttggctgccctatacattctactaatagtgattactattcaggcttttatcatacagatgtattaattcccggagaactgactcaggactccagaataatccataatgttgatagcaatgaccctatgatttttaactggaatgtattgttttatgtctcactggaaaagtttcctgttgataatccttattatggagaatttcttggtattcctgtagatgaagaagcaaagttttttaatccatttccaccaagagcgtttgaaaataaacctctttataatgaggagataactaaatatgattaa

SEQ ID NO: 8205 - DNA, 867 bp, Escherichia coli
atgattaagggagttctgtttgcatttcttgctgctttttcatggggagcagcaatagtgatgagcaaaaaaggtctcgaaaacatggatgccggaggattgtttttctggcaagttggtagtgctgcaatgttatcatggtttgttctcgcaattagcagaaaaaagctcccggtaacaaaaaaatcaatccttgcctattcaacaggaatttttgagccatttctggcgtatacattcacactctatggcctgaaatttatttctgctggtataacagccgttattttttcacttgagtcagtatttattcttatactatctgttatattatttttcgttaaaattaactcaccattacactttatattattgcttactggagcaatggcaggcagtataatggttgccctacctgatatcaatgaccgcattgataatattacaggatatatacttattgttgcaggtgtactctcagcatccttttatgttgttatctcatcacgacttattgtgaattttgagcctgttacgttgttaaccgggcagttgactttctcttttattcttgcttgtttttttattgttctaactggcacatccctgcaactgcctgtagaatctgtatttcttgtgtttttgtcaggaattttacaatattttttggctttttgtttctatctttattccctacgctggattcccgttcacatagcaggagcaatgctctattttattcctctggtagcattgctgttgtcctggttcttcctgcaggaagatatatcatttattcagggactaggcgtttttataactattttatgcgtatatattctcaataagaaatacgccatcgaatga

SEQ ID NO: 8206 - DNA, 465 bp, Escherichia coli
atgatccagcaacagtgtatggttctcctggtaaatatgttgttgtcaatgatcgtactggtgaggttactcagattagtgataagacagatccgggttgggtggacgattcgagaattcaatggggaaataaaaatgaccaataaattatttgaacatacggtgttatatgatagtggtgatgccttttttgaattaaaaggaaatgcttctatgaagttatcaccaaaagctgcaatagaagtttgtaatgaagcagcgaaaaaaggcttatggattttgggcattgatggtgggcattggctgaatcctggattcaggatagatagttcagcatcatggacatatgatatgccggaggaatacaaatcaaaaatccctgaaaataatagattggctattgaaaatattaaagatgatattgagaatggatacactgctttcattatcacgttaaagatgtaa

SEQ ID NO: 8207 - DNA, 141 bp, Escherichia coli
atgaaaaaaataacatggattattttattgcttcttgcagccattattcttgctgcatgtcaggcaaactatatccgcgatgttcagggcgggactgtatccccgtcatcctcagctgaactgaccggattagggggctga

SEQ ID NO: 8208 - DNA, 315 bp, Escherichia coli
atgattactgttattatttctgaggtgggtggctggcgtgaatggaaacaccgcgcccgaacaaaggatgcacagacagccatcatccgggctatgaataaacattttccacgatcttacaattttatccctgatgatattgataatgcacctgtattatttgcagctgtaacacgtacaccgaacgtgaaaataaccggtcatatctggaaacctatgtggaacaggggaatttgctggaacgtcaaaggtccgccagtaatcatcacgctcatccagggggccgcttggaattcggaaaataaaccacgttaa

SEQ ID NO: 8209 - DNA, 657 bp, Escherichia coli
atgggcagtgttacaaagaaaccgtcacctgttgttattattaagaaaaaaagacgaattctttctcatcaggatgatgccgtacaggcagttcctgatgatataaaaccagcgccagtaatggaatttaaaaccgactcattacctccagaaataccagccacagtggccggttccccggaacaacagaaaaaaacaggacgtaagaagaagaaaaaaaagaagaacaatagatggaatcatgagtttatccgacacagtctggactgtgttaaaaaaacattccctcagttacgggctgaagaggggggatatcatgcatttaaaataggcatctcaaaggatgtcatggcttttatttcggccagtcctgagtgtggactaactgtaaaagaatggaattgtgctgtaaggatgattactggcggttacaaatatctgcagcgtatatcagtcgcaggtactccgcgttatggtctggatggcaaagttcatggagctgtaacggaggaagaagcgctgtatgcgcaggcaaaacttgaaaaacacacgcagcgttataacgccaggatgaaagagacagaagatgctcgttgcaaccaaccatcgacaaactgtcacaccggacagcaatttgaaggacgcctgcattcataa

SEQ ID NO: 8210 - DNA, 591 bp, Escherichia coli
atgatgaaaaatccattagcttattttcatattgccacctttttattgtcaggtaaaagtcgtaatctgtcagaatactggaaagccgaagtcatcatgcgggataagtttgtcttacaccgcctgataagaaacgggttgcagagacaacgaggctttctgatgtggtggcgcctggccaatgagatgtttatctctggaaaccaaaaacaaaggaaatgtgcgataaagataaaaaatgcacttatggaacggtatggatgtgatatcggcctgggcgcgcggattggtaaaggcctcatgttacctcatcatgcaggaatcgtcattcatggtaatgttgatatcggtgagaatgtcattatacggcagaatacaaccattggtgaaaaggtttctgacagtagggaaaactatattgttattggcgataatgtcgatattggtgcccatacatgtattattgggttaaatgtgaaaatcggaagtaatgttaaaatcggggcaatgtcttttattatggaagatgtacttgataactgtacttatgtcaccaggaaggaatccagagtgataattcgcgaacagtaa

SEQ ID NO: 8211 - DNA, 288 bp, Escherichia coli
atgacttatacagtaaaattcagggatgatgcgttcaaagaatggctgaaactggataaatccattcaacagcagtttgcgaaaaaactaaagaaatgcagcgaaaatcctcatattccttccgcaaaactgcgtggattaaaagactgctacaaaatcaaacttcgcgcatcggggtttcgtctggtctatcaggttattgatgacatgctaattattgcggttgtcgcggtaggtaaacgcgaacgtagtaacgtttataatctcgccagtgagagaatgagatag

SEQ ID NO: 8212 - DNA, 252 bp, Escherichia coli
atgcctaacatcattctgtctgacaccagtgcaagtgtcagtgaactgaaaaaaaatcctatggctacagtcagtgccggagatggttatcctgtcgccattcttaaccggaatcagccggcattctactgtgtgcctgcggaactctatgaaaggatgcttgatgcgctggatgaccaggaactggtgaaactggttactgaacgcagcaatcagccactgcatgatgtggacctggacagttatttatga

SEQ ID NO: 8213 - DNA, 879 bp, Escherichia coli
gtggcggccctgaaccagacctcatttactgaaagcacataccgtcaggtaaagaacccgaatccggtgttcacaccccgtgaagatgccggaacgctgaagttctgcgaaaaactgatggaaaaggccgtgggcttcacctcccgttttgattttgccgcgcatgtggcgtatgcccgttcgcgcggcctgcgccggcgtatgccgccggtgctgcgccgccgggcgattgatgcgctgctgcaggggctgtgtttccactatgacccgctggccaaccgcgtgcagtgctccatcaccacgctggccattgagtgcggactggcgacggagtctgaggccgggaaactctccatcacccgtgccacccgtgccctgaagttcctgtctgagctggggctgataacctaccagacggaatacgacccgacaattggctgtaacatcccgaccgacatcacgttcacgccggcactgtttgactcactcgatatctcagaagaggcagtggcttccgcacgccgcagccgcgtggaatgggaaaacaggctgcgcaaaaagcaggggatggatgcgctgggtatggatgaactgatagcgagggcctggcgttttgtgcgcgagcgtttccgcagttatcaggcagagcttaagtcccacggcatgaaacgtgcccgtgcgcgccgcgatgcaggcaggacccgtcaggacattgtcaccctggtgaaacggcagctgacacgtgaaatcgcggaagggcgtttccggggaagcctggaggccgtgaagcgcgaaatcgaccgtcgcgtgaaggaacgcatgataatgtcgcggaacaacaactacacacggctggccactgcctcacccttagtttga

SEQ ID NO: 8214 - DNA, 642 bp, Escherichia coli
atgtgcctgtcagaactgcaggccaggctgaacgtgggtcagccgctgtttccgacacatgctttatgtattcgccgttcacaacaacatcgaagcccccctgcggggatcgattttcgcggagcgttccggattttgaatatcagtgaattacatcaacgcaactggtatctggcacagtacatccctgccggtaaaaaccgcgaacatctcttttcctggctttccgaacaacacgtccttccctggacacccctgatactgaaaaaggtccgccgcacggataaagtctgtggttaccgtcgacatatacacgccgtgtttcccggttactttttcctgaaagcagaccccgaaagccacagcttcactcaccttcgccgtcacagtgcctttctggacttcgtgaaaatggccggtgaaatcaaaaccgtcagggaggatatcgttcagtctttgatgaaagtgtacccggatcctgcgctcaatccggcagccagggaggagctggatgctgcctccaccctctggctgacaaaagcgcgttaccagtacctcctccggcttgatgcccagcctctgccggagtcgaggatcgccctgctcctgcacctggtatctgatgacggagcgttgacatga

SEQ ID NO: 8215 - DNA, 663 bp, Escherichia coli
atgaccattctatcccaggaaaaccctgtcattctgttactggagaatatgctcgaagcactctccaccgccccggacaacataaacaacgaacggcgtcgccggcgttacctgctgaactggcttgacactgcccgtcagatgcgcgagttcagaggaatggctgaagagttcactaccctgcgaaaactgctggccaccaattcagacataccggtagcaaacaccctgaaatcactgctggaaagtggcaataacgcagcattatacgacctgtaccgcttccgctcggctcttgccacgtgcaggagtctgggatggcagattggcacgtgcgcatggaatgaccagttactgagtgagacactttcccgcgcacagaccgggaaacgtcatatcctgcagctgaacagcaccggggacaccttttccaccacgggcagaatgatcagaccggtggcattttcattaatccatccggccaccatcaacacgtctgaggttgaagagatattccgggatgaaggttttatgctcgcacacgggcgcgaatgcagtctgaacggcagcggcagaaatatgctgtcacgcattcttcatgtgggccattcaggtttagcggaagaggaatggggcatggacaactgtctgcttttacactga

SEQ ID NO: 8216 - DNA, 621 bp, Escherichia coli
atgacactgacgttacttaccgcgtataacgcaccctatctggcagccctgacttttgttctgcttactggtatcgctgaacttatcgccctgctctgcggacactccctctcttcagctatggatacacctgatttaccggagggtctgacaggagaggcgctggactggctgaacatcggacggatccccctgctgatcgtcctctgtatgctggcaggtttttttggtatatccggcattctcctgcagggtcttattattcatctgctgcaggctcctgctccgaacattctccttgcaccactttgcctgctgctgacatgtcctctcgtacaccgcaccggcagactgattgccccctggttaccccgtgatgaaacaacggcgctcaccgaggaggcattcatcggctgtatggccaccatcactggttatcacgcagtggcgggttccccctgtgaaggtcgcttcacagaccgcttcgggcaggttcattacctgttgctggagccggaggccgggaaagaattcagacgaggagacaaagtgattattgtctgccgtctttccggttcccgctggctgggcgaactgaatccctggccggatgttctttaa

SEQ ID NO: 8217 - DNA, 1695 bp, Escherichia coli
atgtttaatcttccgggatggttgtttaccgttatagcgctggtcctcaccctgttcgttatcgggctgatatttgcccgcctgtaccgccgggcatcggcagagcaggcctttgtccgcacaggtctgggaggccaaaaagtggtaatgagtggcggagcaattgttatgcccatttttcacgaaacaattcccgtcaacatgaacaccctgaagctggaagtcagtcgtgcagcggctgaaagtctcataacccgcgaccgcatgcgtgttgatgttgccgttgccttttttcttcgggtaaaaccatcagccgaaggaatatccactgcagcccagacgctgggacaacgcacgctcacacctgaagatctgcgtagtctggtcgaggataaatttgttgatgccctacgggccacggcggccagaatgagcatgcaggatttacaggatgcccgcgagaactttgttcagggtgtgcagaacaccgttgcggaagacttatccaaaaacggtctggagcttgaaagtgtgtcgctgacaagtttcaaccagactgcacgggtacattttaatcctgacaatgcctttgatgctgaaggcctgacccttctgacccaggaaacagaacgtcgtcgccgcgaacgcaacgaagttgagcaggatgttgaagtggccatcagggaaaaaaaccgggatgccctctcccgacgtctggagattgaacagcaggaagccttcatgactctggagcaacaacaacgggtaaaaacccgtacggcagagcagagtgccagtattgctgctattgaagctgaacgacgtcgtgaagcagaatccgcgcgaattctggctgaacgtaagatagaggaagccgaaatcgaacgacagcagatagtgcgtacccgccaggtcgaagccgaacgggaagtggccatacgggaaattgagcaacagcaggcaaccgaaatcgccagccaggccagagccattgccgtggcggcaaaatcggaagagcagtcacaggcagaagcccgggcaagtaaagcactggctgaggccgtacaggcccagcaggatgtggaaaccacccgccagactgcggaggccgaccgtaccaaacaggttgccctgattgctgctgctcaggaagctgaaacgaaagcggttgaactgacggttcgcgcacaggctgaaaaagaagcagccgaactccaggcagcagcaattattgaactggcggaggccacccgtcagaaaggtctggcagaagcagaagcacagcgcgcactgaacgatgccattaacgtgctttcggatgagcagaccagcctccgcttccgtcttgccctgctggatgcattacctgccgtcatagagaagtccacagaaccaatgaaatccattgacggtattaaaatcattcaggtggatggtctgaatggcggtgttacccgcggtaaaacagcaacaaccgacataagtggcggaaatctcgctgaacaggcagtaaccgccgctctggcttaccgtacacaggctccgctcatcgactccctgctgaaagaggtgggtttatccggtgaaggacttacagccctgacacgtccactggtcatgcctgccccggaaaaggttccggatgtcagcgaaccggtaaccgctccggataactcagaaccacaacaggtttaa

SEQ ID NO: 8218 - DNA, 243 bp, Escherichia coli
atgtccgcagaaaaattcagagttgtcatatacaccaatacatgtgaaaagaaagtcagttatattcctgcaacagaagatataaacatcgctataatgccatttcagacggcagacaatggcttaattattgtgtgtcagaactcccgtataatacgacgcaaagagcgtattcccggaagcagctgtgaatggaaagatgtgacattagcaccaaaatccagaaaccgcgttcagttatag

SEQ ID NO: 8219 - DNA, 1071 bp, Escherichia coli
atgaaaaagaaatcacttacactccttctgccgtcattactcagcggctgtacggcatttaatgccacgcctgttcctgacaccacgcctccggctctggtgttcgtcgacggacaaattcgcgaaagcgctgccattatcgcccatacgcaaaaacgtctgcttccgccaccggtgacccgccctgtgacgccgccccgcccgacaacaacagcgacgcccacaaccgcagtcagcagccagagtaccgcactgcctccccgtccgctccttcaggccacacagctgcccgcactggttatgaccggtaaacccggtcagtcatccgtcgtttatttacgtgaggcacatcagcgctccgtcagtgactggatacgccagttgctaccacccggctggcagttccggcaacagaacgctgccataccggcactgaacaaacgcctccccgtctggtccgttaatgaccagtggcaccgggcactgaatgcgctgctggccggccagcagctttacggacatatggactggaacaggaaaatactgactgtcacgacctctgcaacaccgccggtcgacgtcacggcaccgcagggttcacagaaagctgctgatacaccgcgtaatccgttcaggggcagcgccgcaacgccggcaggcccgacaccagtgacacctgccgtcagcgtttcccgggctcagaccaccaccgggacatccggaactccagagagcagaacaaccacgccagccccggtggccacgaaaccggtagtgccaccacagcagaaggtcataccgccacggcagtggaaaatggaaaaggggaccaccctgaaagacggactggcccgctggacatcatccgaaaaatgcccgcacggcacatggacactgcgctgggaaacacctgtcaactacagcatcgatgcccctctggttttcaccggcagtttccgccaggcgctggagcagctctttgcactctataccccggctgaaaaaccgctgtatgcccggaccagcactgcacaatgcctgctccgtgtgacagaccgcccgcaggaataa

SEQ ID NO: 8220 - DNA, 438 bp, Escherichia coli
atgggatgggttacgggtttcattatggtcattatggccattggtaatttctggttccacagtcacctcagccgtactgtgcaccatcagcagaccgctgaaatcacacagcaggctgcagactttattcgttatatgaatgccatcaacgattacctgtatcagcaccctgaacgacgtgctgccggtggtcagctcacgtcagcacagctcggtctgcccgccacgaaaaacgtcagccacctcatcagtcagcagcgcgtttttgtctgggcaaaagaaaaacccggccttatgggtgccctcctggaacaaagtggtgattcggccctgcttgccagagtggaaaacggtcgcctcctggacacccgtgggcggcgtatttccatcacgctccctgctgtgatccccgatcaggtcatcatctggatgaattag

SEQ ID NO: 8221 - DNA, 1620 bp, Escherichia coli
atgaacaaaaaacttcttgctattatgattgcagccactctgctgcagggctgtaccagtttccgacaggcagagaacaccagaaaagacgccgttgctgaacaacaacgggcccgggaaatgatcgctgagctgcgaaaccggacaccggttgtaaaggaatccccacgtcagtggatcaatccccgtccggtcacggataaaaaccccggtaatgcggtgcccggctgtccgattatcattaacacccggcagagcatcacccttcagcaggtggcccagcggatctcggaaaactgtcatattcctgtaaggatcacccctgatgtacaggcgtatctgagcgtgaccacctccggcagtacgcagcaaatccagggcacagtaccaccgccggataccggcggtatggttccactggccgccataggcagttctgacacgacacttccccgcctgcagggaaatacggcgtcacttcctgaactgaaggcttcaggactgacatcactgctgaatgcggtcgcttcccgtctcgggatttcctggcgttatgatggttcacatatcacgttctattatcttgatacccggaccttcccggtgacctatatggacagccaggttgcctataatgccaccgtggtcagcggtaccatgtcatcaaatggctcatcaggtggaacagcatcggatgccatttccggtgatgccagtaatacccagaccaccaccgtggatatgaaatctgcgctgtatcaggatgtgaaaaatgctgtctcatcaatgctgacgccgggtattggtcgcatgttcatgtcgacgggctttatcaccgtcacggacaccccacaggtactggaaacggtccggacgttcattgaaaaacgcaatgaagaaatgaagcgccaggtggtgctgaatgtggaaattctgagtatccggaaaacccgtaatgagcaggcaggtatcgactggaacgcagtcttcagcgacagaacgctgggactgagcctcggcagcacattcaccagtgcagccagcgataccgtcactggtggtgtttccattgtgaacgggaaactcaccggttcaaaagccttcctgaaagcactctcttcccagggagatgtcagtgtggtaacccggaattccgccgtgaccaaaaacctgaccccggtaccgatgcagattgccaatcagcagagctacattgagagtgtgacgacggataccaccgccaatgtcggctcatccacctccctgaatgcggccactatcaccaccggttttaatatgacccttctgccgttcattctcccggactcacagacactgcagctgctctattccatgagtctctccgacaaaccggttattgagaattacgagagtggtggaagcaaagcccagctgccgaatgtggatctgaaaaccatcaaccagacagtggacctgaaatccgggcagacagtcattatcagtggcttccagcagtcagggcgtcgcagtggaaaacagggtgtcggcacaccgggattcttcggtcttggcggtgggatcaacagtgaaaacgacgacaccattctcgtggtgctgatcacgcccaatatcatctga

SEQ ID NO: 8222 - DNA, 1296 bp, Escherichia coli
gtgacagatatttcaccgacagagcgacaggtgtttccgctgacggcaggacggaatgtatttcttgccggaatggactggaaaacactgcccgcaagccataaaaacccccggacgtttgcccgcagtctgggggcagtacgctatatttcctgtgagtatctcagtacggaagataccgatcgtcacatcatggttgcagccgtcagccagaatacactccccaaaggcagccgcaggtatttctctctcgccatgcttatcctgcccctgctcgagccaggaggatacgctatcgttgaactgtcacaggcaaacgatacagaactttatggttttgtttctgctgttgacggcatcctggtcagtgacctggtgggaacccgggaggaaatcagggaggcccgggaaatattcctcaccattaacagcgcgcctgaacacggctggacatgttatgaaccgccctcgtttaacgggcctgacggcagaggtcccctgccactggaaaccctgacaggtgcagggaaatatccggcagaagcacgccttcaccccgtatcccgtgggccacagcttattccggtattactcatactcacccttctgggtactgcatggtatggctggcagtactatgaacgcctgaaggcagaaaaagcagcacttgctgaagcggcacaaaaagccgcagaggaacggatcacaccaccgtggctgagtatgccggaaaccggagattttatccggggatgcagtgacgtatggtcacgcctgccggtgtcggtcgccggctggcgatattcactcgccgagtgtgctgccaccgggaacagcggcaatctgcgtgcatcatatacaaacatcgccgggacgacagtgaccgcattcagccagcgggtcagggaaattttcagcatccggccgtttatggttatgccggacgggaatagcggtggttttgccctgccggtcaccttcagtatgcctgaaactcccgttgccgttgaggcattaccggaaaacaccctcctgcaggaacggctgaccacactcgcccggtcgatgcagctgaaaatggactggcaggaagtcagcaacagcttcaccgatgaagacggaaataccatccagcccccctggaaggagtatgacctgcagatactgacgacacttccggcgcaccaggtggcagagcatttcagtgaaccctccgtccgttttatctccgtaacaaggcaactggaagagggtcgtttccgttatcaattcacaggtaaatattatgtccagtaa

SEQ ID NO: 8223 - DNA, 459 bp, Escherichia coli
atgtccagtaaaacaaaagctcttctgctttccgtcctgatcctgccgacaacggtcgcggccagcaccatcagcaacatgcaacagaataaccggcaactccaggtggaacagattcaggaagaaactgcactgtatgaagccatgctggcaagagaaaaggtgcgacatgaactcagaaccctggagcagggagaaccagctgagcctgtgcattcacaggaaagcagttcagccgtcacgacagatacccctgcccccattaccggtattccccggctgacagagatatccggagttcacccccagataaccgccaggatacaactgccgggcggacaaactgctgatgtaaaagaagggcaacacattcccggcaccacattccgcgtggaaaagatcaccactgacagtgttgtccttgaacaaaatggtatcagaacaacactacaaccctga

SEQ ID NO: 8224 - DNA, 1509 bp, Escherichia coli
atgctggcacctgcagaccagccacctgatgacattctggaatacgtggttgttgatacagataaaacaggacaaattcatgtcagagtggtggaaggaaaaaaacaccttcgtgccgtccaggattatctgacccgcctgtgctcccgctatccgggtaaagtatccccgtttgagttcaccacacttgatgtgatcgcccgactcaggcaggagacggtcatttccggggtggaaaacggaattaaccccgtacagcaaaaaatgctcgggtatatcagccatgcggccaccctcagcgcctcagatcttcacatcacgccggggcgtgacagtacggatttcacgtatctggaggcccgtgtccacggagagctggagctgctcgatatcgtcagaaaagatgaggggctggaattactgggggccacctattccggaatgactgacgtcataaagggaacacagtttgatcccggtgtcccccaggatgcccgtctggctgaaagattcctgaaactggccggactgtttggtgcgcgctactcccactatccgtgtgtgggcggactctatgccgtactgcgtctgatcaaggatgacagtcagcatataccgacattcagtatgctggggtatcaccctgagcaggagcgcgctgtccgaaggatgctgcagcgaccggagggcatcgtgatcctctctggccccaccggttccggaaaatccaccacgctgaggacggcttctgccgcctatctggaacagtatggcttcaacgataccggagggatcctgctcccccggcgacgtctgttcacaatagaatcaccaccagaggggcgtatccccggtgcaattcagacggccgttatggataccgctcagggctgggtcgattctgttaagtccgccctgcgccttgatcctgacgctatcctgaacggggagatacgtgaccatgcctccgccatcacggcgataaaagccgccatgaccggtcacctgatgctgaccacccttcatgctaacgacccgataaatattcttgagcgtctggaaatggagggcgttcaggcaaggatgattgcagatccgcagttatttatcggcctgctcagccagcgtctggttcaggtgatatgtccccactgccgcctcccctggcatgaggtggagagctcccggacggatgaagaacgacgcctggtggaaaacttctgccagcccgatgccgtgtatcttcgtaaccataacggctgcccacactgctggcgtggagtgaacggccggaccgtcattgcagaagtgatttccccggatgcgaagtttttccagatttaccgggaaaaaggccggattgaggcaaaaacctactggcaccgggagctcggcggtatgacacgaaatcagcacctgctgggcaaaatcaacagtggtcaggtcgatccgctggctgcgcattacatatcccctgtagacgaggacagctatacgctgctgcactga

SEQ ID NO: 8225 - DNA, 1095 bp, Escherichia coli
atgaaaattctggaaagactcaacaatacggaactggaactgtccggccttaaccgctggctgggcaaaaagacgttcaggcggactacgttttacgagtcccttgcaggcatgatccgggacggcacaccggttatgcgggcactggagttcatctgcgatgtggaaacggattttggtaaaaagaaagggcagtccggcctgtattttctggcgacagactgtatcgccagcatacgcagcagtggtcagctctctccggccctgaaggactgggtacccaaagatgaaattgccctgatccgtaacggtgaagaacgaggtgatatcgctgaagccatgtttcaggtcgtcaaaacggcaaaaggacgacaggagatgattagcagtctggtgagtgtctgcctctatccgctcatcctgctgacactctgtgtggtgaatatgtataacgttcatacccgggttattccgatgatcagcgcctttgcaccggaagaacgctggtcagtacagatggtcattctggccaaatcctccggactggttatcggttatggtttgtggctgctggcaggactgctgctgctggcaattctcatcaggatgtcattcagtctgtataccggtccccgacgacggtatcttgatcgcatcccgccatggtccctgtatcagactttccatggcgtgaattacctttttaatatttcatccatgctgcagataaatattcctttatctcatgcccttaccagaatagaaaaacatgcagaacataaccgatggttaaaatcacgaataagtgctatcagaaaaaatgtcttatccggtcagtcactggcactggccatgaaaaactgtggttatgactttccgtcaaaatcctgtgtgaataatcttcttttaaattcagaaagggaggacagtgttgccagtatggcgctttatgcagaccgctggctggaagaagcaaaaaagaatgtcagaaaaagcggcattattattactgctatatcaggtctgctggtatttctcttcatcatcaatatggtcagtgccatttacggcatcagtgacatgctgaagcagtaa

SEQ ID NO: 8226 - DNA, 537 bp, Escherichia coli
atgagcgtcataacctcttcgtattcagaacataatattcgtcaccttcagaacgatgataaaggcatgaccctgctggaagttctcggtgttctggtcgtcgctgccattgttattggtgccgtgatgggactgatgtccgataccctgtcctcttcagacaaccagaaggaactcaaaaacctgcagacaatcgccaccaaaatgaaagcccagaaattccaggggcagtatacaggtactgactacgtcaaaatcctgaccgaaagtggtggcctgcctgccgatatgatcgccggtggtaataaggcgaaaaatgcctggggtggtgcggtaaccatcaaagtcagttcagataaatactcctacgttattgaatccagcaatgtgccgaagaaaaactgtattgatctggtcaccagcctgcgcagttcatccatgtttacaaaaatcaacggcaatgtgacgaataaagttgacccgtctacagtatgtaacgcagataaaactactatcaaactggaaaccaacagttaa

SEQ ID NO: 8227 - DNA, 486 bp, Escherichia coli
atgaacaggttatttatcctgacagtgattttttcactgttatgctcacttccttccgcacaggcatccccacaggacaaacaatatgatcgttgttttattaccgccggaaaacgttattccattgatccaggattactcaaaattattgcccgcagggaaagcagtctgaatccccgggccattaatcataacaggaatgacagaggaaaaattatcagtaccgattacgggataatgcagattaactccacacatattcccgggctgaaaaaaatgggcattatccggagtgagaaagatctgttgaataatgtctgcctgaatattcagaccggagcatggatcctcgcccggcattttcagcgatgcggcgtaaactgggaatgcctcggcagttataacgccggcttcagtaaaagtaacactcaccgccggatgaaatacgcccggcagatttacagcgcttacatgcagggacgttag

SEQ ID NO: 8228 - DNA, 627 bp, Escherichia coli
atgctccagataatcccggcactgctggtcgccataaccgtggtaatacagtgtctggccgttcagatgagtctctatcgactctcccggatgaatgcccgcccccctcaccatgggctggcgctgatgagcgggatgcttgcagctgccgccattatcctgcgtctttatcagaatgacagcgctgtcggggtgctgtttatgacgataatgaccggatgtatgacactgatgaccctgacggatgctgcatcctgccgtcttccccggcccttcaccatcatgtatctgataagcggcagcgcatttcgtctctggcagggagactggctgacaggcctgtgcagtgcagggttctggttcctgctgttgcttctgttcaggcaatacacctcttaccgcaggaaaacagaaaccataggcctgggcgatgtttttctgattgccggtattgccatctggtccccgccgggagacatcccctggattgtcgcaacggcagcaggcggagccttactttatctgtggtgtaacagacaacgacgcattaccagagaacttccctttgggccgtttctctgcgcgtcacagtacgcatttactttttatcccggtggcctttggtaa

SEQ ID NO: 8229 - DNA, 1362 bp, Escherichia coli
atgcaaaaagacaacgataaaggttttgcacttcttgaaattctgggaggactggttgtcatcagcctgctcatgccgctgttctggtcttacattgaagactacctgaatgaaatgcgcaaccagagcgccgcatttcatgcagatgcctacaatactgcagccaggacctacatcgccgataacaatgcccgcctgcatagcggaacgcttcctgccaccttcacggcggatgagttaatccggaaaggatatctgaagggtcttaaccgctcgccctttgggcagagttataccaccggcatccgtcgtaacacgagtaccggtcgtctggaggccctgacctgctccaccggaggggagaatatcaaagacgatgccctgcgcagtatcgccagcctgctccccggtctgggcggatttataggaaaaaatggcacagcaaccggtgtttttggtggatggacagataaacccggcgactatggactcagctgcaatggcgggcacatcgccatcgtaatgatgggtgatgacctgcaggaaagcgatcgcctgtatcgctttcaggtaccgggacgaccggagctgaaccagatgaacacggccatcaatatgggagggaacaacctgaacaatgcaggaaacgtcaatggacaaagtgcaacactgaaaggtgatgttacaagcgaaaacggctggttaatcaccaaaaatgataaaggctggaagaacatcacctatggtggcggttttacgatgacagacagccagtggatacgcgcagtcggtggtaaaggaattataaccacaggggaaatcaaaggaggaaaagtcagtggggggacagtccggtctgacggtcgcctttccacaggtgagtatttacagctggataaaacagccgtagcaaatacaaagtgttcaccagatggacttgtaggccgcgacagcaaaggggcaatactttcgtgccaatccggtgtgtgggttggctttgaatcctaccctgtgggaagccctatcccgtggccatctgccactcctccacaaggctatctgttgatgaacggccagtcgttttcctgttcccggtatcctcagcttgcccgtgcttatcctagctgtaagttacccgatctgcgcggtgtttttatccgtggctgggataacgggaagggacttgatggtgatcggaacagacagctcctgagttatcaggccgatcaatcaggcgtctatcacgaacgtggcggatggctgaaagggcatcatagtggtatgccatactgggcacaggggagtaccacagaaatgcgtcccaaaaacattgcattcaactacattgttaaagccagctag

SEQ ID NO: 8230 - DNA, 822 bp, Escherichia coli
atgaaaactgacagcacaggtattgccgcccgtatgatgctctccctggacagggagcgaatttgcgaatgcctgctcagtcatcgccagctgcagtccacacccctgcaggttcgttatccgcagggagtcagggatgcccttggtatcatgagcgaacagctttctctttccgtctctgacctgacgcgtatcctggtcgaagacgcgttaagtgaaatgtttcttcctgcagataacatcgtccgccgtcttctcagcaggatggagcacatcatgcaggcacatgatatcagcgcaacaacgatggctgcattactggccccctggaatatccgccctgccgtcttccgggagccggacagactcactgactatctgaccggggagattcttgcagcactggctgactggttttatctcagtccggaatggctgaacggcagggtgcattatccactgtatcgtccgggagactggccagccacacaggagatattctgcaggattatttcagcccgcgagaatatggacattattctctggcatggttttccgtttgccggaacgcattccggagaatattgcggcgttctgctcaggcagaaaaaagaaattaataacaccattatttatccggtactttcgttatatccggccagaatggatatagaaaaagaaggctggtttcagatggcacgaaaaatatctccggatatccctgttcgcgccgtaacactcactccggcacaggcagaatatctgataacaggaaaaatattacccactgcgttattcagggttccgttatccccctggtaa

SEQ ID NO: 8231 - DNA, 1203 bp, Escherichia coli
atgatgatgaaaaagcatattacccgtactctcatcgcgtctgccgttttattttcctttaattcgactgcagcaacgtcatattttgaagcccgcaatgatgcgatgggaggaacgggggttgcctcctctcactatggtgtggcaccactggcaaacccggcactgctgacaaaatccggtgcaaaagatgacttcagtcttctgcttccgtccgtgggtgcgcagctgtccgatccgggtaatatcgccgacaacgccgacaaaatcagcgatgactggaaagccttcgaccgtgccgtcgacagccactccggggtaccgcagacagcggcccgcctgaaagagagactgcaggacttccggaacacccatgccagcgcacaggccggggtatctgctgtggcggcccttcccggtgataccctcgctgctgcactgatgctgaaaacgctcgggactgtcagcgtcgacggtaaagtcagcgatgccgacctgaactatctggaaagcattgcagacagtggcagccaggatgtggataaaaacagactgacctcacaggcttttgcccgtgccgcactgatcaccgatgtgggcgttgcgctggccactgaactggaaacggccggacaaaaatggtcactgggcttcacaccaaaattccagcgtgttgacctgtttaactacaatacgctgatcaaaaactatgacagcagcgcattcaaaggtgaccgttaccacaacacccaaaacggtattaacgctgatatcggtgccagcatggacctggatgacaactggacgctgggtctggtcgcacagaacctgatcccacgcagcattgagaccaaagaggtacatggtgtcactgaaaccttcaggatccgtccgcaggtaacaaccggcgtatcatggcacaacgacatgttcaccacggcactggatgtggatctgaccccggccagcggcttcacatcagacagcaaacgtcagtttgccgccgttggtgctgagtttaatgcctggaaatgggcacagttacgtaccggttaccgccagaatctggccagcaacaacggcagtgcattcactgccgggattgggctctcaccgtttgatgtgattcacattgatgtcgccggcctcgtgggcaccgacaacaactacggtgccattgctcagttacagttcaccttctga

SEQ ID NO: 8232 - DNA, 459 bp, Escherichia coli
atgcaaaaaaaacgtatcacccttgcagggggagttgccatgctctgtctgagcggctgtcatcttcccccggataataccgcaccggccaggaagtacggtgcagcttctgaagtcgctgtcacacgacatgcacagtatcagttgtgggagcagggcacgtattctgcagccctgccttcccgccagcccggaggcagcctgcaggctcacagcgggcgggtttcctttgactgggaaggcgatgctctggagctcctgagcgagctggcccgtctgcgaggacaacagttcagttacagcggcgtgcgtcttcccctgcccgtctcactccatgtacgcgatatgaccttcgctgatgcccttcgtctcacagaggcccagactgcctggcgggcagtcctctcacagtcagccgggcgtttacatctttcctatatgccaacggagaaaaaatga

SEQ ID NO: 8233 - DNA, 837 bp, Escherichia coli
atgaaaaaacaggtctgtctcctgctgtccgggctcctgctggcaggctgtgccggacagcaccatcgcccccctgccggtatggcaggcaatttaccaccgccggatctccgggcatggctgacgcccactgacaaccaggatgacggcatttcagacacccgtcgccagatgctcacggacgccggacgaacgctgggattccgtggcggaaaagcacagcgctcatgggaactgattcaggcactgaatgcccgggaaagtacactgaatgccctgtatgacttccgtccccttatcagcagggaaggctggctaccccctgttattgatgaagcgcaggatgttgctcacattcagcctgaccagataagaaccgcgtcccgtgtctggaccatcctgcgccccgaacgttttgtcagtaacccgccgggctggcgtgactggcttctgcgggggctttccactaccgccaccccgggaactgagggccgtgttgtaccggaagaccgcgcacagcgcagactctgggaaaacgcactccgccagggctggcaagaaggccgtgacaacgctgacctcaccctggaagccaaccagaaacgcctgacccgggattaccggggaatgatgctttatgccctgctctggcgtcagggcatgatcacacgcccggatgtgactgaacagcggcagaccgtcaccggtaacggcaggaaactcatcaccggagaccacgtccgccgtctgaagacacacgcggaattcaccctgcagaaatcacgctggcgtccggtcgtcagcacggaaggagcccccgatgaaattacccgatga

SEQ ID NO: 8234 - DNA, 1149 bp, Escherichia coli
atgaaattacccgatgagttcggcacattccctttcgcccgtttcacggccgaagagtttcgctatttttttgcctggtgtgcccgacaccgcgtcagtgatatcgatctgacaggcggctcaccggtatctgtcagtcgctttggacggcgggtacgttcgtccgcacatcctctgccgtcctccatcatgatggcgctgagtgatgaattgtttggacgggaagtccttccccgggtgctgtccggtcatcccgtggaccgtaccattcaggtcagcggtgatgcctccggtcgctacggtctgcaacgggggcagcgtgttcgcctgcgctgtcatctgattcagggaacatcagcaacagaagaaaaagtaatctccgtcaccatgcgggtgatcccgtccgatattccggacatcctcaccatgaatattgaaccggacctgctggatgccatgctccggaaaaccggtctgggtttcatctgcggagagaccggctccggtaaatccacactggcagcggcactgtaccgctacattcagacgcatttccccgaccgcaaaacggtgacctatgaagatccggtggaatacattctggggggagagaatgaccttctgccaccccatcaggccgaaatcgggcgtgatgtggaaagttttgcggcaggacttcgctctgccgttcgccgtaacccggacatcatcggtatcggtgaaatcagggattatgaaacggcagatgcagccgtccaggcaggtaacaccggtcacttctgcatcggcaccatgcacaccaaatcacccggtgaaacctttgcccggctgctggggttatttccaccggaaatcagggattcaatggcagccgccaccctttccctggtgcagttcattctggtgcaggtcctggtcagaacaaatgacggtggcagacaggccgtccgggaatacatcgtcataactgacgaactgcgtgatacgctctcccggcagtcccatgcgacatgggggcattacattgatgaaatcattcgcaaggaaaaacggcggatacgggatcaggttctgaccatgtatcagacgggcagcattgaggcatcagaagctgcgctcttcatcccggccggagaattccccaaatga

SEQ ID NO: 8235 - DNA, 291 bp, Escherichia coli
atgaaacgcgaaggcttctggcgggatgtcactccgccactgaatatttatggtgtcccgttgccgtttaccatgatttacctgctgctgtttccgtatccgtcaaaaacaacattctgggtgtgcagcggcattctgctgttttttgtgctcctggggtactcaggatggactgtccggacgctctgccggcgtctgtacagcctggtgcagggtaaacaggcgtcaggccgtccctggtggtaccggcatcgcacagaattaccccgtgaatggcgcggaacggaataa

SEQ ID NO: 8236 - DNA, 4062 bp, Escherichia coli
atgaagtccagatatcgaacctggcttgctgtcccgcctgaggagacagaagccgtaaaaaatgcagttcccccgttaaatggccgcaaagctgtcgcatgggatccagaaaaaaagctctggtatgcccgggcgggtaccgaactttcactgctggagcgctggttaccccggccacaggaactgtcgatggatgccggcgatccggtcactgaatttgctcaggtcctggaaaacgccgggctggttattcagggattgccacagatggacggagccatacacagagtggccacccgggatgacaaaaaaggggccaaaagtggcgcatacagggcctatcttgatggtcgtcccgccggctggtaccgcgactaccgaagcgccgatgacagtcccacaaactgggtattttccggcggagaacaacacgatcctctggccagactgcatctgcgggcattcgctcagcaacagcgcgatgataacgcacgtaaactgcagcaacagtataacaaacaggccggctatgcccgctcctatattaacgggttgccacaggcaacagcacatgaatacctgacgcgcaagggcatccgggccgcgcctggcgtgcggctgaacaataaaaatgagctggttattcccttcagcaacggccggggagaaatacgttcgtaccagcgtattccggtcaccggcgggaaggatgcccgcattctgaaagactccgagaaaaccggcaactggttcaccttcggaaccccggaaaatggccgccccctgttatttgcggaaggttacgctactgccgcctccctgcacgaagcaaccggccttccggttctgatgacagttgatgccagcaatatgattgccgtggcagaaaatgcccgccaaatctggactgacagcccctttgtcttctgtgccgacaacgatcatcaacgggaaattaacaaaggggtttttagtgcaacaaaggccgcagaagtcacgaatggcgaagtcattattccggcctttacggaggcggaaaaagcacagggactgaccgatttcaatgacctggacgccagccggggacgggacaactttcagaatgccatgaatgcacagttaaaacatatcggtatccccacacccaacagtgacactgccgaccatcgtgaggctgtcgtgatcgacaacctgatattcacaccggtaaaagatgagaagccacaaatgtcccctgaaaacagacagagcacagccccggaaacggagctggcgacacaggatacgccttatgacacccactccgacgatacagaaaaccaggcatatgaagatgactatgccgcctatgcatccctgcaatcagtaactgcggagacgttatccccggataaaccactggagaatattgcgtctgccgctgataccggcacagagaatacctctgtgcctaccgctggcgaccaggaagacctcaatacagacgccacaggtacagacaccgctcacaacagcgacacagcagaaacaggaacgcttcctgaacctgccgggatgcagtccgtgcagcaagcaaccactgaaccgaccgcagaagataaaccacacgagaacgttgtttccgctgccgataccagagaagaaaatgcctctgtggctaccgctgataccggtgaagaaaatgcctctgccaccaccgctgacaaccagagcacgcaggcagaagaacatccccggagtaaagacacaccggaaacctccctctccgacgcggccgggacacagcacaccaccacaacgcagtctgaagaacaagtgcaggtctccatggccagcgctgacgactggagcgcatttgcggaagatctcaacgctgacactccgggggctcccactgttcacaacaccgacaacgcggagacaaacacagtttctgaaccggccgggatgcggccagttcagcaggtgaccactgaactgacggcagaagataaagcacaggaaaagagcgttgcgtctgccgctgagaccggcgcagagcactcctctgacatcaccgatgacaacaggaacgcacccgctgaggagctcaatgccgatgccacggttgctgttcacaacaccggcacaacagaaacagcctcaccttctgaacctgcagaaactcagccagtccggcaggccaccgctgaaccgacggctgaagataaactgcaggaagagcgtcttgtttccgccactgagaccagcacagcgaatgaagcagcccgccctgaaacgccatcgcttttcagccgtcttcgccgttttctgaccggtgggaaatcacgcacctcagaaccttccgttattcaggagaaaaagcccacggaggctgaaacagcaacagaggaggtcgcaccaccatcaccaccggaaaccagcccggaagacacatcgtcagcggaaccggacacgattatctttgcaccccgccgtcccgacagtccgcagcggcacaacctggacgagatccttaaaaatcttacacacaaagagtttcccgacaggactgcgctctacagcgttgacggtgaacccgccttcctggacagactctactgtctcgaaatggtggatggcgccagcgcggatgacaaaaaggtcctggctgcccttgctgtggccaccaacttctatggcggcgttatcgagctgaccggcagtgatgcctttaagcaaaaagccatgcagctgattgtcgaatacgacatcaaggttcgcatgaaactcccggcccagcgggcagcactggaaaaactccgcaaggaaaaagagatggcgcatgatgccattgtcacccacagacccacgccggaactcaaccgccagtcaccggaagagacaacaatggcccaaccggccccccctgtgtcaccgaaggcagaggctgaacaaacagcaggcagtacggctgaaacaccgcatccggaagcgccggtcacggcaaaagctgaagccccccgggccgacagaccggaacaccccgccgccccgtcgtctgcgccagaaaaagcccctgtcagtgcacagccgcagcaacccgacacaccggtggaagagccgcccggcaagctcagccccggtgaaagtgtgactgccgtcctgacaaactacggagaaaaagagtatgcgcccggaaaagggcgctgcttttttgtggagctcaccaaccgcagtggcaaacgggaatactggggaaacggcctggaagaactggtcaaaaaccatcagaagggtgaccccgtcacactgacactgcaggcgagagaaacattccggctgtccggtgaaacgcgggatcgtatccgtaatatctgggccataaccccggtcagtaacggcattaccgttaataatgaccaacctcatgcgggtcagcataccctggagtttccgatggcaacattcagccaggtgatgttacagatgcaacaacactggccacagataatgcaggaagttcgctcccccaaaaatcctcccaataatctgtacattggtgaagacaggcaacctgcatcagcacctcaggatcaatcaatgcgactccccctcgctggtaatgcccccaatgaactgataccagccatcgcctctgccgataaggacaatcgtcagttgaatcttctgctggtccacagcgcagatgatcatctacagggcgtggtccgcctgaacggcaccctttacccggcactggccaccccgtcagctgacaaccgtcagctggttatcaatgccctgacggataacggtctgcagtttgccggttacggtgaagctgttaaccatgatgagaataatcatcagcgtccgtccccacaaataatgcagtttcacctgaagcaacaggactccccgttgtttgccgccatccacaaaccggaagagcaaccggacaagcttttccgctctctgggttttgagcagacctggaaagagtggtctgacagccaaaaggcggaggacaggcaggaaaaaactctgcaacaggcacaatcccacagccccggccgatga

SEQ ID NO: 8237 - DNA, 351 bp, Escherichia coli
atgaacatgaaaaaaacgctgctggtcatactgaccggcatcaccctggcatcaccggtggcaggtgccgccacctgccgggcgggggccgctgccgaagccggcagcagagccgcctgggagcgggcgcgcacagccagccaggcatggtcacagcgggagaatgacgtcgcctcctccctgcagtcctgcctgtcccgcatcaaggacatcagtatcactcttccgcagttccccagcctggacaagctcctccgcgacctggaaaaccaggtctgtgatgccgtcgtggatcgggtgaatgaccatcttccggggaatatcgacccctggaaagactacaacctctga

SEQ ID NO: 8238 - DNA, 696 bp, Escherichia coli
atgagcgaagcacaacccacctcccctgtctcaccggaagcggataacagcggagatatttataaccccgtgctcagaaccatcgcacagtcagaacaacgggccgcgctggtacccggtctggtcagggcgttgctgtacagcggcgcagcactctgcatcagcctggtggctaatggcatacagtactggcatgccaccggcgtgacgcgcgaatactttgccactgacaatggccgactggtccgtctggcaccaaccagccagccggcctggagtcagagcgacgtcatgaactttggcagcatgacgctgagcgaagccttcaatctcgattttgtccactaccgaaaacaaatcacgacacaggccccccgcttttccgaagccggctttgccggctatgtgaatgcccttcaggcctcgaacattctcgacactattaaaaaggagaaatttaacctcacaaccactatcggggcaggtaccctggtcaaccagggacagatggagaacggcgtctggttctggaaattccagtatccggtcaggatgcgcctggtcggtcagaccagcacccgccccgaacaggccttcacctttgaaatcactgtccggcgcgttgacccccgcatcaaacccggcggcatggaaatcagccagatggtttcccgtaacgccgcagcaggaatctga

SEQ ID NO: 8239 - DNA, 975 bp, Escherichia coli
atgcacatacatcatcttattggcgcactgcttattgtgtgcggcactgtcacagctgcagataacccgggctggaaaaatgcacgaagcccgcagaccggcggaaagaccgcacaggcaaccgggaacaccccggcaggcggtcccccgccagccgcacaactcccgggaaacctgccgcctcccggcgctgctcttgtacaggaaggcgcatcgctggattctcccctgaatgccggtgaaattcgtgaactccgtgggataatggccgataacgaacgggccatcagtgccccgctcaccagtgtggtgccccgtatcagttccctcacggtgaatctgtctccgggggccagcctgccccttgtccgtaccgctctgcataacgtcagcgtggtgaccttcactgacgtcaacggcagtccgtggccacagtcggatccgccctataacgctgcgcccggtcactttgacgtgcagttcaacggcaatatggtgtccgtcacccccctgcgcgcctgggctgccgggaatgtgacggtctatctcaaaggattgtctgtaccggtcatcctgaatatcaccagtggtgaaacagacaccactaccctgagtcaggaaatcgacagtcgtctggatctgcgcattccccggcagggacctgccagcccggtggtgtccataccgtcagaaaaaattgccctgcatgacgccactctgcaggcctttctggacggtgtgccaccggatgatcccgccatccgccgcctgaaattctccggtaacgtcccggacaccaccatctggcaacacggcgatgatcttctcgtgcgctcacgggccatgctgcgggatgaatttgaacagacgctggcatcggctgatggtacgcggctgtggaaactgccggtgacccccttactcaccttctccgtgaatggtcagtccgttcacgtcaccccggaactggagtaa

SEQ ID NO: 8240 - DNA, 1332 bp, Escherichia coli
atgagcgaagaacaggacacagccgcaaaatccggcaaaaagctgtcagccctgctggttatggggggcgtgattattatcgggggcggatacctgctgctcacctggctgtcccccgaaaacgctgcatcgctctcgtcagtcaatatcaacagcacaacgtccggcggcggacggaacgtgatggagacacagcactaccgggatttactgcgggctgacaatgaacgtggtgctgcagaagcgttacgtaataacgagacgtttatcgccagtctgccccggggactggataccgataccggaaacgatcagaaaagggataatccccccgatgatcagtcaggcacttccgggcaaaacgcatcccctcctcaggaagatcagacggcccgggaaaaacggcgtgaggcattacagaaactgcttgcccgtatcaacacacagcatcaggatgcccggccaccggtagtggcagcagccatgtggagcaccaccggcgcgcccgggacagcccctcatgcgtcaccgtccggtaccgttacatcacagcatccccgtctgcaggagacgagtctggcaacaccggctacacgtcaggggatccagctgataccggcactgacccgcgtaccggcttacatcgacaccgcagtggactctgacaatgcggtctcccgcgtggtggcctccgtacctgccgggccatgggccggagccgttctctacagccaggacgccagactcgcaggtcagggaatggatatccactttgaccggatgatgtggcggggcatgtttctgaaggtcaatgcatatgccctgaatgaacgaacaggaatgtcaaccgtggccagcgacgtgaaccaccgctggtttaagcacatcgttctgccgtccgtacttggcggggtgggcaatgtcggaagtctttacaaagacgccaacacacagatccttcagggaaactacggcagtattaccggcagggtgggaatgcctgatggagaggcgctggccggcgtcattgcaggtggcatggccgaacggggcagccagctgctgacccgccaggcagagagcgaaccttaccgtcaggtgacagtatcacggggcgaggtcgtctccattctgtttgttgagccggtcatgagcaacgatatcagtacgccgtcctccggcactgccccttctgagtccccctcctccggacgtccgctcacccaggcggaggcagagcaccaggcctctgacaggatccgggcggcggtcctccgtaaacagaatgaaatgcagcaacgctacggcatacaacaggaaagttatccatga

SEQ ID NO: 8241 - DNA, 714 bp, Escherichia coli
atgaaaaacgaacatgaagatcccggcagctttggcgaaacgacggcaccggcatccggcaaatccttcctgaaacgccagtatatgggatacagcctgccggtctgggccggctgtgccctcatcatcctggtcgccatctggtacaagtttctgcggacaccctcagagccccctgcagatgcaggctttgctgtcacaccgcccgctgctgagagctgggcagagcccatgaccatgacggagtccgggagcggaaacaacatgcccgcaccgccggttaccccacaggcagacatgcagcaacttgcccgtgatctgaaagcagagctggacagacgggatgaggaaatccggcgcaccctgaccatgctgaaggacagtatcaccaccctcagtaacgccattcagaaggatgaggcctgggcacaggaaacccgtcagttgcttgaggagacccgtaagcaggtgcataccctacagatgcagggagcactgccagccccgaccgggaataacagacagcctgcgaaaaccctgccttcacctctgcagggcatgaaaatcatgtcggtggagaaaggcatggcctggatccgctggcagggcagtgcctgggcagtacgggaaggcgacagtctgggaaacatcaccatcacccggattgacccgtccagccgggcagtcatcacctctgccggtacattacgatga

SEQ ID NO: 8242 - DNA, 531 bp, Escherichia coli
atgatgagcattgatgccctgacagccatagagaactttgccagcggtattttcagtgcaggcatggagtttctctttacctggggagagctgctggggattatcggccttatcggtcatctgatgcgcgcccgggcagaaggacgtcgcagtatgggaccgggaaaatttattgccggtatcttcatctgcggcatgctggtcagtctgccctcaatgatcaatgccggtggtacccagatgggcttcagggcagattctttcgcccccatcgcatacgtgcagccgggctcctttggtgccgctgccggtgccgtcaatgccattctctcactggcaaaactggccggcgtcggttttgtcatgaacggcatatccatctggcgcaaatcactgctggacgggcacaccgccctgagcgccagtgaatccatcagtaaagggaacgtcaagtttgtggccggcgttctgctggttttcaacgaccgggttatcgatgccactctggcaagcctcggtatcgccttctga

SEQ ID NO: 8243 - DNA, 399 bp, Escherichia coli
atgtcacgacttcgtgccatggcggcgcgtctgcgcgctgcatctgtttatgttcagttatgcctgatggcctgccgtgaccggctggtacgcctgttactgctgcttcccgtgatgctgctgccccacaccgcaatggcaaataccctcttcgatatgattaaaaccgttggcgatggtgccagaggctccagcagttcgtttgtggctatcggtcaggttattggcctggtgctctttatcggcggcctgcttggcctcaaacaaatcggtaaaaaacccggtgcagggctggcctgcctgctgtcaattctggtcggcgtctgccttgccgtcgtaccggaactgatgggcagcggacagaaaacgctcggtctttctccggtttcaatcagttaa

SEQ ID NO: 8244 - DNA, 252 bp, Escherichia coli
atgtcctgtgagctaccccctttcaccctgctcagaacagagcacggcaacgtgattgcccgcgacaaccgggataatcaggagtttgtgtttgcagagtgttactccaccgctatagcagcactgattctggctgccgtcaccctgtatacagagagaaaagcgtatgaaaaagaccccgccactcatcgccccggtccgggaacgatggcttttcccgctcccgcaaccggacacggtattcagcggtga

SEQ ID NO: 8245 - DNA, 627 bp, Escherichia coli
atggctgacacctgccgggatacgatcgtcctgctggaaaaaaacctcacccgggtgatgcgcctgaaaaaacgtccggtaccggaaaacgctgacgaaaaaaagaaacacacccgaaccctgcaggatgcggagcggtccctggcacaggcccgcctgtcggccagacgactggccctgcgtcatgtggaaaagtcgcaaatcgtcacaacggatgcactcagcgaaaatgaaagtgacctgctgcagccggaaggcccgccctttcatctctgtgccttctgccacgcctggcactgtctgaacggctacgctgccgcacagggagtgatggtctggctccccgatttgcatccggcctcggtggttgccctcaatgcgcgggcactgcaggagattttcagcgataaccgtcagcgggtcaggcagggacgggcagtcctgaatgccctggtacagaaccgtctggccgttgaggagaaattccgcacctggcgtccggcggattttgctgatgccctgcgccgctggccgccggcacagcgtaaaacgttgagggagaaaatggacggggtggcgctcattctgctgccggattcgtttcctgacaaaaagtacgtcatgtga

SEQ ID NO: 8246 - DNA, 699 bp, Escherichia coli
atgcaggatattccacaggaaacacatcatgagacgacacgcctcactcagtcagcccaggtggtgctctgggaaatcgatctgacagtggtcggtggagaacgttattttttctgtaatgagcagaacgaaaaaggtgagccggtcacctggcaggggcgacagtatcaggcgtatcccattcaggggacgggatttgaactgaacggcaagggcagtgctgcccgtccgacactgacggtttctaacctgcacggcatggtcaccgggatggcggaagacctgcagagtctggtcggaggaacggtggtccggcgtaaggtttacgcccgttttctggatgcggtgaacttcgtcaacggaaacagcgaagccgatccggagcaggaggtgatcagccgctggcgcatcgagcagtgcagcgaactgagcgcggtcagtgtctcttttgtactgtccacaccgactgaaacggatggctctgtttttccggggcgtatcatgctggccaacacctgcacctggacctatcgcggcgatgagtgcggttatcacggtccggcggtcgcggatgaatatgaccagccaacgtccgatatcacgaaggataaatgcagcaaatgcctgagtggctgtaagtttcgcaataacgtcggcaactttggcggcttcctttccattaacaaactttcgcagtaa

SEQ ID NO: 8247 - DNA, 447 bp, Escherichia coli
atgaataaaatgactgtactattacttagcgcaactatcatttcaggttgtacttcttccgtaccattgataaagaaaactcaatcaggaaaacctgagggggtttatcaaaatacgacaaaagataaagtcaaagatgcccttgtgaattactgcaatagtagagggttgataatttacaacgcggataacagcagtgttatatgtggtaaagaactggaaggcggctctgctgtttttggacaaatgttaatcggcaatgcctattcaacaaccccggtatcaaaagtcagatttactatcgctcaagttaataacgatacaaaagtgtgggccgatatgtggatggaaactcaaatggcaatggggcaagtacaacaaatggctataacagacaacgcaagcaaaaacactatccaacaacgtcttgatgaattaaaaccttaa

SEQ ID NO: 8248 - DNA, 366 bp, Escherichia coli
atgcgtgatattcaaatggttcttgaacgttggggggcatgggtggcaaataatcacgaggatgtcacctggtcgtctattgctgcaggatttaaaggactaatcccttcaaaagtaaaatcccgcccgcaatgttgtgacgatgacgcgatgatcatttgtggatgcatggctcgcctgaaaaagaacaacagcgatttgcacgatttattagtggattattatgtaggtggtatgacgtttatggcgcttgcccgtaaacatgggcgttctgattgctgggttgggcgtttattgcaaaaggctgaaggtgtagttgatggcatgttaatgatgttagaaattgagctagagatggatcgttag

SEQ ID NO: 8249 - DNA, 990 bp, Escherichia coli
gtgagagcactactgacccctgaaattgccccgcgtatggggatcgtattgttcaggccaggttcagagctgatgcccctgtttatgcaggggcgtgtcctgctggagcctgagccggagcgttattcatctttcgccagtggtgccgttccggcggcatcacaactgctggcggatgatcctgccgttcgggccgtgttccgcgatgaggcagtgatccgtcgtgctggtggcgtggaatgtcttgaaagctggttacttcgtgaaaaaggctgccagtggcctcattccgactggcacagcgggaacatgaccacaatgcgacacgctccgggtgcaatccgtctgtgctggcactgcgataaccagctgcgcgatcagttcacggaacggctggaatcaatggcaacggataactgtgcccgctgggtgttgtctgttgtgcgtcgggatctcggttttgatgacagtcacgttgtgacaatgccggaactgtgctggtggctgattcgtaatgatctggcggatgccttaccggaaagtgcagcccgtaaggcactgagattaccgaagcctgttgtgccgtctgttacccgggaaagtgaccttgtgccttcggttcctgccaccagcatcatccaggataaggcgaaaaaggtgctggcgctgaaagtggatccggagtcgccggagtcttttatgttacgcccaaaacgtcgccgctgggttaatgaaaagtacacgcgctgggttatgacacagccgtgtgcatgttgtggaaagcccgctgatgatccccaccacctgataggtcacggtcagggtggaatgggaacaaaagcgcatgacctttttgtgttgcctttgtgcagaaagcatcacgacgagctgcatgcggataccgtggcatttgaagagaagtatggctcccagctggagctgatatttcgttttatcgatcgtgcgctggcaattggcgtgctggcctga

SEQ ID NO: 8250 - DNA, 810 bp, Escherichia coli
atgaataatctgatggttattgatggtattgaagttcgtcgtgatgtttatgggcgttacagcctgaacgatctgcatcgcgcagcagtagcatctggtgcaaatgccagaaccaaggagccaggaaagtttctttccagccaacaaactgttgaacttgttcatgaattgaccaacacccagaatttgggtgttgacccggtgagtgtgattcatgggggaaatgaacggggaacttatgtctgcaaggaactggtgtatgcctatgcaatgtggatcagcccgtcattccatctgaaggtgatccgtactttcgacatggtaaccagcacaccggaaaaattatccggacaggctgctgacaagatgcaggctggcgtgattctgctggactttatgcgcagggagttaaacctgtctaactcttcagtgcttggtgcctgtcagaaactccaggaggctgttggcttaccgaatctggcaccgcgctatgccattgatgctccagctgatgcacacgatggctcaagtcgcccgacactgtcactgagtgcactgctgaaacagtatggtatccgcctgacggctaatcaggcatatcaccagatggtgaagctggggatcgtcgagcagcgcgaacgatacagccgtaccgcgattaacaacatcaaaaaattctggtcgctgacagcgaaaggctgcatgttcggtaagaacatcaccagtcccgcaaatccgcgcgagacgcagccgcatttcttcgaatcccgattccctgagctgttaaagctgctcgataccgttcattga

SEQ ID NO: 8251 - DNA, 3828 bp, Escherichia coli
atgcaattcattaccaacggccctgatattcctgatgagcttttgcaggcgcacgaggaagggcgcgttgtgttcttctgtggagcaggcatttcctaccctgctggtttacctggtttcaaagggttggtagaactaatttaccagaggaacggaacaacactttcagaaattgagcgtgaggttttcgagcgtgggcaatttgacggcacattagatttgctggaacggcgcttaccagggcagcgtatagccgtccgacgcgcgttggaaaaagcccttaagccaaagctccgtcgtaggggcgctattgatactcaggcggcgctgttacgtttagcccgtagccgcgagggtgcccttcgattggtcactaccaactttgaccgtctctttcatgtggcagctaaacgtacaggccaggcttttcaggcctatgtagcgccgatgctgccaattccaaaaaacagccgctgggatggacttgtatacctgcatgggctgttaccggaaaaggcggatgatactgccctgaatcgtctggttgttaccagcggtgactttggcttggcttatctcactgagcgttgggcagctcgctttgtgagtgagttatttcgtaactatgtggtctgcttcgttggctacagcatcaacgacccggtactgcgctacatgatggatgcgcttgcagcagatcggaggctcggtgaagtcacaccacaagtatgggcactgggggagtgtgagccggggcaggagcaccggaaagccatcgagtgggaggccaaaggggtcactcctatcctttacaccgtaccggcgggctccactgatcattcagtgctgcatcaaacgttgcacgcttgggcagatacttatcgagatggtatacagggcaaagaggctatagtcgtcaaacatgctctggcccgcccgcaggacagcactcgtcaggacgatttcgttggtcggatgttgtgggccttgtcagataaatcaggtttaccagcaaaacgctttgcggaactcaatcctgcaccgccgctggattggttattgaaagctttctcggacgaacgatttaaatacagcgatctgccacgcttttgtgtatctccgcatgtcgaaattgacccgaaactccgattcagtctggttcagcgtcctgcgccctatgagctggccccgcagatgtcgctggtttctggatgtgtcagtgctagcaaatgggatgacgtaatgtcccatatagcccgttggctagttcgttatctgggcgaccctaggttgatcatatggattgctgaacgcggcggacaaatacacgaccgttggatgtttctgattgagagcgaactagatcgcttagcagcactgatgcgggagcgtaagacttctgagttagatgaaattctcttgcattcccccctggctattcctggtccacctatgtctactttatggcggcttctgcttagtggtcgtgtgaaatcgccattgcagaacctggatttgtatcgttggcaaaaccgcttaaagaatgaaggcttgacgactacattgcgcttggagttacgcgagttgctttctcccaaggttatgttgaggcggccgtttcgctatagtgaagacgattcgagcagcactgatgaacccttgcgaatcaagcaattggtggattgggagctggtgctgactgctgattacgtacgttcaaccctgttcgaccttgctgacgagtcatggaaatcgtccttgccatacctgttggaagattttcagcagttgttgcgtgatgcactggacttgttgcgggagttgggagagtccgacgatcgtcacgaccgctcgcattgggatttgccgtccatcactccgcactggcagaaccgggggttccgcgattgggtgagcctgattgaattacttcgggattcatggttagccgttcgagccaaagacagcgatcaggcctcgcgcattgctcagaattggtttgagttgccatatcccaccttcaaacgtctggcactgtttgccgcaagccaagacaactgcataccacctgagcggtgggttaattggttgttagaggacggttcatggtggttgtgggccacggatactcggcgagaggtattcagactgtttgttttgcagggacgacatctgacaggaattgcacaagagcgtctggaaactgctatcttggcagggcctccgcgcgagatgtacgaggataatttggaagcagacaggtggcattatttggtggctcattccgtctggttgtgtctagcgaagctcaggggagcgggccttgttttgggagagtctgcggctacacgtttgacggaaatatccacagcatacccaaaatggcaactggcaaccaacgagcgtgatgaattctctcactggatgagcggaaccggtgatccaggcttcgaggagagtatagatgtcgacattgcgccccgtaagtggcaggaattagtgcaatggctcgcaaagcctatgccagaaagactgcctttctatgaggacacttggagtgatgtttgccgtacgcgcttttttcacagtctgtatgcgttacgtaaactatcacaagatgatgtgtggcctgttggtcggtggcgtgaagctctgcagacttgggctgaaccagggatgattatgcgttcgtggcggtacgccgcaccgttggtgcttgacatgcctgacgcagtacttcaggagatttcccacgctgtcacttggtggatggaggaggcttcgaagaccatcctctgccacgaggagattctactggccctttgtcgtcgggttctgatgatagaaacaagcccagagtctagcaccattcgaaacggaattgagacctatgatcctgtttctacggcgatcaatcatcccattgggcatgtcacgcaatcactgatcaccctatggttcaaacagaacccgaatgacaatgatttgcttcctgttgaattgaaaacacttttcaccaaattgtgtaatgtacagatagagctattccgccatggtcgggtgttgctggggtcgcggctgatcgcattttttcgcgtagatcgaccttggaccgaacagtatctattgcccttgtttgcttggagtaatcccgtcgaagcaaaagctgtgtgggaaggcttcctctggtcgccacgcctgtatgaaccgttgctgatagctttcaagtcagattttttggagagcgccaatcactattctgatcttggcgagcaccggcagcaattcgctattttcctgacttatgcagctctgggccctaccgagggatataccgtggaggagttccgaacggcaattagtgctcttccacaagaaggtctggaggtagccgcgcaggcgttataccaggcacttgaaggtgcgggcgatcagcgcgaggagtattggaaaaatcgtgtccagccattttggcaacaggtttggccaaagtcccgcaacttggccaccccacgcatatccgaatcgttgactcgtatggtgattgctgcccgaggtgaatttccggcggctttggcagtggtgcaggactggctgcaaccgctcgaacaccttagctacgacgttcgccttttgctagaatcagatatttgcagccgatatcctgcggacgctctatccctgctgaatgccgtgattgccgaacaacactgggggcctcgagagttggggcaatgcttgcttcaaattgttcaagctgctccacaactggagcaagatgttcgttatcagcgattaaatgaatattctcgaaggcgcagcgtgtga

SEQ ID NO: 8252 - DNA, 216 bp, Escherichia coli
atgtggctactgattttctggctttcatcgccctttaatgtctcttccggtgatgcccgtcagcccacactggcggtgcacagccaggcctttcataccgaacgggcctgccgcgatgcattgcgcgccattaaaaaggagaatgttggcgaattttctctgcggggcgtttgtgtttctgacggaaatacgaaggaggaggctgagagctcatga

SEQ ID NO: 8253 - DNA, 252 bp, Escherichia coli
atgacggatattactgacagacatacacttcgccgtatgtcctggtcggaactcatcacggcaggacaggaagcagaatttcagcatgattacgagcgtgccagaatagtgtggtcattcgccttacatgttgcaacaaccacgattaacaaaaatctggccatagctcatattcgacgctgcgatactttgttgcataaatcaaaggctgtacccggaaacaacccgtgtggttccggtcagcgagtctga

SEQ ID NO: 8254 - DNA, 681 bp, Escherichia coli
atgaattccagtacgctgatatccgtgatgatacggcaacagatatccggtgacggtatgcaggaacatattgattatcagattgagaaatatcagttcagggccaggaatgagtcaccgcgactgatgcgccagtgggaagatgtcatgcgtgaatgccatgataccggagcaggagccagggagcggctgcggattgccttacttaatgttgattatgtgaccagttttgaactgccgtttcgtctgctgttaacccggacaccgcagatgattgacagcgtgcggcgggaatggcagctcagccagaaaaaagtcgtattcaatgagcggcagcggggatgtgtatacagtctgcagaatgacttatccggcgtgccggatagcttcagttacagtcttgcgacgcgaatacggcgggcggacagctatggcatgacgacgcgttgtttcactgatatagccgggcaggttaaagccccgacagcacggctgaaactggcgctggaaagcgggttaattgtcaccgcgctggatggtctgttctggcttggtattcaacgtattgccgcagatgtgcagcggctgcgtcagtccggaatgacaatcatcacccgggatgttgaggtctcagactcgctgaccggaaccacacgggttgtttccgggtacagcctttga

SEQ ID NO: 8255 - DNA, 468 bp, Escherichia coli
atgataaaatatatcttttcactcaccattattttttccgcttctctctgtgccgcacagattcaggggcacgtcatccgcgttcttgatggtgatacgctggaaatattacaggacaaaaagcctgtcagggtccgtctggctaatattgatgcaccggaaaagaaacagccctttggacgctggtcagccactcagctgaaggacctggtggccggaaagcccgtaaccgtgcaatacgcgcagacagacaggtatggccgtattctcggccgggtctataccgctgacggcacagaagcaaatcgctggcaggtccgtaacggcgctgcctgggtgtacccggactacaataatgactatactctcccgccgctccagcgtgatgcccgcgccctgaagcggggattatgggcagataaaaatccggtaccaccatggacctggagaaaacagaataagaaataa

SEQ ID NO: 8256 - DNA, 177 bp, Escherichia coli
atgaacctggttgatgcatttgtcactaaagtgatatccggaccgtatgaagaatacggaaaatggtgggtggatgtagaatatatttcctggggagttccgggtaaaagccggctcatgtttgactcacgggaacaggcacaggaagtgcaggaaggttttcgatttttaacctga

SEQ ID NO: 8257 - DNA, 1344 bp, Escherichia coli
gtgtcttaccaacactcccccacaacagaagacccgatgaacatatggtatatcgttggcaccatatgtctgctctttgcgcttctcatctggctctttttacccgacatcgtctttgccacctgcctgatcctgcacacaatgtgggggatgactgactgggggccttttcaccattttgccgccccccgttataacctgctggccaacaccgccaacaacgctgcaacgatcactttcagccagtggctggatgtcatgtcacagaccgtggggatcctctggctgattctgcttcccatgacgatcggctttctgtggatgtggtttcagcatccggcccagccccgcttcacccgcagaccactgaatatccacacgctgccacatctgttttcatcactgtcaccggcgatcgcccccgttctggctgacggagacagcaacagactcttccacggacaaaaacgtcccgagcgccgtgtcgctctaacccccgaagcctttgtggagcagaacaaccttatccgcaacatgcagctcgatgttgcggccacgcgccagtgctttatggcgcaactgggccagcctctgaccacctggaaagacatggctccacatgaaaaagcactctttgccgtctttggcctgcagttcttccttggggaccggaaatcggctgtttccctgatgaataacctcaacctctcctgcagactcaaaagcaagcgggaccaggggcgtttcagcacgccagtgtattcactggccagaaacgcctttatccgggtcataaaaacagaagacgcacaacagtggctcaggcagcaccgttacgttcgcagtggtcttgtctggctttacgcacatgatttgcgcctgacgccccccaactggctgtggctcaagggcgttgaccggacgctcttctatgcccttcaccgggcaaacaccacaaaaggcttcatcgaaggggccggcgtggtggccgttgcccgggcagaaaatgaagccagccgtctcggcctcccctgcccggaaccctgtgtggaagaggccattgaagggcttcgacgggacatgctggggctgggcctgatatgggacgaacctcagccagatcgcgatcgtaaacgtcagatcaggacccgctggtcactcacggatgacgtgataccccgccgccatgataacgacgaagacactgacactggtgaaaccaccgaaaccaccgaaaccaccgaaaccaccgaaaccaccgaaaccaccgaaaccaccgaaaccaccgaaaccaccgaaaccaccgaaaaacagcatcccgccgacaaggaaaaagaacaatga

SEQ ID NO: 8258 - DNA, 1125 bp, Escherichia coli
atgaccatccactacactgcaacactgaataataaacacctgtccctgaccgccctgtaccctgacggtaatcgcgaggtgattgccatcctgccggtcacagaactgggcgcactgattaaccgtaataacaggctgatgcacctgtccttcagttccccttttcgcgaaataaccgaagcggtgcttgttgataccgttgatgcagaacgtcccggacatcacatcggcagaatgctctcagcgattgatgcctgcctggatgccgaatatgccggaaaaggaaaacatccctcccggaaatatggcttctggcggacactgatgtgtggctttatcgccggaattgctctgccggcgacagttgcaggttaccactggatgaaggcagagcccccttccacgctggcttaccctacatctcaggaatggagagctgaaccagtaaccgacacagagacaccacgcccacatacggaacatcatgttaacagcatcccggcccgcccggctcccacacagcaggaaccttcttctgcccccgctccgacggcagtgacggaagaacaacacgttcaggccgctgaggcccgccgtaatctggccacagtacttaaacgcaacgcagaccgggggatgttcaccattaacctgtccactggtcatgaacgcacgctgtacgccttccttgaccccgcatgcatcaactgccgtctgctggaacccgcgcttaagcaactggcccgggaattcagcgtggtgatttatccggtctccgtgattggcggggagtccagtacaaagcggactgctccgctgctgtgtgaaccggactcacaaaaacgggcgaccggatggcatcagctgtattccgctgacagtggtatggcccccaccggcgatgcaccggccgcacaggatggacagtgtctgaccgccgcacgtgctgccatcgatgtcaataaccaggctttccgccagttcggttttggaggaaccccctgggtgttatcagataccggctggcacctgccgtccggcatcctgaaagacgccacttccgttcgcctcttcctgaaagcaacagatagcgaggagtatcacaatgagccagcaccacgttaa

SEQ ID NO: 8259 - DNA, 2304 bp, Escherichia coli
atgagccagcaccacgttaatcctgacctcatacaccgcacggcctggggaaacccgttgtggaatgcactgcataacctgaacatcactggtctgtgtctggccggcagtatcattacggcgctgatatggccactggcccttcctgtctgcctgctgttcaccctggtcacctccgtgatattcatgctgcaacgctggcgatgccccctgcgtatgcccatgacactcagccttgatgacccctcccaggacagaaaggtcaggagaagcctcttcagcttctggcccaccctgtttcagtatgaagcggatgaaacattccccgcccgggggattttttatgtcggttaccgccgtatcaacgatatcggtcgtgagctctggctgagcatggatgacctcacccggcatgtcatgttttttgccaccaccggtggcggtaaaacagaaaccacctttgcctggctgctcaacccgctctgctggggaagaggctttacctttgttgacggaaaggcacagaacgataccacgaggacaatctggtatctctcccgacgttttggcagggaggatgatatcgaggtcatcaacttcatgaacggcggaaaatcccgcagtgaaatcattcagagcggcgaaaaatcccgcccacagtcaaacacctggaacccgttcgcattcagcaccgaagccttcaccgccgaaaccatgcagtccatgctgccccagaacgttcagggcggtgaatggcagtcacgggcgatagccatgaacaaggccctggtctttggcacaaaattctggtgcgtccgggaaggtaaaaccatgtccctgcagatgttacgggaacatatgacgctggaagggatggcaaaactctattgccgtggccttgatgaccagtggccggaagaagctatcgcaccactgcgaaactacctgcaggatgtcccgggattcgatatgtcactggtgagaacgccgtcagcctggactgaggagccccgtaaacagcatgcttatctctccggtcagttctcggaaacgttcacaacctttgccgaaaccttcggggacgtctttgcggcagatgccggcgacatcgatattcgcgacagtattcacagcgaccgcattctgattgtgatgatccctgcactggacacatcggctcataccacgtcggcactcggtcgtatgttcgtcacccagcagagcatgctcctcgcccgtgacctgggctaccggctggaaggcacagatgcacagaccctggaagtcaaaaaatacaaaggcagcttcccctatatctgtatccttgacgaagtcggtgcctactacacagaccgcattgctgtggaggccacccaggtacgttcactggagttttccctgataatgacggcgcaggatcaggagcgaattgaagggcagacctccgccaccaacaccgccacactgatgcagaacgccggcaccaaattcgccggacgcattgtcagtgacgacaaaacggcaagaacggtgaaaaatgccgccggtgaagaggcacgggccagaatgggcagcctgcagcgccacgatggtgtgatgggtgagtcctgggtggacggtaaccagatcaccatccagatggaaagcaaaatcgacgtgcaggatttgatcagactgaatgccggtgagttctttaccgttttccagggggatgtggtgccgtcagcctctgtgtatattccggacagcgagaaaagttgcgacagtgatccggtggtcatcaaccgctatatttccgttgaagccccccggctggagcgtctccgccgtctcgtccccaggacagtgcagcgcaggctccccacaccggagcatgtcagcagcatcatcggtgtactgacagcaaaaccatcccgtaaacgtcgtaaaaaccgtacagagccttaccgtatcattgatacattccagcgccggttggcaacagcgcagacatcactggatctgcttccgcaatatgatacagatatcgaatcccgggcaaacgaactgtggaaaaaggctgtgcacactatcaataacacaaccagggaagaacgccgggtatgttatatcacactgaatcgtccggaagaggaacactctggtcctgaagatataccttcagtgaaggcgattctgaatactctgctccccctggagatgctgttacctgtaccggatctaactgcatccccgccccataaaaaaaatgtcgctcagacaccatcaggtggaaaacaagagagtcgtaaaaaaagattctga

SEQ ID NO: 8260 - DNA, 294 bp, Escherichia coli
atgtgtattagtagcccggaaacaaactcatggtctgttatttatcgtaaaaattccggagaagatatcaatatcacttccctgacgtttaaaaatagtcttctggcagcccggacactgatggtgcccgaaaactatatgatatgcatactcagaaacggggagagggtcagacgatgggacagagaaatacttgcaggctcaaacagatggtacaagtgttctcccgataatttcgaaatactgggtaagctccccataataaataaagtcacaacactgataaaatcataa

SEQ ID NO: 8261 - DNA, 150 bp, Escherichia coli
atgaattcccagatcctgccagacatgctgattaattttgcccttattaacatcacagacagaaagaacgagggtaccaataccattgatggtaactggcaggccgatgaaagacgccgttaccgggataatgtaagaatctatttttga

SEQ ID NO: 8262 - DNA, 396 bp, Escherichia coli
atgggggtaaagaaaatcgttatgctggctattttagtcagctttgtggcgggatgtgcgccattacatccttcaaattgccataaaactacagccctgggtagttgcagttcaggacgttgggatgatcaggatgaatggggggagcaggcacggggaatcagggatgcaattaatgctaaacttgatgatccgcaaaaatggaaaaggaaaaaatgcaggttgcatatggaattctcccgggatggcacggcgttaaaaatatcaaccagtaatggcgataaaacctattgcgaagcgataaagtcagcagcccataaagctaaattcccggccttcaacaatccggaagtttatagagattttcaaaaatccggctttgacatgcgcggttag

SEQ ID NO: 8263 - DNA, 2712 bp, Escherichia coli
atgaatgccattattccgcacaaaagacgtgacggcaggtcttcctttgaagacctgattgcgtacacgtctgtgcgggatgatgtgcaggaaaatgagctcacagaagacagcgaaatcaagagtgatgtccctcaccgcaaccgtttcagacggcttgttgattatgcaacacgcctgcgtaacgaaaaatttgtctccctgattgatgtgatgaaagacggcagtcagtgggtaaatttctatggcgtaacctgtttccataactgcaattcactggaaacagctgctgaagagatgcagtacaaggcggacaaagctgttttttcccgtaatgatacagaccccgttttccactacattctttcctggcctgcgcatgaaagcccgcgtcctgagcagctttttgactgtgtgcgtcacacactgaaatctcttgaactctcaaaacatcagtacgtggctgccgttcatacggacacggataatctgcatgtgcatgttgccgtgaatcgtgtacatcctgaaactggttatattaactggctttcctggagccaggaaaaactcagccgtgcatgtcgtgaacttgaacttaagcacggattcgcgcctgataatggctgctttgtgcatgcacccggcaaccgtattgtgcgcaaaacagcgctggtacgtgagcgccgtaatgcctggcgacgcgggaaaaagcagacgttcagggaatatattgcgcagatgtcgattgccgggctgcgtgaagagcccgcacaagactggttgtctttgcataaacggctggccagtgatggtctgtatatcacgatgcaggaaggggaactggtggtgaaggatggctgggacagagcgcgggaaggtgttgcactcagttcgttcggaccgtcatggacagctgaaaaactggggcggaaactgggggaatatcagcctgtaccgacagatattttcagtcaggtggggacacccggtcgttatgatccggaagccataaacgttgatatccggccggaaaaagtggcagaaacggagagtctgaaacagtacgcctgccgttattttgccgaacgcttaccggaaatggcgagaaatggtgagctggaaagttgcctggatgtgcacagaactctggcaaaggctggattatggatggggatccagcacgggcatctggtactgcatgatggatttgataaacaacagacaccagtacgtgcagacagtgtgtggccgttaatgacgctggattatatgcaggatctggatggtggatggcagcctgtaccgaaggatatttttactcaggttatacccggagaacgattccggggacgtaatcttggtactcaggctgtcagtgattacgaatggtatcgtatgcggatggggacaggtccacagggagcaataaagcgcgaactgttttctgataaggaaagtctgtgggggtacacgactgttcagtgtgagtcgttgattgaagatatgatcgcgggcgggaatttcagctggcaggcgtgccatgagatgtttgcgcgtaaagggcttatgttgcagaaacagcatcatggtcttgtgattgtggatgcgtttaatcatgagctcacaccagtgaaggccagcagtatccacccggatttgacgttatccagggctgagctgcaggcagggccatttgagattgcaggtgcagatatatttgaacgggtgaagcctgaatgtcgctacaatccggaacttgctgccagcgatgaagtggaacccggcttccggcgcgatcctgtactgcgtcgtgaacgccgtgaagcccgtgcagctgcgcgggaagatttgcgcgcgcgttatcttgcatggaaggagcactggcgtaaacccgacttacgttacggagaacggttacgggaaattcatgctgcctgccgtcggcgcaaggcgtatatccgtgtgcagttccgggatccacaattgcgtaagctgcattaccatattgcggaagtgcagcgtatgcaggcgctgatcaggctgaaggagagtgtgaaggaagagcggttgtcactgattgcggagggtaagtggtatcctttgtcctaccggcagtgggtggagcaacaggcggtacagggagacagagctgcattatcacagttacgtggctgggattatcgtgatcgtcgcaaagacaagcgacgaacaacgaatgccgaccgctgcgtgattctctgtgaaccgggaggaactccactttatgaagacactggcgttctcgaagcccgtctgcagaaagatggcagtgtgcgttttcgtgatcggaggaatggcgagttagtctgtgtggattatggggaccgtgtggtgttctaccatcatcaggacagaaatgaactggtggataagctgaatctgattgctcctgtattgtttgatcgtgagccaggaatgggttttgaaccggaaggctcatatcaacagtttaatgatgtatttgcggaaatggtggcctggcataatgcagctggaataaccggaaatggacactttgtaatcagccgcccggatgtggatttacatcgtcagcgtagtgaacagtactaccacgaatatatcaggcaacagaaaagcatatccggggggcatggcgcatcttatgctccagttcaggataatgagtggacgccaccatcacctggaatgtag

SEQ ID NO: 8264 - DNA, 333 bp, Escherichia coli
atgagtgagaagaaaacccgaacgggcagtgagaacaggaagagaattgtaaaattcacggcgagattcacggaggatgaggctgaaatcgtaagagaaaaagcggagtcaagtggacagacggtttcaacatttatacgaagctcttcactggataaggtggttaactgccgtactgacgaccgtatgattgatgagattatgcgtcttggccgccttcagaagcatctgtttgtggagggaaaacgcactggtgataaggagtatgcagaggttcttgttgccattactgaatatgtcaatgctctgcgaagagacttaatgggacgctga

SEQ ID NO: 8265 - DNA, 336 bp, Escherichia coli
atggcttctaaaaaattttactcagatgatgacatccagctggcaaaagctgccttatcggaattgccggacctcaccgctcaacggaaaacattgcgtgattttcttgatgccattcgtgatgacatcattatcctggtaaggacaaagggttatacactgacagatgttcgtgacacgctcaaaaatgcagggtatgaagtaggagagaaagcacttcgtgacattattcgggaagcagaatcgaaaaaaccatcccgccgttcttcctctaaaacagcacctaaaaagacagattcaggcaggaaagatggcatcgatatgaacaacaattga

SEQ ID NO: 8266 - DNA, 849 bp, Escherichia coli
atgaatcagactttacccactgctgacctgaatactgccggcacgacagatgttattccgtctgtagctatcgaccgcatcatcgcgcagcgtaacgaaggtattgcactgttcatgcaggcgatggaatgcctggcgacagcgcgcaggattctgctcgatgcttccggtgacatttttctctacgggtttgaagactgtgtgactgactccgttcgatgcatggataaaccggaagaagcgaaaaggaatatcacccgtcttgccgaccgtaaaatctgggaccgcctgatggcggatacggggatgtacaccttcatgagttcatgccagcgtgatgagtggaacagccagctgatgagcgacacctgtcctgaaatcaccctggacaatgtactggcaacttttcgccatctgaatgccagcaagatgcagacatttgaacagggactgattgatgtctaccggaaattgtcatgggattacagaaccaataatccctgccgtctgggcaagaaaatcattattgaaaacctgctgtaccgctggagtaacgggcgtgtgacgctggactgcagcggacgggaggcactggatgacctggtacgtcctttttatctgctggaggggcgcaacgttcctgacttccggagcagcatcggggcgcagtatggtgaatttctcgggaacggtgacaatgtcggtaagctgttagaaggggaatattttacggtgcgtggctaccagaaagggaccgtacacattgtctttaagcgtcctgaccttgttgaaaaactgaatgatattattgcacggcattatcctggtgcattgccgccacgagtctga

SEQ ID NO: 8267 - DNA, 252 bp, Escherichia coli
atgaccggctgggaactgcgaatctggcgaaaaagcatgctctggtcacgcgaaaaagcggccagagaatttggcgtgacgcagagaacatggcacgcctgggaaaatgcggaacaggtggatgtcaccgtctggaggaccacccaggcactttcagtccgtgacctgctgcctcacatgcaggggatgcgtaaggcagatatcatcaggcgactggaaaatgaactgggggaaacagcagaggatgtgtga

SEQ ID NO: 8268 - DNA, 183 bp, Escherichia coli
atgacgattgcagaacgtcttatacagaaaggtttcgacgagggttttaaacaaggggctcttgaagtggcgcgggaaatagcctgccggcttcgggatataggctggccgccggaacggattcaggaggtcacgggactttccggtgaagaactgaaaaaactgtttcctgatgagcagtag

SEQ ID NO: 8269 - DNA, 915 bp, Escherichia coli
gtgagtaagaagaaaaacaccacgacgcccacgccgcatgatgctgcgttccggtcgttcctggcgaatcccgacgtcgccagagattttctggaactgcatcttccggcggagtaccggcagttgtgcgacctgtccacgctgaagctggaacccgccacctttgttgagccggacctgcatcagtacgccagcgatatcctctggagcgtgaaaaccaccgggggtgaagatggctatgtttatacgctcatcgagcaccagagcaccgaaaatctgtacatgcctttccgcatgttacgttacagtgtggcggcgatgcagagacatctggagcagcacaaaacgttgccactggtgattcctgtactgttctatcatggtgagcgcagcccgtacccgtacagcatgaactggctggactgttttgagaatccggcacttgcggctaaaatatacacaaagccgtttccgctggttgatatcactgtcgttgatgacaatgaaatcatgaaccatcgccggatggccgcactgacgctgctgatgaagcatatccgccatcgtgacatgatggagctgctggacaaactcccgcaggtcatggtggaaatttcagatgagcaggtgcgtgttctgattcattacatcgttaacgcaggggactctgtatcaccggaatttatgcgggcgctggctgagcgtctgccgcagcatgaggataaactgatgactatcgctgaacgtcttgagcaaaaaggtcgccaggaaggcaggatggaaggacgcatggaaggagcgcttgaaaaagccctggctattgcgtgccagcttcagaaaatggggatgacgccggagcagattaagcaggctaccggactttccgatgacgaactgaagaaaatcactcactga

SEQ ID NO: 8270 - DNA, 390 bp, Escherichia coli
atgaagtcttgttttgatactgacaaagcttttcatatgtcttttgatgaagtcactttcaacgctgacagaattcgctcaaaactggaactattatccgaagaactaatgccccgttgtggtcttgtttatgagctatatcagcgacgtttgagtgctgctattgataattttgtggccacattgccgacagaacaacatctactggtcctggaactggcccgtgaggagtttgattacctttccgcagaagagattgctgaagaaatacgccgtgactcagaacgcggctattgttgtcatggctttgaacgcaattgctgtcctctcggttgtggggatttgggcgatgattgctgcgatgctgctgatttgatggaggaaccgtga

SEQ ID NO: 8271 - DNA, 267 bp, Escherichia coli
atgagaccatcaattatcttcgcaaccgccgagtatgtaaagcgtctgcgtgaagagtgcctgcgggagaacaaacccctgcaccgccatacccgcttcagacgccaggaactggcaccggatgagattaacccggacgtcctggcgatgggcggtcatatcgccagacgctgcagtgagcagaagcgggtacgtatccccgctatgaaagtcagcgaatggggccacctgctccgcgcgcttgaaattgaacgggtctgtcactga

SEQ ID NO: 8272 - DNA, 435 bp, Escherichia coli
atgacagtcagcagcacgatttccgttttttgccgcgacggggtgttccgtaccgtttactgccacctgcacggtgagccgacctggaacggtcgcatcctgcatacccactatgccaccggtcagcaggccgaagccctggttgaacacggtgatatccgttgccttggtccccgttgcgacaaacccgccgggcatacgcttcagaacccggtggacggtgtgacggcttattacggacgtgacagtggtttccggatggacagtgaggcgcgtgagtaccgttctttcagggaggctattgccactgaaagcactgaagaggtgcgcttccattatgtgttcatcgacggctactggaaggtgatgtaccgcacgccggaaggctggaagatgaaagcgctcgcgctggcactgcgtcgctgtccggaatga

SEQ ID NO: 8273 - DNA, 501 bp, Escherichia coli
atgtctgttgttgcacctgctgtatacgttggaacctggcacaaatacaactgtggaagcatcgctggccgctggtttgacctgacaacgtttgatgatgaacgcgactttttcgccgcctgccgtgcccttcaccaggatgaaaccgacccggaactgatgtttcaggattatgagggattcccggggaatatggcctctgaatgccatatcaactgggcctgggttgaaggcttccgccaggcgcgggatgaaggctgcgaagaggcttatcgtctctgggtggaggataccggtgagacggattttgacaccttccgcgatgcctggtggggcgaggctgacagtgaggaggcttttgcggttgagttcgccagtgataccggcctgctggctgacgtgccggagacggtggcgctctattttgactatgaggcgtatgcgcgggatttattcctggactccttcacctttattgacggtcatgtgttccgtcggtga

SEQ ID NO: 8274 - DNA, 597 bp, Escherichia coli
atgatgaaatcagacgaaaaataccaggttcccgcgtggatgcgacctctgttgccgttgctctgcaacaccggggggaacgatccggaagaactgctgaatgatacagaaaccactgccagtgcgaatgttgtccgttatgtactgatagttgctgtgcggtcgcaggttgatctgctgcagcttctgtacaggaaagggctgttgcgcacagagataccaggtggcttttcaccggaagaagcgcaggcactcctggataatctggtgcgcagccatatcagcaaggcgctgtcgggcgagcgaatggcagcccgtgacagaaatgccgatctggcctggattagacagcaactggtcgatgccgcctggtttgtccgtgccacactggaagcgcatgggatgagcgtcggaaatgagagtccccctgctccgccggagacaatgccggacatacagacacgggaactggtgatgttgatcaagcgactggcatcatcgctgaaagcggtgaaaccggacagttgtgtggtgcgtgaagcgcaggactggctgcgcgacagaaaacttgtggatatcacagatattctccggtga

SEQ ID NO: 8275 - DNA, 720 bp, Escherichia coli
atgagcgcacgttcacgggcactgatccccctcagcgcagaacaacaggccgccatgcaggcggtggctgtcacagaacaacgtcgtcgtcagggacgcacactttcagcatggccttatgccaccgctttctttcgctgcctgaatggcagtcgccggatttcgctgaccgatctccgcttttttgcccctgcgctgacgaaggaggaatttcatggcaaccgtctcctgtggctggctgccgtggataaactgattgaaagttttggggaagtctgtgttcttcccctgccatccgatgcggggcaccgtctgttcccgtccgtgccttttcgtgaaggtgagcgtcgtcgtcagaaaaccacgctgacagagcagaaatacagccgccagcgggaacgtgaggcagaacgacgggaactggaataccagacatgttttgctcaggcgcagattgaccttgcgtttcatactcccgccacggtcggaagctggttgtcccgctggtctggtgttgttgaggagcatgatctggaaacgattttctgggggtggtgcgggcgttttccatcactgtcatcatttgaccggtttttctggcaggaggaaccactctggcggctgatttttgaagccggtgaggccggtcgtggtgcaccggtacaggtacgtgcacttgagcagtggatgatcccgaacaagctggagaacgtaatatga

SEQ ID NO: 8276 - DNA, 438 bp, Escherichia coli
atgatgaataccgaactgacactgaatgccctgcagtccatgaatgcccaggaatatgaagaaatccgtgctgcgggaagcgatatgcgccgtaatctcactcacgaggtgatgcgtgaagtggacgcaccggctaactggatgatgaacggagagtatggcagcgagttcgggggctttttccccgtccaggttcgtttcacgccagcccacgaacgtttccacctggcattatgttcgccgggagacgtctctcagctctggatgctggttctggtgaatggtggtggacagcctttcgccgtcgttcaggtgcaacatatcttcacgcctgtcgcgatcagtcacacgctggcgcttgccgcgacactggatgcgcagggatacagtgttaacgacatcatccatatcctgatggcagaaggaggtcaggcatga

SEQ ID NO: 8277 - DNA, 1959 bp, Escherichia coli
atgcctgtaacgaagtgtgaaccagaaaccacccgcaaagcaagccgtaaatctgtaaaaacgcaggaaactgcactgtctgccctgctggcgcagacggaggaagtgagcgtgccgctggattcactgattaaatcaccgctgaatgtgcgcacggtgccgtattctgcggagtccgtcagtgaactggctgattccattaagggagtcggcctgctgcagaatctggttgttcatgccctgcccggtgaccgttacggtgtcgccgcaggtggtcgccgactggcagcactcaacatgctggcagagcgtgacatcattcaggctgactggcctgtccgtgtgaaggtcattccgcaggagctggcgactgccgcatcgatgaccgagaacggtcatcgtcgggatatgcaccctgccgaacagattgccggattccgcgcaatggcgcaggaaggcaaaacgccagcacaaatcggtgatttgctgggctattcaccccgccatgtccagcgaatactgaaactggctgaccttgcgcctgtcatcctcgatgcgctggcagaagaccgcatcaccaccgaacactgtcaggcgctggcgctggagaacgacaccgcgcgtcaggtgcaggtgtttgaagccgcctgtcagtcgggatggggcggtaaaccggaagtgcgggttatccgcaacctgattaccgaaagtgaagtggcggtggcggggaacagtaaattccgcttcgtgggggctgatgccttctcgccagacgaactgcgcaccgatttgttcagcgatgacggggacggttatgtcgaccgcgtggcgctcgatgctgccctgctggaaaaactccaggctgtcgcagagttccttcgggaagccgagggctggggatggtgcgccggacgcatggagcctgtcggtgaatgccgtgaagatgcccgggcataccgcaacctgccggagccggaagcggtgctgacggaggcggaagacgaacgcctgaacgaactgatggcacgttacgacgcgctggaaaaccagtgtgaggaatctgacctgctggcagcagaaatgaagctgattgactgcatggcgaaggtcagggcgtggacgccggagatgcgtgccggaagtggcgtggtggtgtcctggcgttacggtaatgtgtgtatccagcgtggtgtgcagttgcgcagtgaggatgatgtggctgacgacgctgaccgcacggaacaggggctggagagcgcgtcagtggaggaaatcagtctgccgttgctgactaaactgacctcagagcgcacgctggcagtccaggcagcactgatgcagcaaccggacaaatccctggcactgctggcatggacgctctgcctgaatgtgtttgacagcaaagcgcacagtagtcccgccagaattcgcctggcatgtgagcattatgcgctgaccagcgatgcaccgtcggggaaggaaggtgccgcattcatggcgctgatggcagaacactctcgttttgctgccctgctgccggaaggatgggaacgggatatgacgacgttcctgtcactcagccaggaggtgctgttatccctgctcagcttctgtaccgcgtgcagtcttaacggtgtccagacccgcgagtgtggtcacacgtcacgcagtccgcttgactcgctggaaagcgccatcggctttcacatgcgtgactggtggcagccgacaaaagcaaacttcttcggacacctgaaaaagccgcagattatcgcagccctgaatgaggcagggctgtccggtgccgcacgggacgcggagaagatgaagaaaggcgatgcggctgaacatgcagagttccatatgaaagacaaccgctgggtgcctggctggatgtgttcaccacgtccacagacggatgccactgaacgcgccgataacctggctgatgccgcctga

SEQ ID NO: 8278 - DNA, 234 bp, Escherichia coli
atgagcgaatatttcagaatacttcagggactgccggacggctcctttacccgcgaacaggcggaagccgttgccgcacagtaccggaacgtctttatcgaggatgatcagggaacgcattttcgcctggttgtccgtcaggatggcacgttgatctggcgctcctggaattttgaggacggtgccgggtactggatgaaccagtacatcagggatttcgggattcttaagtaa

SEQ ID NO: 8279 - DNA, 441 bp, Escherichia coli
gtggcaaacctgcaggtggctacgtcagaaagctggcgcgacaaacagacgggggaggtgcgggagcagacggaatggcaccgcgtggtgctgttcggcaagctcgcggaagtggcaggtgaatatctgcgcaagggtgcgcaggtctacatcgaaggtcagcttcgcacccgtagctgggaagataacggtatcacccgttacgtcactgaaattcttgttaagaccacgggcaccgtgcagatgctgggacgtgcaccacagcagaacgctcaggcgcaaccgaagcctcagcagaatgggcagccacagagtgctgacgcgacgaaaaaaggtggcgcgaaaacgaaaggccgtggacgtaaggccgcgcagccagagcctcagccgcaaccgccggagggggaggattacgggttttcagacgacatcccgttctga

SEQ ID NO: 8280 - DNA, 531 bp, Escherichia coli
atgcaacactccataaaacaccgcgcttcaacggcgcaccccgacgaggatgaccttgttgataccacgtgcactcataagaacctcctgactgaaagatgtgagataaaccggataccggcgacgggacgttcatgtcccccttcagaggagcgaaagctcctcctgccgtccacttcacaggggtttctccccgcagtggacctttccgatgggggcccgtttaccgcctcacggggcagctgtccgggggcggacgcaaaattttttgccgggttcatggctaaaaattttgtggccggtgcatctcaccctggacagatggaacgggagggggttacgtctgccccccggaaagtccacagcgggaaacaggccgcaggagtggcggcaggagggaggactgctgcgccatcaggcgcagtttcctcacacaccgtcaggtgtgcagggagcgcaggtcacggcgcgacaggggcggcgcgaccggaacggtcgctgcaagccgggttttcacgcatcggaccgtag

SEQ ID NO: 8281 - DNA, 192 bp, Escherichia coli
atgaatatcagcacagaaacccgcgaaattctgcgtaattacagggccgtgattaatgcgcggcgtcgtgaaatggggcagaaaccgctcaccaccgcgcagattgttgatgaaatctgcgattttgtggcgaatcagcaggcggttttcctgggcggtcactacatccttcagggcagcagaaacaggtga

SEQ ID NO: 8282 - DNA, 423 bp, Escherichia coli
atgtactgtactgttaaagaaatcatccgcgatgtactggatacagacgtgccggacagtgaatgcgtttttgccgtggtgctgacccgtggggatgtgcgtcacatagcccaggactggaacctgtcagacgatgagctggaaaccgtcatgcagcggctggacgatgcttttgtatatggcgcatgtgacagagttgtttccgatattgtcaatgaactgatggaagaaaagcgcgccagccgtcatgtgacagtcccggcggtgatgctggaaaaagtgatggcgctggcaggtagtgaaatgaagcgcctgtatgccgtcgggagtgagaacgggggcgacggtgacgcattcgtcagggaggaactcgaagcaatggacgttgtgttgcaggcgctggacggggagacgatgtcatga

SEQ ID NO: 8283 - DNA, 582 bp, Escherichia coli; identical to SEQ ID NO: 7555

SEQ ID NO: 8284 - DNA, 744 bp, Escherichia coli; identical to SEQ ID NO: 7556

SEQ ID NO: 8285 - DNA, 699 bp, Escherichia coli; identical to SEQ ID NO: 7557

SEQ ID NO: 8286 - DNA, 342 bp, Escherichia coli; identical to SEQ ID NO: 7558

SEQ ID NO: 8287 - DNA, 906 bp, Escherichia coli; identical to SEQ ID NO: 6961

SEQ ID NO: 8288 - DNA, 366 bp, Escherichia coli; identical to SEQ ID NO: 7607

SEQ ID NO: 8289 - DNA, 1101 bp, Escherichia coli
atgagtcggaaatacctcattcgtatcactgagctggaaaggctgctctctgagcaggctgaagccctccgtcagagagatctgcaactgagtctggttgaagagacggaggccttcctgcgctctgcactggcacgtgccgaagaaaagatcgaagaggaggagcgggaaatagaatatctgagggcccagatagaaaaactgcgccggatgctgttcggtacccgttctgaaaaactgcagcgtgaggttgaacaggctgaggcccaactgaaacaacgcgaacaggaaagcgatcgttacagtgggcgtgaggatgacccgcaggttccccgccagttgcgacagtcacgtcatcgtcgtccgttaccagcacatcttccccgtgaaatacaccgcctggagcctgaagaaagttgttgcccggagtgtggcagtgagctggattatctgggtgaagtcagtgctgagcagctggaactggtgagtagcgccctgaaagtgatccgcactgttcgggtaaaaaaagcctgtacaaaatgtgactgtatagttgaagcgccagcgccgtcccgcccgatagcgcgcggcatcgcgggctccggattacttgcccgcgtgttaacgggaaaatactgcgaacacctgccactgtatcgtcagagtgaaatctttgcccgacagggtgccgaactgagccgtgcattaatctccaactgggttgacgcgtgctgccagttaatgactccgctaaatgatgccctgtaccgttacgtgatgaacacccgcaaggttcacactgacgacacaccggtaaaagtgctgacaccgggcagaaaaaaggcaaaaacaggacgcatctggacgtatgtccgggatgaccggaatgcgggctcatcagagccaccggcggtctggttcgcctactcaccagacaggcagggaaaacatccggtacaacaccttcgtcccttccggggtatcctgcaggcggatgcattcagcggttacgatcggctgttcagtgccaaacgtgaaggtgatgcacagacagaagttgcgtgctgggtccatgcccggcgaaaaatacacgatgtatga

SEQ ID NO: 8290 - DNA, 2226 bp, Escherichia coli
atgagttttaacgcaaaggatatgacccagggcggtcagattgcgtccatgcgtatccgcatgttcagccagatcgccaatatcatgctttactgcctgtttatttttttctggatactcgttggtctgattttatgggtaaaaataagctggcagacgtttgtgaacggctgtatttactggtggtgtaccacgctggaaggcatgcgggatttaatcaagtcccagccagtatatgagattcagtattacggcaaaaccttccggatgaacgctgcccaggtactgcatgataaatatatgatctggtgcggtgagcagctatggtccgcattcgttctggcgtctgtcgtggccctggttatttgcctgatcaccttctttgttgtctcctggattctggggcgtcagggtaaacaacagagcgaaaatgaagtcacaggtggtcgtcagctgacagacaatccgaaagacgttgcccggatgctgaaaaaagacggcaaggactccgatatccggattggcgacctgccgattatccgggattccgaaatccagaacttctgtctgcacggcacggtcggggccggtaagtcggaggttatccgtcgtctggccaactatgcccgtcagcgcggtgatatggtggtgatttatgaccgttcaggggaatttgttaaaagttactatgatccctccatcgataaaatcctgaatccgctggatgcccgctgtgccgcatgggatttgtggaaggagtgcctgacacagccggattttgataataccgcaaatactctgatccctatgggtacaaaagaggacccgttctggcagggttcaggacgtaccatttttgcggaagcggcgtacctgatgcgtaatgaccccaaccgcagctacagcaaactggtggacacactgctttccatcaaaattgaaaaactgcgtaccttcctgcgtaattcaccggcggccaacctggtggaagagaaaattgagaaaacggcgatttccatccgtgctgtgctgaccaactacgtgaaagccatccgttacctgcaggggattgagcataacggtgagcccttcaccatccgtgactggatgcgtggtgtccgggaagatcagaaaaacggctggctgtttatttcgtcgaacgccgacacccatgcctccctgaagcctgtgatctccatgtggctgtccattgccattcgtggtctgctggcaatgggagaaaaccgtaaccgtcgtgtgtggtttttctgtgatgagttacccacgttacacaaactgccggacctggtggagatcctgccggaagcccgtaagttcggtggctgttatgtgtttggtatccagtcctatgcccagctggaagatatctacggtgagaaagcggcggccacgctgtttgacgtcatgaacacccgtgcttttttccgttccccgagccataagattgcagagttcgctgccggtgagattggtgagaaagagcacctgaaagccagcgagcagtattcctacggtgctgacccggtacgtgacggggtatcgaccggtaaggatatggagcgtcagacactggtcagttattccgacattcagtctctgccggatctgacctgctatgtcactctgcccggaccgtatccggcagtaaaactctccctgaaatatcaggcacgaccgaaggtcgctccggagtttattccgcgtgacatcaacccggaaatggagaaccgtctgagtgccgtacttgctgcaagggaagcagaaggtcgccagatggccagcctcttcgaaccggaggttgcctccggagaaggcgtgactcaggctgaacagccacaacagccacaacagccacaacagccacaacagccacaacagccacaacagccacaacagccacaacagccacaacagccacaacagccagtgtcttctgtcatcaatgataagaagtcagatgcaggtgtgagtgttccggcaggggggatcgagcaggagctgaaaatgaaaccggaagaagagatggaacagcaactgccacccgggatcagtgaatccggtgaagtggtggatatggccgcttatgaggcatggcaacaggaaaatcatccggacatccagcagcagatgcagcgtcgtgaagaggtgaacattaatgtgcaccgggagcgcggggaggatgttgagccgggagatgatttctga

SEQ ID NO: 8291 - DNA, 195 bp, Escherichia coli
gtgattgaatgcgatcatggcaaactgaaacggataatcaacgccacgctgggatttaaatccatgaagacggcttacgccaccatcaaaggtattgaggtgatgcgtgcactacgcaaaggccaggcctcagcattttattatggtgatcccctgggcgaaatgcgcctggtaagcagagtttttgaaatgtaa

SEQ ID NO: 8292 - DNA, 372 bp, Escherichia coli
atgaaccggaaaatatttgcactttttgctctgacagcagggatgcatcttgctgttcatgcttcagaaaatgtgaacacaactgaaaaccgccagttcctgaagcagcaggaaacactgagtcagcagttacgtgaaaagccggacatacagttgcaggcatgggcagagcagcaggtcagggcgaatccccttcagcattccgataaccagtttctcgatgaactggtccgtaaacagcaggctgctcagaaggataaaccacggcactgttgcaaagttagcgatgaggcagccttttgtcttattcaaaggccttacatttcaaaaactctgcttaccaggcgcatttcgcccaggggatcaccataa

SEQ ID NO: 8293 - DNA, 567 bp, Escherichia coli
atggcgggtgatgcactgacattccgtgtggcgtttgtcgttcgctggctgctgtgggtcgtcaggtttgtggttatctggccgctggccacaatggccctgatggctctgtttgttttatggaaggacaacaccacgctggggaaattactggttaaggagattaacttcgtaagacaaacagcacctgccggacagttcccggtcagtgaatgctggttttcttcctctgattcttcaggcagatcagaaatacaggatatctgccattaccgcgcggctgatgctgcagattatgtcagggagactgaccggtcactgatgcaactggtcaccgcattctgggcaacactggcactgatgtatgtctcgctggcagcgatcaccgggaaatatccggtgcgacccggaaaaatgaaatgtgtccgggtgggaaccgcagatgaacatctgaaggaagtttatacggaagatacttctctgtcggaaaaaatcaggaaatgccatgtttatttccctgatgacagggcaaacagaaacaacggagataaaaatgaacatgcgtaa

SEQ ID NO: 8294 - DNA, 1452 bp, Escherichia coli
atggccagtatcaacaccattgtgaaacgcaagcagtacctgtggctggggattgtggttgtcggtacagcctccgcgattggtggggcactgtatctgtctgatgtggacatgtccggtaacggggaaaccgtggctgaacaggagcctgtgccggatatgaccggtgtggtggatacgacctttgatgacaaggtgcgtcagcatgccaccacagagatgcaggtgacggcagcgcagatgcagaagcagtatgaggaaatccgtcgtgaactggatgtcctgaacaaacagcgcggtgatgaccagcgtcgtattgaaaaactgggacaggacaatgccgccctggcagagcaggtaaaagccctgggtgctaatcccgtcacggcgaccggtgagcctgtaccgcagacgccagcctcaccgcccgggccggaaggcgaaccacagccgggaaacacccccgtatccttcccgccgcagggcagcgttgctgttccaccgccgacggcgttttatcccgggaatggtgtcacgccaccaccacaggtgatgtaccagtctgtgccggtgcctaaccggatacagcgtaaggtgtttacccgtaatgagggaaaacagggaccatcgctgccgtacattccgtcaggaagttttgcgaaagccatgctgattgaaggggcggatgccaatgcctcagtcaccggtaatgaatccacggtgccgatgcagctgcgtatcaccggtctggtggaaatgccgaacagcaagacgtatgacgcaacgggatgttttgtggggctggaagcctggggggatgtctccagtgaacgtgctattgttcgcacccgtaatatcagctgcctgaagaatggcaaaaccattgatatgccgattaaggggcatgtcagcttccggggtaaaaacggtatcaagggcgaagtggtgatgcgtaacggcaaaatcctcggctgggcatggggcgcgggatttgttgacggtatcggtcagggaatggagcgcgcctcccagccggctgtcgggctgggtgccacagccgcttacggggccggcgatgtccttaaaatgggtatcggtggcggcgcatcgaaagccgcacagacgctcagtgactactacatcaaacgtgccgaacagtatcacccggtgataccgattggtgcgggcaacgaagtgacagtggtgttccaggacggcttccagctgaaaaccgtggaggaaatggcgctggagcagtcacagagtacagcggaagagggtaacccggaaagccctgtgccgaatcctccctcggcagaaagccacctgaacggttttaacaccgaccagatgctgaagcagctgggcaatctgaatccgcagcagtttatgtccggagacaagaacccgcagggcggggatgccggcaaggagggcggaaatggcgggtga

SEQ ID NO: 8295 - DNA, 228 bp, Escherichia coli
gtgaggaggcgtaacgcgagaggcgggataagcagaacagtctcagtgtatctcgatgaagatacaaataaccgacttattcgggccaaagatcgtagcggtagaagtaaaactatagaggttcagatccgtctcagagatcatctgaaacggtttcctgatttctataatgaagaaatattcagggaggtgatcgaagagaacgagtcaacatttaaagaactttag

SEQ ID NO: 8296 - DNA, 510 bp, Escherichia coli
atgaaaaaatggatgttagccatctgcctgatgtttataaatgagatctgccaagccactgattgctttgatcttgcaggccgggattacaaaatagatcctgatttactgagagcaatatcatggcaagaatcccgttaccgggttaatgccatcggtattaatccggtaacgggatatggcagcggactgatgcaggtagattcccagcattttaacgaactggcccgctacggaattaagccagaacatctgacaacagatccctgcatgaacatttataccggtgcttattatctggcaatagcatttaaaaaatggggcgtcacctgggaggccgttggtgcatacaatgccggattcaggaaaaccgaacgccagaaccagagacgtcttgcctacgcatcagatgtttaccggatttataccgggataaaaagcagtaaaggtatccggcttccggccacgaagaaatcacttccggaaattaacagcgtgcagaacaattaa

SEQ ID NO: 8297 - DNA, 822 bp, Escherichia coli
atgcgattagcttcccgttttggtcggtataattccatccgccgtgaacgtcctttaacggatgatgaattaatgcagttcgtgccttcggtattttccggtgataaacatgagtcccggagtgaacgttatacgtatattccaacaatcaatatcatcaataagttacgtgatgaaggtttccagccattctttgcctgtcagagtcgggttcgtgatttgggacgtcgcgaatacagtaaacatatgttacgtcttcgcagggaagggcatattaacggacaggaagttcctgaaattatcctgcttaattcacatgatggttcatccagttatcagatgatccccggaatttttcgttttgtctgcacaaatggcctggtgtgcggaaataattttggcgaaatccgcgttccacataaaggtgatattgtcgggcaggttatcgagggagcgtatgaagtgctcggtgtctttgataaggtcactgataatatggaggcgatgaaagaaattcatcttaacagtgacgagcaacatttatttggcagagctgcactgatggtcaggtatgaagatgaaaataaaacgccagtgacacctgaacagataattactccccgtcgtcgggaagacaaacagaacgatctctggacaacctggcagcgggttcaggagaatatgataaaaggtggattatcggggcgaagtgcctccgggaaaaataccaggacaagagccattacaggtattgatggtgatataagaatcaacaaggcgttatgggtgattgccgaacagttcagaaagtggaagtcatga

SEQ ID NO: 8298 - DNA, 711 bp, Escherichia coli
atgcaaactacgcgtaccccctactctgtttcctttatggcgacagtgttacttttatttctctttgcttgccatagcaccattgccaacgcagctgtcgcacttggtgcgacgcgggtaatttatccggcaaaccagaaacaggttttattgcctgtcacgaataatgatcctgccagtgtctatctcattcagtcatggatagaaaatgcgggtgaccagaaagatacccagtttgtcattaccccaccgcttttttccatgcaaggtaaaaaagagaatacgcttcggataatcaacgccactaatcatcagttaccaggcgaccgtgaaagcctgttctgggttaatgttaaagctatccctgctatggaaaaagaccagaagaatgagaatacattacagctggcaattattagccgcataaaaatgttttatcgccccacgcatctggcaatggcacctgaagaagcgcctgcaatgcttcggtttcgtcgcagcggtagcatactcactcttattaatccaacgccctacttcattaccgtaacaaatatgaaagcaggaaatagcaatctcccaaacaccatggtgccgccaaaaggtgaagtatcggtggatatcccgcatgctgtaaccggggatatcagttttcagacaatcaatgattacggtgcattaactccgcttattaaggcaaccatgcagtaa

SEQ ID NO: 8299 - DNA, 672 bp, Escherichia coli; identical to SEQ ID NO: 7976

SEQ ID NO: 8300 - DNA, 204 bp, Escherichia coli
atgttccagccgccttgcctcttcctgatcccggtattccctcgcctttttcatcatttctgccgttggctcctgcagtttgtcgagaaactccttagatcgtttagccaccgactgaagggagacactgtccgtcctgccggtattgcgattggtgtaaaccaggcgggtaagggggtctggttaactccttcccttccataa

SEQ ID NO: 8301 - DNA, 732 bp, Escherichia coli
atgcaccgccttgatgaggtggttgatacgctgcttgtcctgcagaagaagcaccggatacggtttgatgtctggcaggtcgttaaacgggatcacgccattatttcgttcttcgatcaggggatgaatcctgcagtgcccagggttgcctactggaccccctttcgttacccgctgctactgaatctggcaagcctgttcgataatgaactggctgaaaaagcgtggtgtgcccgcctcgaagcccatgatggaaggtcctcatctctgttcagtgaggtctgcagtgagctgcttgcgcgcgttcataccctgggggaccgccgttacattgaattgattaccgatgcgttgtcctgggcgatgacccactttgacgaactgggatataactgcaaaaccggtaaacaaaagctgcagatcatgcccaatatggttggatttcagttcgtattgcgcggtatctgttcccgcctgggagcaccaaatcgcaaagccgacatcgttgtggaccagcagtcacagttcaacaccacccagcgggagctgagggagttctattaccagatacgtgagatgccgtgggtacacggtcccggtttaccggtcatggatgtgacgaacatgccggctgaacgctggttttccagtcgggtacaaaaagtgcagggctggagctggttgatatatatctctggatcttcaaacgctttatggaagggaaggagttaa

SEQ ID NO: 8302 - DNA, 153 bp, Escherichia coli
atgccacaacgaacgtttttaatgatgttaatcgtcgtctgtgtgacgatactgtgttttgtctggatggtgagggattcgctttgcggatttcgtatcgagcagggaaatacggtgtttgtggcaacgttagcctacgaagttaaacgttaa

SEQ ID NO: 8303 - DNA, 1587 bp, Escherichia coli
atgtctgaatcccgcagcaattttccagcacgacatggtactccatggaatactgaagagttacagcgtcttctcgtatccatagcggagggcgtctcgctaaaaaaacttactcaaacacatcaacgatcgtccgggggaatacgtggagcaatcaaacgcctgcttccttctgagtttcttgagttcaacgatataaacacggtgaatgatctcagcaattacttcaacaagattcctcgccaagaacacaatagtatcatcaataatttaatatcattgagcactgcaaaaacaattgctcatgataaagttgaaatacaaaagaatagttttaaacaaaataccccactccccctctgccaacccaatacagattttaaagattatatagccgatgaacatgatgtcattatgctaattcattctgctatcgaaagtttatctaataaacgacatcaatatattcttctaatgcgactcggcacagatgattcacctcattctctggcagatattgccgtcaaattaggaatttcccgtgaaagggtaagacaacttcaggaacgagcccttggcttactagctgctaaatctcgctatgaagggacacctggagcttgccttaaagcccttattaactcaataggtaattcaccatatgatatagcagtatggatttatcgtattgttcatcgggatttcgttacatcctctgagttagccgccaaattcatcatttttgccgcaggcattcctaaagcaagacgagatgaaataaaaaattcgctctcattaatatcacaattacaaaagcagaagttacgtgaacgaagagcagaattagcacacgctcacgctcaggaaagagcccgaatcaagaaagaaagagttgagttcatattcagtaaatggctagacaatacacattggccaaaatatatcgcacctcctccccccgtagaacagctatgttcacagagagcggttaatgatactgacatatctggattcttttactctcaaaaattaggtcgtacagtccagtacgaatcagggcttgagtttaaaataatgaatctattagaatgttgcgatcaggttcttttctatcaagaacaaccattttctattccatattgttttaaaaacaaatcaaaaaaatactatccagatttactcattgcgacagttgatggtcggtgcctacttatggaagtgaagccaacagaccgaatgaccttgagtctcacgagaataaaaagtaatgcaggtcgcaaatgggcacatactcgaggatggggatggttggtcattagtgataggttctcgttacgtcagctggaagaacatgccatctcaacaaacacatggaaacttatagaggctgaactgaaaacatcaaggattttagcatggcgtgaaatgatggagttacgtacacgatacgagattcatcgtttagatcttattgcatatatcattcagtctggtgctgaagtggataacttttatcgaattaccccgaaaatatctaataatacatctaaccagagacaaccaaatgagagcgactgtcataattga

SEQ ID NO: 8304 - DNA, 654 bp, Escherichia coli
atgaacacaacaaaaagcagatatccttcctggtgggcatattattaccttatccgcactgcttattttatatttggtgttccttttttattactatgttctctaggatttaccggtatgatgcttacagaaccatatatagaaacagatattcaagcatatctatatacttatggcagttggctcctattaatactcccatcactctggctatatatgaaaaccagagcgaagaaaaagaaagtccagcaggttgttcagcagataaaagaaagcagtccctttgcgccgaccagcgattatgagcaactgtcattctcgaagagttgttatttcgggatcgacattaaaaacggcaccatgctgtatgtgcgtatttatccaaacaatgtgatggatgtaattggtctggatattcacaactttacccgcacggttgctgaggacggcaagctggaaatccacaccacctatgtgagtctgccgatgattcctcttgagatctccggcatctcatcaaggacgctggccaacaccatgcacaccatggctgcacgtggatatgagtacaaggaacgtttcccacagatgatccggtatcgggttaaagagtgggaaaaagttgccggtgttcctgttgcagaagtattttga

SEQ ID NO: 8305 - DNA, 2166 bp, Escherichia coli
gtgaaaatcatacccagagcactgagtgcaggtctggcgctggctgccgtacctgcacaggctttcgtcacctatcaggacattgtgagtgccgccaccaatccggatgacctgtcgcgccaggcactggtcaccatttttggtgatgtggtcacaaatcccctgacagccagcagcaacaccatcattggcaacctgttcatggtgtttaacgcaattatcgccacgatggggatagtctggtttctgtttattggtatccgtcatgctgtccgcacgggacaccagggcagtgtctttaacaacggacgggacgtcgtcggcatactcagtgtcgtgagtggatttttgatgattgtgcccaccgcttccggctggagtctggcgcaactggtcatgctgtggggcgcatccatcatgggcatcggttccgccaatatcatggttcagacagcggcagaaaacattgctgaaggctattcaatgaccgtacagccagtacatgtctccacccgcacggcagcacggggaattctggagatggaactgtgcaaacacgccatgaatacgggcctcgatgactttaaccgtaccgcacgttcatcaacgccgcccatgagcgaatcctcacggacagagaatggcagatataccgtcaccgtctcaaatggcagcgccacctgcgggagtgtgagtctctccgtgaaaggaaacggcagtaacaagcagtccgcgctggcccattttttcaatcccttcattgaaacggaatatcagggggttctgacggcacaacgctccgccatggataccatgctccgtgacctggacagcgcggcgcaggaatttgtgtcggcataccggacccggcgcgacacgggtaacggcaacctgccggatattgaaagccgtattcagaaggcagccaaccggtatgaagaaacggtgcagaaggcgttgccggcagataacgcagaaactgagcgcagggagcagctgaaatcctacctgaccacctacggctgggttgccctgggtgcctggtaccagacctttgccaccgccaaccagcgactggaagacctggccaaccgcgctcctactgtgagtggcgtctcgtcactgggcgaagccggagatacggaattcctgaaggaagtcaagggggcttaccaggcacagctacagaactcagcgtatactcctgcactgggaacagccacctctgccagtgaataccacgcatctaaaactcaagaccctcaatcagcaatcttaaaattgattgggtttaacctaacaagaatgactaactggacagccacttatctgagcggtacaggtaccacaactaatcaactaaatccgttgataaaaatgaaaaacattggcgattacaccatggttacgaccgaaaccatctgggcgggttataccaccgtcagggtactttccacggccggcagcaactccgtttttggtcgactggtcaatgccgtcagcggattatctgacgccgcaaaggcttttctggaagcatccgcaccaccactctacttcctgctgtttttgctgttttgtgccggtttttcgttatccatttacctgccgtttatcccgtttatcttctggatgaccggcatcggcaactggatagtcagcgtactgattggatgtgctgctggccccctgtgggccgccacccatctgggaacaagtcaggaccggggaagccgggccgcttacggttacatctacctgatagacagcatgatcagaccgctgctgatggtgttcgggttcttttttgcatcagtcgccatcgtggccggcggcacaatcctgaatgcgctgtatgctgctgcactgatgaatgtccagataaactctgtgacgggcgtgttcagcatggcgggatttttgatgatttatgcccgcgcctgtaccacactggttgcagccgtttttgcgcttcaggcttatctgcctgaccatgtaattaattttctgggcggacgtgacggtgttaatatgctggggaatatggtttcttcagtcaaagatattattgccggaggtaataccaatatgcgcagaacacctggcgttcgtgaagaaaaactgaaaaatattaatagagatgataaagacggaataaaacaataa

SEQ ID NO: 8306 - DNA, 570 bp, Escherichia coli
atgaaagacgacaacagcatcgacgaaaaaaaaccggccccccgtctccgccgcatcggtgatatagggataaatctgttcgcaccactggccgaaacccgctggatgctgcgcagctgccgccatatgctggaccagcataaaacgcgcctgaagcgcctcatgcccgaccggcaaccggagagtccggtctgtatgacctgggaggaagcggtcagggccagcggactgacggtcgacgaactggaccggcgtctgcgacgtcgcaggatgttctggcggacaggattctggctgatgatgataccggtacttctgctgtgtggtatggcccttgcggccaccgcactgccggtcatcaccctgatacgtatcctggtctgcctgttactgatgagtaccattgcagcactgtgtgcctcaaaagccctgattgcgtcataccgcctctggcagctgaatgaacgtcgggtcagcgaggacgaacagggcacattccccgattacctgcaggcccggcacggctggaaacaggccacatggctggccattacccaccggcagtactga

SEQ ID NO: 8307 - DNA, 1206 bp, Escherichia coli
atgcaaagacaatctgcaaccacactgcttgcactccttgtaggctgtgcggttatccctgccacccatgcctactctgtgaatgttgtgtccagtcagccggtcacccgacagatcatgccggagctggccaccatacagggcatcatggaggaaatggtccgtatgcagacggccaccggcacagccatcacccagaactcagaaaaactggccaccgtcattgcccaggacgggcaggccacccgtcagcagatgatattcagtaatgaaacacaccgcctcgaggaggccaggaaaagcttcagcgtgccggactccatctgcagtgaatccgcgtccggcattgcagcagaaagccgccgggcagcagcgtctgcagcggcacgtctgagtcaggggggaggggtcagcagtaaacccatccgggaacgtctctcccgggctgcggactccccggtccgcgaggcgtatgacagtgccggcatccacgccggttactgcacggaagcggagtatgcccgctttggcggaactgatgtctgccctgccgtgggcgatctgccgggcggagacagccaggtacgatcgctctatcagggcgcaggcacagcagataccccggccgctctcacctgggatcagaaacagattgatgctgcgacggcttatatgaaaaacaccgccagaccgtcagcgggtcgtgccccggggaaaggagaagtgggcacacagaccgggcgcacgtatgtgggcctgcagaatgaatacaacggcatcatcgatgccgcctctcatccgcagctgtcactgattgctgacagtacccctaatgaagccacccgtggggcactgactgaagccctgcagtcaccgtcagctgcggcatattttgaccggaccgcatcatcagaagcccgcacccgtggccacatgagccagcgggagtttgaggcctttgaagccggcagacggtatgccaacaccgactggcagcaggatctgcagggcatggaaggcgataaccttctccgtgagctgctgcgcaccaccgccctgctgaactggcagatgaacgatctgaaagagcagattcgtcagggtaacgttatcgccgggcagcaacttgcgctggccgcacggcagtattacggacagcgccttggcgaactgtcacaggccatgagccaggggagcgtaagatga

SEQ ID NO: 8308 - DNA, 621 bp, Escherichia coli
atgtacagcattcatatcaccccccgctgccggcgtcctgcccggggacaggtcttcctgaaaacactgcgcgtggacggtgacagtttcagcttcaccctgccgtccgcctgcttcacactgcgaccgtcccccaatccccgggtcatttttgccagtgacagacgggctgacggggagatgagtggtattcgcctggccctgcccggagagacaggcacgctgataacaacggccacctggcaggttaacgtgccggagcgaccgccttttgatatacagcatgtcattcactggcttctgcccgcaccactcactgcgctgatgtctgacaacacctggctgtggccggatgtccccggcacaccggcactcacagccggagactggccggtcatggaaagcgacaccccgacactgaaacgcgtgaagcgtcgtaccttcacgctcatcgataaccgtaaccgtcagggatggatcacgcgccgcttccagtgtttcccgctggctccgctgccggaatcactcagtcatcgcgtaccagacatcctgtatcccccgaaaacggagaaaaaagaatgcaaagacaatctgcaaccacactgcttgcactccttgtag

SEQ ID NO: 8309 - DNA, 3045 bp, Escherichia coli
atgaatatcaaccgcattatttttgccattgaagactgtatcagtaccctgtcacggtattccgtttccgcattcttccccgattactgtgatctgcacaccgtcatcggtctggaccagcaggaccgcgaacgccgcccctggctgaaagccccctacattgccaccacaaaacaggggtattacctttccgtctttgaaatcagcggtgccctgaaagaaatggatgaaaacccggaccagacggcccccgggacactggagtcactgattgcagcactggctgagcgaatgaacacggcctggaaaaattccggccacaaaatcagttttgttttcgaacgcgatccggagcgtggaagggatgaaatcgaagccatgctcttaccccagcgaaaatccatcgcacgcacggggatcctgcttcaggacgtcctggatgaaaaagtcaccacactcaccccctggcttgtccgggagcgctgctggctgaccgtctggagctctgaagaactgctgagccggaccgatcgcaaggaccatcagacccgtgtcaggaaactcgctgaacacgctccgccagcccgttttgcgcaggatccctggcgctggacactttccgccctcaaaatacggcatgacgccttactggacacgctggagcaggccctgacacatgattctgatggcctgctgattcgcctgatggatatccatgaagtgggacgggaaatccgccgccagctggagcgcaacagtacaccggcagtatggcagcctcatctgcctgaagatgcccgtcctgccggctggcgacagggcggggatacctctgtattccacgcaccgtcgctgaatctgcagttattcaccacacagcctgaaacacacggcagcctgattcaggccggtgagctctggcacggtatggtcgccattaccctgccccctcagaatctgcggacattcaaccagctggtcagggatgtgccccgtgcaatcccctggcgtatccggatggatctgatgcccgacggcatgaaggcgctgggggtcaagaaaaccctgctgacctacagcagctttattcctcctctccggcccatgtatgactcggtaatgatgctgaatgacatcaacaagcatgatccggtctgtatcatgaccattgttgccaccacatggggaaacagccgggaagtctgtacccgtaaccaggctctcctgaaatctgcgctggaaggctggggggtatgcggcaccaccacaaccttcggtgatccgagacgtgcctgggtgaacacggttctggcagcctcccacagctccggcccgatccccctttacccgcccctttcacacgccctttccctgtttcccctgaacagggcaggctctgtctggcggggacagggaaatctgatgatgcacaccgaagacggctctgcatgggaggtggcgctggcgtcatcacaacagaacaagcacacggagctgacacccggcgcacccggtctgggcaaatcggtactcatcaacgcactgtcggagatccagatagcctcagcccagaagaatctccctttcattgcctatatcgacaagggattcagtgcacagggactggtacagcttatccgtgacagcctgcctgagcagagaaaggacgaagccgtggggatcattctgagtaatgacccggaccacacccgcaacctgtttgatgtgatgtacggggccagaaaacccgtcacaccggaaaagaacttcatggtctccgtcctctgtgcattgtgtgtggataccggcaccggtcagccctgtaatcccggcgacacccggcaaatcatcagcagcctggtggacctggccttccgggaatatggcgagaataaccccagactttaccgcgcaggtacggaacccctggtggatctcgccctggaagagagcggcatcgctgaacaacatgatgccggatggtggaatgccgccacctggtttgaaatcagggacatgctgcatattgcagggaatatccccgccgcccagcgggcacactaccaggccatgcccctgctggctgaaatgtccgccctgctgggacagccgtccatccgggatgtgttcggcaccgttcagcgtgataactcggaagagcggttgctggactacatccgccgtgccctcgatcagggacacagtgactacccgatgatgtccggctgtacccggtttatgctcagccccgacacccgcgtggtcgccgttgatctgaacaatgtggccggggacaagacacctgccggacgtctgcgcaccggtatcatgtatctgctggccgggcagatcgccggcggggattttgtcctgccgcagtatcaggaggaaatacggaaaaatctcgacccacgctaccatgaggtgattttccgccgcattgaacagcttgatcaggaggtcaagaccaaagtctatgacgaactgcacaatgcaaaagggatcaacttcatctgggaagccctggacacccaggagctggagcagcgtaagttcgggatacgcacggtgctgagcacccagctgctgcagcattatcctccggccgtgctcaaatccgccaacaccctgtggctgctgcgttaccgccctgacgaaattccgttcctgcgggataactttggcgtcccggaagtcacactgcggcgcttcctgaaaatgccggaaggggccgcaccggacggcagcggtgtcccggtactggctgtgttccgtgtaaaaaacggcacgctggcccggatcctgaaattcaccctcggtccactggagctgtgggcactgaactcctctcctaaagacagcgccctgcgacgtgcgctgacgcaggaggtggggtcactgcgggcacgccagatcctggccgaacactttccccggggttcagccacctcactgatagaacaccgcgcccgcacacatgacagtgaaaacgtcatccatgagctggcagcagaactcatccgtaagcagggatataacctctga

SEQ ID NO: 8310 - DNA, 1530 bp, Escherichia coli; identical to SEQ ID NO: 7437

SEQ ID NO: 8311 - DNA, 318 bp, Escherichia coli
atgcctgaacgtgaaaactatcagcaagtcacgctacaggcgcgtttagtctctgccttggaaaccttaaacccaaatgtgcccagtgacaccttaatcgaagtagcgaaaatcgttgccacaccgcaaacgcctgtactgattaaaaacaacaaactctttcaccaatatttaatcgaaggtgtgcctgttgaatactcggtaatggagcaagaacaatgggtgaccaagcatactcatgttcgattaattgattttgtgttgtggtcaactaaaactggccaccgcgttagagtttttccagtatcggttttctga

SEQ ID NO: 8312 - DNA, 375 bp, Escherichia coli
atgaaagcactggaaatggcatgggaaacccgtggtaagcccgtcggggtgatgttccacagcgatcaaggcagtcattatacgagcaggcagttccggcagttactgtggcgataccggatcaggcagagtatgagtcggcgtggaaactgctgggataacagcccaatggagcgcttcttcaggagtctgaagaacgaatgggtgccagcgacgggctatgtaagtttcagcgatgcagctcacgccataacggactatatcgttggatattacagcgcactaagaccgcacgaatataatggtgggttaccaccaaacgaatcagaaaaccgatactggaaaaactctaacgcggtggccagttttagttga

SEQ ID NO: 8313 - DNA, 360 bp, Escherichia coli
gtgaaagccgtaattactccctttgtacaaaaagagcttggcgtcgccacattcaaagtggatcaggaagtcagaaagctggtggaggctggccgtaaatttattatggagccggtaccgcgtgagttaatcgagcacatggacgacggcctcgttgtttccgagcaaactatggcaacaaatgaggcgttgcagccgttttttaacagcgatgaactgtttcgccgtattggtggaattgactcgctggtagcgtggttgcgcaggaaagaggggcaggtcaggctgggccatgtcgttctcgccggacagcaggcttaccatgaaagcactggaaatggcatgggaaacccgtggtaa

SEQ ID NO: 8314 - DNA, 180 bp, Escherichia coli
atggcacgcaaatacaacaaattgtcccgtgaagcgttaaagatgcttcttgatggcgtgagtcgccgcgaggtaaagcaatacctggctggtaagcaaattggtgccaggaccgctattgctgtgttatgccgtcaggaaatggttgtgcttaaacagagaatgccgggcagcagataa

SEQ ID NO: 8315 - DNA, 381 bp, Escherichia coli
atgaggcatatatcaccggaagaacttattgcgcttcatgatgcgaatataaaccgctacggcggcctgccgggaatgtctgatccgggcagggcagaggccattatcgggagagttcaggccagagttgcctacgaagagatcaccgaccttttcgaagtctccgccacctacctggtggctacagcgagagggcatatattcaatgatgccaataagcgtaccgcgctaaacagtgcgctgttatttctacgccgtaacggggtgcaggtatttgattcacctgaactggcagaccttaccgtaggggctgcgaccggagagatatctgtatcttctgtcgccgacacgttacgtagattgtatggttctgcggagtag

SEQ ID NO: 8316 - DNA, 222 bp, Escherichia coli
atgcaatccattaacttccgtaccgcgcgcggcaacctttctgaagtgctcaacaatgttgaggccggggaagaggttgaaatcacccgcagaggccgtgagccagcagtaattgtcagcaaggctactttcgaagcctacaaaaaagcggcgctggatgctgaatttgcatccctgtttgacaccctggactccaccaacaaggaactggttaaccgataa

SEQ ID NO: 8317 - DNA, 1557 bp, Escherichia coli
atgacaagtattcaacaacgtgcagagcttcatcgtcaaatctggcaaattgctaacgatgtcaggggttcggtcgatggatgggattttaagcaatacgttctgggcgcacttttctaccgttttatcagcgaaaatttttccagttatattgaagccggtgatgacagtatctgttatgcgaaactggatgacagcgtaattactgatgacattaaagacgatgccatcaaaaccaaaggctacttcatctacccaagccagcttttctgcaacgtagctgcgaaagcaaataccaatgacagattgaatgcagatttaaacagcatcttcgttgctatcgaaagttctgcttacggttatccttcagaagctgacatcaaaggtttgtttgctgatttcgataccaccagtaaccgcctgggtaacaccgttaaagataaaaatgcccgcctggctgcggttctgaaaggggttgaagggttaaaacttggtgacttcaacgaacatcagattgacctgttcggtgatgcctatgagttcctgatttctaactatgcggcaaatgccggtaagtcaggcggtgagttctttacaccgcagcacgtctccaagctgattgcacaactggctatgcacgggcagaccagcgttaacaaaatctacgacccggcagcgggttccggctcactgttgttgcaggcgaaaaaacagtttgataaccatatcatcgaagaaggtttttttggtcaggaaatcaaccatacgacctataacctggcgcgtatgaacatgtttttgcacaacatcaactacgacaagtttgatatcaagctgggcaatacgctgactgaaccgcacttcagagatgaaaaaccgtttgatgccatcgtttctaacccgccgtattcggtgaaatggattggcagcgatgacccgacgctgattaacgatgaacgttttgccccggctggcgttctggcccccaaatccaaagctgactttgcgtttgtattacatgcgctgaactatctttctgccaaaggtcgtgctgcgattgtctgcttcccgggcattttttaccgtggcggcgcggagcagaaaatccgtcagtatctggttgacaataactatgtcgaaaccgtgatttcactcgcaccgaacctgttctttggcaccaccattgccgtcaatattctggtgttgtctaaacataaaacggataccaaagttcagtttattgatgccagcgaactattcaaaaaagagaccaacaacaatatcctgaccgatgcccatatcgaacagattatgcaggtatttgccagcaaggaagatgttgctcatctggcgaaatctgtcgcgtttgagaccgttgtcgctaatgactataacctgtcggtgagctgctatgtagaagcgaaagataaccgcgaaattatcaatattgctgagctaaatgcagagcttaaaactacggtcagcaaaatcgaccagttgcgtaaagatattgatgcgattgtggctgaaattgaaggctgcgaggtgcagaaatga

SEQ ID NO: 8318 - DNA, 1272 bp, Escherichia coli
atgagcgagttgagttatctggaaaaattgctggatggggttgaggttgagtggaaaacccttgaggatatttctataaagatatcatctggaggaacccctaaaactggcgtatcagaattttatgatggcgacattccttggttgagaactcaagaagtaaacttttgtgatatatgggataccgaggtaaaaataactgagtctggagttaaaaactctagtgcaaaatggataccaaagaattgtgtcattgttgctatgtatggggcaactgtggggaaaatcggcataaacaaaattccaatgacaacaaatcaagcgtgcgcaaatattcaacttaatgaagaagttgctcattatagatatgtatttcacttcttgtgtagccaatacacatatatcaaatcccttggaacagggtcccagacaaacataaatgcgcagattgtcaaaaatattaagatccccatcccctgcccggataatccggaaaagtcccttgccatccagtctgaaatcgttcggattctggataagtttactgcacttaccgctgagcttaccgctgagcttaacatgcgtaaaaaacagtacaactactatcgcgaccaattgctgacttttaaagaaggtgaggttgagtggaaagctttgggggaaattggtgagtttattcgtggaaaacgttttactaaagcagattatgtagaagatggtggtatcagtgtaatccattatggtgagatatatacacgatatggtgtttacacaactcattcgttatcacaggttagagctgatatggcagcgtcattacgctatgccaaacatggagatgtcgtgataactgacgtgggggagactgtagaagacgttggtaaagcagtggcatggcttggggatgacgatatcgctattcatgatcactgttatgcttttcgacattctttgaatccaaaatttatttcctattacatgcaaaccgattcgtttatttctgaaaaagcaaagtatgtagccagaacaaaagttaatacactactcattaatggtttttcaaaaattatgattccggttccatatcctaaagatcacgaaaaatcacttaaggaacaagctcgcattgtcgaaatactcgacaaattcgacacactgactaactccatcaccgaaggtcttccgcgtgaaatcgagttgcgccagaaacaatacgaatactaccgtgatttactgttcagtttcccaaaacctgaaactgtcagtaattaa

SEQ ID NO: 8319 - DNA, 3117 bp, Escherichia coli
atgactcatcagacacacaccattgctgaatccaataactttatcgtccttgataagtacatcaaagctgagccaacaggcgacagctaccagagcgaatcggacctggaacgagaactgattcaggacctgcggaatcagggctatgaatttatatccgtaaaatcacagtcggcgatgctggccaatgttcgggaacagcttcagaacctcaatggtgtggtgtttaatgacagcgagtggcggcgtttcacggagcagtatctggataacccgagcgatggcattctggataagacccgtaaaatccatatcgactatatttgcgactttatttttgatgacgagcgtcttgagaacatctatttgatagataaaaagaatctcatgcgcaataaggtgcagattatccagcagtttgaacagacgggttctcatgctaaccgttatgacgtcacgatcctggttaatggtttaccgctggtgcaaatcgaactaaaaaaacgcggggtggcgattcgtgaggctttcaaccagatacatcgttacagtaaagagagttttaacagcgaaaattccctgtttaagtatctgcaactgtttgtcatttctaacggcaccgatacccgttattttgccaacacgacaaagcgcgataaaaacagttttgacttcaccatgaattgggcaaaatcagacaacacgctgattaaagacctcaaagactttaccgctacctttttccagaaacatactctgctgaatgttctggtgaactacagcgtttttgacagtagccagacgctactggtgatgcgaccgtaccagattgccgccactgagcgtatcttatggaaaatcaacagctcctataaagcgaaaaactggtctacccccgaaagtggtggctttatctggcacactaccggttctggtaaaaccctgaccagctttaaagccgcgcgtctggcaacagaactggactttattgataaagtcttctttgtggtcgacaggaaagacctcgattaccagaccatgaaggaatatcagcgtttttcgccagacagtgtcaatggatcggaaaataccgcaggtcttaaacgaaatctggataaggatgataacaaaattatcgtcaccactattcagaaactcaataacctgatgaaagcagaaagcgacctgcctgtatacaatcagcaagtggtgtttatatttgatgaatgccaccgcagccagtttggagaagcgcagaaaaacctgaagaagaaattcaaacgctattatcagtttggttttaccggtacccctattttcccggaaaacgccttaggctcagaaacaaccgccagcgtatttggtcgtgaattgcattcatatgttattaccgatgcgattcgagatgaaaaagtgcttaaattcaaggtggactacaacgatgtgcggccacagtttaagtctttagagacagaaaccgacgagaaaaaactgagtgcggctgaaaatcagcaggcgtttcttcatcccatgcgtatacaggaaattacgcaatatattctgaataatttccgccagaaaactcaccgtaccttccctggctcaaaaggttttaatgctatgttggcagtgagcagcgtggatgccgcgaaagcctattatgcgacgtttaaacggttacaagaagaagccgctaataaatcggctacctataaaccgctgcgtattgcgacaatcttctcctttgccgccaatgaagaacaaaatgccattggtgagatttccgatgaaacttttgataccagcgcaatggacagcagtgctaaagagtttctggacgctgcaattcgtgaatataacagccattttaaaactaactttagcaccgacagtaacggttttcagaactactatcgtgatttagcccagcgggttaaaaatcaggatatcgatctgctaattgtcgtggggatgttcttaaccggcttcgatgctccaacattgaacacgctattcgtcgataaaaacttacgttttcacggcctgatgcaggcattttcccgcaccaaccgcatttatgacgccactaaaaccttcggtaatatcgtcactttccgggatctggaacgctcaactattgatgccataacgctgtttggtgacaaaaacaccaaaaatgtagtgttagaaaagagttatgcagagtatatggaaggctttactgatgctgctactggtgaagctaagcgcggctttatggcagtagttgcagaactggaacaacggttccctgaccctgccagtattgaaagtgaaaaagagaagaaagacttcgtaaaactgtttggtgaatacctgcgtaccgagaacatcctgcaaaactatgatgaatttgccacgctgaaagccctgcaacaaatcgatcttagcgatcctgttgcagtagaaaaattcaaagcagaacattatgtggatgatgaaaagctcgctgaattgcaaacaattcgtctccctgctgatcgcaagattcaggattatcgttctgcctataacgatattcgcgactggcagcgccgtgagaaagaagctgagaaaaaagagaaatcaaccactgactgggatgacgtggtttttgaggtcgatttgctgaagtctcaggaaataaacctggattatatccttggactgattttcgaacataacagacaaaataaaggcaagggcgaaatgatcgaagaggtcaaacgcttaattcgttcaagcctggggaaccgggcgaaagagggcctggtggtcgattttattcagcaaacgaacctggatgatttaccagacaaagccagcatcattgacgcgttctttacctttgctcaacacgaacagctacgtgaagcagaagcgttgattaaagaagaaaatctcaatgaagaggcggcgaaacgctatattcgcacgtctttaaaacgcgaatacgccaccgaaaatggcacagaattaaacgagacattaccaaaacttagtccgttaaacccgcaatataaaacgaaaaaacaggcagttttccagaaaatcgtctcgtttattgagaagtttaaaggcgtaggcggaaaaatatag

SEQ ID NO: 8320 - DNA, 273 bp, Escherichia coli; identical to SEQ ID NO: 8089

SEQ ID NO: 8321 - DNA, 873 bp, Escherichia coli
atgaatccgtctgatgccattgaggcaattgaaaaaccgctctcctccctgccttactcgctttcccgtcacatcctggaacatctgcgcaaactcacccgtcacgagcccgtgattggcattatgggtaaaagcggggccggtaaatcttcactctgtaatgccctgtttcagggggaggtcacaccggtcagtgatgttcacgccggcacccgggaagtgcagcgcttccgtctgagtggtcacggttacagcatggttatcactgacctgcccggggtgggcgagagccgggacagggatgcagagtatgaagccctgtaccgtgacattctgcctgaactggacctggtgctgtggctgattaaagccgatgaccgggccctgtctgtggatgagtatttctggcgacacatcctgcagtgcggacatcagcaggtgctgtttgtggtgacacaggccgacaaaacggagccctgccatgaatgggatatggccggcattcagccctctcccgcacaggcacagaacattcgcgaaaaaacggaggcggtattccgtctgttccggcctgtacatccggttgtggccgtatcggcccgcaccggctgggaagtggatacgctggtcagtgcgctcatgacagcgcttcccgaccatgccgccagtcccctgatgacccgcctgcaggacgagctgcgcacggaatctgtccgcgctcaggcccgtgagcagtttaccggtgcggtggaccggatatttgacacagcggagagcgtctgtgttgcctctgttgcacgcacggttctgcgtgccgtccgtgacacagtggtctctgttgcccgcgcggtatggaactggatcttcttctga

SEQ ID NO: 8322 - DNA, 573 bp, Escherichia coli; identical to SEQ ID NO: 7694

SEQ ID NO: 8323 - DNA, 858 bp, Escherichia coli
gtgactgatcttcaccaaacgtattaccgccaggtaaagaacccgaatccggtgttcacaccccgtgaaggtgccggaacgttgaagttctgcgaaaaactgatggaaaaagcggtgggcttcagctcccgttttgatttcgctattcatgtggcgcatgcccgttcgcgtggtctgcgtcgacgcatgccaccggtgctgcgtcgacgggctattgatgcgctgctgcaggggctgtgtttccattatgacccgctggccaaccgcgtccagtgttccatcaccacgctggccattgagtgcggactggcgacagagtccggtgcaggaaaattctccatcacccgggccacccgggccctgacgttcctgtcagagctgggactgattacttaccagacggaatatgacccgcttatcgggtgctacattccgaccgatatcacgttcacactggcgctgtttgccgcccttgatgtgtctgaggatgcagtggcagctgcgcgccgcagccgtgtggtatgggaaaacaaacagcgcaaaaagcaggggctggataccctgggtatggatgaactgatagcgaaagcctggcgttttgtgcgtgagcgtttccgcagttaccaaacagagcttaagtcccggggaataaagcgtgcccgtgcgcgtcgtgatgcgaacaggaaacgtcaggatatcgtcaccctggtgaaacgacagctgacgcgtgaaatctcggaagggcgcttcactgccaatcgtgaggcggtaaaacgcgaagtggagcgtcgtgtgaaggagcgcatgattctgtcacgtaaccgcaattacagccgcctggccacagcttccccctga

SEQ ID NO: 8324 - DNA, 255 bp, Escherichia coli
atgtcgcagacagaaaatacagtgacttcctcatctggcgcaaaacgagcatacagaaaggggaatccgctttctgatgcagagaaacaaagattatcagtggcccgtaaaagagcttcgttcaaggaagtaaaagtatttctcgaaccaaagtataaggccatgctcatgcaaatgtgtaatgaagatggcctgacccaggctgaagttctgaccgcactgataaaaagtgaagcgcaaaaacgatgcatgtga

SEQ ID NO: 8325 - DNA, 303 bp, Escherichia coli; identical to SEQ ID NO: 6057

SEQ ID NO: 8326 - DNA, 1344 bp, Escherichia coli
atgaaaatgggaaaaattgcagttactcctaataatgataaagcagccagccactctaaagatgaaaatttagccacaaatacaattaagaaaaacgtaaaacctaaatatggcgatgcggcatttttagagtacactcgactaatagttaaccacccgaattattttggaatgccagatccctttggggaaaaaggtgagattcaatgggaagctccatcaaatagggcatcggggaaatttaaacacactcatcaacggcgctatgaatggtggaaaaataaagccagaagtattgggatagaccctgacactgaaaaagcatggattagtaaaacagctaaactaattcatccacttggagttaaaccatgcaagaaatgcggtaaagaaatggaattatcttactcctacccaaatgagcatttcttttctcgggttaggaaacttaattatatagatgagacttttgagctatctcaaaatgaacacatagttgatttgttgactcgtttagatgatagatttggtgaaagaatatatttagatttaccacatttattttctacaaaatccatcacgattccagatatttcaagcaatctcgaagcatggattgagtatctaaaagaacaatacatacctcaagaatcacgtatgcttagccctggagccatggcaaatcctccagatcgttttgatggatttcattcatttaaccgctgttgtcgctctattgctgataaaggaaggaccaaagaaaatcttaaatcttatgttactgacagaagagttttcgaatattgggtggatggtgattgggtagctgcagacaggctaatgggccaagttagaacaaataatatatttattaacgaggaatgtttgaatgccggaaatggtggtttacatccaactccttgccaagcagatcacattggcccaatctcactagggttttcccatcgcccacaatttcaactactttgcaaatcatgtaatagtgccaaaaacaatcgtatgtatttaagtgatataatctctttattagaagctgagaatgaaggtcatacggttatttcatggttcgcagaagaagtatggaatcgactaaaacactctgtagatgatagtgaaaaagccttaagactaagtaaaatactacgtgataatagacatacatatatgaatcttcttaaaaaaataatggatgaaggttattatactttccttgcaagtcttttacatcttgaggtagccaattataacccaatatttgagggattatgcatttcaaatcatttaacctgtctcttatacacatctccgagcccacgagactaa

SEQ ID NO: 8327 - DNA, 873 bp, Escherichia coli
atgaatccgtctgatgccattgaggcaattgaaaaaccgctctcctccctgccttactcgctttcccgtcacatcctggaacatctgcgcaaactcaccagtcacgaacccgtgattggcattatgggtaaaagcggggccggtaaatcctcactctgtaatgcactgtttcagggggaggtcaccccggtcagtgatgttcacgccggcacccgggaagtacggcgcttccgtctgagtggccatggtcacagcatggttatcactgacctgcccggggtgggcgagagccggaacagggatgcagagtatgaagccctgtaccgtgacattctgcctgaacttgacctggtactgtggctgattaaagccgatgaccgtgccctgtctgtggatgagtatttctggcgacacatcctgcaccggggacatcagcaggtgctgtttgtggtgacgcaggccgacaaaacggagccctgccatgaatgggatatggccggcattcagccttctcccgcacaggcacagaacattcgggagaaaacggaggcggtattccgtctgttccggcccgtacatccggttgtggccgtatcggcccgcaccggctgggaactggatacgctggtcagtgcgctcatgacagcacttcccgaccatgccgccagtcccctgatgacccgcctgcaggacgagctgcgcacggaatctgtccggtctcaggcccgtgaacagtttaccggtgcggtggaccggatatttgacacggcggagagcgtctgtattgcctctgttgcacgcacggttctgcgtgccgtccgtgacacggtggtctctgttgcccgcgctgtatggaactggattttcttctga

SEQ ID NO: 8328 - DNA, 603 bp, Escherichia coli
atgaaacaacagtatcagacccgttacgaactgctccacgaaagctaccagaaatggctgaccggcttcacccggcacgccgtatcctggggcgtgtgtcatccgaatatctactacttccataatctgacgcccgggtgggtgtcattcaatggtgaaaaaccggagattgccatcgtaccccagagcctgcaccggctgatttatggccctgacaaacgggccacgccgcccctggatgatgatctgatagtgaatttatgcaccagtgaacatctgctggttcatcatccgatgctggaaggcattctcctgtctgaatgtgaacgtctgaggcagcgttctctggcaaataaactgattagcctcttccgtcagtttggtggcacggagttgcgcctcaaactggtctggctttgctggcttgatttaatgaccggaaacagccttgaagactggaaagagaacctgaaacggaaatcagaaaaagagctggaggaatggatcatcaaccgtcagaggcagagcgcagcactgacggatctgatggatcagtacgtgctcctggcataccgcacaacggttgacgataaccgcaactga

SEQ ID NO: 8329 - DNA, 207 bp, Escherichia coli
atgaccaccccagtttcactgatggatgaccagatggtcgacatggcatttatcactcaactgaacggcctgacagataagtggttttacaggctcatcagggatggggcctttccggctcccatcaagctgggccgcagctcccgctggctgaaaagtgaagtggaagcctggctacaggcgcgtattgcacagccccgcccgtaa

SEQ ID NO: 8330 - DNA, 570 bp, Escherichia coli; identical to SEQ ID NO: 5077

SEQ ID NO: 8331 - DNA, 201 bp, Escherichia coli; identical to SEQ ID NO: 5078

SEQ ID NO: 8332 - DNA, 423 bp, Escherichia coli
atgtactgtactgttaaagaaattatccgcgaagtgctggatacagacgtgccggacagtgaatgcgtttttgccgtagtgctgacccgtggggatgtgcgtcacatagcccaggactggagtctgacagacgatgagctggaaaccgtcatgcagcggctggacgatgcctttgaatatggtgcggatgtcagcgttgttcacggcgttgttcgtgaactgatggaagaaaagcgcgccagccgtcaggtgacagtcccggcggtgatgctggaaaaagtgatggcgctggcaggcagtgaaatgaagcgcctgtatgccgtcgggagtgagaacgggggcgacggtgacgcattcgtcagggaggaacgcgaagcaatggacgttgtgttacaggcgctggacggggagacgatgtcatga

SEQ ID NO: 8333 - DNA, 480 bp, Escherichia coli
atgccactgctggataagctgcgtaagctgtacggggtcggaccggtatgcagtgaactacatattgccccgtcaacgtattaccactgtcagcaacagcgacatcatcctgataaacgcagtgcccgtgcgcagcgcgatgactggctgaagaaagagatactgcgcgtatacgatgggaatcatcaggtatacggtgtgcgtaaagtctggcgtcagttgttacgggaaggaatcagggtagccagatgtacagtggcgcgcctcatggcggttatgggacttgccggtgttctccggggtaaaaaggtccgcactaccgtcagccggaaagccgttgccgcaggcgaccgcgtaaaccgtcagtttgtggcagaacgttctgaccagttgtgggtggctgattttacttacggtgtgcccggagttcagggcgggcatggatgcttaaatgaaccgcgagtctgtctggaatattga

SEQ ID NO: 8334 - DNA, 1524 bp, Escherichia coli
ttgataatcagcgaaatgcaacgcaagcttgccacatgggcagccaccgatccgtccctacggattcaacggctgctgcgtctgataacacaaccagaatggctggctgaagcggcgcggatcacgctttcatcaaagggggcccatacccccggcgttgatggcgtgaacaaaacaatgctacaggccagactggctgttgagctgcaaatcctcagggatgaattactctcaggccactaccagcccttgcccgccagacgggtttacatccctaaaagcaacggcaaactgcgaccactgggtatccccgcgttgcgggatcgtattgttcagcgggccatgctgatggcgatggagccgatatgggagagtgattttcatacgctctcatatggcttccggcctgagcgcagtgtccaccacgcgatccgcacggtgaaattacagctcacagactgtggtgaaacccggggacgctgggtgattgaaggcgacctgtccagttacttcgacaccgtacatcatcgactgctgatgaaggctgtacgccgcaggatcagtgacgcacgtttcatgactctgctgtggaaaaccatcaaggcgggacatatcgatgtcggtctctttcgggcggccagtgaaggtgtgccacagggcggtgttatatcgccgctattatcgaacatcatgctgaatgagttcgatcaatacctgcatgagcgctacctgagcgggaaagccagaaaagatcggtggtactggaataacagtatccaacggggccgaagtacggcggtcagagaaaactggcagtggaaacccgcggtggcgtactgccgctatgccgatgattttgtcctcatcgtcaaaggcaccaaagcacaggcggaagccatcagggaggagtgtcggggtgtgctcgaaggcagtctgaaactcaggctgaacatggataagactaaaatcacccatgttaatgacggctttatctttctggggcacaggatcattcgcaaacgcagtcgttatggcgagatgcgagtggtctcaacgatcccgcaggagaaagccagaaacttcgccgcatcgctgacagcactgttatcaggcaactacagtgaaagcaaagtcgatatggctgaacaactcaaccgaaaactgaaaggctgggccatgttctatcagttcgttgattttaaggccaaagtcttcagttatatcgaccgtgtcgtgttctggaagctggctcactggctggcccgcaaataccgtacaggtatcgcttccctgatgaggtggtggtgtaaatcaccgaaaccgggtcagagcaaaacgtgggttttatttggtaaaaccaatcacggcaagctcagcggcgaaatactgtactggttggtggggcaaggcaagaagctgttccgctggcggctacccgaaggtaatccctatctgaggacggagaccagaaacacgtatacatcgcgctttacagaagtggcaatggcgttcgccagcatttaa

SEQ ID NO: 8335 - DNA, 357 bp, Escherichia coli; identical to SEQ ID NO: 6160

SEQ ID NO: 8336 - DNA, 348 bp, Escherichia coli
ttgatcccattaccatcagggacaaagatctggctggtcgctggcatcaccgatatgagaaacggcttcaacggcctggcggcaaaggtgcagacgacgctgaaagacgatccgatgtcaggtcacgtttttatcttccgtgggcgtaatggcagtcaggtaaagctcctctggtctaccggcgatggactgtgtctgctgaccaaacggctggagcgcggccgcttcgcctggccgtcagcccgggatggcaaagtgttcctcacaccggcacagctggcgatgctccttgaaggtatcgactggcggcagcctaaaagactgcttacgtccctgactatgttgtaa

SEQ ID NO: 8337 - DNA, 1092 bp, Escherichia coli
atgcgcctggagaagaaaatacatgtattttccagcaattatgcgctgtaccacagcatgagccaacgggttatggctgttctggagtcgctttctcccgcagttgagccctactcaattgatgaaatgttcattgatttgcgggggataaatcattgcatctctccggagatttttggtcatcagctcagggaacaggtaaagagctggacaggactcaccatgggggtgggcattgcgcctacaaaaacgctggctaaaagtgcccagtgggcaacaaagcaatggccacagttttccggtgtggtcgcgctgacggcagaaaaccgtaatcggatcttgaagctactggggttgcagccagttggtgaggtctggggagtaggacgcagactgacggaaaagctgaatgcgctgggtattaacacagcactgcagctggcgcaggctaacacggcattcatccggaaaaacttcagcgtcattcttgagcgtacggtacgcgaactcaacggcgagtcctgcatatctctggaagaagcaccgccggcaaaacagcagattgtctgtagtcgcagttttggtgaacgaatcacagacaaagatgccatgcaccaggctgttgttcagtatgcagagcgggccgcagagaaactacgtggggagcgtcagtattgccggcaggtgacgacatttgtacggacatccccctttgcagtaaaagaaccctgttacagcaatgccgctgtggaaaagcttccattgcccacacaggacagccgggacattattgccgccgcatgcagagccttaaaccatgtctggcgtgaaggataccgctatatgaaggcaggagtcatgctggctgatttcacaccatcgggtatagcgcagccgggattatttgatgaaatccagccccgtaaaaacagtgaaaagttaatgaaaacactcgatgaactgaaccagtcgggaaaagggaaagtgtggtttgcggggcgaggaaccgcccctgaatggcaaatgaaacgggaaatgctctcgccttcgtatacaacacaatggactgagatccccattgcttcattctga

SEQ ID NO: 8338 - DNA, 1425 bp, Escherichia coli
gtgcctaaatttacacgtcgtgatataaccagtgacgactattacattaaatatcattacacccctttttctgaattaattgactttaacgtaacggccagtaccagtcgcggtaatcaaaagtatcgtgatggctcgctgtatactttctacaaaacctcagcgcaaaatcgttctgacgcgctggatatcaacaataccagccggttcactgtcgcggacaatgacctggagtttatgctgggcagcaaactgatgcgtacccgctatgaccggaccattcactcagcggcgggcgacccgaaagcgaatcaggaatcgatcgagaacaatccgttcgcaccctccggccagcaggatatttcagcgctgtataccgggctgaaggttacgcgcggcatctgggaggcagatttcaatctcaactacacacgtaacaggatcacagggtacaagcccgcctgcgattcacgcgttatctgcgtgccacagggtagctacgatattgacgataaagagggtggcttcaacccttcagttcagctttctgctcaggtaacaccatggcttcagccgttcattggctacagcaaatccatgcgcgccccgaacatccaggagatgttcttctctaattcaggaggcgcatccatgaacccattcctgaagcctgaacgtgcagaaacctggcaggcgggttttaacattgataccagagatttactggtcgaacaggatgccctgcgctttaaggctctggcgtaccgcagcaggatccagaactacatctacagcgagtcttatctggtttgttctggaggtcgtaaatgcagtctgcctgaggtgattggcaatggctgggagggcattagcgatgaatacagcgacaatatgtacatctacgttaactcggcaagcgacgttatcgcaaagggcttcgaactggagatggattatgatgcaggttttgcttttggccgactctctttcagccagcagcaaacagaccagccaacctccatcgccagcacccactttggcgcaggggatataaccgaactgcccagaaaatacatgacgctggatactggtgttcgcttcttcgataacgcgttgaccctgggcactatcataaaatacacaggcaaggctcgtcgcctgtcgcctgattttgagcaggacgaacataccggcgcaataatcaaacaggatttgccgcagatcccaacgattatcgatctctatggtacttacgagtacaaccgcaacctgacactgaaactttcggtacaaaacctgatgaacagagattattcggaggcgctgaataagctcaacatgatgccaggtcttggtgacgagacccacccagccaattccgcgcgtggcagaacatggatatttggcggggacattcgtttctga

SEQ ID NO: 8339 - DNA, 1428 bp, Escherichia coli
atgtccatacgtttagaaggttatatgcaaacaacacaacaaaatgcgccactgaagcgcacaatgaaaacgcgtcacctgattatgctttccttgggcggcgtgattggcacaggattattcttcaataccgggtacatcatttccaccactggagcggcgggaacgctgctggcctatctgattggtgcgctggtggtctggctggttatgcagtgtctgggcgagctgtcggtcgcgatgccggagaccggagcgtttcacgtttatgccgcgcgctatcttggtccggctaccgggtataccgtggcctggctttactggctgacctggaccgtggcgctgggttcgagctttaccgccgctggattctgtatgcagtactggtttccacaggtgccggtatgggtctggtgcgtggtgttctgcgcgattatttttggtctgaatgttatctccacgcgcttttttgccgaaggggagttctggttctcgctggtcaaagtggtcactatcatcgcctttatcatcctcggtggggcggcgattttcggctttattccgatgcaggatggctcgcccgcgccggggctgagtaatatcacggcagaaggctggttcccgcacggtggcttaccgattttgatgactatggtggcagtgaactttgctttttcgggtaccgagcttatcggcattgccgccggtgaaacggaaaacccgcgcaaagttatcccggtagcgattcgtactaccatcgcgcgactgattattttctttatcggcaccgtgtttgtgctggcagcgctgatcccgatgcagcaggcgggcgtggagaaaagcccgtttgtgctggtatttgagaaagtagggatcccgtacgccgctgatatttttaacttcgtgatcctgacggctattctttctgcagcgaactccgggttatatgcctccgggcgcatgctgtggtcgttgtcgaatgaacgtacgctaccggcctgttttgcgcgagtaacgaaaaacggcgtgccactgacggcgctgtcggtcagtatgctcggtggtgtgctggcgctgttttccagcgtggtggccccggacacggtatttgttgcgctgtcggcaatctccgggtttgcggtggtagcggtgtggctgagtatctgcgcctcgcattttgtttttcgtcgccgtcatctgcaacaaggtaaggcattgagtgaattacattatcgcgcgccgtggtatccgctggtgccagtattaggttttgtgctgtgcctggtggcctgtgttgggctggcattcgatccagcgcagagaattgcgttgtggtgcgggttaccgtttgttgcgttgtgctatggtgcttatttccttactcaaccccgaaacgcaaaacaggagccagaacatgtcgcagaataa

SEQ ID NO: 8340 - DNA, 933 bp, Escherichia coli
atgtcgcagaataatccgttacgcgctcttcttgataaacaggatatcctgctgctggatggcgcgatggcgacggagctggaagcgcgagggtgtaacttagccgacagcctgtggtcagccaaagtgctggtagaaaacccggagcttatccgcgaagtgcatcttgattactaccgggcgggggcgcaatgcgcgatcactgccagctatcaggcgacgccggcgggcttcgccgcgcgaggtctggatgaagcgcagtcgaaagcgctgattggcaaaagcgtggagctggcgcgtaaagcccgtgaagcgtatctggcagagaacccgcaggcgggaacgcttctggtggcgggatccgtcgggccttacggcgcgtatctggcggatggctctgaataccgtggcgattatcattgtagcgttgaggcatttcaggcgtttcatcgcccgcgcgtggaagccttgctggatgccggggccgatctgctggcctgcgaaaccctgccgaatttttccgagattgaggcgttggccgagctgttgaccgcatatccgcgtgcgcgggcgtggttctcatttaccctgcgcgacagcgaacacctgagcgacggtacgccgctgcgtgacgtggttgcgttgctggcgggttatccgcaggtggtggcgctaggcattaactgtattgcgctggaaaacaccaccgctgcgttgcagcatttacacggtttaacggtgctgccgctggtggtgtatccgaactcgggcgagcattacgatgccgtgagcaaaacctggcatcatcacggtgaacattgcgcgcagctggcggattatctgccgcagtggcaggccgctggcgcacggttgattggcgggtgctgtcgcaccacgcctgcggatatcgccgcgttaaaagcgcgaagctga

SEQ ID NO: 8341 - DNA, 234 bp, Escherichia coli
atggtcggtgtgcgcccggaagcgatcacgctcagcgatcgcggcgaagagagccagcgctgcgtgatccgccatgtcgcctatatggggccgcagtatgaagtgacggtggaatggcacgggcaggagatattattgcaggtcaacgctacgcgtctgcaaccggacgtcggcgagcagtattatcttgaaatccatccgtacggcatgtttgttctggcggatgcggcataa

SEQ ID NO: 8342 - DNA, 270 bp, Escherichia coli
gtgaagctggcttttagtggtccaagggtttctggtcataatgaggagttagataccagcggggggacaggtactgcgattgtagttcaggctgcaggtaaaaacgtttctttcgatggcacagaaggtgatgctaataccctgaaagatggtgataatgtgctgcattatactgcgattgttaagaagtcgtcagccaataatgcccaagtcactgagggtgctttttctgcagtcgcaaccggtgatgctgccaacttactgatttag

SEQ ID NO: 8343 - DNA, 915 bp, Escherichia coli
atggcatacgtctcctcttgttatgcacagacgttgtggttatgttctgaagaaatacttaagagatccgtcttttatttgttcgcatttctttgccttattggcattataagtattcttttacagaagactgagattatacatgataaaagtatgattctttttcctgaaccatcagcatttgcattggtttttatacctatcttttcattttgtttatactatacaagagggggggggctactattgctctatatattatctttgggtattgcgttaggtatccagaatttaacaatgttggtaggcattgtgattagtgtttttgtgatgaaaaaaataactataaggcaaactattgttatacttttgggggcatggattttttccatgatattaagtgatttagacatttcttactatacatcgcggcttgattttaaaaatactacgaacctatcagtgcttgtatatctttcaggaattgaaagagctttcttgaattttattacaagttatggtcttggtattggttttcaacaaatgggagtgaatggggagataggaatatatcaacaaattttagctgaacttgatgcccctatgttaaatatatacgatggctcatttatttcttctaagttaatatctgagtttggggttattggtgcattaatgtgtattttctattttttttatttttcccgattttatctgcgtttcaaaaaaagtaagagatattcaccgcagtatattttagcatatagcttctacatgtgtttcttcatccctctttttatacgtggtgctggttatataaacccctatgtgtttatgttattttcatcaatatttttgtgcaaatatcacgctaaaaatatcttgatgaaatctaatgtccagatagctatataa

SEQ ID NO: 8344 - DNA, 996 bp, Escherichia coli
atggcgaccacagtaatagctgcctttaacgaatttatgaaagataccgtgaatctcaaaaaggcagataccgatgacgcgcgtgcaagtcgcgactggcttatcggtaagatgaatgattttgagaaggacgataaatttccggtgagttttccagcgatccatattgcctttggctcctttgccagaagaaccaaaatccgtccgcttgatgatatcgatctgatgtttggcttaaccgggcaaggtgccacctataccatcctgagtgaccggataactgtaacctcctccggagaggggtcacgtctgcacagttaccgccattccggagctgacaccgtctgctccgtcagaattctgaatgcctttaaaaaccgcctgcaggacattgcccagtacgcccaggctgatatcaggcgtaaccaggaagctgtcacgctgaaactggtcagcaaggactggaattttgacatcgtcccctgctttattaccagcgaagatgcctttggacggacttactacctgatccccgatggcaacggccactggaagtttaccgacccccgtaaagacagggacagagtcactactatcaatgtgcagaataacggcaatgtgctcaatgtcatcagagcagtcaaatactggcagcggcgaccgacgatgccatccatgagttcctacctgctggaaacgctgattctggactattacgctggcaggacatcctgctcatcgtttgttgacatggagctggaagcgcttttccgccaccttggtcaatccgtgcggtactctgtcaacgatcccaaaggcatacagggtgatatcaactcactttcagccgaggcacgtaaggcgatatcggacagatgttatctcgatgcgcaaaaggtatcggaggcgagatggtttgaaaataataaagagtatgaaaaatccatcaataaatggcgcgatgtgttcgggccattctttcctgtttacgggtga

SEQ ID NO: 8345 - DNA, 894 bp, Escherichia coli
atggatttactgtatgcgcaggcccgtgtctacgacagggtaaaaaactggaacagactgaattttctcttcagcatcatcgtaccgctcctgctttctttcgttaccgtatacaaccggagccgggaatttgtcgattcagagttgttgtcttcgctgttggggttatatggactcctggtgcttacctttaacattgttatcagtggacacatctcggctctgcgcaggaaggcagcctcaatccaggaaatgtacgactgccgggtacttggcatccggcgtaatgaactgaaggtggaggagatcccacgggatgacatcatccgggaagctgcatattttagagacagcccggaaaaagcacgaaagcgatttggcgaagaggggtggtacgtcagtaaggtgtatgacgcgccgcaggccgtaatggcgctcctttgccacggaaaaaatctcggctgggacaaatcgctcagggaggttctgcacgtattttatctttccgcttttattgtctcgcctgtcgcgatgcttgtttacggcatcgtcatgaaatccgggctgaatgagatcctcttctatgtggtgttcacactgccggtcatccgctatttcttgcttcagtttctggataatcgcagcagtatgaaaagaagcgagaagctgaaaaagtacgttgagaaggaattatccggcataagggtgtccggaagggcagaagaagagcaactggcttatacgctccggaatatccaagatgagatgtttacctaccgggcctcatgtccgcccgtacccaacggtattcagctgataatgaagcccaaaaatgaacgaatttatgttgattactttgaaacaaatctgaaggagctgcaccttcagaagtaa

SEQ ID NO: 8346 - DNA, 471 bp, Escherichia coli
gtgcccaatgtcctgacaaactttctgctgagattcctgcgtctgagggaacagcccccccacaagcccctgtgccacctgacaggaactgaggttcatactgttaatgtcacttgccattttctgcaggaagtcttttgcggtttttatttccggcaccgttgtctgcagggcaaggtcaaaaaagtaaccggcagcattgctcataatctgcttaacaaaacgctgcaactgatcgccattaataaaactgaacgagccgagataggcgtcgatgccgccacatccggcattgatatccggcagcgtcatggaaatcagctggatatttttgacctgggtgcgggcatacagggagccaccataggcatacccggcggcctgcccctgccagacgcccggctgtgtggtattggaggcgaagcccagcttgttaaagaactgattcatatcgctgttcacatccgctga

SEQ ID NO: 8347 - DNA, 627 bp, Escherichia coli
atgctgcatgaactctggctgcagagtggtactggccagcgtcgctgggaaggattaccggatgaggtcagggaaaccatcaccgggcatttcaccgcaaaaagaggtgactggtgtggcttctggagtgacgaggatgtatcggtgtggtggaaccgtctgtgtgacaatgtactgccggaaaaaaccatgccgtttgacctgctgacggttctgcccacccgcctggatgttgaagtgaatggctttaacggtggtgttctgaacggtgttccttctgcgtatcactggtatacggaacagtatggcgtgaagtggcctgtggggtatgaggtgaatatcagccgtcagggagaaaacttcattcaagtggatttcgacacgccgtggtgtcagccggaaagcaacgttgttgcagaattaagccgccgtttcggctgcacgctggagcactggtacgccgaacagggctgcaatttctgtggctggcagcgatatgagcgtggagagcttgttgatgtgctgtggggggaactggaatggtcttccccgacagatgatgatgagctgccggaagtcaccgcgccggagtggatagtcgacaaggtggcgcattacgggggatga

SEQ ID NO: 8348 - DNA, 969 bp, Escherichia coli
atgtgcgaactcgatattttacacgactctctttaccaattctgccccgaattacacttaaaacgactcaacagcttaacgttggcttgccacgcattacttgactgtaaaactctcactcttaccgaacttggccgtaacctgccaaccaaagcgagaacaaaacataacatcaaacgaatcgaccgattgttaggtaatcgtcacctccacaaagagcgactcgctgtataccgttggcatgctagctttatctgttcgggcaatacgatgcccattgtacttgttgactggtctgatatccgtgagcaaaaacggcttatggtattgcgagcttcagtcgcactacacggtcgttctgttactctttatgagaaagcgttcccgctttcagagcaatgttcaaagaaagctcatgaccaatttctagccgaccttgcgagcattctaccgagtaacaccacaccgctcattgtcagtgatgctggctttaaagtgccatggtataaatccgttgagaagctgggttggtactggttaagtcgagtaagaggaaaagtacaatatgcaggcctaggagcggaaaactggaaacctatcagcaacttacatgatatgtcatctagtcactcaaagactttaggctataagaggctgactaaaagcaatccaatctcatgccaaattctattgtataaatctcgctctaaaggccgaaaaaatcagcgctcgacacggactcattgtcaccacccgtcacctaaaatctactcagcgtcggcaaaggagccatgggttctagcaactaacttacctgttgaaattcgaacacccaaacaacttgttaatatctattcgaagcgaatgcagattgaagaaaccttccgagacttgaaaagtcctgcctacggactaggcctacgccatagccgaacgagcagctcagagcgttttgatatcatgctctga

SEQ ID NO: 8349 - DNA, 825 bp, Escherichia coli
atgtgcgaactcgatattttacacgactctctttaccaattctgccccgaattacacttaaaacgactcaacagcttaacgttggcttgccacgcattacttgactgtaaaactctcactcttaccgaacttggccgtaacctgccaaccaaagcgagaacaaaacataacatcaaacgaatcgaccgattgttaggtaatcgtcacctccacaaagagcgactcgctgtataccgttggcatgctagctttatctgttcgggcaatacgatgcccattgtacttgttgactggtctgatattcgtgagcaaaaacgacttatggtattgcgagcttcagtcgcactacacggtcgttctgttactctttatgagaaagcgttcccgctttcagagcaatgttcaaagaaagctcatgaccaatttctagccgaccttgcgagcattctaccgagtaacaccacaccgctcattgtcagtgatgctggctttaaagtgccatggtataaatccgttgagaagctgggttggtactggttaagtcgagtaagaggaaaagtacaatatgcagacctaggagcggaaaactggaaacctatcagcaacttacatgatatgtcatctagtcactcaaagactttaggctataagaggctgactaaaagcaatccaatctcatgccaaattctattgtataaatctcgctctaaaggccgaaaaaatcagcgctcgacacggactcattgtcaccacccgtcacctaaaatctactcagcgtcggcaaaggagccatgggttctagcaacggcactgttgcaaagttag

SEQ ID NO: 8350 - DNA, 435 bp, Escherichia coli; identical to SEQ ID NO: 4023

SEQ ID NO: 8351 - DNA, 237 bp, Escherichia coli
atggttgcctccggagcagtttgcggtgatgcctttcccgggaatggattgccagtgcggggactgtggagcttaattccggtgttggtggcctttccattgattttatgccaacagccccctgtgactgacaggctgcctcgtcattccattcgtatctccagtaacagggggttgtattgtattttattgtaccggttcaggtgtgcgtttcccggcgcgtctgcaccggcttaa

SEQ ID NO: 8352 - DNA, 348 bp, Escherichia coli
atgatcccgttaccttccgggaccaaaatttggctggttgccggtatcaccgatatgagaaatggcttcaacggcctggctgcgaaagtacaaacggcgctgaaagacgatcccatgtccggccatgttttcattttccggggccgcagcggcagtcaggttaaactgctgtggtccaccggtgacggactgtgcctcctgaccaaacggctggagcgtgggcgcttcgcctggccgtcagcccgtgatggcaaagtgttccttacgcaggcgcagctggcgatgctgctggaaggtatcgactggcgacagcccaagcggctgctgacctccctgaccatgctgtaa

SEQ ID NO: 8353 - DNA, 477 bp, Escherichia coli
atgtttattgattcagaaaaacgactgaaacaactttcagatgaggcaaagaaaaacaccgaggatctcgaagaagcaaagaagaattcaaggtttacacaggtatccccaaaaggttgggaacgcgttcgagagctgctgaaggatagccaaggcatatcagcactgaagctgtactcatttttagcggagcatatcgatcctacgtgtggcgctgtcgttgcggatcagcaattcctagctgaaaaacttggagttagcagaagcacaattattcgttggctcaattacttagaatcaaaaaatgcattagttagaatccccgttgctggtaaggtttgtgcgtatgccctcgatccacatgaagtctggaagggatacaacactacgaaaaaccatgcagcatttgtcactaaaacactggtcaacaaagacggtgatattcagcgccgaatcatggccatgttttcaaattga

SEQ ID NO: 8354 - DNA, 1023 bp, Escherichia coli
atggtcacttttgagacagttatggaaattaaaatcctgcacaagcagggaatgagtagccgggcgattgccagagaactggggatctcccgcaatacggttaaacgttatttgcaggcaaaatctgagccgccaaaatatacgccgcgacctgctgttgcttcactcctggatgaataccgggattatattcgtcaacgcatcgccgatgctcatccttacaaaatcccggcaacggtaatcgctcgcgagatcagagaccagggatatcgtggcggaatgaccattctcaggggattcattcgttctctctcggttcctcaggagcaggagcctgccgttcggttcgaaactgaacccggacgacagatgcaggttgactggggcactatgcgtaatggccgctcaccgcttcacgtgttcgttgctgttctcggatacagccgaatgttgtacatcgaattcactgacaatatgcgttatgacacgctggaaacctgccatcgtaatgcgttccgcttctttggtggtgtgccgcgcgaagtgttgtatgacaatatgaaaactgtggttctgcaacgtgacgcatatcagaccggtcagcaccggttccatccttcgctgtggcagttcggcaaggagatgggcttctctccccgactgtgtcgccccttcagggcacagactaaaggtaaggtggaacggatggtgcagtacacccgtaacagtttttacatcccactaatgactcgcctgcgcccgatggggatcactgtcgatgttgaaacagccaaccgccacggtctgcgctggctgcacgatgtcgctaaccaacgaaagcatgaaacaatccaggcacgtccctgcgatcgctggctcgaagagcagcagtccatgctggcactgcctccggagaaaaaagagtatgacgtgcatcttgatgaaaatctggtgaacttcgacaaacaccccctgcatcatccactctccatctacgactcattctgcagaggagtggcgtga

SEQ ID NO: 8355 - DNA, 852 bp, Escherichia coli
gtgaaagtactcaacgagctaaggcagttttatcctcttgatgagcttctcagggctgcggagataccgcgcagtacgttttattatcatctaaaggctctcagcaagcctgacaagtatgcggacgttaaaaagcgtattagtgagatttatcacgagaatagaggccgatacggataccgtagggtaacgctgtctcttcatcgagaaggaaaacagattaaccataaagctgttcagcgcctgatgggaaccctctcacttaaagcagcgattaaggtcaagcgataccgctcttacagaggagaggtagggcaaaccgcccctaatgttctccaaagagatttcaaggctacgcggccaaacgagaagtgggttaccgatgttactgaatttgcagtcaatgggcgcaagctgtatttgtctccagtaatagatctcttcaacaacgaagttatttcttacagcctttcggaaagaccagtgatgaacatggttgagaatatgctcgatcaggcattcaaaaagcttaatcctcacgagcatcctgttctgcactctgaccagggatggcagtatcgtatgagaagatatcaaaatatccttaaagaacatggtattaaacaaagcatgtccagaaaaggcaattgtctggataatgctgtggtggagtgtttctttggaaccttaaagtcggagtgtttttatcttgatgagttcagtaatataagcgaactgaaggatgctgttacggaatatattgaatactacaacagcagaagaattagcctgaaattaaaaggtctgactccaattgaatatcggaatcagacctatatgcctcgtgtttaa

SEQ ID NO: 8356 - DNA, 462 bp, Escherichia coli
atgctcaatacactcactgaccagatacatttccaccgacgaaaaacgtgctccccggttcacgatggcatcgagcaccacgggcaggttttcgtcatcttcatcgagccagcaggggtgatcgctttccttcacgaccaggcgaaagcggcgcgtctggcgggtcagcaacgtctgaccggtggtggtcagcgccgcacggatacgccgcgcatcttctgccacctggtaacagatgcttcgtaccgcatcgtgcaccgcatcaagaacagccctgatttcgtcttcggtcagccattctccggcatacgggaaagacacctgcgttccgtctgccggaagtaccggcagcgactgccactgactgccggacagtaccagttccgccccggttccggtcagtctctgaatggcggaggccaggagcggcggcagtacgccgccgtgacggttgataagtaa

SEQ ID NO: 8357 - DNA, 435 bp, Escherichia coli
atgtacggaacatgcgaaacgctatgccgggagctggcagcaaagtatccgggagacgcgccgctgatgctggttatctggtccccggaagagattcaggcactggctgacggtatggaaatttctctgaccgatcatgaaatcaggaccgtcctggcgcgcatggaggacatcccggaagaccagcggactgaatccggtatttcttccgccgcggtgatggagattatcagcaacgtgagcgaaaaccgccaggtgaccgtccctgctgaactgctggcgtccctgattcagaccgctgaacaggcactgtggaaacgtgagtgggccgcccgtgataacggcctcgccgtcccggaatgcgttacccgccgtcaggcggtggttaatcaggcccgcaccctgctgaaaaacaacacacacgaaaacaactga

SEQ ID NO: 8358 - DNA, 222 bp, Escherichia coli
atgaactatgccggacacgaaaaacttcgcgccgacgtggcggaggtggccaacaccatgtgtgaccttcgggccaggctgaacgatatggagcatcgctgtcgctttgattccgatgtgcttgttgaacgcctgacacgccagacgctgtatcgcgccaatcgcctgtttatggaggcgtataccgaaattctggaactggattcctgcttcaaagattga

SEQ ID NO: 8359 - DNA, 462 bp, Escherichia coli
atgctcaatacactcactgaccagatacatttccaccgacgaaaaacgagcgccccggttcaggatggcatcgagcaccacgggcaggttttcgtcgtcttcatcgagccagcaggggtgatcgctttccttcacaaccaggcgaaagcggcgcgtctggcgggtcagcaacgtctgaccggttgtggtcagcgccgccctgatacgccgcgcatcttctgccacctggtaacagatgctgcgtaccgcatcgtgcaccgcatcaagaactgccctgatttcgtcttcggtcagccattctccggcatacgggaaagacacctgcgttccgtctgccggaagtaccggcagcgactgccactgactgccggacagaacaagttccgccccggttccggtcagtttctgaatggcagaggccaggagcggcggcagtacgccgccgtgacggttgataagtaa

SEQ ID NO: 8360 - DNA, 222 bp, Escherichia coli
atgaactatgccggacacgaaaaacttcgcgccgacgtggcggaggtggccaacaccatgtgtgaccttcgggccaggctgaacgatatggagcatcgctgtcgctttgattccgatgtgcttgttgaacgcctgacacgccagacgctgtatcgcgccaatcgcctgttcatggaagcgtataccgaaattctggaactggattcctgcttcaaagattga

SEQ ID NO: 8361 - DNA, 327 bp, Escherichia coli
atggcgaagcccttccgcacccacgctgaagtccacggtctgcgtttccagcagttccgttttaatcagccacagcccggcgcggtgtgcctgcccccggctggtacagccaaaggcatccatcttcgtgacgttacgaccgtaacgggcaatggcctgcgtatcttcaacaagctctgtcgccgtctcccagccgttgttcgggtcaatccagttcacctcaacggcattatggcggtccttcagggcgctgaagctgtagcggaacggcgcgccatcatccggcatcaccacattactgcggttataggtccacaccttatctga

SEQ ID NO: 8362 - DNA, 306 bp, Escherichia coli; identical to SEQ ID NO: 7670

SEQ ID NO: 8363 - DNA, 603 bp, Escherichia coli
atgtggtgtgaccggaacagagaacgtcacaccgtcagcagcagcggcggcaaccgcctccccaatccaggtcctgaccgttctgtccgtcacttcccagatccgcgctttctctgtccttcctgtgcgacggttacgccgctccatgggtattttcagtgttgccaccatcgtctgcagctggctgacgtaccaggagtcagagagcggaaccagccggtgagtctgctgaccggcgggcattctccccgccgtcctggcagctttttcggtccgttgtttcagggtcgcaagctgcacaaacggatacggaggcgcaagcgaaaaatccccccgcgtcagcgccagtgcttcattaatgcgtgctccggtgttccacagtgtggccagcagcatcttgcggtgcagatccgggacgtaatggagcagggcactcacttccggagccagcagatattttggcagttcatcatggaccatcgacatctggcgaagtgccagagctgccggataatcaatggcaacaggcagcgatgcaggctgcccggcagaatacactgccggtaccatgactgcagactggctgtgtataacggagcctga

SEQ ID NO: 8364 - DNA, 474 bp, Escherichia coli
gtgtctttcccgtatgccggagaatggctgaccgaagacgaaatcagggcagttcttgatgcggtgcacgatgcggtacgcagtgtcagttgccgggtggcagaagatgcgcggcgtatcagggcggcgctgaccacaaccggtcagacgttgctgacccgccagacgcgccgctttcgcctggttgtgaaggaaagcgatcacccctgctggctcgatgaagacgacgaaaacctgcccgtggtgctcgatgccatcctgaaccggggcgctcgtttttcgtcggtggaaatgtatctggtcagtgagtgtgtggagcatatcctgtccagtgggctggcctgcgatgtgctgcgtatacctgatgaaccgtcccgtcgctggtttgaccgggatattctgcgggaggtggtcctggaagcccggactgaaatccgcagcatggcggatgcactggcgaaaatccggaaatga

SEQ ID NO: 8365 - DNA, 474 bp, Escherichia coli
gtgtctttcccgtatgccggagaatggctgaccgaagacgaaatcagggctgttcttgatgcggtgcacgatgcggtacgaagcatctgttaccaggtggcagaagatgcgcggcgtatccgtgcggcgctgaccaccaccggtcagacgttgctgacccgccagacgcgccgctttcgcctggtcgtgaaggaaagcgatcacccctgctggctcgatgaagatgacgaaaacctgcccgtggtgctcgatgccatcgtgaaccggggagcacgtttttcgtcggtggaaatgtatctggtcagtgagtgtattgagcatatcctgtccagtgggctggcctgcgatgtgctgcgtataccggatgaaccgccccgccgctggtttgaccgtggtgttctgcgggaggtggtccgggaagcccggaccgaaatccgcagcatggcggatgccctggcaaaaatccggaaatga

SEQ ID NO: 8366 - DNA, 351 bp, Escherichia coli; identical to SEQ ID NO: 6245

SEQ ID NO: 8367 - DNA, 228 bp, Escherichia coli; identical to SEQ ID NO: 7763

SEQ ID NO: 8368 - DNA, 819 bp, Escherichia coli; identical to SEQ ID NO: 6059

SEQ ID NO: 8369 - DNA, 141 bp, Escherichia coli
atgctgagtacgctttgttacaacctgatgatgacatgcggtatccattccatggacagccagatgctcaatgggcatgggatatccatgcaacttcaggggattgatattgccgaaaagccaggcaagaatattcactaa

SEQ ID NO: 8370 - DNA, 246 bp, Escherichia coli; identical to SEQ ID NO: 4533

SEQ ID NO: 8371 - DNA, 486 bp, Escherichia coli; identical to SEQ ID NO: 7756

SEQ ID NO: 8372 - DNA, 426 bp, Escherichia coli
atgcaatatgcgaaacctgtcactctgaacgttgaagagtgcgaccgtctgtcttttctgccttacctgtttggcctggattttctgtatgccgaagcgtctgtatacgcgctggcgaaaaaaatgatgccggaatatgaaggcggattctggcacttcatccgcctgccggacggtggcggttacatgatgccggatggcgaccgtttccacatggtgaacggtgcaaactggtttgaccgtaccgtgagtgctgatgccgcaggcatcatccttacctcccttgtgattaaccgccagttgtggctgtaccacgacagcggggatgcagggttgacacacctgtacaggatgcgtgatgcgcagttgtggagccacatcgaatttcaccccgaatgcaacgcgatttacgcggcacttgactga

SEQ ID NO: 8373 - DNA, 447 bp, Escherichia coli
atgacgcccggcgagcgcagcctcattcagcgggccctgaaaaccctggaccgccatcttcatgaacccggcgtggccttcacctccacccgtgcggcacgggaatggctgattctgaacatggcgggactggagcgtgaagaattccgggtgctgtatctgaataaccagaatcagctgattgccggtgaaaccctcttcaccggcaccatcaaccgcacggaagtccatccccgggaagtgattaaacgcgccctgtatcacaatgccgctgccgtggtgctggcgcacaatcacccgtccggtgaagtcacacccagtaaggcagaccggcttatcaccgaacgtctggtacaggcactgggcctggtggatatccgggtgccggaccatctgatagtcggtggcagccaggttttctcctttgccgaacatggtctgctttaa

SEQ ID NO: 8374 - DNA, 603 bp, Escherichia coli
atgcaacagctcggcctgaagtctcctgtgcgtctgaagaaataccggtcttaccggggaaatatgggactcgctgcagaaaatatccttcagcgactgttcaaagcggcagctccctgtgagaaatgggtgacagatatcaccgaattcagggctggcggacaaaaactgtacctgtccccgatacttgatttgtttaacggggaaatcgtggcgtgggaaacggcctgcaggcctacagaggagctggtgaagcggatgttaaataaggggctggaaagccttgctgaaggggagaaaccgctgctccacagtgatcaaggatggcattaccggataaaaagttatcagtccgccctggcggacagagggttagtgcagagcatgtcgcgcaagggcaactgccttgataatgcggtaatggagaacttctttggtcacctgaaagaagaaatgtactatcgccgggactacagaaatgtagaagagctggaaaatgccgttaacgaatacataacttactggaatcaaaaaagaataaaactcagtcttgggggactcagcccggtagaataccggactgagtatcaaaaagccggttaa

SEQ ID NO: 8375 - DNA, 432 bp, Escherichia coli
atgacggcggagcaacgccttgccgaacgtcagttgaaaacgaaaccgctgctgaaatccctggaaagctggctgcgtgaaaagatgaaaaccctgtcgcgacactcagaactggcgaaagcgttcgcatacgccctgaaccagtggccggcgctgacgtactatgcagatgatggctgggctgaggcggacaataacatcgctgaaaatgcgttgcggatggtcagtctgggccgcaaaaactacctgttcttcggttcggatcatggaggagagcggggagcgctgctgtacagcctgatcgggacgtgcaaactgaacggagtggagccagaaagctacctccgctatgtccttgacgtcatagccgactggccgataaaccgggtcggcgaattgctcccctggcgcgtagcactgccgactgaataa

SEQ ID NO: 8376 - DNA, 462 bp, Escherichia coli; identical to SEQ ID NO: 8356

SEQ ID NO: 8377 - DNA, 213 bp, Escherichia coli; identical to SEQ ID NO: 5358

SEQ ID NO: 8378 - DNA, 222 bp, Escherichia coli; identical to SEQ ID NO: 8358

SEQ ID NO: 8379 - DNA, 381 bp, Escherichia coli
atggcagtaacgtccccggtggtggatttcagcctgcagttgccagaagttacgtttctgcaccgcctgcagggcatccgcgatacgatggagttcatggtcctgtgtggcatactcccggagccttctggctgttgctggctgccagtgccagcgtccttcaaaacaggctccgtccccctggctgcagaatccgctgaaccagatgcacgcctcttccataaacctgccgttgctgagccggaaaacgcgctggcggaggtcaattccgaaaatgccacagaccgccctgaagtcctcatacacgttttcataccagttgctgtcagcatgatgctgacggtaccagtcgcgggctttttcctgtgcggtggaggatag

SEQ ID NO: 8380 - DNA, 303 bp, Escherichia coli; identical to SEQ ID NO: 5063

SEQ ID NO: 8381 - DNA, 303 bp, Escherichia coli; identical to SEQ ID NO: 6057

SEQ ID NO: 8382 - DNA, 717 bp, Escherichia coli
atgattgttgcaaatatgtcatcatacccacctcgaaaaaaagagttggtgcattctatacaaagtttacatgctcaagtagataaaattaatctttgcctgaatgagtttgaagaaattcctgaggaattagatggtttttcaaaattaaatccagttattccagataaagattataaggatgtgggcaaatttatatttccttgcgctaaaaatgatatgatcgtacttacagatgatgatattatttaccctcccgattatgtagaaaaaatgctcaatttttataattcctttgcaatattcaattgcattgttgggattcatggctgtatatacatagatgcatttgatggagatcagtctaaaagaaaagtattttcatttactcaagggctattgcgaccgagagttgtaaatcaattaggtacagggactgtttttcttaaggcagatcaattaccatctttaaaatatatggatggttctcaacgattcgtcgatgttagattttctcgctatatgttagagaatgaaattggtatgatatgtgttcccagagaaaaaaactggctaagagaggtctcatcaggttcaatggaaggactttggaacacatttacaaaaaaatggcctttagacatcataaaagaaacacaagcaatcgcaggatattcaaaacttaacctcgaattagtgtataatgtggaagggtaa

SEQ ID NO: 8383 - DNA, 414 bp, Escherichia coli; identical to SEQ ID NO: 7721

SEQ ID NO: 8384 - DNA, 693 bp, Escherichia coli; identical to SEQ ID NO: 8185

SEQ ID NO: 8385 - DNA, 1518 bp, Escherichia coli; identical to SEQ ID NO: 7515

SEQ ID NO: 8386 - DNA, 126 bp, Escherichia coli
atgactatcttcttgtgcataccagtgacgtacctagggggcctaaaagccttcatccagcagttcctcaccggggagcagagcttcttgttaagcgaagcgcaattcaggcagggctgcatttaa

SEQ ID NO: 8387 - DNA, 531 bp, Escherichia coli
atgagtgattcgcgcctgctgccgaccggctcatcaccgcttgaggtcgccgccgcaaaagcctgtgcggaaattgaaaaaacgccggtcagtattcgtgagctgtggaacccggacacctgcccggcaaatctgctgccgtggctggcgtgggcgttttcggtcgacaggtgggatgaaaagtggccggaagcgacaaaacgcgccgttatccgcgatgcctatttcatccactgtcataaaggcactgtcggcgcaatccggcgtgtggtggagccgctcggctatctcattaacgtaaaggaatggtgggagacaaacgacccggccggaacctttcgtcttgatatcggtgtgctggaaagcggtatcacagaggaaatgtatctggaaatggaacggctgattgccgatgccaaacccgcaagtcgccaccttatcggcctgaacattatccaggacattcccggctatctgtatacaggcggtgtggtctgtgatggtgatgttattactgtttatcccggataa

SEQ ID NO: 8388 - DNA, 2619 bp, Escherichia coli
atgagcacgaaatttaaaaccgttatcactactgccggagccgcgaagctggcagccgccactgtccccggcgggaaaaaagtaaacctgtctgcaatggccgtgggtgacggtaatggccaattgccggtgccggatgccggtcagacgaaactggtgcatgaggtctggcgtcacgctctgaataaagtcagcgtggataataagaataaaaactatatcgtggctgaactggttgtaccgccagaagtgggcggcttctggatgcgtgagcttggtctgtatgacgatgccggaacactgattgcggtcgccaacatggcagaaagctataagcctgaactcgctgaaggctccgggcgtgcgcagacctgccgcatggttattattgtcagtaacgtggcgtccgttgagctgagtattgatgccagcacagtgatggcgacgcaggattacgtcgatgacaaaatcgcagaacatgagcagtcccgccgccatcctgacgccacgctgacagaaaaaggttttactcagttaagcagtgcaacaaacagcaccagtgagtcattggcggcaacgccaaaagcggtcaaggcagcaaatgacaacgcaaattcacgtctggcgaaaaatcagaatggtgcagatatccaggataaatcagcttttctggacaatgttggcgttaccagtctgacgtttatgaaaaacaatggcgaaatgccggttgatgccgacctgaatacatttggtcccgttaaggcttatctggggatctggtctaaagctacctcaactaacgcaacactggagaaaaatttcccggaagataatgctgtcggtgtgcttgaggtttttgctgccggcaattttgcaggtacgcaacgctttaccacgagagacggcaatgtttacatgcgtaaactcgccaataagtggaatggcactgatggttcgtggggcgtatggcgtcacactcaatctgctacccgccctttgagtacgactatagacctgaatacgcttggagccgccgagcatcttggtttatggcgtaacagtagctcggctatagcttcatatgaacgcaattatccagaggaaggcggctttgctcaggggatgcttgagatcctcgaaggcgggaattatggaagaacgcaacgttataccactcgccgtggaaatatgtatgtccgctgccttgcggcaagctgggatgcatcaaatccacagtgggaaccgtggttaagagtcggtcatcagtcagagagtcgttattacgacggggatttgaatgaggtgacttcaccaggtatttacagcgttacaggtaaagcgaccaacggtccaatactggacggaaacggcgtgacagtcctcgggattctggaagtgttgaggcgctttgatggtgttaacgtatggcagcgttatacaactgccggaacaggtgcaacccttaaaggtcgcacatttgagcgcgtctataccggcagctcgtggagcgaatggcgggaagtctacacctcgtattcacttcccctgaatctgggtatcggcggtgcagtggcaaaactctccagcctggactggcagacctacgactttgtgccgggcagtctgataaccgttcggcttgataacatgaccaatattcccgacggtatggactggggcgtcattgatggcaacctgataaacatctcagttggtccgagtgatgattccggtgcggggcgctcaatgcatgtatggcgcagcactgtaagtaaagcgaactaccgcttttttatggtgcgtatttcaggaaatccgggaagtcgcacgatcaccacaagacgtgtgccaattattgacgaagcccagacatgggcggcgaaacaaaccttcagcgccggtctttcaggcgaactgtccggcaatgctgctacagcaacaaagctgaaaacggcaaggacaattaacggcgtaacctttgacgggacgaaagatattgaagcgtttccgcctggtgttccgctgccgtggccatcagatacaccacctgcaggctatgcaattatgcaggggcagacgtttgataaggctgcatatccgaaactggctattgtctatccttctggtgttattccagatatgcgcggctggacaatcaagggcaaacccgccagtgggcgtgccgtattgtcacaggaacaggacgggattaaatcgcatactcacagtgccagtgcgtcaaatacggatttagggacgaaaacgaccagttcatttgattacgggacgaagacagtcagtacgtttaactacggaacaaaaaccactaataccactggtaaccatacacataccatttacagagggaatgccaatactaatggtgaaaccggtaaaacaggctttgacaacccatcgtttaatggcacatcaggagctgccgggaatcatgcccacacggtagatattggcgcacataatcatacggttggtattggtgcacattcacacacggttgctattggctcacacgggcactctattaccgttaatgctacaggtaataccgaaaacaccgtcaaaaacatcgcatttaactatattgtgaggcttgcataa

SEQ ID NO: 8389 - DNA, 579 bp, Escherichia coli
atggctttcagaatgagtgcagaagcacaaactatccgcgttttcaatttacttgatggaaccaatgaatttattggcgaaagtgatgcatatattccaccgtatactggcctgcctgcaaacagtacagatattgcaccgcctgatattcctgctggttatgcagccgttttcaatgcagatgaaatgaaatgggaactgatggaagaccatcgcggaaagaccgtctatgaaacgaaaacgggagcagccatttatatttctgaacttggcgtattacctccagacgtgacagccatttccccggatggggattatcagaaatggaacggcaatgcgtgggtgaatgatgagaatgcagagcgtgatgcgcttgtcagagcggctgactctcagaagaaagagctgattgcatatgcaggtgaaattattgccactctgcaggatgctgtcgatttagatatggctaccgaggaagaaaagttaagcctgacacactggaaaaaataccgtgtgctactgaatcgcgttcagccggaaaatgccccggatattgaatggccggaactaccgcaataa

SEQ ID NO: 8390 - DNA, 402 bp, Escherichia coli
atggcaactcttaaatcagtgatggcaatagccaccttaataatttcactcaacgcaaacgcgaatgatattaaaacccttcaaaagcagcttaaaccatggcaacccctagaaatcacgaataaaaacaactcgcttacggtggtgcttcctggcaaagaaatctctcctgacgcctacaacaacctgattatgactggtgtatgcgcaccagtctggacaaaagacacgcctgtttcatatctcaaaaaaatcaaagaaataagcatagttaatcaatataaatccatcggttatgttttttccgaaccattaaaaacatgcaatgaaataggttcgttgacgcctaaacaggggcaagtgttactttcatcccaaacacgtctttacacagggaaataa

SEQ ID NO: 8391 - DNA, 1323 bp, Escherichia coli
atgagtgcgttaagggatgaagtatctatgaaggttgcgttctccaatggcatgataaacaaattatgcaaaagttttttttatagtcatggtaaggagcagccttgtattcaagtcggtaaagcattagaagattttgttttttggcttgcatataatgatgaggagattgcaaaatgtgctagtaggttattaaaagcatatggcccccaattaggtataagtgaccttcacaatgcgaaaagattattgttaggtttttgttctgaagccttcaatcgcattgatgctgattttctgtcgcttaatcctgataagatttgtgttgatgatattataacgcaagttcatagaaaaaatcttagtgagatgtttaagtattatatactttcacgaataaaatcctgtccatatatttataatcttgggtgtgctggctttgatgggaagcttgagcttagagaaaatttatttttatatggcccggggctaggggtggaattactttctgatattaaagacaaaactgacatcaaggttcctgttgatttttatgatgatgaatatatgcggcataaaccaattgggaaatattttcgacagtcaaaatcctgcttggtggtggcatatgcttcatcagaggataaagcggtgaaaatgtttgatagtttgtttggagctttatgtcttgcagttgataatccttttgcgattaatcgagttgctgttaataatctagttgagtcttttagtgtcgggaaatatcatgaaattgagtttcgggtgaatattccgtctgtatataatttaaatataacggattcagccttggcgatacttacaaaaatactttcatcacctgataaaaggatgttgtctgctctttcctttatagcgcacgggtggagggatgacaaacgtgaaaggtttttgaatcaatttatagcattggatgctatgtatggaaccaataatggtaataaaaattcaattattggcggtgtttgcagagatgcggcgaaaattattgatattgattcaaaaataggaataatctatgagcttaggtgtaagtttgttcatggagatatttcatcgttatctgataatgatggctatcgaaagtttattgatagctatggcgtggaccctattgtttctctttttgaaattcttaaagaatgcgtccttaattataatggaacttacaaaacgccaaaagatgttggaaaggcagataggtctatttgcgttcctgctgagttgcttccagcggttgagaggatgatagcggaatacagtggagttaaaaaaacaaactaa

SEQ ID NO: 8392 - DNA, 855 bp, Escherichia coli
atggcaaaaaaagtctcaaaattctttcgtatcggcgttgagggtgacacctgtgacgggcgtgtcatcagtgcgcaggatattcaggaaatggccgaaacctttgacccgcgtgtctatggttgccgcattaacctggaacatctgcgcggcatcctgcctgacggtatttttaagcgttatggcgatgtggtcgaactgaaggccgaaaagattgacgacgattcggcgctgaaaggcaaatgggcgctgtttgcgaaaatcaccccgaccgatgaccttatcgcgatgaacaaggccgcgcagaaggtctacacctcaatggaaattcagccgaactttgccaacaccggcaaatgttatctggtgggtctggccgtcaccgatgacccggcaagcctcggcacggaatacctggaattctgccgcacggcaaaacacaaccccctgaaccgcttcaaattaagctctgaaaacctgatttcagtggcaacgcctgttgagctggaatttgaagacctgcctgaaaccgtgttcaccgccctgaccgaaaaggtgaaatccatttttggccgcaaacaggccagcgatgacgcccgtctgaatgacgtgcatgaagcggtgaccgctgttgctgaacatgtgcaggaaaaactgagcgccactgagcagcgcctcgctgagatggaaaccgccttttccgtacttaagcaggaggtgactgacagggcggatgaaaccagtcaggcattcagccgcctgaaaaacagtctcgaccacaccgaaagtctgacccagcagcgccgcagcaaggccaccggcggtggcggtgacgccctgatgacgaactgctga

SEQ ID NO: 8393 - DNA, 294 bp, Escherichia coli
atgatgacgctgattattccgcgaaaggaggctcccgtgtccggtgagggtacggtggtcatcccgcaaccggcaggcgacgagccggtgattaaaaacacgttcttttttcccgatatcgacccgaagcgcgtccgggaacgtatgcgccttgagcagaccgtcgcccccgcccgtctgcgtgaggccatcaagtcaggcatggctgaaacgaatgcggagctgtacgagtaccgcgaacagaaaattgccgccggttttacgcgtgcgtattaccgtgaaggagatcggtga

SEQ ID NO: 8394 - DNA, 294 bp, Escherichia coli; identical to SEQ ID NO: 7755

SEQ ID NO: 8395 - DNA, 276 bp, Escherichia coli
gtggcttccatctccatcagttgtccctcctgctcagctactgaaggcgtggtgcgtaacggtaaaagtactgccggacatcagcgctatctctgctctcactgccgtaaaacatggcaactgcagttcacttacaccgcttctcaacccggtacacaccagaaaatcattgatatggccatgaatggtgttggatgccgggcaaccgcccgcattatgggcgttggcctcaacacgattttacgtcacttaaaaaactcaggccgcagtcggtaa

SEQ ID NO: 8396 - DNA, 981 bp, Escherichia coli
atgagccatcaactcaccttcgccgatagtgaattcagcactaagcgccgtcagacccgaaaagagattttcctctcccgcatggagcagattttgccatggcagaatatgaccgctgtcatcgagccgttttatcccaaggcgggcaatggccgacggccctatccgctggagaccatgctgcgtattcactgcatgcagcattggtacaacctgagcgacggtgccatggaagatgccctgtacgaaatcgcctccatgcgcctgtttgcccgattatccctggatagcgccctgccggatcgcaccaccatcatgaatttccgccacctgctcgagcagcatcaactggcccgtcaattgttcaagaccatcaatcgctggctggccgaagcaggcgtcatgatgacccaaggcactttggtggatgccaccatcattgaggcacccagctctaccaagaacaaagagcagcaacgcgatccggagatgcatcagaccaagaaaggcaatcagtggcactttggcatgaaggcccacattggtgtcgatgccaagagtggcctgacccacagcctggtcaccaccgcggccaacgagcatgacctcaatcagctgggtaatctgcttcatggagaggagcaatttgtctcagccgatgccggctaccaaggagcgccacagcgcgaggagctggccgaggtggatgtggactggctgatcgccgagcgtcccggcagggtaaaaaccttgaagcagcatccgcgcaagaacaaaacggccatcaacatcgaatacatgaaagccagcatccgtgccagggtggagcacccgtttcgcatcatcaagcggcagttcggcttcgtgaaagccagatacaaggggctgctgaaaaacgataaccaactggcgatgttattcaccctggccaacctgtttcgggtggaccaaatgatacgtcagtgggagagatctcagtaa

SEQ ID NO: 8397 - DNA, 927 bp, Escherichia coli
atgccaaactggtgctcgaatcgtatgcatttttctggtgaaccggcacagattgctgagattaaacgactggccagcggtgccgtcacaccgctttatcgccgcgccacaaatgaaggtattcagctgtttctggccggaagtgccggacttctgcagaccactgaagatgtgcagtttgaaccgtgccccggactgacggatgccggacgtggtgttgtatcgccggagaatatcgcgttcacccgctggctgacacacctgcagaacggtgtactgctggatgagcaaaactgcctgatgctgcatgaactctggctgcagagtggtactggccagcgtcgctgggaaggattaccggatgaggtcagggaaaccatcaccgtgcatttcaccgcaaaaagaggtgactggtgtggcttctggagtaacgaggatgtatcggtgtggtggaaccgtctgtgtgacaatgtactgccggaaaaaaccatgccgtttgacctgctgacggttctgcccacccgcctggatgttgaagtgaatggctttaacggtggtgttctgaacggtgttccttctgcgtatcactggtatacggaacagtatggcgtgaagtggcctgtggggtatgaggtgaatatcagccgtcagggagaaaacttcattcaagtggatttcgacacgccgtggtgtcagccggaaagcaacgttgttgcagaattaagccgccgtttcggctgcacgctggagcactggtacgccgaacagggctgcaatttctgtggctggcagcgatatgagcgtggagagcttgttgatgtgctgtggggggaactggaatggtcttccccgacagatgatgatgagctgccggaagtcaccgcgccggagtggatagtcgacaaggtggcgcattacgggggatga

SEQ ID NO: 8398 - DNA, 1173 bp, Escherichia coli
atgcgtctgttttctattcctccacccacgctactggcggggtttctggcggtattaattggctacgccagttcagcggcaataatctggcaagcagcgattgtcgccggagccaccactgcacaaatctctggctggatgacggcgctggggctggcaatgggcgtcagtacgctgactctgacattatggtatcgcgtacctgttctcaccgcatggtcaacgcctggcgcggctttgttggtcaccggattgcaggaactaacacttaacgaagccatcggcgtttttattgtcaccaacgcgttaatagtcctctgcggcataacgggactctttgctcgtctgatgcgcattattccgcactcgcttgcggcggcaatgcttgccgggattttattacgttttggtttacaggcgtttgccagtctggatggtcaatttacgttgtgtggcagtatgttgctggcatggctggcagccaaggccgttgcgccgcgctatgcggtaattgccgcgatgattattgggatcgtcatcgttaccgcgcaaggtgacgttgttacaactgatattgtctttaaacccgttctccccacttatattacccctgatttttcgtttgctcacagtctgagcgttgcactccccctttttctggtgacgatggcatcgcaaaacgcaccgggtatcgcagcaatgaaagcagccgggtattcggctcctgtttcgccgttgattgtgtttactggattgctggcactgtttttttcccctttcggcgtttattccgtcggtattgcggcaatcaccgcggctatttgccaaagcccggaagcgcatccggataaagatcaacgttggctggccgctgccgttgccggcattttttatttgatcgcaggtctgtttggtagtgccattaccgggatgatggctgccctgcccgtaagttggatccagatgctggcaggtcttgcgctgttgagtaccattggcggcagtttgtatcaggcgctgcataatgagcgtgagcgcgacgcggcggtggtggcatttctggtaacggcaagtggattgacgctgttcgggattggttctgcgttttggggattaattgccggaggcgtttgttacgtggtgttgaatttaatcgctaacagaaaccgataa

SEQ ID NO: 8399 - DNA, 1128 bp, Escherichia coli; identical to SEQ ID NO: 5696

SEQ ID NO: 8400 - DNA, 1758 bp, Escherichia coli
atgtttaaacctacctatctggcaaggctgcaggcttgttgtaacaaatttgaactggctgatttgcttcagattaaagttacatttctgactaatgttttgtatagaataaggccagaaaatcaatacaaaaaatttactataaagaaaaagtctggaggagagcgggagatctttgctcctgatgaaaaactgaaagatattcaacaacgactttctgaacttctatatatatgccaggaagaaatttgggcaaaaaataatattaaacaaaatgtatcacatggttttgagaagaataaaactataattacaaatgctgagaggcatcgagataaaaatattgtatttaatattgatattgagaatttcttcccatcctttaattttggtcgcgtgcgaggatattttattgcaaaccaaaatttcaagttacatccaaatgttgcaaccattattgcgcagatagcctgcctggatggatcgcttccgcaaggaagcccttgttctccagtaataactaatcttatttgtaggattttagatttcagattatcaaagctagcagtcacatatggttgtagttacagccgctatgcagatgacattacgttttcaacaaacaaaaaaaacatccctgatgcattagtttctaatgagaaagaaaacgaaccaggtaagatattggtagaagaaattcatcgtgcaggcttcactttaaaccataataaaaacagagtgtctaggtgtacatcaagacagcaagttacaggtttaactgtaaataaaaaaataaatgtaagcagagagtatataaagaatacaagagcgatggcgcattctttatactttgaaggttcgtatacacttattgagaaagatggaaaacatagaaagggcacccttagtgaattagaagggcgatttgcatttatcgatatgcttgataaatataataatgtggaagcaaagaaaaatgcgcgtcctgagagatatgtggttaaaggatttgggttggattttaagcagagacttaactccagagagaaagcatacagcaaattcctatactataaaaatttctatggaaatgagcaaataacaatcttaacagaagggaaaactgacccggtttatcttaagtgtgcaattgattctttgtttttggattaccctcagttagttagagaggaaaaaaacacaaagaatagagtgttaaaagttaatttatttaaaaccaatgacaagaaaaaatattttctcgatttgtctggtggagctgcagactattcgaggtttttcagacgacatggtttactttgtaaagcgtatgaaaaacagcctcctaaaaatccagtgataattttattagataatgacacagggccatctgacttcataaatcaaataataaaggattattcgcatctaccaaaaaaagcggaggatgttagaaaaggggcgttttatcacttagagagtaatttatatgttctttttactccgttattaccaggggataactattcttcactagaggatttttttgaaccaaaagttttgcaaatgaagtataatggaaaaagcttcgataaaagcaataatcatgacagttctactacatttggaaaagatagatttgctacttatatagtaagggaaaatagaaaaactatcgatttttcattattcaaacccatacttgattcaattattgaaatcaaaaaacattttatcaatctacacccatcaaagtga

SEQ ID NO: 8401 - DNA, 249 bp, Escherichia coli
atgcgtaccacatcatttgcgaaagttgcagctttatgcggcttgttggctctgtctggttgtgcctctaaaatcacccagccagataaatattctggttttttaaacaattactctgatttaaaagaaacaacctcggcaacaggtaaacctgttttacgttgggtagacccgagttttgatcaaagcaaatatgacagcatcggtaagcgtcaacggagcaccgtattgacgcttatttattggtga

SEQ ID NO: 8402 - DNA, 540 bp, Escherichia coli
atgactgaaacgataaaagtaagcgaatcacttgaattacatgctgttgcggaaagtcatgtcacacttctttatcagttaatctgtaaaaataaaacctggttacagcagtcgctaaactggccgcagtttgttcaaagtgaagaggacacgcgaaaaacggtgcagggtaatgtgatgttgcatcaacgcggctatgccaaaatgttcatgattttcaaagaagatgaacttatcggcgttatctcttttaatcgtattgaaccactgaataaaaccgctgaaatcggctacgggctggacgaacctcatcaggggcaggggatcatttctcaggcgctgcaggcattgattcatcattacgctcagtctggtgaacttagacgcttcgtgatcaaatgtcgggtggacaatccgcaaagcaaccaggtagcgttgcgcaatggttttatccttgaaggttgcctgaaacaggctgagtttctgaatgatgcctatgatgatgtgaacttatacgcgcgtattatcgattcacaataa

SEQ ID NO: 8403 - DNA, 921 bp, Escherichia coli
atgtttccaaaatgcaaattttcccgcgagtttctgcatcctcgctactggctcacgtggtttgggcttggtgtactctggctttgggtacagcttccttatcctgttctctgctttctcggcacgcgtatcggcacaatggcgcgaccattcctgaaacgtcgtgaatctatcgcccgtaaaaacctggaactttgtttcccgcagcattctgcggaagagcgcgagaagatgattgccgaaaactttcgttcactcggcatggcgctggtagaaaccggcatggcgtggttctggcccgacagtcgcgtacgtaaatggtttgatgtggaagggctggataaccttaaacgcgcacaaatgcaaaatcgcggcgtaatggttgtcggcgtccattttatgtcgctggaactgggcggtcgggtgatgggactttgccaaccaatgatggccacctatcgcccgcataataatcagctgatggaatgggtccagacccgtggtcgcatgcgctctaacaaagcgatgatcggcagaaataatctgcgcggcattgtcagtgcactgaagaaaggtgaagcggtatggtttgctcccgatcaggattatggtcgtaaaggcagctccttcgcgccgttctttgcggtggaaaatgtcgccacaaccaatggcacctatgtcctctctcgtctctctggcgcagccatgttgaccgtaacgatggtaagaaaagcggattacagcggatatcgtttgtacatcaccccagagatggaaggctacccgacagatgaaaatcaagccgctgcctatatgaacaagattatcgagaaagagatcatgcgcgcaccggagcagtacctctggatacaccgtcgctttaaaacgcgcccggtgggtgaatcgtcgttatacatttaa

SEQ ID NO: 8404 - DNA, 3474 bp, Escherichia coli; identical to SEQ ID NO: 7554

SEQ ID NO: 8405 - DNA, 801 bp, Escherichia coli
atgccactgctggataagctgcgtgagcagtacggggtcggaccggtatgcagtgaacagcatattgccccgtcaacgtattaccattgtcagcagcagcggcatcatcctgataaacgcagtgcccgttgtcagcgcgatgactggctgaagagagagatacagcgcgtatacgatgaaaatcatcaggtgtacggtgtgcgtaaagtctggcgtcagttgttacgggaaggaatcagggtggccagatgtacagtggcgcgcctcatggcggttatgggacttgccggtgttctccggggtaaaaaggtccgcactaccgtcagccggaaaaccgttgctgcaggtgaccgcgtaaaccgtcagttcgtggcagaacgtcctgaccagctgtgggtggctgattttacttacgtcagcacatggcagggcttcgtctatgtggcgttcatcattgatgtgtttgccggatacatcgtggggtggtgggtctcatcgtctatggaaacgacattcgtgctggatgcgctggagcaggcgttgtgggcccgccgtccgtccggcaccatccatcacagcgataaaggctctcagtatgtgtcactggcctatatggagcgattaaaagaagcaaaactgctggcatcaacagggagtacaggcgactcgtatgacaacgcgatggcggagagcatcaatggtctttacaaagcggaggtaatacaccgtaagagctggaaaaaccgtgcagaagtggaactggccacactcacgtgggtggactggtataacaatcgatga

SEQ ID NO: 8406 - DNA, 327 bp, Escherichia coli; identical to SEQ ID NO: 6097

SEQ ID NO: 8407 - DNA, 633 bp, Escherichia coli
atgaaacgtttaattatggctacgatggtcacagcaattctggcatcttcaactgtatgggctgctgataatgcaccggtagcggcacaacagcaaactcagcaagttaagcaaacccagaaaacggcagcagcagagcgtatctctgaacaaggtttatatgcgatgcgtgacgtgcaggtagcgcgcctggctctgtttcatggcgatccagaaaaggcaaaagaactgaccaatgaagcttccgctttgctgtcagatgatagtaccgaatgggcaaagttcgctaagccaggtaaaaagaccaacgtcaatgatgaccaatatattgtcattaatgcatctgtcggaatttctgagagttatgtagcgacacccgaaaaagaagccgcgataaaaattgccaacgaaaaaatggcgaaaggggataaaaagggcgcaatggaagagctgcgcctggccggtgttggcgtaatggaaaaccaatatctgatgccgctcaaacagactcgtaatgcacttgctgatgcgcagaaactgcttgataaaaagcaatactacgaggcaaacctggcgcttaaaggtgcggaagatggaatcatcgttgatagcgaagcactgtttgtgaactaa

SEQ ID NO: 8408 - DNA, 1695 bp, Escherichia coli
atgtcagatcaacttcaaatgacagatggtatgcatatcatcgttgaagcattaaaacagaataatattgacactatttatggtgttgtaggtattcctgtgacggatatggcgcgccatgcccaggcggaaggcattcgttatattggttttcgtcatgagcagtcggcaggttatgccgctgcagcaagcggttttcttacccaaaaaccagggatctgcctgacagtgtctgcgccaggattcctcaacggtttgaccgcattggccaatgcaacggtaaatggttttccgatgatcatgattagcggctccagcgaccgcgcgatcgtcgatctccagcaaggtgattatgaagagctggaccaaatgaatgcggcaaaaccgtatgccaaagcagcatttcgcgttaatcagccgcaggatcttggcattgcattggcacgcgctatccgggtctcagtatcgggtcgtcctggcggtgtttatcttgatttgccagcaaatgtcctggccgcgacgatggaaaaagacgaagcgttaaccacgattgttaaagttgaaaatccgtcgccagcattattgccatgcccgaagtcagtcactagcgcaatttcgcttttagcaaaagctgaacgaccattaattattcttggcaaaggcgcggcgtattcacaatctgatgaacagcttcgtgaatttattgaaagtgcccagattccattcctgccaatgtctatggcgaaagggatcctcgaagatacgcatccactctctgcggcagctgcgcgttcgtttgccctggcaaatgctgacgttgtcatgcttgttggtgcacgactgaattggttactggcacacggtaaaaaaggatgggcggcagatacacagtttattcaactggatattgaaccgcaggaaattgacagcaaccgccccattgctgtgccagtcgttggcgatattgcatccagtatgcaaggtatgctggcagaattgaaacaaaacacatttacgactccactggtgtggcgtgatattttaaatatccacaagcagcaaaatgcacaaaaaatgcatgaaaagttaagtacagatacccaaccattaaattactttaatgcattgagtgccgtgcgcgatgttttgcgcgagaaccaggatatttatttagttaatgaaggggcaaataccctggataatgcacgaaatattattgatatgtataaaccacgtcgtcgtctggattgtggcacctggggtgtcatgggcatcggtatgggctatgccatcggtgctagcgtgacctctggttctccggttgtcgctattgaaggtgatagtgcttttggtttcagtgggatggagattgaaacgatttgtcgatataacctgccggtgacgatcgttatttttaataatggcggcatctacagaggagacggtgttgacctcagcggcgctggtgcaccatcgccaacggatctgttgcaccatgcaaggtatgacaaattaatggatgcgtttcgtggcgttggctataacgtcaccacgacagatgaacttcgtcatgctttaaccaccggaattcagtcgcgcaaaccgaccattattaatgtggtcatcgacccagcagcaggaactgaaagtggccatattaccaaacttaacccaaaacaagtcgctggtaattaa

SEQ ID NO: 8409 - DNA, 1164 bp, Escherichia coli; identical to SEQ ID NO: 7865

SEQ ID NO: 8410 - DNA, 1680 bp, Escherichia coli; identical to SEQ ID NO: 7680

SEQ ID NO: 8411 - DNA, 1215 bp, Escherichia coli; identical to SEQ ID NO: 5959

SEQ ID NO: 8412 - DNA, 603 bp, Escherichia coli
atggcagataaatccgaaaagaaaaaagaaaccacaaataaatcagcaaaaaaaacactaacgaagaagagcgaaaaattaactccagcaaaagacaccgcaccaaaacaagtgaatgtagatccagctataagattgaaacaaattcgtcaacttgtccgtaataataataaatccatcatgggagaggattatattatttgtcaaatctataaagaatctagatttaagcaatttgcaggtaagaataaacataatgcgaaaggcttaatgcaaatgcaacgaaatgcagtgaggcaggtttttaaatatcgacaacaaaaaataaaaggaagaatgactactgataaagagacaaatgaagctttcgctaatgctgatacattttataaatctgataaaatatttgatgaaaaagaaaatattaagattggcacagagtatttgcaatactggatagataaagaagcaacaattgaggaggcatatcggacatatcgtggaacagatgaagcatactattctgttataaaaccttgcgctgaaaaactggctaaagatcctgataacatacaaatactaatggagggaataggaagatag

SEQ ID NO: 8413 - DNA, 756 bp, Escherichia coli
atgtcagtattcaattcagaagatactattgcatactcattacattcattgttgaatcaaacatatgaaaatattgaaattctcgtgtgcgatgattgttcatcggacaaaagccttgaaataattaagagcatagcttattctgattcaagagtgaaagtatatagctcacgaaaaaaccaaggcccttataatataagaaatgagctaataaaaaaagcacacggtaatttcatcacctttcaagatgcagatgatctttctcatccggagagaatacaaagacaagttgaggttcttcgcaataataaggctgtaatctgtatggctaactggatccgtgttgcgtcaaatggaaaaattcaattcttctatgatgataaagccacaagaatgtctgttgtatcgtcaatgataaaaaaagatatttttgcgacagttggtggctatagacaatctttaattggtgcagatacggagttttatgaaacagtaataatgcgttatgggcgagaaagtattgtaagattactgcagccattgatattggggttatggggagactccggacttaccaggaataaaggaacagaagctctacctgatggatatatatcacaatctcgaagagaatatagtgatatcgcggcaagacaacgagtgttagggaaaagtatcgtaagtgataaagatgtacgtggtttattatctcgctatggtttgtttaaagatgtatcaggaataattgaacaatag

SEQ ID NO: 8414 - DNA, 1113 bp, Escherichia coli
atggctcaaaatcatgaagtggttgcatttgatacccatcaaaaaaaagttgacttacttaatgataaactctctcctatagaggataaggaaattgaaaattatctttcaactaaaatacttaattttcgcgcaactactaacaaatatgaagcctataaaaatgccaattacgttattattgctacaccaacgaattatgacccaggttcaaattactttgatacatcaagcgttgaagctgtcattcgtgacgtaacggaaatcaacccaaacgcaattatggtggttaaatctacggtcccagtaggtttcacaaaaacaattaaagaacatttaggtattaataatattatcttctctccagaatttttacgagaaggaagagccctatacgataatctccatccatctcgcattattatcggtgaatgttctgaacgggcagaacgtttggcagtgttatttcaggaaggagcgattaaacaaaatatacccgttttatttacagattctacggaagcggaagcgattaagttattttcaaatacttatttggctatgcgagttgcattttttaatgaattggatagttacgcagaaagttttggtctgaatacgcgtcagattattgacggtgtttgtttggatccgcgcattggtaattactacaataatccttcttttggttatggtggctactgtttgccaaaagataccaagcaattattagccaactatcagtctgttccgaataaacttatatctgcaattgttgatgctaaccgtacacgtaaggactttatcactaatgttattttgaaacatagaccacaagttgtgggggtttatcgtttgattatgaaaagtggttcagataattttagagattcttctattcttggtattataaagcgtatcaagaaaaaaggcgtgaaagtaattatttatgagccgcttatttctggagatacattctttaactcacctttggaacgggagctggcgatctttaaagggaaagctgatattattatcactaaccgaatgtcagaggagttgaacgatgtggtcgacaaagtctatagtcgcgatttgtttaaatgtgactaa

SEQ ID NO: 8415 - DNA, 981 bp, Escherichia coli
atgagtcatcaacttaccttcgccgacagtgaattcagcagtaagcgccgtcagaccagaaaagagattttcttgtcccgcatggagcagattctgccatggcaaaacatggtggaagtcatcgagccgttttaccccaaggctggtaatggccggcgaccttatccgctggaaaccatgctacgcattcactgcatgcagcattggtacaacctgagcgatggcgcgatggaagatgctctgtacgaaatcgcctccatgcgtctgtttgcccggttatccctggatagcgccttgccggaccgcaccaccatcatgaatttccgccacctgctggagcagcatcaactggcccgccaattgttcaagaccatcagtcgctggctggccgaagcaggcgtcatgatgactcaaggcaccttggtcgatgccaccatcattgaggcacccagctcgaccaagaacaaagagcagcaacgcgatccggagatgcatcagaccaagaaaggcaatcagtggcactttggcatgaaggcccacattggtgtcgatgccaagagtggcctgacccacagcctggtcaccaccgcggccaacgagcatgacctcaatcagctgggtaatctgctgcatggagaggagcaatttgtctcagccgatgccggctaccaaggggcgccacagcgcgaggagctggccgaggtggatgtggactggctgatcgccgagcgccccggcaaggtaagaaccttgaaacagcatccacgcaagaacaaaacggccatcaacatcgaatacatgaaagccagcatccgggccaaggtggagcacccatttcgcatcatcaagcgacagttcggcttcgtgaaagccagatacaaggggttgctgaaaaacgataaccaactggcgatgttattcacgctggccaacctgtttcgggcggaccaaatgatacgtcagtgggagagatctcactaa

SEQ ID NO: 8416 - DNA, 702 bp, Escherichia coli
atgtcagatctgatagcttacaaatcaaacgcccttatcgaggcaagctacaagctcactttgcaggaacagcgcttcctgctggtctgtatcagccgcctaaaatccggagaagattccccttcgccggatgaacaaaaaaccatgaccatcacggctgcagagtttcatgatgcctttcctgacatgggacggcagcacgctgaagctaggctcaaggaagcgatagatcgcctctgggacaggtcagtaatcatcaagaacgaggaaaaacgagaagagttccgctgggtgcagtaccgggcgcagtatttcaaaggtgaggcgaaagtagatatcaccttctccgatgccatcatgccgtatctgacacagctcaaggggcagtttacgcgggtagtcgtgaagaacgtctccagcctttccagcacctacagcatccgcatttacgagctgctccagcagttccgcagcaccggtgacagaacgatagctatcgatgatttccgaaccatgcttgccgttgaagataaatatcaacaattcaaagacttgaataagatgataatcaagccagccatcgccgaactgaacgaaaaaagcgatctggttgtaactgttgagacgatcaaaaaggggcgcacggttgtagccctgcattttcgcttcaaggaagacaaacagatcaagatgacgatctaa

SEQ ID NO: 8417 - DNA, 2160 bp, Escherichia coli
atggcgatttatcatctcagcatgaaaatcatctccagaaacagcggctacagcgccgttgcttctgctgcctatcgttccggttcactgatgcttgatgagcgtaccggactgactcacgactacacccgcaaaagcggtgtggctgaagctgtgattctgactcccgcgacagcccctgcctggtgtacgaaccgtgccgaactctggaatgccgttgagaaggccgaacgccggaagaactcacaacttgcgcgggaaattgaactcgccatcccccgcgaactaccgcaggatgccgcacgggaaaccgttctcgcctttgtcagagaaaactttgtcagtcagggcatgattgctgatgtggcgttccatcacatggataaaacaaatccccatgcgcacatcatgctgaccacgagagctgtcggacctgctggattcggtggaaaggtcagggactggaacgaccggacacatgccgagacgtggcgtgcatcatgggctgaccatgcgaacagggcactggcgaacgccggttatcaggaagagatagaccatcgttcatacgagcgacaggggcttgagaaaacgcctggtattcacctcggaaagtctgcctgtgcgatggaaacacgcggtatcgaaacagaacgcggcgaacagaatcgtctgattaacagacttaacctggaaatacagatttcccgtaccgaactcagaaacagcgggctgacagagcctgcccgccgtgtggctgaccttctgaatatcgtgcttcctgacaacgcaacttcgtacacactacgtgacatcatcgaagcgttgccgaaggacagtaatgcggcatggaaactcaccagtaatgccatgtcgatgatggcagatatgcaggcgacgcgcagacgctgggaagagctgaacaccgaacgaaaggaagcgatgagccatgctgccagcctgaaaaaatcatcgccgttttcgtccggtttttcccgtattcccctgatgcaatgggcggcaccggaataccgtagcgaacagggaaaaatccagtcgctgagccagcaaatggaaaaattgcgacaacattaccggaaggtggagaaacaggacattcccgcgagtcagacggcatttgaaaaacagtggcagcagtggggggcatccggccttgcagctctcagagtccagttgcttaaacgtgaagaggaattgcgccggaaggagcaggaggatagagaacgtagtcgcgcggagcgacgagcggaacagctcaggaaaaatgacaatgccgttatggattcaggggtactgagcgcagtcgttacggggtatggcgaggcccccatgcctggtaacggggaaatgacctgttaccttctgcttcacaaccggaacggagaatacacgctctgggggaacgagctggagaaataccgcaccagaatctttgagcgtgttgatttaatgcgtgacaggagtggttatatctgtgagcgaagccaaatcggccaacgtccgccactgcaacgtgtttattcctctgcaacctttgagcaactgctgacgcaggtttgccagacatggccgcaatatacccgcaatctccgccggccgaagacatggccggagtctttctgtcttggagaagaccgccagccagccatgccatcaccagcggcaaggaaggtggattttatgcagggacgtctgccaccgacgctgatgccggtcatgagttctgtcgaccgggaaacccgccagcttcagcttttgctggtcatgggcgtggatgactctctgggcggtgttatccggcttaatggtacgctgtatcccgcgtttgccgttccctcagccgataacaggcatctggtcatcagtgcgctgaccgataaggggttacggtatgcagggtatggtgttgccgtaaatcacgatgcagacagccacatatcacctgcaccagaactgatgcagtttcatctgaaaacccgtgaggcaccgctttttgctgccgtcaacacaccagaaaaacagccggatcatctgttccgctcgctgggttttaatcgtacctgggaggaatggcagcgcgaggaagatgcacgaacacacaccaccgagaggagacatgatcgcggttggtcacagtga

SEQ ID NO: 8418 - DNA, 255 bp, Escherichia coli
atgagcagaacgctcgaacagaagattgctgatgctgaggcgagattacagcgcctgaaggcgaagagccggagcctggacacagcgcagaaggttgttgtgggtgctgcattgctggcaaaggtcagaaagccggaggaggtgcagttgcgtgcctggttactccagttcctgaaggcagaggtgacacgacaggctgatgtgacgcgcatactgccgctgattaacgagctggaggcgctgccagaacagtga

SEQ ID NO: 8419 - DNA, 192 bp, Escherichia coli
atgatgcactttagcactactgattgtagcctcttctttgcaaagatgtcaaagtttatgacgaaatatacccttatcgggttgcttgccgtgtgcgccacggtgttgtgtttttcactgatattcagggaacagttatgtgaactgaatattcacaggggaaatacagtggtgcaggtaactctggcctga

SEQ ID NO: 8420 - DNA, 255 bp, Escherichia coli; identical to SEQ ID NO: 8324

SEQ ID NO: 8421 - DNA, 837 bp, Escherichia coli; identical to SEQ ID NO: 6088

SEQ ID NO: 8422 - DNA, 213 bp, Escherichia coli; identical to SEQ ID NO: 5358

SEQ ID NO: 8423 - DNA, 1623 bp, Escherichia coli; identical to SEQ ID NO: 5879

SEQ ID NO: 8424 - DNA, 399 bp, Escherichia coli
atgcgcatcagcaacatcgaatggctgaagaaacggatcggattcatcaggaagctcggagaacagaccgcacgacagagacagattattgacctgatcgacaacgaagccggactcacagaacaggaacgcaaacttctccacgtactggcaacagcggaaaaaaacgacttacaggcacaggagagcgaacgaaaacaggcggtccaaaaacgaatcgagggaaaaaaacaacgacgggaacgcaatcaccggctctttctcgcggctgggctactgatcgaagcaggactggtagacacaaaaacaggcgagctatgctataaaaaagacaggatattacaagcacttaaggaacttaagtacgatctggagacatccccaaacccagacgcgtaa

SEQ ID NO: 8425 - DNA, 207 bp, Escherichia coli; identical to SEQ ID NO: 6172

SEQ ID NO: 8426 - DNA, 816 bp, Escherichia coli
gtggatgccggaaaacagcagcgcggggaaggttttgaactgcgtaccgatctgtggggtgcagtacgggcaaagaaaggcatctttatcagcgccgacgcgcaggacaaggcgcagggtcaggtgcgcgaaatggccgacattatcagcgaactgaacagcctgagcgataaaatccagaaactgtctgacgatgcggccacggcgaacgccgatccggcggatatggccgcgcagatagcattgataaccagccggataaatgacctgaccgcctcggtgattttgatgcacgcaccgaaaggcgtggcggtcgccagcggcgagcacctgcaactggccgcggtgaaaaacctccagataaatgcgggaaacaacgccgatatcggcgtagtgaagaatatgtttatcggcgtgggacgggcgctgagcgtgtttgtacgcaaggcgggtatcaggctgattgccaataaaggcgcagtatcggtacaggcgcagcacgatctgatggagttactggcgaaaaaatcgatagagatcgtcagtaccgaagatgagattaaaatcaccgcgaagaaaaaaataacgattaatggtggtgggagttatatccggatagagggtagcggcattgagccgggaacgccgggggattataacgtcaaagcggtacattacgggcgtcagcctaaagcctcggagaaggttcctatgccagaatttcccatcctttcagccgtggactcatccgatttttgtcttgaatgcctgctgaatgccatcaaaaacgatgacgctgttgttgaaggagtgtaa

SEQ ID NO: 8427 - DNA, 1146 bp, Escherichia coli; identical to SEQ ID NO: 8081

SEQ ID NO: 8428 - DNA, 918 bp, Escherichia coli
atggttcagaaaattttgtcggataaggttatgaatgaaagaacaaatgcgtattactcttattatcttggagagcgtaatatctccgtactgccccttaatgtttatgatcccccggaacgttttatcgcttacataaaaaaaaacagagaaaatctgaacatcacactttcagattttgaacttgaacaaataatttctggtatgcgtctgaaggccctggccttcctggtccccctggaaaaaatatcctggatcgcgggcagtgaacgcgcatgcttattttcctggtatctgttgatgcagtttatccagaataacagggcaaaaataagcgcagacttgcttcaaaagaataaactgtatcttaaagaagagtatctggaagggaatgccttcccgtcggactcatcgacacagttcagacaaatactcagagttctcgatattctttctgataagaatttgcgggatgagtggataatccagaccaaagacagatggatacgggcatttaaatcaaagagtcctttcagttacctcctcccggagaacgaacatgaatgcatatggacatggaattatttgaagggaaaaaatattgcactggaaaaactggccagttttcctggttctgctgatatttaccacgcaatccacctttcatttgacatatgggttacctgtccactcacctcacctgacgatataaaaaatttcagaaacagtttcaataaggccaaggcgcagcgcaagtacaaaaaaatgcaggaagataaagtcaatgtacagttttttcttgacgcagaaaccagggcgcagctcaaagaattatcgagggtcagaagactcagtaccggcgaaatgctgcatgacctgattgttgaagagtataaaaggtaccgacattccagataa

SEQ ID NO: 8429 - DNA, 1182 bp, Escherichia coli
atgctgatggcgatggagccgatatgggagagtgattttcatacgctctcatatggcttccggcctgagcgcagtgtccaccacgcgatccgcacggtgaaattacagctcacagactgtggtgaaacccggggacgctgggtgattgaaggcgacctgtccagttacttcgacaccgtacatcatcgactgctgatgaaggctgtacgccgcaggatcagtgacgcacgtttcatgactctgctgtggaaaaccatcaaggcgggacatatcgatgtcggtctctttcgggcggccagtgaaggtgtgccacagggcggtgttatatcgccgctattatcgaacatcatgctgaatgagttcgatcaatacctgcatgagcgctacctgagcgggaaagccagaaaagatcggtggtactggaataacagtatccaacggggccgaagtacggcggtcagagaaaactggcagtggaaacccgcggtggcgtactgccgctatgccgatgattttgtcctcatcgtcaaaggcaccaaagcacaggcggaagccatcagggaggagtgtcggggtgtgctcgaaggcagtctgaaactcaggctgaacatggataagactaaaatcacccatgttaatgacggctttatctttctggggcacaggatcattcgcaaacgcagtcgttatggcgagatgcgagtggtctcaacgatcccgcaggagaaagccagaaacttcgccgcatcgctgacagcactgttatcaggcaactacagtgaaagcaaagtcgatatggctgaacaactcaaccgaaaactgaaaggctgggccatgttctatcagttcgttgattttaaggccaaagtcttcagttatatcgaccgtgtcgtgttctggaagctggctcactggctggcccgcaaataccgtacaggtatcgcttccctgatgaggtggtggtgtaaatcaccgaaaccgggtcagagcaaaacgtgggttttatttggtaaaaccaatcacggcaagctcagcggcgaaatactgtactggttggtggggcaaggcaagaagctgttccgctggcggctacccgaaggtaatccctatctgaggacggagaccagaaacacgtatacatcgcgctttacagaagtggcaatggcgttcgccagcatttaa

SEQ ID NO: 8430 - DNA, 273 bp, Escherichia coli; identical to SEQ ID NO: 8089

SEQ ID NO: 8431 - DNA, 738 bp, Escherichia coli; identical to SEQ ID NO: 7689

SEQ ID NO: 8432 - DNA, 699 bp, Escherichia coli
gtgcaagagtcaaaaaagaaggatgcagatattgaattgactaaatctatatttaagaaaagacaatttttattattgaacaggattaatgagctaaaaaaagaaaaggaagaggtaattaaactttcaaaaataaatcacaacgatgttgtgagacaagaaaaatatccagatgatattgaaaaaaaaataaatgacatacagaaatatgaagaagagataagcgaaaaagaatcaaaactcactcaggcaatatcagaaaaagaacagattttaaaacaattgcatatagtgcaagagcagttggaacactattttatagaaaatcaggaaattaaaaagaaacttccacctgtgctatatggagcagctgagcagataaaacaagagttaggttatcgacttggttatattatagtctcgtattctaaatccctcaaggggattattaccatgccatttgcacttatccgtgagtgtgtttttgaaaaaaaacgtaagaagagttatggcgttgatgtgccactctatttatatgctgatgctgataaggctgaaagagttaagaaacatttatcttatcaattagggcaggctattatctccagtgctaattcgatatttggattcattacccttccatttaagttaattgttcttgtttataaatataggagagctaaaatcaagggctgttaa

SEQ ID NO: 8433 - DNA, 303 bp, Escherichia coli
atgggcgagctgcgctgttatgtcattaccatgatcgacgaacacagcaactacgctctggcacaggccgtgccgtcacttaactgtgatatcatcaaactcttcttttgccgtgcagaccggctattccctatcgatatcaaccagggcatcgcagataacgggaaagagttcccaggaaacttcgacaaagcaccgcaggaatccgctagcaagccctatggacctacccctttacgcctagaacgcacctctgaacgttttaagcgaacgccgaaagaacagttcattgaatttaaataa

SEQ ID NO: 8434 - DNA, 699 bp, Escherichia coli; identical to SEQ ID NO: 5520

SEQ ID NO: 8435 - DNA, 645 bp, Escherichia coli
atgagcagcattatcaccatcacagtgtatacgctggatgaactttcctgcccggcacggggaaaagcccgcgactggtaccgtcagcatcatgctgacagcaactggtatgaaaacgtgtatgaagacttcagggaggtctgtggcattttcgggattgacctccgccagcgcgttttccggctcagcaatggcaggtttatggaagagccgtgcatctggttcagcggattctgcagccagggggacggagcctgttttgaagggcgctggcactggcagccagcgacaccccggaaaatcagggaatatgcccctcaggaccgtgagcttcatcgtatcgcggataccctgcaggcggtgcagaaacgtaacttctggcagcttcaggctgaaatcagtcaccggggacgttactgccatccgtacagcatggatatcaccgtcacccggaacagtccgactggtcaggcaatgacaaccgatgcggaagccgctgtcagcgaagccctgcgcgacctggccttctggctgtaccgccagctggaaaacaagtacgactggctgacctcagacaccgctgtggatgaggcccttctcatcaacgaatataccttcaccgaagccggtctgcgcgccggctga

SEQ ID NO: 8436 - DNA, 369 bp, Escherichia coli
atgtcggacacactccatgagacaaattatcccgacgaccataacgaccgcctctggtgggggctgccctgcaccgtgacgccctgtttcggggcctgtctggtgcaggagggtaaccggttgcattaccttgccgaccgcgccggtatcagaggccggttcagcgatgcggatgcgtaccatccggaccaggcctttccgctgctgatgaaacaaccggaactcatgctcaccagcggtgaactgaatccccgccatcagcataccgtcacactgtatgcgaaaggactgacctgcgaagccgataccctgggctcctgtgattacgtttatctggctgtttatccgacgcccgaaatgaaaaattaa

SEQ ID NO: 8437 - DNA, 1047 bp, Escherichia coli; identical to SEQ ID NO: 6113

SEQ ID NO: 8438 - DNA, 417 bp, Escherichia coli
atggctacatacggcggtcagtttacgcttacccagaaacgtaagcatcgggaaggtaaacgcgtgcatcccacaaccctgcattacgtctgggcccgggagtttggggagtgcaaaggtaaaaaacactatcacctgatgctgctggtcaaccgggatacctggtgtcgtgccggcgattaccgcgctccgggatcactggccgggatgattaaacaggcgtggtgcagtgccctgggagtggatgccggacgttatgacacgctggcacattttccggtcaggccggcggtgtggctggaacgcgatgatgacaccggctttcagcaggtgctggagcgtgctgactatctggcgaaggagagtaccaaagcttacggcaccggtgagcgcaactttggctgcagtcgtggctga

SEQ ID NO: 8439 - DNA, 384 bp, Escherichia coli
atgtacgcaaaatcttttctcgcacttgatggcaacggacgtctgaccggtgcccgtaccgcacaaactgctccttatgcccactacacctgccacctttgcggcagtgcactcagataccacccgcaatacgacaccgaacggccctggtttgaacacactgacgacgggctgacggagcacgcgcagcaatgtccttatgtcaggccggaacgcagagaaatacggttgattaaacgtctgcagcaattcgtcccggatgccttacccgtggtacgtaaagccagctggtactgcaggcaatgtcaccacgattattatggggagcagtactgcacacactgccagaccgggcgtttcagtgaggagggggtagcagaatga

SEQ ID NO: 8440 - DNA, 411 bp, Escherichia coli; identical to SEQ ID NO: 7734

SEQ ID NO: 8441 - DNA, 234 bp, Escherichia coli
atggcacccgaaccggatgacgatgatgacgaaacatgggtactgttcaatgccatgaacggcaaccgcgctgaaatgagcccggaagccgctggcattgctgcctgtctgatgacgtacagtcatcatgcctgtcgtacggagtgttatgccatgacggtccattattaccggctgcgggattacgccctgcagcatccggaatgcagcgccattatgcgcatcatcgactga

SEQ ID NO: 8442 - DNA, 819 bp, Escherichia coli; identical to SEQ ID NO: 6059

SEQ ID NO: 8443 - DNA, 510 bp, Escherichia coli
atggtcgggaagtgctgtcatgagcgcactgaccagcgtatccagttcccagccggtgcgggccgatacggccacaaccggatgtacgggccggaacagacggaataccgcctccgttttctcccgaatgttctgtgcctgtgcgggagaaggctgaatgccggccatatcccattcatggcagggctccgttttgtcggcctgcgtcaccacaaacagcacctgctgatgtccccggtgcaggatgtgtcgccagaaatactcatccacagacagggcccggtcatcggctttaatcagccacagcaccaggtcaagttcaggcagaatgtcacggtacagggcttcatactctgcatccctgttccggctctcgcccaccccgggcaggtcagtgataaccatgctgtgaccatggccactcagacggaagcgccgtacttcccgggtgccggcgtgaacatcactgaccggggtgacctccccctgaaacagtgcattacagagtga

SEQ ID NO: 8444 - DNA, 303 bp, Escherichia coli; identical to SEQ ID NO: 5063

SEQ ID NO: 8445 - DNA, 249 bp, Escherichia coli
ttgcattaccttgccgaccgcgccggtatcagaggccggttcagcgatgcggatgcgtaccatccggaccaggcctttccgctgctgatgaaacaaccggaactcatgctcaccagcggtgaactgaatccccgccatcagcataccgtcacactgtatgcgaaaggactgacctgcgaagccgataccctgggctcctgtgattacgtttatctggctgtttatccgacgcccgaaatgaaaaattaa

SEQ ID NO: 8446 - DNA, 1137 bp, Escherichia coli
atgtttgattatgaaacattgcgcttcatctggtggctgctgattggcgtgatcctggtggtctttatgatctccgacggatttgacatggggatcggctgtctgctgccgctggtggcgcgtaatgatgatgaacgtcggatagtgataaacagcgttggcgcgcactgggaaggcaatcaggtctggttgatcctcgcaggtggggcattatttgccgcctggcccagagtgtatgcagcggcgttttccggcttttatgtggcgatgattctggtgctgtgctcgctgttctttcgcccgctggcctttgattatcgcggaaaaatcgccgatgcacgctggcgtaaaatgtgggatgccggactggtcatcggcagtctggtgccgccggtagtcttcggtattgcattcggcaacttgctgctcggtgtgccgtttgccttcacaccgcaattacgcgtggaatatctcggcagcttctggcaactgctgacgccattccctttattgtgtggattgctcagtcttgggatggtgattttgcaaggtggcgtctggttacaactgaaaactgttggtgtgattcatctgcgttcacagctggcgaccaaacgcgccgcactactggtgatgctgtgctttttgctggcgggttactggctgtgggttggtattgatggctttgtgctgctcgcccaggatgctaacggtccttccaatccgttaatgaaactggtggcagtgctacctggtgcctggatgaataatttcgtcgaatcgcccgttttgtggatcttcccgctgctggggttcttctgcccattgctgacggtgatggcgatttatcgtggtcgcccgggttggggatttttgatggcgtcattgatgcaatttggcgtgattttcacggcaggcatcacgctgttcccctttgtcatgccgtcaagcgtgagtccgatctccagcctgacgttgtgggacagcacttccagtcagctgacgctgagcattatgttggtaatcgtgctgatatttttgcccattgtgttgctctacactctctggagctactacaaaatgtgggggcgcatgacgacagaaactctccgccgtaacgaaaacgagctgtactaa

SEQ ID NO: 8447 - DNA, 513 bp, Escherichia coli
atggcagagaaaaaaagaacccgctggcagcggcggccaggcacgacgggcggcaaattaccgtggaatgactggcgcaatgccacgacctggcgtaaagcgacgcaattattactgttggctattaatatttatattgccatcacgttctggtattgggtgcgctattacgaaacggcaggtagtacgacatttgtcgccagaccgggaggtatcgaaggctggctaccgattgccggtctgatgaatctgaaatatagccttgcaacaggtcagttaccgtccgtccacgccgccgcgatgctgttattggtcgcttttatcgtcatcagtctattactcaaaaaggccttttgttcatggttatgcccggttggtacgctttcggaattaatcggcgatctcggtaacaaactgtttggtcggcaatttgtccttccccgctggctggatattcctctgcgcggcgtgaagtatttgctgttgagttttttctctatatcgcgttattga

SEQ ID NO: 8448 - DNA, 1593 bp, Escherichia coli
atgaaacgaacgcctgtcctgattgatgtgaacggcgttccgcttcgtgagagtctcagctacaacgggggcggtgcaggatttggcgggcaaatggctgagtggttgccaccggcgcagagtgccgatgcggccctgctgcccgcgttgcgtctggggaatgcccgggcagatgatctggtgcgcaataacggaatagcggctaatgcggtggctctgcataaggatcacattgtcgggcatatgtttctgatcagctaccgtccgaactggcgctggctggggatgcgggagaccgcagcaaaaagctttgtcgatgaggtggaggcggcctggtcggaatacgccgaagggatgtttggcgagatcgacgtggaaggaaaacgcacgttcacggaatttatccgtgaaggtgtgggcgttcatgcgtttaacggcgaaatctttgtgcagccggtctgggatacggaaaccacgcagttattccgtacgcgttttaaagccgtgagtccgaaacgggtggacacgcctggacacggtatggggaacccttttctgcgggccggtgtggaggtcgatcgatatggccgtgccgtcgcgtaccatatctgtgaggatgattttccgttctctggtagtggacgatgggaacggatcccgcgtgaacttcccaccgggcgtccggccatgttgcatattttcgagccggtggaggacgggcagacccgtggggctaatcagttttacagcgtcatggaacggctgaagatgctcgattccctgcaggcaacacagcttcagtcggccatagtgaaggcgatgtatgcagcgacgattgaaagtgaacttgataccgaaaaggcctttgaatatatcgccggcgcgccacaggagcagaaggataatccgcttattaatattctggagaagttttccagctggtatgacacgaataacgtgacactgggcggtgtcaaaattccgcaccttttccctggtgatgatctgaaactacagactgcgcaggattcagacaatggattttctgcgcttgaacaggcgctgctgcggtatatcgccgccggtcttggcgtttcctacgaacagttgtcccgtgattactcgaaggtcagttactcaagtgcccgcgcctccgccaatgagtcgtggcgctattttatggggcggcgaaaatttattgcggcccggctggccacgcagatgttttcctgctggctggaagaggcacttcttcgggggattattcgtccgccacgggcacgttttgatttttatcaggcgcgatcagcctggtcacgggcagagtggattggtgccggaagaatggccattgacgggctcaaggaagtccaggaatcagtgatgcgcattgaggccggactgagcacgtatgagaaagagctggcgctgatgggcgaggattatcaggacattttccgccagcaggtcagggaatctgctgagcggcaaaaagccggactctcacgtccggtgtggatagcgcaggcgtatcagcagcagatagcggagagtcgtaggccggaagaggagacaacaccacgtgagacgtaa

SEQ ID NO: 8449 - DNA, 1506 bp, Escherichia coli
gtgagacgtaatctttcacacattattgccgcagcattcaatgaaccgctgcttctggagcccgcctatgcgcgggttttcttttgcgcgctcgggcgcgagatgggggcagcaagtctttcggtaccacaacagcaggtacagtttgatgctctcggaatgctggctgaaacggacgagtacatggccggaggtaaacgaccggcccgtgtttacagggtggtgaacggtattgctgtactgccggtgaccggcacgctggtgcaccggctgggtggtatgcggccattttccggaatgacaggctatgacggtattgtcgcctgtcttcagcaggcaatggcggatagccaggtgcggggcgtactgctggacattgacagtccgggcgggcaggccgccggcgcgtttgactgcgctgacatgatttaccgcctccgtcagcagaagccggtctgggcactgtgcaatgacacggcctgttctgcagccatgctgctggcgtcggcctgctcccgacggctggttacccagacatcccgtatcggttccattggcgtgatgatgagccatgtcagctatgccggtcatctggcgcaggccggtgtggatatcacgctgatttactcaggggcgcacaaggtggatggcaatcagtttgaagcgttgccggcagaggttcgccaggacatgcagcagcggattgatgcggcgcgccggatgtttgccgaaaaagtggcgatgtttaccggtctgtctgttgatgcagtcacaggaacagaggccgctgtttttgaaggtcagtccggcattgaggccgggctggcggatgaattaatcaatgcgtcggatgccatcagtgtgatggccacggcgctgaacagtaatgtcagaggaggcactatgccgcaattaactgcaacggaagccgccgcgcaggagaaccagcgagtgatggggatcctgacatgccaggaagcgaaaggacgtgaacagcttgccacgatgctggcaggacaacagggcatgagcgttgaacaggcccgggcgattctggccgcggcggcaccgcagcagccggtggcatccacgcagagtgaagccgatcgcattatggcgtgtgaagaagcgaacggtcgtgaacaactggcggcaacgctggcggcgatgccggagatgacggtggaaaaagcccgcccgatcctggctgcttcaccgcaggcggatgccggaccatcactccgtgatcagatcatggcactggatgaggcaaaaggggctgaggtgcaggctgaacagctggctgcctgcccgggaatgactgtggagtgcgcccgggctgtgctggctgcgggatcaggtaaggcagaaccggtctctgcatccacaaccgccatgtttgaacatttcatggcgaaccattcaccggcagcggtacagggtggcgtgccacagacgtcagcagacggtgatgcggacgtgaaaatgctcatggccatgccatga

SEQ ID NO: 8450 - DNA, 1029 bp, Escherichia coli; identical to SEQ ID NO: 6101

SEQ ID NO: 8451 - DNA, 549 bp, Escherichia coli; identical to SEQ ID NO: 656

SEQ ID NO: 8452 - DNA, 399 bp, Escherichia coli
atgacggcactacttgcgcagccagaaaaataccatttgcaaaaggtggttatcgaaggtgttggcaatattgagtttgaaggcaacaccttatatttaaataaagaatcctgggaaaattttgttcaaagtgatagcgtgtggttagatattgatttcccaaacccagtcgtgaccttagctcgtgctcgtcagctaaatggcgattatgtccggatagctggaacatttgatatggatatacgaggtcatttgggcatgtggagtgggggtattaccgatattactttgtatgaacgcgtcacgacccgtaaagagtttgcacgccacagagaacaagaaatcaaaaaattacagacggaatctgctaaaaataatatagaaacgacgacaaaatga

SEQ ID NO: 8453 - DNA, 348 bp, Escherichia coli
atgattaaaaccgaatttggcattattgatgaaattgacgctgataaagattatagtcactatgaacctgaaaaatataactgcgtttatattgatgatgacatttatattgatgaatggtgggaacaactccagacaataaaaactttccatcatagtttaaatcgtcaaggttatgcgcttgctcgctacggtgtcacaattatcccacctggttcattaaaccagtttcttcatattgtaatatcagatccaaaattccagcacgatcctttacttctttctttatcagaagtaatacaaaaggccatcagagaaaataaacacatgatacatttcggcatataa

SEQ ID NO: 8454 - DNA, 1152 bp, Escherichia coli
atggatttctctttaactgaagaacaagaactgctgctggccagtattcgcgaactgattacgactaactttccggaagagtatttccgcacctgcgatcaaaacgggacatacccgcgtgagtttatgcgggcactggcggataacggtatttccatgcttggcgtgccggaagaatttggtggtatccctgcggattacgtcacccaaatgctggcgctgatggaagtgtcaaaatgcggtgctccggcatttttgattaccaacggtcaatgtattcacagtatgcgccgtttcggttctgcagagcagctacgtaaaacggcagagagcaccctggaaacgggtgatcccgcctatgccctggcattgacggagccaggcgcaggctcagacaacaacagtgccactaccacttacacgcgtaaaaacggcaaggtttacatcaacggacagaaaacctttattaccggtgcgaaagagtatccatatatgctggtgttggcgcgcgatccgcaaccgaaagatccgaaaaaggcctttactctgtggtgggtcgactccagtaagcccggcattaaaatcaatccactgcataaaatcggctggcatatgctcagcacctgcgaagtctatctcgacaacgtggaagttgaagagagcgacatggtgggcgaagaaggaatgggtttcctcaatgtgatgtacaactttgagatggagcgcctgatcaacgccgcgcgcagcaccggctttgccgaatgcgcattcgaagatgccgcccgctatgccaaccagcgtatcgcttttggtaagcccattggtcataaccagatgatccaggaaaaactggcgctgatggcgattaagatcgacaacatgcgcaacatggtgttgaaagtggcatggcaagccgatcagcatcagtcactgcgcaccagcgcggcgctggcaaaactgtactgcgcacgtaccgcaatggaagtcattgatgatgcgattcaaatcatgggcggtctgggctataccgatgaggcgcgcgtctcccgcttctggcgtgatgtccgttgtgaacgtatcggcggcggtacagacgaaattatgatttacgtagcaggtcggcagatcctgaaagattatcagaacaaataa

SEQ ID NO: 8455 - DNA, 867 bp, Escherichia coli
atggatgttaccgcaaaatacgaattgattgggttgatggcctatcccatccgccacagtttatcgcccgaaatgcagaataaagccttagaaaaagcgggattgccatttacctatatggcctttgaagtggataacgatagttttcccggagcaattgaaggattaaaagccctcaaaatgcgcggaactggtgtatcaatgccgaacaaacaactggcgtgtgaatatgttgatgaattaacgccagcggccaaactggtgggtgccatcaacaccatcgtaaatgatgatggctatctgcgtggctataacaccgacggcacgggtcatattcgcgccattaaagagagcggttttgatatcaaaggcaaaacgatggtgctattaggggccggtggtgcctcaacggcaattggcgcgcagggggcaattgaaggtttaaaagaaattaaactctttaaccgtcgggatgagttcttcgataaagctctcgccttcgcgcagcgggttaacgaaaacaccgattgcgtcgtgacagtcaccgatctcgccgatcagcaagcctttgcagaagccctggcttccgccgacattttaaccaatggcaccaaagtgggtatgaaaccccttgagaatgaatcattggttaatgatatcagtctgttacacccgggacttctggtcactgaatgcgtgtataaccctcatatgacgaagttattgcagcaggcgcaacaagcgggttgcaaaacgattgatggatacggcatgttgttgtggcaaggggctgaacagttcacgttatggactggcaaagatttccctctggaatatgttaaacaggtcatggggttcggtgcctga

SEQ ID NO: 8456 - DNA, 1503 bp, Escherichia coli
gtgtccactgcaaaccaaaaaccaactgaaagcgtcagtttgaacgcttttaaacaaccgaaggcgttctatctcatcttctcgattgagttatgggaacgttttggttattacggcctacaaggaattatggctgtttacctggttaaacaactgggtatgtctgaagcggattcaatcacccttttctcttcctttagtgccctggtttatggtctggtcgctatcggcggctggttaggtgacaaggtactgggtactaaacgcgtaattatgctcggcgctattgtgctggcgattggttatgctctggttgcctggtctggtcacgacgccggtatcgtttatatgggtatggcggctattgcggtcggtaacggcctgtttaaagctaacccgtcttctctgctttctacatgctatgagaaaaacgacccgcgtctggacggtgcattcaccatgtactacatgtccgtcaacatcggctctttcttctctatgattgctacgccgtggctggccgcgaaatacggctggagtgttgcgtttgcgttgagcgttgtaggcctgctgatcactatcgttaacttcgccttctgccaacgttgggttaaacagtacggttcaaaaccagacttcgagcctatcaactaccgtaacctgctgctgaccattattggtgttgtggcactgatcgctatcgccacctggctgctgcacaatcaggaagttgcgcgtatggcgctgggcgttgttgccttcggtattgtggttatcttcggtaaagaagccttcgcgatgaaaggtgctgcgcgtcgtaaaatgatcgttgccttcatcctgatgctcgaagccattatcttcttcgtgctttatagccagatgccaacgtcactgaacttctttgcgattcgtaacgttgaacacaccattctgggcctggccgtagaacctgagcagtatcaggcactgaacccgttctggatcatcattggtagcccgattctggccgctatctataacaagatgggcgataccctgccgatgccaaccaagtttgctatcggcatggtgatgtgttctggtgcgttcctgattctgccgctgggtgcgaaattcgcgtctgacgctggtatcgtgtctgtaagctggctggtcgcgagctatggcctgcagagtatcggggaactgatgatctctggcctgggtctggcaatggttgcacaactcgttccgcagcgtctgatgggcttcattatgggtagctggttcctgaccactgccggtgcaaacctgattggtggttatgttgcaggtatgatggctgtgccggataacgttaccgatccgctgatgtcactggaagtctatggtcgcgtattcttgcagattggtgtcgctactgccgttattgcagtactgatgctgtttaccgcgccgaaactgcaccgcatgacgcaggatgacgctgcagacaaagcggcgaaagcagccgtagcgtaa

SEQ ID NO: 8457 - DNA, 204 bp, Escherichia coli
atgcgcaaggatgcggataccctctacgacctgagccgcgcaatcctgcatcaaacggtcatcggcggtaatgtacggctcgcactcagcagcgttgataatcaacgtttcaatcttatctccgccgccctgcaatttaacgcctgtcggaaatcccgcaccacccagcccggcaacaccaaactgatgaatgcgctcgattaa

SEQ ID NO: 8458 - DNA, 225 bp, Escherichia coli
atgagcaaaatcagggtgttatctgtcgatgattcggcactgatgcgccagatcatgacagaaatcatcaacagccatagcgacatggaaatggtggcgaccgcccctgatccgctggttgcgcgtgatttgattaagaaattcaatcccgatgtattgacgctggatgttgaaatgccgcggatggacggactggatttcctggtaatgactccaacttactga

SEQ ID NO: 8459 - DNA, 1662 bp, Escherichia coli
atgattaaccgtatccgcgtagtcacgctgttggtaatggtgctgggggtattcgcactgttacagcttatttccggcagtctgtttttttcttcccttcaccatagccagaagagctttgtggtttccaatcaattacgggaacagcagggcgaactgacgtcaacatgggatttaatgctacaaacgcgcattaacctgagtcgttcagcggtgcggatgatgatggattcatccaatcagcaaagtaatgccaaagttgaattgctcgatagcgccaggaaaacattggcccaggccgcgactcattataaaaaattcaaaagcatggcaccgttacctgaaatggtcgctaccagtcgtaatattgatgaaaaatataaaaactatcacacagcgttaactgaactgattgattatcttgattatggcaatactggagcttatttcgctcagccaacccagggaatgcaaaatgcaatgggcgaagcgtttgctcagtacgccctcagcagtgaaaaactgtatcgcgatatcgtcactgacaacgcagatgattaccgatttgcccagtggcaactggcggttatcgcgctggtggtggtattgattctgctggtggcgtggtacggcattcgccgtatgttgcttacaccgctggcaaaaattattgcgcatattcgcgaaattgccggtggtaacctggcgaataccctgaccattgacgggcgcagtgaaatgggcgacctggcgcagagcgtttcacatatgcaacgctctttgactgacaccgtcactcatgtgcgcgaaggttcagatgccatctatgccggtacccgtgaaattgcggcgggcaacaccgatctttcctcccgtactgaacagcaggcatccgcgctggaagaaactgccgccagcatggagcagctcaccgcgacagtgaagcaaaacgccgataacgcccgccaggcctcgcaactggcgcaaagtgcctccgacaccgcccagcacggcggcaaagtggtggatggcgtagtgaaaacgatgcatgagatcgccgatagttcgaagaaaattgccgacattatcagcgttatcgatggtattgccttccagactaatatcctcgcgctgaatgccgctgttgaagccgcgcgagcgggtgaacaaggccgtggttttgccgtggtggcgggcgaagtgcgtaatcttgccagtcgcagcgcccaggcggcaaaagagatcaaagccctcattgaagactccgtctcgcgcgttgataccggttcggtgctggtcgaaagcgccggggaaacaatgaacaatatcgtcaatgctgtcactcgcgtgactgacattatgggcgagattgcatcagcatcggatgaacagagccgtggcatcgatcaagtcgcattggcggtttcggaaatggatcgcgtcacgcaacagaacgcatcgctggtgcaggaatcagctgccgccgcagctgcgctggaagaacaggcgagtcgtttaacgcaagcggtttccgcgttccgtctggcagccagcccactcaccaataaaccgcaaacaccatcccgtcctgccagtgagcaaccaccggcacagccacgactgcgaattgctgaacaagatccaaactgggaaacattttga

SEQ ID NO: 8460 - DNA, 1290 bp, Escherichia coli
atgtcggatgacaaatttgatgccattgtggtcggtgcgggcgttgccggtagcgttgccgcactggtcatggcgcgagccgggctggatgtcctggtgatagaacgcggcgacagtgccggatgtaaaaacatgaccggcgggcgtctttatgcccacacacttgaagcaattattccaggctttgcagcatcagcgccggtagaacgcaaggtcacacgcgagaaaatctccttcttaaccgaagaaagcgccgttaccctcgattttcaccgcgagcaaccagatgttccgcaacacgcgtcttataccgtattgcgtaatcgtctggacccgtggttgatggaacaagccgagcaggcgggcgcgcagtttatcccgggcgtacgcgtcgatgcgctggttcgtgaaggaaacaaggtcactggcgtccaggccggggatgatattctcgaagcgaatgtggtgattctggctgatggcgttaactcgatgcttggccgctcgctgggaatggtttccgcttccaatccgcatcattacgctgttggtgttaaagaggttataggcctgacaccagaacagatcaacgatcgctttaatgttacgggcgaggaaggtgccgcctggctgtttgccggttccccttctgacggcctgatgggcggcggattcctctataccaacaaggattccgtatcgttggggctggtttgtggattgggtgatatcgcccatgcgcaaaaaagcgtgccgcaaatgctggaagattttaaacaacaccccgctattcgcccgctgattagcggcggcaaactgcttgaatattccgcgcatatggtgccggagggcggtctggcaatggtgccgcagctggttaacgatggcgtgatgatcgttggtgacgccgcaggcttctgcctgaatttgggttttacagttcgcggcatggatttagccattgcatcagctcaggctgccgccacaacggtgatcgccgccaaagaacgcgcggatttctccgccagcagtctggcgcaatacaaacgtgagctggaacaaagttgtgttatgcgcgatatgcagcatttccgcaagatcccggcgctgatggaaaacccgcgcctgtttagccaatacccacgaatggtcgccgacatcatgaacgatatgttcaccattgacggcaaaccaaaccagccggtacgcaaaatgatcatgggacacgcgaagaaaattgggctgatcaacttgctgaaagatggcattaagggagcaaccgcgctatga

SEQ ID NO: 8461 - DNA, 426 bp, Escherichia coli
atgtatcaacgctgttttgataatgccagtgaaacgctgtttgtcgccggtaaaacgccacggctttcacgtttcgcatttagcgatgatccaaaatgggagtctggacatcacgttcatgacaatgaaaccgagctgatttacgtcaagaaaggggtagcaaggtttaccatcgattcttcgttatatgtcgcgcatgccgatgacattgtggtgatagaacgtggcaggttgcatgcggtggcctctgacgttaacgatccggcaacgacgtgtacctgtgcgctgtacggctttcagtttcagggggctgaggaaaatcagctactgcaaccgcattcttgcccggtaattgccgcaggacagggaaaagaagtcattaaaaccttatttaatgagctaagggtaatggtgccaacttactga

SEQ ID NO: 8462 - DNA, 1881 bp, Escherichia coli
atgtctgaccctgtacgtattacaaatcccggtgcagaatcgctggggtatgattcagatggccatgaaattatggccgttgatatttatgtaaaccctccacgtgtcgatgtctttcatggtaccccgcctgcatggagttccttcgggaacaaaaccatctggggcggaaacgagtgggttgatgattccccaacccgaagtgatatcgaaaaaagggacaaggaaatcacagcgtacaaaaacacgctcagcgcgcagcagaaagagaatgagaataagcgtactgaagccggaaaacgcctctctgcggcgattgctgcaagggaaaaagatgaaaacacactgaaaacactccgtgccggaaacgcagatgccgctgatattacacgacaggagttcagactcctgcaggcagagctgagagaatacggattccgtactgaaatcgccggatatgatgccctccggctgcatacagagagccggatgctctttgctgatgctgattctcttcgtatatctccccgggaggccaggtcgttaatcgaacaggctgaaaaacggcagaaggatgcgcagaacgcagacaagaaggccgctgatatgcttgctgaatacgagcgcagaaaaggtattctggacacgcggttgtcagagctggaaaaaaatggcggggcagcccttgccgttcttgatgcacaacaggcccgtctgctcgggcagcagacacggaatgacagggccatttcagaggcccggaataaactcagttcagtgacggaatcgcttaacacggcccgtaatgcattaaccagagctgaacaacagctgacgcaacagaaaaacacgcctgacggcaaaacgatagtttcccctgaaaaattcccggggcgttcatcaacaaatcattctattgttgtgagcggtgatccgagatttgccggtacgataaaaatcacaaccagcgcagtcatcgataaccgtgcaaacctgaattatcttctgacccattccggtctggactataaacgcaatattctgaatgaccggaatccggtggtgacagaggatgtggaaggtgacaagaaaatttataatgctgaagttgctgaatgggataagttacggcaacgattgcttgatgccagaaataaaatcacctctgctgaatctgcggtaaattcggcgagaaataacctcagtgccagaacaaatgagcaaaagcatgcaaatgacgctcttaatgccctgttgaaggaaaaagagaatatccgtaaccagcttgccggcatcaatcagaagatagcggaagagaaaagaaaacaggatgaactgaaggcaacgaaagacgcaattaatttcacaacagagttcctgaaatcagtttcagaaaaatatggtgcaaaagctgagcagttagccagagagatggccgggcaggctaaagggaagaaaatacgtaatgttgaagaggcattaaaaacgtatgaaaagtaccgggctgacattaacaaaaaaattaatgcaaaagatcgtgcagcgattgccgcagcccttgagtctgtgaagctgtctgatatatcgtctaatctgaacagattcagtcggggactgggatatgcaggaaaatttacaagtcttgctgactggatcactgagtttggtaaggctgtccggacagagaactggcgtcctctttttgttaaaacagaaaccatcatagcaggcaatgccgcaacggctcttgtggcactggtcttcagtattcttaccggaagcgctttaggcattatcgggtatggtttactgatggctgtcaccggtgcgctgattgatgaatcgcttgtggaaaaagcgaataagttctggggtatttaa

SEQ ID NO: 8463 - DNA, 1347 bp, Escherichia coli
atgccaatgatacttgtaaagaagaatccccggggcaaagtgattcgggagcttagcagtgaggaagagactgcagtaaagacggtctgtggactgaaaaggccagcaaccatggcacaacataacctggccaatgatcttctccgggaaatgcgtgagtatgatgcatggttacagtgtgactgtattccgggagattcgccggccatgaattttgctgctcttaaaaacaatacgggtactctttatctgtccagttttaatcatgagcatgcacctgaatgccccatgtatcgtcagttatccggaaatgaagaggaaacatccttcggagcaagccggcatcccgttagcacccgtataaattacagaaactttttaccacctgatgacagtaattctgttatcagactgcaggcccgctctgcttaccataatggtgagcgctcctccgttcgcaagaaacgtccgcgccttggccgtttactcctgtcgcttattgaagatgcagggctgaataaactggattccctggctaatccccgtatccggactaattatcgtgagtgtcttgatgccatacggcaggttacactacagcaggagtatattcggggaagagccttatctgaaattatccatttccggccaggaatgtctgaaaggtctcaggagcggttaatggaaacgctggagaattcagaacgacactggcctgccagaagaaagcatatgttctttcagatttttatggcgcagcacatctgtcgtgatgctgtggaaattcactgggcgaacggtaatattcaggtcatcagacctgtgcgggggatcagtattaatggtgaagcgcagggcggaatacgtcccccttactgggttattcttgctttttgccggagtgccgatggcagaatcatctgcagtgaagggtatgctcatgctctttatcaactgacatgtccggtgcctgtggacagcaaactggaacgaaacacgctcactgctcttctgaatgtggccagctggcttaaaagaaagccaggtacgccggaattaagtctggaaaggcccctgtttgatacagaagtttatgttaatggtgaaaagaaatatgtactgccggatttcattgtcacagcaagggctcctgacggaaagacggccagagtggtcatcgaaacgatgggatatgaagacagtgattactgcgcgagaaaatccaggcagcataccggcatgaagcagattggtgttctgcataccgatccaccgaaatggctggataacgagcatcccccttttaagaaacatatgtacggtgtttttatgcatctcaggtactga

SEQ ID NO: 8464 - DNA, 603 bp, Escherichia coli
atgggaaaaaatcaggaagaaaggaaaactcccgtcattgtggtgaaaaaacgtcgtactttttcgccaccgtccttatccgaaaaaacagatattatcgcacctgtatttactgaacagacggcagaatcagcccccgccggaataaattcatctgccgtcgaaacacatatccccgaagcgccagccaggaagaagaaaaagaaaaaacgccgtttcccacgtccctcccactggacccgtgagtatactcacgagtgcgtggaaaaaataaagatcctgtttcctcatcttcgtgctgaaggtggtggatttattcccctgaaaattggcataaacaatgatatttcagcatttctggcagaacacccggagacagaactgaccatggacgaatggctctgtgcagtgtcctgcatcacctcacgccgtgtatatctgcagcggacagctgtcgccggcgtcccacgttatggtctggatggtcaccccaaagggcaggtctcagaatctgaagcacagagtgccggtcgcagactggtgacattagaacaaaagttgctcaggatgcaggcacagcaggagaatatttctgggcaataa

SEQ ID NO: 8465 - DNA, 510 bp, Escherichia coli
atgagtaaatcaggtgcagaaaaaattcaattcatcctgaataatcatgaacaggcatacagacgcctgaagcctgtatatacttttttagaactggcatcttggatttcggttgttctgctgattatatacctatcaggcaagaatcacgtgcttacagcagcttttctctgctttgcatggacagcattctgggttcttttccttttacattatttcccaaaagttttctttattctcgatcgtcagagtctgctcaacctcatggaggccaccaaagactcaccagatgtaaagcaggagctgcttaaccgccttttttccggaaaaagaatgaccgggcgggatgaaatggatatctgccgtcttctgagaaaaaatgaagaagaaaaaatccgtcagagtgaactgaatatcatcaggaattttattgatgaacagcagttaacgaatagtgatattccgaagaaaagtacggttccaaatgaagataaaaaaggcataagatga

SEQ ID NO: 8466 - DNA, 1077 bp, Escherichia coli
gtgtataaatacacggcacaatcgctccgccataagcgacagcttgtggcaggtctgaagaatactccatataacgcagtacactggagtcagttagcacccgaagagcagatccgtttctgggaagactatgaagcgggaagggcgaccactttcctggttgaaccggaaaggaagcgcacgaagcgccgtcgcggtgagcactccaccaaacccaaatgcgaaaatccgtcctggtatcgtcctgagcgctataaggcgctgagcgggcagctcgggcacgcctacaaccgtctggtgaaaaaggacccggtgaccggcgagcagagcctgcgcatgcacatgtctctgcatcctttttacgtgcagaaacgaacgtatgccggtcgcaaatatgctttccgtccggaaaaacaacgcctcctcgatgccatctggccggttctggtcagcttcagtgatgcgggcacacataccgtaggcatgagtgtttcccgtctggccagagaaatcagcccgaaagacagcaaggggaaggttattccggaactggaagtgacggtttcccgcctttcccgtttgctggccgaacaggtacgttttggtgtgctgggtgtttcagaggaaaccctgtgggaccgtgaaacccgccagcgtctgcctcgttacgtctggataacaccggcaggctggcagatgctgggcgtcgacatggtaaaacttcacgaacagcagcagaaacgactgcgtgaaagtgaaatccgccagcagctcattcgggaaggtgttctgcgtgaggatgaagatatctccgtacatgcggccagaaaacgctggtatctgcagcgcagtcaggatgcgctgaaacaccgtcgtgcgaaagcagcagccagtaagcgcgccagacgcctgaagaaactgcctgccgaccagcagattcatgagatggcagagtatctcaggaagcgtctgccgccggatgaagcctatttttgttccgatgaccatctgaagcgactggccatcagggagttgcgtcagcttgaactgacgctggctgccccaccgccgcactag

SEQ ID NO: 8467 - DNA, 288 bp, Escherichia coli
atgtcacctcaaatgatacagaaactcccggccatcactctgttggaaggcatgtttcccgagctatcaacaaaccagcttaaagtctgcgttttttacgcaatgggtgttccttacgacgccattgcccagaactgtcggctttctcccgaaacggtacgaacctacctgaagcgaagcctgaagaatttaaatctggaaggatatgatgcacttcgctctgctgtgctgatgcgaactttcgttttcatgattagcaatacagctaaagaaaacgaaaaaatgtga

SEQ ID NO: 8468 - DNA, 534 bp, Escherichia coli
gtgaatatagaacacctgaataaccggaactggtatcttgcgcaatataatacagccggcaaaaacagagaatctttattctcatggctgaatgagcaaaacgtcgtaccatggactccattaataacaagaaagataagacgggcagactccaggtgctgttaccgtgaaagaatattcgctatttttccagggtacttttttattctggctaattttgacattcaaccagtatcggcattacgtcgccatagcgccttcattgatttcgtgaagtttggcggtgaaataaaacccgtcaataaagatattgttgatggattaatgaagatttacccggaccctgtgctaaatccgggagccagggaagagctgaatgcggcttccagcatatggctgacaaaagcacaatatcagtatctcctcagaatggaaaatactctccagcctgagtcgaggatatccctgctcctggaactggtatcaaatgccgaacatcacggctttatggagcgccttgtaaacatcccatag

SEQ ID NO: 8469 - DNA, 684 bp, Escherichia coli
atgaccacgacagaacatcccgtgcgccagttgctctggtgtgcactgaatgccctgaaaacggcacaggaaaaccacaatataaccagtgaaaccggattacggcattacctgcttgaatggctttctggtgccagcagacatcctgagttccgtagtctccctggcgaaatcatggcgttaaaagcattgaccgaaaaagatcgcaatattcccatcatcggaacgctgaatacgctctttctcagctctgccactgtcggggaatgtccgttgtttcgttttcgggctgcactgggtaaattacagaaagcaggctggcgcacatatgtctgcccatggcctgagagggtgttcaatgaatccattgaacgggcctgttccgggaaacgtcatctgctacaactaagtcgcaccgaagagtgttttctaccgacaggcgatatgagggcaccagttacgttgcagctgatcactccactacaccgcaaaactatgcagcttctggaaacggcagagttaatattctccgacgaaggatttcaggtggtgagaggatacgaacatcaattcgggatcgaacgcagagaaaccctctttcacaccctatttatcgggctgcccagcctgccagaagatgtctggggtgcaacacaggagcagacgactatcacattacactga

SEQ ID NO: 8470 - DNA, 552 bp, Escherichia coli
atgaaaaaacaaccactactctggatgacgatagccgccgcactgctgtccggctgcacaggccacagggaacatcacccgcaggtgacattcacggtcgataccgtgcgaacagacacaacggccagcaacccaatctgcctggcggaaaaatacggaagccttcttaatgagcgccatccggacctgtttgccggtgctcaggggagtatttcacgcagtgcattttttaatgacagcctgacgctgacacctgaaacgctccacgggatgatacagaatacgccctgtgttgaatcactggtaacgtccgtaggtccggataccttcactgcagatgtctctcccggtgtcagaatgcaggtatcaccggatattcacggtgcgcccggaaatatcactctgcgactctcgaccacagaccagaaacgaaaacagactgttgaacaaagcatttctctcagaccggaacagtcccttgtcgtgaatggattcaccggagacggagctggcgaaaagcgcgtcgttctcatcacacctcacgtgcgttaa

SEQ ID NO: 8471 - DNA, 255 bp, Escherichia coli
atgccacagcaacatcccggacgactgcaaatactggtcgtcgacgcacactgcaaacgcaggctgttttcaacgaaaacaccgacagaccccgatgagcttgcccgacgtttctgcacgccggataactgtctcgtggtggtactacgcgacaaccgatttctgttccgactggagcgtgctcccggcagccactgccgctggcacaagggcagcagctcccgccatcagcatctacaggactggctgtcgtaa

SEQ ID NO: 8472 - DNA, 297 bp, Escherichia coli
atgtttaccatgttctttctagttaaattaaccatcgcgattgtgattgtctgtggaatcctttctccgattttagcttcaccacataacaaactgtccacacttttttggaagataccaaacgcgttctggattttcctgatttgcatatactttgcaatcgccatggcggtgttaatagaaagcagtgaacagacacgcatccgccgccaacaatatttccaacagtacgaagtgccaaatgagacacataaaaatgtggtgatagaaaacagtattaaaagtcaactaatatga

SEQ ID NO: 8473 - DNA, 594 bp, Escherichia coli
atgaaaaataataacgtaccattatatctatggttgctttggtgtacgctttgtctgtacatcactaccccatggcaatacttacgttatccatacactgacaacttatcattgccttatatgttatatttctgtgtggtggttgtgatttgcattttcccactacttttcagatgtgtacttcttattgtaaggtctgcatctaaatatgacttcacattctttgtgaagaagaaaaagggaagcaagaaatcaactatacatcttagcccctatgctgacacacgttgcccgaagtcaatgaggaaacactgggatgtattgctttctctgatatcaaaagcaattaataatgatgaaatcattgtcatgcattcacatctctttactccagcaagaataaataaacttataaagagactggaatcttatgatttgagtttttcagttattacatacccacggaaaacaagtctgtacgaaaaattatcaattccttttatatatctcttatttcagtggtctttcccgcatttgcattcggacggaatgacagtcgtcattcgtcctctccagccgcctcacaccaattaa

SEQ ID NO: 8474 - DNA, 1068 bp, Escherichia coli
atgaaaaaaaactgtctgacacttatactgccgtcattattgtccggctgtgccggaatttccggcagcaataacgtggcaccatcagatacgcctgctctggtttttgttgacggacaaatcagtgaaagtgctggcgttctggcacttacgcaacaacgtctttctccacctaaaataactccccccccgagagtcagcgtgccagagacagtaaaaacagcacagcctgttagcgaatcccgaccgttaccttcaccaacaataagtcagaatttctcccggttaatcattacaggcaagcctggtagcgcccctgtaacactatcgccgacggcccgtaaccggaccgtcagtcagtggataaaaacattactaccggaaggatggaaattcagacaagagaatgcagccacgcccaagctgaataccaaactggtttcatggtctgccaatgatcagtggacccgttctctgaaccggttgctggaagaacaacacctctggggccatctggactggaataataaaacgttgaccgtcacaacatcagctgctgcaccggcacaggacacggcaaccactatctcgccagcagccatggtaaccacatccacttaccctgaatctccaacgacagcaaatagccaaaacaaaccacgaaatccattcaggggaaacagcgtatcttcgtcaacgcccgccgccaccccgactccaaccggctccacagtcaagtctatcccgctcatgaccggaacgcctgttaaaccggtatctcagggtaaagagtggcgtgcgccggcaggcaccacattaagagagaacattatcaagtgggcagaagaaacaaaatgcgaaagcatggcatcaacgcactggatggtcatatggccactttctgtaaccgattaccgtctggatgcgcctttaatgttccggggatcatttgaatcagccatggagcaggtatttgagttatatcggactgcgcaaaaacctttatacgcacaggcttctcgcatgcagtgcatcattacagtttctgatacaagggatggtcgctaa

SEQ ID NO: 8475 - DNA, 438 bp, Escherichia coli
atgggatggctggtcatggccgtcggcctgaccattctgattatcactggtagctaccagaatcagaagatgtctgaaaccacaaacgcccagcaatatgcaagtgcgtctgtatgggcaagtcagatactaatgattgctaacagaatcaatgatatcagatacgtatcaggccagcaggacggagtaatttcctcagataaactggctctccctgtcactccggactcccgaattaaacatcagttacaacaggggcgtctgtgggtatggatgcctgaacaaccaggtcttgttgaaactttgcgttcaaaaagtcgtggttctgcactaatagggatcttccaaaacgggcaactcacctggctatcaggaactgcaaccggtctgacacccccggcaggcattactgctggttctgtcgtctacgttaactaa

SEQ ID NO: 8476 - DNA, 1683 bp, Escherichia coli
atgaaaaaatcacaccagcgttcaatgaagctggcggtgctcccctgcatgatcgccgtcgctctttccatctccggatgtactttcagcgaaatcaacaaaatgcagaaaaaagcacaggaagactcagcacatgcacgggaaaaggtatcagccctttcggcccgtaaatcgcaggctcttacctggctcgataatcaatggataaaccctgttccggtcgctcaggtatcaagagagaaaaaacaaacagctccggcctgctacatcacgcaggcaagaaaaggagagatcactctgcaggaactggggcaacgtattactgccgtatgcggcatccctgtgatcatcacgcctgacgcagccaattcaactcttgaaggaggcgctacccgccagatgacaggaacactaccagcaccagatgaaaatgggcgtctaccgttaagcagcctgggcagcacaacaatgactacctccactcagccattaacgctgaataacctcatgtggcagggagatatcaatggtcttctggatctgatggccagccggagtggtctgtactggcgcatggataatggtcggattgtattctatctgactgaaaccagaacgtatccacttcatatgctgaacaccaaaaccagcagcagttccagtgtcagctctggctcaacaagcacaatgggggcaacaggaggccaggataactcagcatccggtgatgcaacgtcctctcagagcacaaccgttggtcaggaatacgatctgtatgaagacatccggaaaactattgaagcaatgctgacaccagaaaaaggccgttactggttatctgcatcgagctcaacgctgactgtcactgatactccagctgtccaggaagccgtcgcacgatatgtggacgaacaaaacagtattatgaaccgccaggtagccctgaacgtacaggttctgagcgtcagcaataccagaaacgaacagttcggtctggactggaaccttgtttataaatcgctacattccgccggagcaacgttgaacaatgcaagcggagattttacaggcgctacatctgcaggcgtatcaattctggatacggcaacagggaatgccgccaaattcagcggttccagtcttctgattaaagcgctgagtgaacagggcgatgtcagtgttgtgacttcacaagaaagcactgtcacaaacctgacgccggtacctatccagatggcagatcagacggtttacgtcgcccagtcagcaacaacaacgactacggatgtaggagcaacaacaacattaacgccgggcatgatcaccaccggattcaatatgaccctgctgcctttaattcagaaaacgggcaatctccagttgcagatgaattttaatctgtcagatcccccaacaatccgtagctttacgtcaaaagacggaaacagttacatcgaaatgccgtataccaaactgcgttcactgagccagaaggtcaatctgaaagaagggcaatcacttgtcgttactggtttcgatcagaacaatacgacgacaagtaaagccggtacgtttacgccagcaaatccattatttggtggttcacaaaccgggaaaaatgaacgcagcacgcttgtaatcatcattaccccgactttcccgtcaggaggcaacaatggctga

SEQ ID NO: 8477 - DNA, 1296 bp, Escherichia coli
atggctgatgaagatatcaacccggttgtgcttctcgcagatcctaaagtaaatcatcgcgtgtgggcagcctgtcttaaatggagtcctgtcgtaaaaaaacagcgagtcccttctcatcagaaacacaagccccatgtaaaatccagacggcttacctctctgaaagtgactgtaggcagcagaagttcccgtgggaagatcagccgcattaccggcacaggaatactggccaggccggagcgcaatcattatttttcccttgctctggctttctgctcatgggtgagaaatggatacggcgtcttccggtacagcgataaggagcttttattccttgcctccattaatggccagcctgccgttatggctgatctgtcaggaaatgatgctgatgttgctcaaaaggtcagtctttttctgacgatgaacgaagagccccccgaaaaatggcaggtcgtatctcctctggaacatcctgataactgggaaagtattattacccggttatcatcagcagatctccgccgttgcaaacttactgtcggcaatcgcagcaaattcacactgcctgccgtactgtttttagtagcagccggcgcaggcactgtattctggatgactcagccagagccggatgtcgtaccgacgcccgaggagatagctgcacgggcaagattgcagtttaaaaagcccgatccaccgccagaactcccgcatccatgggcatcacaacctgtaatcagtgattttctgaaagcctgcgcggaccttcgaaaaccatcaccggtcgcgctagaaggctggaaacttaccggtggaacatgtactcccgagacattcacactgatttacgaacgacagccaggaggaactattgaaggctttctggcaagaagcaaagaaatctttaatgttattcctgactttaaccttaaagatggtgcacgcctggcttctgtaacccggccactgccttccctgccccgcagggatgaggcagtccctaccccctcagaacaactgatgcgggtgttcacgtggtttcagaaaaaacagttaacgccggccattaatgaaatagccataccggaaccattaccaggtaacgatggtgaaccagcccctgttcagaaatggaaagaatatcagttcagtttatcaacgcctgtaaatcctgatgagttgttccctttatttcaggataccggcgttcgtctgagcaatatccattttgaattaaacggcggtactttcagttattcctcagaaggtcatatttatgcgtccaggtaa

SEQ ID NO: 8478 - DNA, 453 bp, Escherichia coli
atgcgtccaggtaaattactcattattccatccatatttttcttctccggtttttcatttgcaacaacacaacctcttgtcacaataggagaacttgaagcacaacaaaaccggaatattcttttacaggcaaaagttcagggcgcacagctacagaaacaactcgaagaatcagatgttacttcatcatctgaaactgtttcaggtttctctggtgtgactgcctctttgccatcagtttcagagcagccgacatctaaaaacagaaaggaattgcccatcattatggaaataaacggcaaagataaacgtcttaatgccgttcttcgcatggctgatggacgtcagacaagcgtcaccactggcagccagcttccaggcacatccgtcacagtgaagtcgatctcattgtctggcgtcacgttaagtgatggcaccacccttactttctga

SEQ ID NO: 8479 - DNA, 1554 bp, Escherichia coli
atggataaatataatctgaaggatgctctcctttttatatccaggggagacacccatgaaattcttatagaaacaaaccagcggacaaggcctgacgtacaaagtaatctccaggagctgctaaaattatatccggatatcaacccaaaagtagtctcgttgtcggagttacaggaggcaggtcaggatgagaaaaacagaggcccgaaagaacgaattattcatctgaaagaccttgctgatgtcagtgaaagtgagaagaaagttctatcttattttgaaactgccagaaaacttggtgcttcagatattcatttcttaatttcagagtctattttcaaagttcgcatgagaatattcggtgaactgcagactgtagatgaagatcaaccagcactgggctattcactttgcgcaacagccattctgtcaatggctgatgtcactgaaaccagtttcttccctcaaagggagcaggatgcgcgcctgtccccacaattaatgcgaaaaataggaatatttggtgcacgctacagtcacagacctacaggagacggtctgattgcagttatgcgcctgatacccgatgacggagataaagttcccacgtttaaacaactgggctttatcccggaacaaatccggttgctgaacataatgctgcgccgcccggaaggaaaaatagtcctgtcaggtccaaccggttccggtaaatcgacaacgttacgcagcgcctgccgtgtatatcttgacgataatcaggggcgacacctgctaacaatcgaagatccgctggaaggacagatactgggagcaacacagactccgattatctgcgacaaatccgacgaagatgccgtcaaactggcatggagtcgggctatttcatcggcaatgcgacttgaccctgatgccatcatggaaggggaaatgcgcgatcttatctcgatgatgtcaaccacctacgcggcacagaccgggcacatagttctgacgacattacatacaaactcagctctgggtataccggagcgaatgattacgatgggtatgaatgccgatcttatttgcgatgcgcaattactgattgggatgatcagccagcgccttgtaccaactctgtgtccctcctgccgtattccatgggaaaagcgagcacctgaacttagcgacgacgagcgtgattaccttgagcggcactgcaataaagattcactctgcagtacagataatatctggttccgaaatcatcacggatgctctgaatgtaatcacgacgtaatcattaacggcagaaagcgcggtgaaataggtaaaggcctcaccggcaggactgtaattgctgaggtgatagaacctgataaccgcttatttcagattctgaaaacacgcggcaaagttgcagcacgtaaatactggctggaaaacatgaaaggcatcagtcgtgtagagcatcttcttcgccgtatcaatgaaggtctggtagaccctcttgaagccgacagaatcatccctctggacgaagacgagcgcctcagcatcgatgatgtctaa

SEQ ID NO: 8480 - DNA, 1098 bp, Escherichia coli
atgcgtgaaatgaatttcagtcaacggctgaggcgtttcattgtcagaaaaacgttcagcgccccctacagggtgcagttttacgaagccctgcgttttctgctggaaaataaacagccattaaagaccgcactggaacagatgcgggatgcctggacagactttggacgaaaatggcatccctttgctgaactggccacagactgcattgagtctcttcgtgaaaacagtggcgaaaactctctggaatatactcttagtttatgggttcctcaggaagaggccgcagtaatcagcgccgggataagaagtggttcaattgtggatgcactgcaattcgccaccactcttacagatgcaaaagaacaaatccatcaggctatatggcaaatggctatttatccggtgggattgttaatcatgatgacggggacattatatgttctgaatacagagctaatacctgaactgagcaaaataagctcccccgattcatggagtggtgctcttggttttctttatggattatctgtttttgtcgataattacggcgctatatgtgccgttctttttgcagtgatcacaggtttaatatcatggtctctgccaaactggaaaagccctgacagtgttcgtacttttgccgacaagataatgccatggagtatttatcaggatatacagggagcaacatttctcctgaatatggctgcacttctgaaagccaaaatgacgacgctcaactcgctaaacattcttcaggagtttgcatcaccatggttaagcacacgtcttgacagcattatttaccgcgtccgccaaggggatcatcttggactggctttgcgtcagtgcggttatcagttcccatccagggaagcagccaacttcctgtctttattacagggagatggcgcaacagagctaatcagcaattatggtcaacgatggcttagtcaaacacttcaacgtgtaaagaaacgggcaaacgtgattcgtttaattatgctgatatttcttgtcatgtctctcatgttactggtttttgccattatggatattcagtctattagtgacaacagcatgggtaacttttaa

SEQ ID NO: 8481 - DNA, 615 bp, Escherichia coli
atgttagtagaaaatattaataccactttaactggaaataataagaagaatgagcctcatgataaaggatggggaattttggagcagggaacaatagcgctcgttgttctttttgttatagtcgttgttctgggtagtttgtatgcgttacgtacaagaaccaatgtggcaactgaaaccgcaaatatacaaacaattatcacaagtgcccagagcctgctaaaaggtagcgatggatatacatttaccagcagtgccaaaatgacaggtgccctcattcagatgggggccgttccctctgggatgacagtacagggcgacaaaacatctggtacagcaacgctctataacgcatggggcggtgctgtaactgttgccccggcttcaacatcagggttcaacaacggttttaccgttacctatgataaagtcccacaggatgcctgtatccagattgccacacggatcagtaaaactggtttaactaacggcattaccctgaacagtactgctcacagtgatggaaaagtcactactgaagaagccagtacgcaatgcaaggcagataatggcagcactggtacaaacaaacttatcttcaccatcaatggttaa

SEQ ID NO: 8482 - DNA, 561 bp, Escherichia coli
atgtcagggggtacagtacccctcagacttatttcattaatcctgcttttttctcttattccacccgcccgagcttcatacgtagcccccaaacagatctggaccaacaagtgggacaattgctttgccgctgccggcgcgcgctatcaaattgaaccattattattgaaggctatttctgccggggaatcttcgttgaggccgggcgcaattaatataaataaggacaaaaaaacaggtaaagccagtagcacggattatgggttgatgcaaataaactcaacccatattccaaagctgataaatatgggcgtaataaaaaagtctgaggatttaatcaccaaaccatgccttaatatccatataggaagctggatactggcaagacattttcagatatgtggcgtcagctggaattgccttgggtcatacaatgccggattccgtaaggacagacatgaaacaagagagcaatatgccaataaaatatggagaatttatcgtgacatgaaagggatatgtcttcccggacagggaggcaggcaatgcagacaatcgtag

SEQ ID NO: 8483 - DNA, 657 bp, Escherichia coli
atgcagacaatcgtaggcataagtctatcccctgtttatatactgccattgatgttcacattttccattattggacgaactctgctattcagagttcgttattttttatctgatacgggacatctctggtataagacacaccctgctgttctgtcaggaatatggctatacagtatagctgtggcgttaattattttatcatcatcaccactgctctaccgtattcatgctgtccttattctttcgttcatactgcaaatggcggtaacggatgcactgacaggtttattaccaggaacattcacccggcgttttttaattgcaggaatgctatcacaaatcacgactgatatatggtggttccgtacaacagaatttgccactgctgcaattgtcttattctgccttcataaattagttaaccgccatcgtcttaatattggcactggagacctgtggcttattgcaggtattaccgcatggtcagggttatataacgccatatggtgtgtgttgctgggcacaggaggatttgtcttatggcattcaacatggtgcataaaagggcataaagaaggccctctgggtccatggctatgttttggccatgtccttttgctgctggataatctttatcaaccactatgggtaatctga

SEQ ID NO: 8484 - DNA, 1371 bp, Escherichia coli
atgaaaaaatatgaccgaggctgggcatcgctggaaactggcgcggctttactgattgttatgctcctgattgcctggggagcgggcatatggcaggactatattcaaacaaaaggatggcaaactgaagcacgtcttgtcagcaactggaccagtgcggcccgctcttatatagggaaaaactacacgactctccagggcagtagtaccacaacaactcctgccgttatcacgacaaccatgctgaaaaataccggctttttgtccagcgggtttactgagacaaacagcgaggggcagcggttacaggcatatgtggttcgaaacgcccaaaacccggaattactacaggcaatggttgtatccagtggtggcacaccttatccagtgaaagcacttatccagatggctaaggatattaccactggtcttggtggatatatccaggacggcaaaacagccacaggtgcattacgttcctggtcagtagctttaagtaattatggtgccaaaagcggtaacgggcatattgccgtattgttatcgacagatgaacttagtggtgcagctgaggacactgatcgtctttacagattccaggtcaatggtcgccctgacttaaacaaaatgcacacggccattgatatgggatcaaataacctgaataacgttggggcagtaaatgcccagacaggtaatttcagcggcaatgtgaatggtgtaaatggcactttcagcggtcaggtaaaaggcaatagcggaaactttgacgtaaatgtcaccgctggcggtgatatcagaagtaataatggttggttaattactcgtaacagtaaaggctggctcaatgaaactcacggtggcggattttatatgtccgatggatcatgggttcgaagtgtaaacaacaagggcatctataccggcggtcaggtgaaaggcggtactgttcgggctgatggtcgcctttatactggtgaatacttacaactggaaagaactgccgttgctggcgcatcatgttcgcctaacggccttgtaggccgcgataatacaggggcaatactttcgtgccaatccggtacttggcgtaaaagcaattctggtagtacggtgataactggtcgtatagcaaatggtcagcaaataccgctgccaacagggttttctgccagtcagtgctcatggagtgtgagcaatgcagaaaaccctcaaggttggaagccgaattactttgcaggatcagttgcaacttatgatgcaaatcgaattgttaaatgtggtttttatgatgaatacaatttccataaagggacatttagagctgatttaaccggaaaatgtagttatgtcgtcgcgtgtcagaactga

SEQ ID NO: 8485 - DNA, 1155 bp, Escherichia coli
atgccgtctccacgcatccgtaaaatgtccctgtcacgcgcactggataagtacctgaaaacagtttctgttcacaagaaagggcatcaacaggagttttaccggagcaatgttatcaagcgatatcccattgcccttcggaatatggacgaaataacaaccgttgatattgctacatacagagacgttcgtttagcagaaatcaacccccgaacgggtaaacccattacaggtaatactgtacgtcttgaactcgcccttctgtcatctctgttcaatattgctcgtgttgaatggggaacctgtcgtactaacccggttgaactggttcgcaagccgaaagtatcctccggacgagatcgccggctaacgtcttcagaagaacgtcgcctttctcgctatttccgcgaaaaaaatctgatgttgtatgtcattttccatcttgcccttgagacagccatgcggcagggcgaaatactggccttacgttgggagcacattgatttgcgccacggtgtggctcatttacctgaaaccaaaaacggtcactcacgggatgttcctctgtccagacgtgcccgtaactttcttcagatgatgcccgttaatctccacggcaatgtttttgattacaccgcatccggctttaaaaatgcctggagaatagccacacaacgacttcgcatcgaggacctgcattttcacgatctacggcatgaagcaataagccgcttcttcgaactgggtagcctgaatgtaatggagattgctgcaatatcaggacatcgttccatgaatatgctgaaacggtatactcatcttcgtgcatggcaactggtcagtaaacttgatgcccgccggcggcagacacaaaaagtggcagcatggtttgtgccgtatcctgcccatatcacgaccatcaatgaagaaaatgggcagaaagcgcatcgtattgagatcggtgattttgataaccttcacgtcactgccacaacgaaagaggaagcagttcaccgcgccagtgaggttttgttgcgtacactggccattgcagcacagaaaggcgaacgtgtcccatctcccggagcgttacctgttaacgaccctgactacattatgatttgccctctgaacccgggcagcaccccgctgtaa

SEQ ID NO: 8486 - DNA, 825 bp, Escherichia coli
atgagactgaatacgaccggtattgcggcccgaatgatgctctcgctggacaaaaaagcaatcggcgaaaaactcatcaacggtcgtcagataaacccgacacctctgcaggtccgttacccccaaggggtaagagaagttctggggataatgagcgaacaattagccatatccaccgctgatttaacccgaatcctgcttgaggatgctcttcataatatgtttatgcctgcggataacaccgcagggaacataataagcagaattgaatacatcatgctgtcgcatgatataaatgcgccattactggcaacattgctgtcgccatggaatatccgctccacggttatacaggacccggccagacttgcagactatctttcagctgacgctctcgaacatcttgctgaatattttaatctcaatccggactggctgaatggccatgaaaactatccgatagcgttgtccggtgaatggccagatactgctgataatttcagaatgcttattaatgatagcagcaacactgaagttattttctggcatagtttccccttcgcaggaaacacgaaaagagaatattacggggtaatattgagacagaaaaaagaaataaatggttctgtaatatatccggcactatcattatcaccaacaattctgaacgatgaaaaaagaaaatggttaactgaatatacaaccaggcagaatacaacaatgtctttgcgacgcgtcacgttgagacctggccttgccgggaaccttattacagggcaaatactacctgttagcttatttaatacgtctttattaccctggtaa

SEQ ID NO: 8487 - DNA, 1203 bp, Escherichia coli
atgatgaagaaaaatcatattacccgcaccatcattgcatctgctgtattattttcctttaacgctgcagcagcgacgtcatattttgaagcacgtaacgatgcaatggggggcaccggggtagcatcttcccattatggtgtggcacctctggcaaacccggctttactgacaaagcacaacagcaatgatgatttcagccttcttctgccgtctgttggggcacaagttgctgatcctgatgatgtatcaaataaagctgatgatgttaaagatgactgggatttgtttgatagtgctgttgataaccagcatggcgtacaacaggcagcagcaaatcttaaacatcgtctgcaggaattccgcaatatcaatgcagatgctcaggtaggtgtatcagctgtagcagccatggcaaatgacactctgccgtttgcccttatggtcaagtcttacggaactgtcagcgtaaacggaaaagtaaacgatgcagacctggattatctggacaaagttgccaatggaacaattaccgacgtcgataagaatgccctgacctcacgcgcattcgggcgtgcagctgtaattaccgacgtcggaatttcatttgccaaagaactggaaacggccggacaaaaatggtctcttggcgtcacaccaaaatatcagcgtgtggacctgtttaactacaacgtaacggttcgtgattacgacaaagacgattttgacggtgacaagtaccacaacacgaaaaacggattcaacgccgatattggtgcttatacagacctgaatgacaactggactgtcggtcttgttgcccagaacatcattccacgcagtattgatactaaagtcgtcaatggctttaaagaaaccttcaaagttcgtccacaggcaaccgccggtgtatcctggcataatgacctgtttaccactgctcttgacgttgatctgactcctgccagtggcttcacttctgacagcaaacgtcagtttgcaagtgttggtgctgaatttaacgcatggaaatgggcgcaattgcgtgccggttatcgtcagaacatggcatcaaactccggaagcgccttcaccgctggcgttggtatctctccatttgacgtcgtacatatcgatgtttccggcctggtaggaactgaccacgattacggtgcaatggcacaacttcagttcactttctga

SEQ ID NO: 8488 - DNA, 585 bp, Escherichia coli
atgatgaaaccacgttcttcttattcaaaaacagcattcattcttttattttctgttttcctggtagcggcagtgacaaaagcaaaaagctcgcttcccgatatcaccctggaacaggcaaaagaaattaatgctgataacaccgttattttccttttccgccatggagaacgttgcgaccgttcagatatgccatgctattcggataaaagcggaatcactattaccggtacagagaaagcacagcaggaaggtattaagttcgcaacaatcttcagtgaatatgatatttactccagcaatgcggtaagaaccatacaaactgcaaaattcttctccggtaaagaacccgtcgttatggacagtttatcagactgcaataatgatctttataagacgcttgaatcaatcgcaagagaatctcataaaaggaacatagtaataatgacacataatcattgtttatcatttctggccagagataggctcggcaagaaattcaaaccggcgtaccttgatgccctgatcatgcattacgatggtacccgactcatacttgacggaaaatacaacaaagaggcatag

SEQ ID NO: 8489 - DNA, 459 bp, Escherichia coli
atgaaccgtattatacctgcggggtgtcttgccgccctttttctggctggctgcaactccccttctcagcatactcctgttccgcgtaactacggtgctgcctctgatgtggcggttacccggcacactcagtacacattatgggacaaaggtgtgttttccggccaacttccggtttcaacggggtctcatcttctgacagctaacagcgatcgcctttcctttgactgggaaggtgatgcaattgaattactgaacgaactggccagagtcagggggatgcagtttaactacaatggtgtccgcctgccgttaccagtcaaccttcacgtccgggatatgacgttttccaatacgttgagacttattgaagcccagacagcctggagagcaacaatccatcaatatccgggcttgttacaggtcaacttcatgcagccggagaaccggaaaaaatga

SEQ ID NO: 8490 - DNA, 819 bp, Escherichia coli
atgaaagcactcacctctctcattttgccagtaatactgcttactggttgttcttcttcccctaccatctcgccaggtggtgtcaatacgccaccacctgacattaatgcatggcttaaaccacgaagtgaaaagccggatagtctgtcagaaacacgctggaaaatgctgaccgacgcaggtaaaacgcttggatttcgtggtggcaaggctcagcgttcatgggagctgattcaggcactcaacgcccgggaaagcacacttaatgccttatacgatttccggccactgattagcccggaaggctggctaccaccggttattgatgaagcacaggacgtagctcatatcacgccagatcaaatccggacctcttcccgggtctggaccatcattcgccctgaacgctttgtcagcaatccaccgggctggcgtgactggcttctccgggggctttcaacaacagccactccgggtacagaaggcagcgtcgttccagaagacagcgtgcaacgaaaagtgtgggaaaccgcattacggcagggatggcaggaaggaagacaaaacgccgacctgacgcttgaagccaaccagaaaaccctcacccgtgattaccggggcatgatgctgtactcacttctctggcgtcagggcatgatcacccgtccggatgtttctgatcaaatgcaaaccgttacaggtgacgggaaaaaactggtcactggagatcgtgttcgtcgccttaaaaatcatgcggaattcaatcttcagaaatctcactggcgtccgcttataggcactgaaggaggctcccgatga

SEQ ID NO: 8491 - DNA, 1149 bp, Escherichia coli
atgaatattcctgatgagtttggtctttttccgtttcagcgtttcactgcagatgaactacggcatttctttgtctggtgtgccgcacataaagtcagtgatgtggatctgaccggcgggtcacctgtatctgtcagtcgctttggccgacgggtgcgttgttccagtgcaacgttaccaaccacactcatgtcctccctgattgatgaactgttcggtcgggaagtcattccccgcgttctggcaggcaatccggttgacaggacgatacagattaacggggatgcatccgggcgctatggtcttaaacgcggagaacgcatccggttacgctctcacctcattcagggcacatctggtgcggaggagaaagcaatctcaataaccatgcgtgtcatcccgacagaaataccggacattctctccatgaacattgaaccagacctgcttgaagcaatggtctgcaaaagcggtctgggatttgtatgtggtgaaaccgggtcaggaaaatcaacgctgtgttcagcactgtaccgttacattatggacaatttccccgacgccaaaatcgtgacatatgaagacccggtggaatatatcctgggaaatgaaaacgatctgctcccaccgcatcaggcagaaatcgggcgtgatgtggtcagttttgctgccggactgcgttctgctgtacgacgtaatcccgaaattatcggtgttggtgagatcagggataacgaaaccgccgacgcagcggtacaggcaggcaacaccggacattactgcctgagcaccatgcatacgaaatctcctggtgaaacgctggcacgtcttcttgggctgtttccccctgtcatcagggattcgatggcctgggctgtcctgtcactgttgcagttcattctggttcaggttctggtcagaacaaatgacggtggtcgtaaagccgtccgggaatatatcgtcattaacgatgagcttcgcgacaatctttccggaatgccacatgcagagtgggggcatcacattgatgccataatccggcaggagaagcgccgtatccgggaccagattctggaaatgtatatccggaatgaagttgaccgaagagaagcgattctttttatcccgccaggggagttacggtcatga

SEQ ID NO: 8492 - DNA, 291 bp, Escherichia coli
atgaaaagagaaggtttctggcgatatgcaacaccgccagtcaacatccagggcgtacctctgccgttcaccatgatttatctgtttatatgcccctttccctccaaaacaaccttctggatttgcaccggcatcattttatttttcgttattctcgaccgttcaggctggactgtcaggacgatctgtactcgcatttacagcattctgagaggggccatcgcctccggtcgtccatggtggtatcgccaccatacggaatcaccacgagactggactggcctcgattaa

SEQ ID NO: 8493 - DNA, 552 bp, Escherichia coli
atgtcaggtaaaaaaactatcgttactctgctccgggtatcgctactggcatgcccgttactgttcacgacaccatcgtttgcaatgatcgacacgccatccgtgaaggtcggcttttctcctgaaggaagcgcatccgctctggtgcttgacacaatcaacagtgcggaaagctccatcaggatgatggcatattccttcaccgacccggatgtaatgcatgcgctggcaaaagcgaaaaaacgcggagtggacgtccgtattgttgttgatgacaaggggaatacgaaccgggcaagtcaggaagcgatgaaatatatcaacctgctggacattcctctccggactgtagatgccttccccatccatcacgacaaagtcatcattgttgacggaaacacggttgaaaccggctcctataacttctctcgtgctgctgcacgcaagaattcagagaatgtcgttgtgcttaagaatatgccggatgtagccgcacaatatcttgaacactggcaggatcgctggaataagggtacagactggagaccctga

SEQ ID NO: 8494 - DNA, 3768 bp, Escherichia coli
atgccgtctgtatcccgctaccgcacctggcttgccgtgcctgcagatgaaatagaagatctcaaaaaagcacatcccccgatgaacgggcacacgcccgtcctctgggataaagagcacaaactctggtttgcccgcccgggggcggacctgtccatgctggaccgctggctgccccgaccgcaggaagtctccatgaacggcagtgatccggtcaccgagtttgcccaggtactggaaaatgccggactggttctgaaagaactgccggccatggacggtaaaatccaccgggttccgaccaccgatgacaaaaacgggcaaaaaagtggcgcatatcgcggcttcctggacggcagacctgccggctggtacagggattatcgcagcgcggatgattcgccggtcaactggaccttctccggcggagagcagacagatccccgcgcaaggcttcacctgaaagcgcattcgctgcaacgcagggaggacgctgagcgggaactgaaagcacagtacaaccgacaggctgcttatgcccgccgctatgtcaacaaatggccgcaggccacggcacatgaatacctgacccggaaaggcattcaggctgcgccgggggtgcgaataaacgacaaaaatgagctcgttattcctttccgcaaccgtaacggcgcaatacgctcctaccagcgcattccggtcaccggcgggaaggatgcccgcatcctgaaagattccgagaaaaccggtaactggtttgcgctgggtacaccgcgcaacggccagccggtgctgtttgccgagggctatgccactgccgcctccctgcacgaagccaccggccttccggtgctgatgacagtggatgcgggcaacatgattgccgtggccgaagatgcccggcaaaaatggaagcaaagcccctttatcttctgtgccgacaacgatcatgcacgccaggttaacaaaggtatcgtcagtgcaacaaaagccgcagaactgacaggaggatcggtcatctttcctgcgttcaccgatgccgaaaaagcgcagggactgaccgatttcaatgacctggacgccagccggggacgggccgcttttcagcatgtcatcaacgcccagttagaacatatcggggtttccacccccaacagtaacaccccggaaatccgggaggcactggtgatcggcaacctcgtttttacaccggtccacactgaggaaaaaaccatgactccgacagaatatcctgaaacatcacccgatacagggcacagccatgaccagggaccttctctgccgtccgccacgcagcaggaacaaccaactgcttccagcagtaacattgctgatgaaacactgtcatttaccagtcacgccactgaaaataacggcaaagatgagcagcaccctgataacgttcaggcgcaaacggaaagctctgtagttcaggactcccctgcagaatcaccggcatccccggaaagtacaacggcgtctgcccctgatgaacccgctcatccggcggaacctccggaaaaagttgtctctgtggccacagataaagactggcgtgaatttgaagccgaactgtcacaaccggaaaaaaacgagttacaacaggagtccggcacttcaccagaaataccggcccctgctgctgcccccgccgcccctgaagacagcccctcatctgaaaccatgaatgaatcagccgaaccatcaccttcccctgatgcagtcaaagaggaaatgaccgtgatgacggagcctgatgacaaacaaagcaccggaatatccccggatactccccgggaagaggcggtcagccatgtaactgaagacattccccttcagccagagccgttccttcctgagtcagatggccctgaagaatacgaagactacagcgcatatcaggagctgatgaacaatgaaaatcctgagcatctgcaggaaaacagtgatatgccgtcgcaaccggacacaggccccgttcaggcagatgagtcagaacttcaggccacaacagccactatagaaccggctgtccgggatgaacccactccgcagcaacctgttcagagcacatcaccttctgataatacttcatcgtttctcgacaaagcgcgtggcctttttacgcgtaaaaaaacggattcacaggcgcatgagaacagtgatcccacgccctcagcggaaaccacgacgactccaccgatacctgacagtattgtctacgccccggaacgttctgatgcaccgatatcgctcaacatggacgaaattcttaaagagcttgactgggaaaaacgagcagacagaaccgtcctgtacaaactggatggcaaacctgccttcattgaccgggtaaaccggctggaaatggtcaacggtgccagcaatgacgatcgcagcgttctggccgcacttgctgtggccaccaaattttatgggggcgtcatagagctgacgggcagtgatgcctttaagcaaaaagcaatgcagttgattatcgagcacaacatcgatgtccggatgaaattgccagatcaacgggctgaactagaaaaattacgcaaggaaatggctgtcagtaaggatgcagttgtcacccatcagccaacaccggaacttaaccggaataccccagaacaaccggctgtccctgaccccgttcaggaaaaagaagccacacaatccccggcgtccccagtagcccctgaagcatcaaccgtcagcaccgcctctgcaccatcaccggctgaaccaggcaaaacggcagatgtggcaccagacgaagaaccaccaggaaaaattcgcccgggagagagcgtgactgccgtactgcacaattttggtcgtgctgaatatgcacccggcaaaggagagagtttctttgttgagcttaaaaaccgcagtggcagcaaactctactggggggaacaactggaaagtctggtcaaaaaccatcagaaaggtgacgtggtgacactgacacttcagaaccgcgaacaattcatcctcccgggagagcaaaaagcacgtttccggaataagtggtccatggagtcagttaccaacgggatctcggtatcacatgataatccggataaaggtcagcgtattcaggcgattccggtcgaaacctttatgaaagtggctgcgcaaatcagccaggggtggcccgaagagatgaaagcgttacgtatgccagaaaacgtcggctcacatctgtttatcggtgaagaccgacatccggtctccgcgccacagaacgcaaatcaggtaacagaaataaccagcgcagcccctgacaagctgacacctgttctgggatcagtggataaggatacgcgtgaactcaacctgctacttgtccagagtgccgatgaacatctgcagggtgtggtccggctgaacggcacattgtatccggcactggccaccccatcagccgacaacagtcagctggttatcaatgcgctgaccgacaaaggtttacgctttgcaggttatggtgaagcggtaaaccacgatgctgacagcacgaatcgccctgcaccggagcttatgcagtttcatctgaaaacccgggaagaaccgctttttgctgctgtctacacgccggaaaaacaacctgatgcgttgtaccggaacctgggcttcgagcagtcatggcagcagtggtccaacagccaaaagccggaggacaggcaggaaaaaactctgcatcaggatctctcccacagccccggccgatga

SEQ ID NO: 8495 - DNA, 348 bp, Escherichia coli
atgaacatgcataagtctctggttgccgtgctcggccttatcctgatttcatccacggcaagtgctgcaacctgtcgtgcgggtagcgcggcacaggccggtagtaatacaggatatgagcgagcacgtgcagctgcggatgcatggtcacaacgtgaaaacgatgtttcctcatccctgcagtcctgtctgtcacgaatcaaaaaaatcagcataaacctcccccagttccccagccttgacgacattctgtcgcagctggaaaaccaggtctgcgacgcggtcgtggacaaggtgaatgaaaagctgccggggaatattgatccctggaaggactacaacctatga

SEQ ID NO: 8496 - DNA, 693 bp, Escherichia coli
atgaccgaaaataccgtgccatcctcgccatcacatccggcacctgacccggaaatactgaagagcacaatcagggctatgaagcagtcagaacagcgggcaaataatgtccctgcgctgataaaagcgcttttatgtacgggcacatgtcttcttatcagtattactggtaacgccattcagtactggcactcaacgaatgtggagcgcgaatatttcgctacagacaatggtcgtctggtcaggctggcaccaacaagtcagccagcatggagtcagaatgatgcaatggcctttggcagccaggcactggcgaccgcattcaacctggattttgtgcactatcgttcacagatctcctctctgtctccgcgtttttctgacgaaggttttgccggatatgtgaatgcattacaggcatctaacattctggagacgatcaagaaagagaagatgaatctgaccgccacgacaggcgctggcgttctggttcgacagggacaaatgtccgacggcgtatggttctggacatttcagtatcctgtccgtatgcgtctggtcggccagacaaccagcaagccagaacagtcttttgttttcgaaatcaccatccagcgtgttgaccccagactgaaaccatccggtatggaaatccggcagatgatctcccgtaacgccggaccgaactcctga

SEQ ID NO: 8497 - DNA, 984 bp, Escherichia coli
atgcaatcacgttatttactgagcacactgctcctggtgtgcagcgccgccacgtctgcagataacgcaggatggcagaacgcacgcacaccacaaacgacaaattctgccagcgatcacgttcagaacgcctcccaaaacaccggaggtgttccggcaacactggtaaaaggtgagcttcctgcccccgggcaggccagcccgctggtacaggatgcggcaagacttgattctgagctctccgccgatgagattcgctcactacgcagtctcatggcggataacgagcgggccatcaatgcgcccatcaccagtgttgtaccccgtatcagctctctgacagttaatctgtcccccggtgccagccttcctcttgttcgcacagccatgaacaacctgagcgtagtgacatttaccgatatcaacggttcaccatggccacaatccgatcctccttataacgcggcaccaaaactctttgatgtgcagtacaacgagaacatggtgacaatcacaccattgcggccatgggcatccggaaacatttctgtctacctgaaaggtctgtcggtaccggtcatcctgaacgtaaccagtggcgaaacagatacgccgtcatccagtcaggaaatggacagtcgtctggatctgcgaataccacggcagggaccaaccagcccggttgtctccatcccgacggataaaatcgccctgcatgatgcaacattacaggcatttctggatggtattcctccccgggacccttcagttaagaggctgaaattcacaggtaatgtcccggatacaacgatctggcaacacggcgatgacctactggttcgttcccgggcgatgttgcgcgatgaatttgaacagaccttgtcctctgccgacggaactcatctctggaaacttcccgtcaccccactactgactttctctgtgaatggccagtccgttcacgtgacaccagaactggagtaa

SEQ ID NO: 8498 - DNA, 1290 bp, Escherichia coli
atgagtgctgaacaggatgccggtaaatccggaaagaaactggctgccctgcttggactgggcagcatcatcttatttggcgtcggctatatcgcgttttccaaaatatcagggagtaacagcgatatgcagtcagccgtgaacattaacagtgcagcaagcggcggaacgcgcagcgttaccgaaacgcctcactatcgtgaactgttaagagctgataatgaacgaggggccgcagctgcagcccgcaataatcagacgttcattgccagtcttccacaggggcttgatattccggacactccggaaaagcaacaacagcctgcagcaaaaccggaaaactatgctcatcgccaggcttccggcacaccacaggaggatcgagcagccagtgaaaaacgtatggagcggctgcaaaagctgattgtaagaataaaagatcagcatcctgccggtagtacaccaaccatagcaacggctatgtggaataaatctccggcagaaacaacagggcagaatggtacgcagcaattcgcattacagaatgccagcctgtccacgccggtagcagaaaaagggatacaactgatacctgctctgacccgtataccagcatatattgatacggcagtggattctgataacccgtcatccaaggttatcgcaaccattcccgctggcccctgggcaggggcaacgctgttcagtccgggagtcaaactggtgggtaacggcgtggagatccatttcgaccggatgagctggaacggcatggaccttaaggtcaatgcatatgctcaacgggaagacaacctgatgtcatccgtggccagcaatgtgaatacacgctggtttaaacatatcattctgccgtcagtgttaggaggtgtgggcagtattggcacactttataaagatgccaacacgcaggttattcagggtaactatggcacggttaccggacgcgtgggaatgcccagtggtgaagctgttgcgggcgttattgccggtggtatggcggaaagaggaagtcagatattaacccgccaggcagaaagtgagccctataaacaggtagaagtgtatcagcatgaagtcgtatcaattctgtttgttgacccggtaatgacaaacgacgccaggtcatcttccctttccagtggcatttccccttcagttaatcgtacatcacagacggaacaacgctcgcaggcacgaatgcagacagccatggagcaaagaaaagctgtgatgcaacgtcggtatgatgaacaaccggagacaccataa

SEQ ID NO: 8499 - DNA, 705 bp, Escherichia coli
atgaaacctgaaacagaaatagatgaaaccggcagcttcggtgaacccgaagagaaacccgcccctttctggaaacgttccgtctgggggatatctgtagcaacatgggggctatgtgcagtcgtattactcgcagccatatggtatctgttcctgagagcaccatcggaaacaggcatgcctccgtttaatgatgcggatgctggcgtacagacctggcaaaccacacaagaatcatcaccttccgttcagtccactgagaccatgactgtccggacaggagaagatatgagccagcttgcccgggatgtaaaaacagagctggataaccgcgatgaaaaaattcaggcaacactgaatatgcttcacgacagcattaacaagctgggcgaagctataaaaaaggatgaagaatacgcacaggaaacgcgccgtcagctggatgatatccggagccacctgaacggaatgatgacacagaaaagcgtcaccgaatcctcttccacaccgcatccagcaaagaaaaaaacgtcgtctgtacttaacggaatgaaaatcatgtcgatggaaactggcatggcctggattcgctggcagggtagtacctgggctgtcagagaaggtcagactctgggcaatgtggtgatccagcggattgatccgacgacccggaccatcatcaccagtgcagggacgttacgctga

SEQ ID NO: 8500 - DNA, 528 bp, Escherichia coli
atgaacatggatgccctgaccgccattgagaactttgccagcagtattttcagtgccggaatggatttcctgtttacctggggagaattcatcggggtgatcagcatgattaccctgtttgcccgcgcccgttcagccggtccggtaaaaatgtctcccggaaaatttattgcggggatgttaaccagctgcatgctcgtatcactcccggcaatgattaacgccggaggcgtacaaatgggattcagggctgactcatttggcccgattgcatatgtacaacctcagacgtttggcgctgctgctggcgcagcaaatgcagttctgtcgctggccaagctggccggtgttggatttgtaatgaacgggatatccatctggcgcaaggccggactcgatggacataccgcactgagtgccagtgaatccgtcagtaagggaaacgtcaaatttattgccggcgtcctgctggtctttatcgatcgtgtcctcaatgccctgctggcaagcattggaatcgtcttctga

SEQ ID NO: 8501 - DNA, 405 bp, Escherichia coli
atgtcacgtattcgtgtcgtagcggcccgtctgtacgccgcatttatccacgcacaactgtttgtaatgtcatgccggagcaaactgactaagttcctgctgctcattcccatgatgttgctgcccaaagccgttcttgccgatggagatcttgccgatatggttcgcaatgtcgaacaaggtgccaaaacagcacagtcatcatcactgactattgcgcagttcatcggcgtaattctgtttctcgggggcctgattggcctgaaaaaagttgggaaacaaggggggatgggactggctggttgcattgtatctatcgtcattggggcgctacttgtcgccggacctgaaatgatgagtcgcagccagaaacagctggggatttccacaatttccattggctaa

SEQ ID NO: 8502 - DNA, 189 bp, Escherichia coli
atgtctgcctggagcccggagcacataacgttacgacgaacagaaaacggcaatgtgattgcccacgacagtcgggacgatcaggaattcatttttgcagaatgctgttccgatgaaatcgcaaacatcattctggaagccgtgaaacgttacaccagtacggagcctgctcatgcaacacagcattaa

SEQ ID NO: 8503 - DNA, 801 bp, Escherichia coli
atgcaacacagcattaaagacttgtggttgtatccctttccagaaattgatgtggttcatacacaggagccactgttaccggaaccggaattaacaacgcccggtcgatgtatctgctgccggcaaaacgtcaggcaccgtttcagactggatgactcatggccactcagacagcttaccgacacaatcagtgacacacgagttcgtcttaataaggccacagaacatctggataagttaaaaaagcgtggtgaaccagtcgcaaccggcgaaaaggaaaagtacaacacggcagtaaaagccgctgaacgggcgcttgagcaggcccgtctgtctgccagacgtctttcactccgccatgtacagaaagctgaaatcaccagtacagagtcgttgtcagagaaagagcaggaactgtttcatgaagacggcccgccttacagcttatgtgctttctgccacgcctggcattcactgaatggttatgccgcagcacagggcgttatggtgtggctacccgaccttcatccatccacggtcgtggcccttaaccgtcgttcattacaggaagttttcagtaatgataagttccgggtccggcggggacgggaagcgctctctgcactgatgcaaaacagactggcggttgaggataaattccgcagtttccgcccggccgatttcgctgacgtttttcgtcgctatccaccttccggtcgttcgcccctgcgtgaaaaaatgaacgggattgccctgattctgacaccagattcattcatcaaaaaagaatacgttgattga

SEQ ID NO: 8504 - DNA, 3045 bp, Escherichia coli
atgaacataaaccgtttaatcttcactatcgaagactgtctgaacacgctatcccgtttctctgtcgcaagcagttttgttgagtattgcgatttacgtactgtaattggtctggacagacaggatcgtgaacgtcgcccatggctgaattcgccctatattgcagccacaaagcgtggagaatatctctctgtctttgaagtcagcggtgctttcagggaaatggatgaagcatccgaccagactggcccaggttcactggaatcgctgatcaccagcatgagtgacagcctgaatacggcatataaaaacagcggtcataaaatcagcttcgtttttgagcgtgatcctgacatggggaaagaagaaatcgaagacatggtcgccccacaaaagcgctcactggctaatacaggtatccagttacaggatgtggtcgatgagaaagtcacaacactgtccccatggctggtccgggagcgttgctggctggcgatctggagtggacccgaccttatcagcaacagcgatcgcaccgcccatgatgagcttgtcagaagactggctgaacgggtaccgaaagcacgctttgcccagtccccctggcagtggaccttatctgcactgaaaatccgccacgaagcttttcttgataatgtggaacaggcactgagacattcatctgatggcctgattctccggctactggatatacacgaggtcgggcgtgaaatacgtcgtcagacagaacggcacagcacaccgcgtaactggcaaccccacctgcctgaagatgcccagccagcgggatatcgctggactgacgatgaatccgtactacatgctccttcattgcatttgcagttattcaacactcaggtgaccacacagggcaacctggttcaggcgggtggactctggcacggaatggtatcgattactttacctccgcaaaatctgcagacgtttaacgaactggtccgtgccgtcccccgcgcagtcccctggcgcatcagaatggatctgatgcccggcgggatgaaggctcttaatctgaagaaaacgcttctgacttacagcagcttcatttctgccgttcgtccaatgtatgaatccgttatgaccctggcggcaacggatgaaaaagaacctgtctgcataatgaccatcatggcctccacgtggggaaaaacacgtgaaatatgcacacgaaaccaggccattctgaaatcggccattgaaggctggggcgtatgtggcaccacgacaacatttggcgatccccgacgcgcctgggtgaataccattctcgcggcatccggaggctccggcccggttcccctgtatcccccgttgtcacatgccatctcgcttttcccgcttaacagggcaggctctgtctggcgaggcaaagggaatctgatgttacatacagaagacggttccgcatttgaggttggtctggcgtcatcccaacaaaataaacatacagaactggcaccaggcgatccgggactgggtaaatcagttctgattaatacgttgtcggaaatacagatatcatctgctcagaaaaacctgcccttcattgcctatatcgataagggatacagtgctcagggactggttcagcttattcgcgacagtcttcctccggaaagaaaagacgaagctgtcggtattattctgagcaatgatccggaatacacccgtaacctttttgacgtgatgtacggcgctaaaaagcctattacgccggaaaagaatttcatgtcatctgtgctgtgtgctctctgtgtcgataccggtaccggtcaaccctgtaaccccggagacacccgacaaattatcaaccagcttatcgagctggcttttaaagagtacggtgaaaataatccgcgactttatcgcgcctcaacggaagaactggtggattcagcactgcaggactcgggactgtatgaaaaacatgatgcaacctggtgggccagatcaacctggttcgaagtccgggatatgctccacaatgccgggtatatcatggcggctcagcgggcacattatcaggcaatgccccagcttcccgaagtgtcctcgatgctgggccataccagtctcagggatgttttcggtactgttcagcgtgatggttcaaacgaacttctgctggactacatccgccgcgctctcgagcagggacataacgactaccccatgatatccgggtatacccggtttatgatcaacccggaaacccgggtcatcgctgtcgatctgaataatgttgccggtgacaaaacgcctgcaggcaggcttaaaaccggcatcatgtacctgcttgcaggtcagatcgccggtggtgacttcaccctgccacaatacagggatgaagtgttaaagcagcttccacgggaataccatgaaatcgctcttaaacgtattaaccaacttgatcaggaggttaagacaaaagtttatgatgaactgcataacgcccggggcattgacttcatctgggaaaatctggatacccaggagcgtgagcaacgcaagtttgctatccgcacggttctgagtacgcagtatctgagggactacccggaaagcgttcttaagtcagcaaatactctctggttactgcgctacaaacccgaagatatccccgtactgagggataacttcaacgttcctgaatttatgctgaaacgcttcctgaaaatgccggaaggcccggcaccagatggtagtggtgttcctgttctgggagtattcagggtaaaaagtggcacgcttgcgagaatactcaaatttaccgtcggtccactggagctatgggcgctgaactcatcgccaaaagacagtgccctgcgtaaaacactgacaaataagttaggttcagttcgggcacgtaagattctggccgaaaacttccccagaggttctgcaacgtcattaattgagcaccgggcgggccaacataacagtgacaatgttattgaagaactggcctcggagctcatccgaaaacagggatacaatctctga

SEQ ID NO: 8505 - DNA, 615 bp, Escherichia coli
atgtgtacaattcatatcaccccacgctgccggagacctgccagagggcaggtatttcttaaaaaacttgaggtaaaaggtgacagtttctcattcactctgccgtcacgtgtcttcaggttacatccggcccccaatcccagagtgatatacgcctcggatgccagaacacagggaaaggtcacaggcatgcggctgttgttgccgtccagcacagatgagctgataacaacggcaatatggcaggtttctgtcccggatgaagcaccattcgacgttcagcatgtcatccagtggatactcccttcaccgctggcttcgctgatgtccgatgatacctggttatggccatccgttcccggaacgccggcactaagtgccggtgactggcctgttatggatactgacccttccaccttacggcgcgtcagacgtcgttctttcagcatcatcgataaccggaacaggaaaggttatatcaccaggcgatatcagtgtttcccactggccccactacctgaagacagaaaatacgacagccttcctgaccttgtgctccatcccgagcaggagacaataaaatgcaaagaaaaacattactcgcagcccttatag

SEQ ID NO: 8506 - DNA, 1203 bp, Escherichia coli
atgcaaagaaaaacattactcgcagcccttatagccaccctgagtggaacggcatgccaggctcatgcttattcagtcaccgtcgtcgccagccggcctgttgaagagcaggtcatccccagaatggaagccatcaaagatgtccttggcaacatactgagtacccagacagccacgggtaccgctatcaatcagaactctgaaaagctggcaagtgtcattgcccagaacggacaggcgacacgtcagcagatgattttcagtaatgaaactcagcgcctcgaggaggcacggaaaagcttcaccgtgccagactccatctgcagtgaatccgcatcagggattgcaacagaaagcaaaagtgcctcagcatccgcagcctcaaaactcagtaaaggtggcggtgtgagcaaccgtagcatccgcgaccgtctggccagcgcagcaaactctcccgtgcgggaagcttatgatggcgcggccatacacgccagttactgtacagaagcagaatatgcacgttttggaggaaccgccgtttgtccttctgtgggcgaaataccaggtggagacagccaggtacgctcgatttaccacggcgcaggtacagcggacacacctgcggcactgacatgggatcagaagcaaatagatgcagcgactgcttacatgaaaaacacttcccgcccctctgccggtcgtgctctgggtaaaggagaagtgaatacccagagtgggcgaacctacgtcggactccagaacgaatacaacggcatcattgattctgcgtcgaatccccaactgacgctgattgctgacagcacgcctaatgaaagcacacgtaaagcactggctgaaacactgcagtcagactcagcggccgcttacttcgaccaggtggcttcaccagaagcaaaagcacggggatatatgagtacccgtgagtttgaagcttttgaggctggccggcgctacgccaacacagcatacctggtggatttacaggaaatgcagggggataacctgctccgtgaactggtaagaatcactgcgcaaatgaactggcagctgaacgatctgaaagaacagatccgccagggtaatgttatctctggccagcaactggctctgactgcccgccagtattatgaaaaacaactcggtagccttgagaaaacaatcaatcaggcaaacgcacgttga

SEQ ID NO: 8507 - DNA, 585 bp, Escherichia coli
atgaataagttaccggaaaattcagaccagacgaaaaacgtcaaaaaatcaccatccataacccgcatagccacccgggggattattaacatttttgttcctctgatggagactcgcctgataacgaattctgtacagcatatgctggaacaacaaaaacgcaggctggacagatttcgtcaggtaaataataaaaaggcgcaactccacctcacgtgggaagaagctctgcaggccagccatatgtcagtagacgatctggatcgtcgtttccgccggcgcagaacagtatggcgattctgttgctggagtctgctggccatcgctttgtttctcagtggtatgctctttgccgcctcttcattacctcttacgactctggtacgcgccatcagcactcttgtgttgatactgtcaggcgtcgctctttgtgcttccagagcactgattgttacataccgcctctggcagttgcatgaacgaaaagtcagcgaacccgagcaggggactttccgtgattttctgaacgaccgcaatggctggcgcaatgccacattaattgccgtaaccagtaaacaatactga

SEQ ID NO: 8508 - DNA, 2169 bp, Escherichia coli
gtgaaaattttacttcgcgcactctgtgcaggccttgctatatcctcactgccggcaatggcttcagtgacctatcaggatattgtgtctgccgcaaccaatcctgacgatctgtcccgtcaggcgctggtcacgatattcggtgatgtagtcaccaatccactgtcaaccagcgcccccactctgatcggaagcatgttcggggcgttcaacagtatcatcgccgtacttgccgttgtctggtttatgttcattggtatccgtcatgttgtgcgttcggggcatcagggacaggtattcagcaccggacgcgatatcgtcggcacactgagtgtcgttgcaggttttctgatgatcgttccaaccggaaatggctggagtatcgctcagctcattatgttatggggcgcatcgataatgggggttgggtccgccaatgtgatggtgcaacttgccgctgataatatcgcaaatggttattcaatgactgtacagccagttcaggcatccacacgaacagcagcgcgtggcatttttgaaatggaactgtgtaagtatgcggttaacgcaggactaaatgattttaatcagacggtcaaatcctcgacttcactgatgacagaatcagctaaaaccgccagtggtaattacactgtcacggtatccaatggcagcggtatctgtggttcagccagcctgtcagtagaaggaaacggaactacagatcaatcgacgattggaaaattctttaatcccttcagtaaaaacgaatacagcggtgttatctcagcacaacgtgcagccatggataatatgattagcgacatggacaacgctgccagtgagtttgtgacaacatttctggaaaaaagaaattctggcaacggaacattgccggatatcgagacacggattcagagagcagccgacgagtatgaacgcgctgtacaaaaatcgctacctattgataacggagaacaatccaggaaagaagctctcaagtcttatctcacaacctatggatgggtgacgcttggcgcgtggtatcagacctttgccactgctaaccagcgtctggcagagctggctgacagagctccagctgtaacttcaatgtcatcacttggggaagttggcgatactgatttatttagtgctgttatgggggcatacaagactcaattacagaactccacatatactccaacgataggaacgataacaactcaagatgaaagtaatgcagctaatagcacagacccacaaagtgtggtcatgaaaagtatagcgccaaccatattaaaatggacaaaccaagctgctactgaatggtcaggaacaggaacaaccagcaaccaagttaacccattaattaagatgaaaaacatcggcgattatacattgggtacaacagaaattctctggacaggatatacaactgtcagagttctcgcgacaatgggtgataactctattttcggaaaggctgttaatttgttctctggattacctaaaggatttgttgctctgctggatgctgcagctcccccaatatatttcttgttgttcctgttgttttgtgcgggtttttccttatcaatttacctaccatttataccattcattttctggatgacaggcattgggaactggatagtaagcgtattaataggatgcaccgccgggcctctgtgggcagcaacacatctaggaacatcagaggacagaggaagtcgagcagcttacggatatatatacttaattgacagcatgataagaccacctctcatggtattcggtttcttttttgcctctgtcgccatcattgccgtcggcacaatattaaactcactgtttggcgcagcactagttaacgtacaggtaaaatcattaacagggatattcagccttgccgggttcctgctaatttacgcccgtatgtgtacaacgtctgtagctgcaatatttgctttacaagcatatcttcctgaccatgttatcaatttcttgggtggtagagatggtgtaaatactcttggcaacctcacctcatcagtaaaagatatttttgcaggttctaatagaaatattagacacagccctggagttagagaggacagactaaaaaatgtcacaaaggatgataataaagatggaataaaaggataa

SEQ ID NO: 8509 - DNA, 651 bp, Escherichia coli
atgcaaatggtaaaaacaatcaatagatatcctgcttggtggacattatattacgcccttagatttatatatttcataagcataccagtgttatccatttttattcttttcggagtgctctccattacatcttcaagatatgtgacgcaagaagattatatttatacttgcgtctgtctgtttttactaattgcccctgcaatattgatgtattcccgagcaagctcaagaaaagacaaaataaaaaaaattgtcgcggagataaaaaacaccggtttttattcacctgacaaagaatatgagggactgtcttttactcagggcgtctattttggcgtggataccaaaaaaggcactatgctgtatgctcgtgcttaccctggaaatataatggatattatcggctttgacattgacaacttcacacgcactgtgaccgacgccaagacactagagatttatacaaaatacataaatataccaatggtctcaattccgtcaggatgcatccatcccaaaatgatggcggatacaatgcatgcaatggcagaaagaggatatgattaccctgtcgactttcctcgcctaattcaggagaagcgtaaggagtgggagcagattgcaggcatgcctgtagccgaagtattttaa

SEQ ID NO: 8510 - DNA, 210 bp, Escherichia coli
atgagcatgcctcctgcgatagctaatactttcttgtttgaaatgatgaagagtaaatcaaaagacgttacacttgctgcgatctatgcattaggtgaaggccggtgtcaggcggagaacattactcgtgaattacatagattgagtcaaagtgatgatatggaaataaaaattgctgcgattaaagcacttggtcgaatttatcggtaa

SEQ ID NO: 8511 - DNA, 177 bp, Escherichia coli
atgaatctggtagacgcctttgtcaaaaaagtaatatccgggccatataaagaatatggaaaatggtggatagatgttgaatacatttcatggggcgttcccgggaaaacaagactgatgtttgagtcaaaggagcaggcactggaagttaaagaagggtacaaatttttaacgtga

SEQ ID NO: 8512 - DNA, 252 bp, Escherichia coli
atgtcagaaaagtggagtaaagaattcgactcttgctttcaggtggggagcatagaagaaattgccgatgctctcgagaaacgcagcggaagcgaggaaaacgcgttagccatgctggcaatgacagccttcacactcatgacccgacgtggtatctgcgaaatgcagaacgtggcccccgatggcaaaggcattcggctggagctaatcggcttcagggaaaatgaaacaataccggatacgcttcattga

SEQ ID NO: 8513 - DNA, 156 bp, Escherichia coli
atgatgccacagcgaacgtttttaatgatgttaatcgtcatctgtgtgacgattctgtgttttgtctggatggtgagggattcgctttgcgtactccggctccagcagggaaacacagtgcttgtggcaacgttagcctacgaagttaaacgttaa

SEQ ID NO: 8514 - DNA, 1209 bp, Escherichia coli
atgtcttacaatcgacagcctgtcgcagaagatcctatgcagatatggggcgctgttggtgtccttcttatcctgctgctattcgttatatggttattcttgccggaagtggtttacgccagctgcctgattcttcataccttatggggactggttgactggggaccatttcataactatgcagcaccacgatacaacctgcttgccatgaccggtaacaacgccgccaacataagctatagccagtgggttaacgtcatggagcagaccataggtattctgtggatgtacctcttacctgtgacactctggtgtttgtgggagtggtatcaacatccgggacaaagtcgtttcacccgcagaccagtagatattacccgcctgccacacatctttgcttcgttgtcccctgctatcgcccctgtactggcagatggtgatccggaaaaactctttcatggtggcaaacgacctgaacggcgggttgctctcaccccggaagcatttgtcgagcagcatactctcatcaccaatatgcagctcgatgttgcagctgcaagacgatgtttcatggcccagttaggtaaacctttaacgtcctggaaagacatggcaccacatgaaaaagcgctctttgccatatttggtcttcagtatttcctggatgatcgtaaggcagcattaaagctcatggatacactgaacctctcatgcagaattaaaagcaaacgggacagtgggaaattctgtacccctgtttattcactggccaaatcagctttccagagagtgattaaaagcaacggagcacagcaatggctgaaacaacatcgctacgtccgcagtgggctggtctggctgtatgcacatgacctgcggcttacgccacccaactggatttggctgaaaggcgtggacaggacgctgttttatgcattacaccgcgccaataccacgaaaggatttattgaaggcgctggcgtggtggccgttgcacgtgcagaggccgaagccatgcgttttggtcttccctgccctgaaccctgtgttgatgaagcggtggaaggcttacggcgggatatgctcagtctcggtcttatctgggatgaaccacaaccagatcgcgaccggaaacgccgcatcctgaccaactggtccctcaccgacgacatcctgccccgcacacctgctacagacaacgaattctga

SEQ ID NO: 8515 - DNA, 1071 bp, Escherichia coli
atgacaatcgagtactttgcaacacgcattgcaaaacatatttccgtgcaggcaatctggccggatggcaggacagaaattattgccgtccttccacgggatgccctgtcagggctggtaacacgaaataatcaactgattcatatagcctttgacgccatgggcacccgtaacagagaaaccgtcctgattgataaacaggagcataacgctgaccagatacttacagctattgattcctgcctgcgccttgaatatctgatggaacgccgcttcagcagaacacctttgttccgtggcataatcgccagcgttgtgctgttcgtaatggcaacgattggcttctctctgttccgctatgttgatcgtgtattctgggatgatacaacgcctgaagcagtacagacagcaggtgagccacgactgctaccccctcacctgaatcacactgtgccattaaatgaaggcattcaactcccggttcccccgaaaaaagacgtccaggtcccggagaaaacaatcacaagcaaaaatccggaagccgcagctgcgcgacataatctggctactgttctgaagcggaacgccgatcggggcatgtttaccatcaacctgtcatccggtcatgaacgaaccctgttcgcatttctcgatcctgcctgtcctaactgcagacttctggagccggccttaaaacgcctggccagcgacttcaatgtcgttatctacccggtttcagttattggtggagaggaatccaccgaccgtgtggcaccactgctgtgtgaaaaagatgctcagaaacgtgctgccggctggcaccgactgtattccgcagataacggaatgatgacgccatcagaagaaacaacgcctgcagatgaaacatgcctgaaagcagccagagctgcgattgatgttaacaatgtcgccttccgtaagttcggatttgccggtaccccatgggtgctgtccgacaccggctggcatctgcctacaggaattctgcaggaaactggcacgcttaatttattcctgaaaaccaccgacagcgagtctggccatgagtga

SEQ ID NO: 8516 - DNA, 2292 bp, Escherichia coli
atgagtgaacatcgcgttaaccccgagcttttacaccgtacagcctggggaaatcctgtctggaatgcactccagagtctcaatatctatggcttttgcctggtggcaagtcttgtggccagttttatctggccacttgcattaccggcatgtctgttgttcacactgataacaatgctggtatttagtctgcagcgatggcgctgccctcttcgtatgcccatgacgctggaatgtgctgacccgtcacaggacagaatgattaaaagaagtcttttcagcttctggccaaccctgttccagtatgaggtcattctggaatcaccggccagcggcatattctatgttggttatcaacgcgtcagggatattggcagggagttatggctgagtatggacgatctgacccgccatataatgtttttcgccaccaccggtggcggtaaaacggaaaccatctttgcctgggcgattaacccactttgctgggcaagaggattcacccttgtcgatggcaaggcacagaatgatacggcaagaacgatctggtatctggccagacgctttggacgtgaagacgatgtggaagtcattaacttcatgaacggaggaaaatcccgcagtgaaatcattctgagtggtgaaaaaacgcgtcctcagtcaaatacctggaatcccttctgttacagcactgaggcattcacagcggagacaatgcagtcaatgctgccccagaacgtccaggggggcgagtggcagtcccgggccattgccatgaataaggcactggtatttggtactaaattctggtgtgtgcgcgaaggcaaaacaatgtcgctgcagatgctccgtgaacatatgactctcgaagggatggccaaactttactgtcgtggcctcgatgatcagtggccggaagaagctatcgcaccgttacgtaactaccttcaggacgttcccggtttcgacctgtcgctggtcaggacaccatcagcctggacggaagaacccagaaaacaacatgcttatctctccgggcagttttctgaaactttcagcacattcacggaagcattcggggatatttttgctgaagattccggtgatatcgatatccgtgacagcattcacagcgacaggattctgatggtaatgatccccgctctggatacatcagcgcatacaacgtctgctcttggacgaatgtttatcacccagaaaagtatgattctcgcccgtgatttgggctaccgcctcgaaggaactgattccgatgcactggaagtcaaaaaatataaggggcgtttcccttatctgtgtttccttgatgaagtgggggcatactatacggaccgtattgctgtggaagccactcaggtgcgttcactggattttgctctgattttgatggcacaggaccaggaacgtatagaaggacagacaacagccacgaatactgcaacactgatgcagaacacggggacaaaatttgccggcaggattgtcagcgagggtagtacggccagaacgctgaaaagcgccgccggtgaagaagccagggcgagaatgaacaacctgcagcgtcaggacggcatatttggtgaatcatggattgacagcccacaaatcagcatcctgatggaaagcaagataaatgttcaggagttgattgaacttcatcctggcgagttcttttctattttccggggagaaaccgtaccatcagcatcattcttcatccctgacgatgagaaaagctgcagcagcgatcccgttgttataaacaggtatatcagcgtggatgcgccacgcctggaccgtctccgccgtcttgttccccgtactactcaacgtcgaataccgtcaccggaaaatgtcagtgccatcattggcgtcctgactgcaaaaccctccagaaaaagacgaaaaattcgcacagagccgcacacgatcgtggatacattccagcaacgcattgcaggacgtcaggcggctatggcaatgctggaagagtacgacacagatatcaacgcacgtgaaagtgccttgtgggaaacagcggtgaatacgcttaaaacgaccacacgggaagagcgacgaattcgctatatcacgctgaacagaccagaactacctgaaacaaaagaggaaaatcagatatcagtgagagcagaaagagcaggtataaacctgttaacgcttccacaggacaataaccacccgacagggcgtcctgtaaacgggtttcatcataaaaaaaccaaccgtccggactgggacggaatgtactga

SEQ ID NO: 8517 - DNA, 2700 bp, Escherichia coli
gtgaatgcagtcattccgaaaaagagaagggacggcaagtcttcgttcgaagacctagtatcctacgtctctgtccgggatgacatgaccgatgaggaactggatttatcttcttcttcgcaggctgaacaaccgcaccgaagccgtttcagtcgccttgttgattatgcgacacgtcttcgaaatgagtcattcgtggcgctggttgatgtcatgaaggacggctgcgaatgggtcaacttttatggtgtcacctgctttcataactgtacttctcttgaaactgccgctgcagatatggagtacattgcccggcaggcacactatgcaaaagatgacactgatcctgtttttcactacatcctttcctggcagtcacatgaaagcccgcgtccggaacagatttatgacagtgtacgtcatacgctgaaatcactcggccttgccgaccatcagtatgtctctgccgtgcatactgatacagataatctgcacgtccatgtggctgttaaccgggtacaccctgaaacgggttatctgaaccggttatcctggagtcaggaaaaactcagtcgtgcctgccgtgagcttgaactgaagcatggttttgctccggataacggttgctgggtccatgcaccgggaaatcgtatcgttcgcaaaaccgccgttgaacgtgatcgccagaacgcgtggacacgcggaaaaaaacaaacttttcgcgagtatattgcgcagacagcggtagctggtttacgcagtgaacctgtacatgactggttatccctgcatcgtcgtcttgcggaagatggtctgtacctgtctcagatggacggaaaatttctggtgatggatggctgggatcgcaacagggaaggtgtacagcttgactcgtttggcccttcctggtgtgcagaaaaactcatgaaaaaaatgggtgactacacgccagtaccaaaagacattttcagccaggtggaagcaccaggacgctataatccggacttcattgcagctgatgttcgcccggaaaaaatcgctgaaacagaaagtctgcagcagtatgcctgtcgtcatcttggagaacgtctgccggaaatggcacgggaaggacggctggagaactgccaggctattcaccgcacactggctgaagcgggattatggatgcgtgttcagcatggtcacctggttatctgtgacggttatgatcataaccagactcccgttcgtgctgacagcgtatggtcactgctgacgctcgacaatgtgaatcaactcgatggtggctggcagcctgtaccaacagatatttttctccaggttacgccaacagaacgcttccgtggtcgtcgtatggagagctgtcctgcgaccgataaagaatggcaccgtatgcgtacaggtacggggccgcagggggctatcaaacgcgaactgttttctgacaaagaaagtctgtggggatacagcatcagccattgtagccctcagattgaagaaatgatcacacagggtgagtttacctggcagcgttgtcatgagttgtttgcacaacagggactgatgctacagaaacaacatcacgggcttgttgtcgttgatgcctttaatcatgagcaaacgccggtgaaggccagcagcattcatcctgatctgactctggggcgtgcagagccacaggccggaccttttgtgagtgccccagcagatttgtttgacagggtgcaacctgaaagtcgctataacccggagctggctgtcagtgacaggtacggggtcagcagtaaacgtgacccaatgctgcgccggcagcgacgtgaagccagagctgaggcccgtgctgacctgcgtgcccgctatctggcatggcgtgaacaatggcgtaaaccagatctgcgttatggggaacgttgtcgggaaattcatcaggcatgccgtctgcggaagtcacacattcgtgcgcagtacgatgatccggcattacgtaagctgcattatcacattgcagaagttcagcgaatgcaggcattgatcaggctgaaagaagacatcagggatgagcggcagaaacttattgctgacgggaagtggtatccaccctcttaccgtcagtgggtcgaaattcaggctgctcagggagacagggctgctgtatcgcagctgagaggctgggattatcgcgatcgccgtaaagataagtcacgcacaacgacaacagaccgctgtgtcgtgctttgtgaaccgggcggaacgccggtatacggtaataccggtgatctcgaggcccgtttgcagaagaacgggagtgttcgtttccgtgaccgtcggacgggagagtttgtctgtacggattatggtgacagggttgttttccgtaatcaccatgaccgcaatgcgctggcagataaactggatttgattgcaccggtattattcgggcgtgatccacgcatgggttttgaaccagaaggaaacgacaaacaatttaaccaggtctttgctgaaatggttgcctggcataatgtgacaggccgtaccggtcacgaagactacaggattacgcgaccggacgtggatcatcaccgtgaaggaagtgaacgctactaccgcgattatatcgcggcgaacagcaacgatgacgcatcactgcctccgccggagcaggataaacgctgggaaccgccttctccaggttaa

SEQ ID NO: 8518 - DNA, 333 bp, Escherichia coli
gtgagtgatagtgcggtaagaaagaaaagtgaggtacggcaaaagacagttgtcaggacactcagattctctcctgttgaggatgaaaccatcaggaaaaaagctgaagattccggacttactgtatctgcttacatccgaaatgcagcactgaataagcgaattaactcccgtacagatgatgcttttctgaaggagttaatgagactgggaaggatgcagaagcatctgtttgttcagggaaaaagaaccggtgacaaggaatacgcagaagtgcttgttgccataaccgaacttacaaatacattgcgtaaacagttaatggaaggttga

SEQ ID NO: 8519 - DNA, 336 bp, Escherichia coli
atggcttctaaaaaattttactcagatgatgacatccagctggcaaaagctgctttatcggaattgccggatctcaccgctcaacggaaaacattgcgtgattttcttgatgccattcgtgatgacattattgtcctggtaaggacaaagggttatacactggcagatgttcgtgacacgctcaaaaatgcagggtatgaagtaggagagaaggcacttcgtgacattattcgggaagcagaatcgaaaaaaccatcccgccgttcttcctctaaaacagcacctaaaaagacagattcaggcaggaaagatggcatcgatatgaacaacaattga

SEQ ID NO: 8520 - DNA, 891 bp, Escherichia coli
gtgagtaagaagaaaaacaccacaacgcccacgccgcatgatgccgcgttccggtcgttcctggcgaatcccgacgtcgccagagattttctggaactgcatcttccggcggagtaccggcagttgtgcgacctgtccacgctgaagctggaacccgccacctttgttgagccggacctgcatcagtacgccagcgatatcctctggagtgtgaaaaccaccgggggtgaagacggctatgtttatacgctcatcgagcaccagagcaccgaaaatctgtacatgcctttccgcatgttacgttacagtgtggcggcgatgcagagacatctggagcagcacaaaacgttgccactggtcattccggtgctgttctatcacggtgagcgcagcccgtacccgtacagcatgaactggctggactgttttgagaatccggcgcttgcggctaaaatatacacaaagccgtttccgctggttgatatcactgtcgttgatgacaatgaaatcatgaaccatcgccggatggccgcactgacgctgctgatgaagcatatccgccatcgtgacatgatggagctgctggacaaactcccgcaggtcatggtggaaatttcagacgagcaggtgcgtgttctgattcattacatcgttaacgcaggggactctgtatcaccggaatttatgcgggcgctggctgagcgtctgccgcagcatgaggataaactgatgactatcgcagaacgtcttgagcaaaaaggtcgccaggaaggagcgcttgaaaaagccctggctattgcgtgccagcttcagaaaatggggatgacgccggagcagattaagcaggctaccggactttccgatgacgaactgaagaaaatcactcactga

SEQ ID NO: 8521 - DNA, 777 bp, Escherichia coli
atggcaagaagtggatttgaagtccagaaagccgccgttcatgctctatttttacgtgagcttagaactaggtttggcaaatatcgcttgggttatttatgggctgtattagaaccagctgctcatcttctaataatgctggcaatttttggtttttttatgcatcgcacaatgccagatatttcctttcctgtatttttaataaatggaataattccttattttatatttagcaatattgctacgcggtctataggggcaattgaggcaaaccaaggcttatttaattacaggccagtaaggcctatagatacaattatagctagagcaatattagaagtgctaatttatagcatagtatatctggttttgatgagtttattgttaataataggggagcaatttaaaatatataatatattgctgttgtttagcgcatggattttactggctttattttcatgtggaattgggttgatctttatggtaattgggaaaacttttccagaaacagagaagtttctaccaataatactcaagccattatattttgtatcatgtattatgcttccattacatgcaataccaaaaggttattggggatatatattatggaatcccattgttcatgtggtagagctttgtcgtgaatccgttgttacaggttatgtctctgaaggggttagtttatattacttatttataagcacgttaatattattgtttttaggattggcgctatattcatctcgtgaagaatacatgttaacatcatga

SEQ ID NO: 8522 - DNA, 258 bp, Escherichia coli
atgttaaggcagcgcgagctgaagctgtaccaatggatggcatcttatttgcccgtattgttgattcgtcttggcattgatgaacaaaccgcgtttgcgcgtaaacctgaccaccaactggcagcgttacaggaaaaaatcgccgttacgccgcaactgacattcaatggcgcaaagatccttgaactggatgggcgacaccccgccgatgaaattctgcaagcgtcacaacgcgcaattcacgccgcgctttcctga

SEQ ID NO: 8523 - DNA, 1500 bp, Escherichia coli
atgctaaatttatttgttggccttgatatatacacagggcttttgttattgcttgctctggcatttgtgttgttctacgaagcaatcaatggttttcatgacacggcgaatgcggtggcagccgttatttatactcgtgccatgcaaccacaacttgctgtggtgatggcggcattttttaacttttttggcgtgttattgggcggacttagcgttgcctatgccattgtccatatgttgccaaccgatttgttgctgaatatggggtcaacccacggcctggcgatggtcttttccatgctgctggcggcgattatctggaacctgggaacgtggttcttcggtttaccggcctccagttcgcacaccttgattggtgcgattatcggcatcggtttaaccaacgcgctgttaaccggctcatcggtgatggatgcgttaaacctgcgtgaagtgaccaaaattttctcctcgctgattgtttcccctatcgtcggcctggtcattgcgggaggcctgatattcctgctgcgacgctactggagcgggacgaaaaagcgtgaccgtattcaccgcattccggaagatcgcaaaaagaaaaaaggcaaacgtaaaccgccattctggacgcgtattgcgctgattgtttccgctgcgggcgtggcgttttcgcacggcgcgaacgacggacaaaaagggatcggcctggtaatgctggtactggtggggattgcccctgctggcttcgtcgtcaatatgaatgcgtccggctatgaaattacccgtacccgcgatgccgttaccaacttcgaacactacctgcaacagcatcctgaactgccgcagaagttgattgcgatggaacctccattgcctgcagcatcgactgatggcacgcaagtaacagagtttcactgtcatccggcaaatacctttgatgctattgcgcgcgttaaaacgatgctgccaggcaatatggaaagttacgagccgttaagcgtgagtcagcgcagccagctgcgccgcattatgctgtgcatctctgatacctccgcgaagctagcgaaactgccaggcgtcagtaaagaagaccagaacctgctgaaaaaacttcgcagcgatatgttaagcaccattgagtacgctccggtgtggatcatcatggcggtagcactggcgctcggcattggcaccatgattggctggcgtcgtgtagcgatgaccatcggtgagaagattggtaagcgcggcatgacgtatgcgcaaggcatggcggcacaaatgacggcggcagtgtctatcggtcttgccagttatattgggatgcccgtctccacaacacacgtcctctcgtctgcagttgcagggacgatggtggtggacggcggtgggttacagcgtaaaacggtaaccagcatcctgatggcgtgggtatttactttaccggcggcaatttttctttctggtgggctgtactggatagcattgcagttgatttaa

SEQ ID NO: 8524 - DNA, 867 bp, Escherichia coli
atgacagacaatacttatcagcccgcgaaagtctggacgtgggataaatccgctggcggcgcgttcgccaatatcaatcgcccggtttctggtccgacgcatgaaaaaacgctgcccgttggcaaacacccattgcaactttattcgctgggaacgccgaacggtcagaaagtaacgattatgcttgaggagctgctggcgctgggcgttactggtgcagagtacgacgcctggctgattcgtattggcgatggcgatcaattctccagcggctttgtcgaagtgaacccaaactcgaagatcccggcgctgcgcgatcatacgcataatccgccgatccgcgtgtttgaatctggttcgatcctgctttatctggcggagaaatttggctacttcctgccgcaggatttggcaaagcgtactgaaacgatgaactggctgttctggttacagggcgcggcaccgttcctcggcggtggttttggtcacttttaccattacgcaccggtaaagattgagtacgccatcaaccgctttaccatggaagccaaacgtctgctcgacgtgctggataagcaactggcgcagcataagtttgttgcgggcgatgagtacaccattgcggatatggcgatttggccgtggtttggcaacgtggtgttaggtggtgtgtatgatgccgctgagtttcttgatgcgggcagttataagcatgtacaacgctgggcgaaagaagtaggcgaacgtccggcggtgaaacgtgggcgtattgttaaccgcaccaacggaccgctgaatgagcagttgcatgagcgccatgacgccagtgatttcgagacgaatacggaagataagcgtcaggggtaa

SEQ ID NO: 8525 - DNA, 411 bp, Escherichia coli
atgaatgatttctttgccgcaattgagtttatgcaacgctatccgcaagcgacaggcaaagtgggtattaccggattttgctatggcggtggcgtatcgaacgcggcggctgtcgcgtatccggaactggcctgcgcggtgccgttttatggtcgtcaggcacccactgccgatgtggcgaagattgaagcgcctttactactccacttcgcggaactggacacccgaatcaacgagggctggcctgcttacgaggcggcgttgaaagccaataataaggtttatgaggcgtatatctatccgggggttaatcacggattccataatgattccacgccccgttatgacaaatctgccgccgatcttgcctggcaaaggacactgaaatggttcgataaatatctctcctga

SEQ ID NO: 8526 - DNA, 828 bp, Escherichia coli
atggctaatccaaccgttattaagctacaggatggcaatgtcatgccccagctgggactgggcgtctggcaagcaagtaatgaggaagtaatcaccgccattcaaaaagcgttagaagtgggttatcgctcgattgataccgccgcggcctacaagaacgaagaaggtgtcggcaaagccctgaaaaatgcctcagtcaacagagaagaactgttcatcaccacgaaactgtggaacgacgaccacaagcgcccccgcgaagccctgctcgacagcctgaaaaaactccagcttgattatatcgacctctacttaatgcactggcccgttcccgctatcgaccattatgtcgaagcatggaaaggcatgatcgaattgcaaaaagagggattaatcaaaagcatcggcgtgtgcaacttccagatccatcacctgcaacgcctgattgatgaaactggcgtgacgcctgttattaatcagatcgaacttcacccgctgatgcaacaacgccagctacatgcctggaacgcgacacacaaaatccagaccgaatcctggagcccattagcgcaaggagggaaaggcgttttcgatcagaaagtcattcgcgatctggcagataaatacggcaaaaccccggcgcagattgttatccgctggcatctggatagcggcctggtggtgatcccgaaatcggtcacaccttcacgtattgccgaaaactttgatgtctgggatttccgtctcgacaaagacgaactcggcgaaattgcaaaactcgatcagggcaagcgtctcggtcccgatcctgaccagtttggcggctaa

SEQ ID NO: 8527 - DNA, 522 bp, Escherichia coli
atgcggcgctggcacacctgtttttttattctgctgttctgtggcttcagcggaaacgtgttgtgcaaagaatcgattaatgaagcgatagaacgtttgtatcaaccattgaccagtaatgacgatataccaataactgatgaattcagtctcgatttgcgaagtaatatgagcgctactcctggcaaaatgacaccctggctgaataataatcttttgtgtcgctgtgtcgatgacgctttcgtttctgcagaaataatccaaagcacacacctaaatggccgccgaacgcatgtactgttgcagctggttatcaaacaaaatcacacagatatccaccggttactggggctgatgctggttcgtaaaaatgataatcatcgttggctaatagaagacatcgatgatggtactgaaatccccaacagtctacgggcagaaatacgcgaagatacgcgaatgaaacgcagagctgtaattaatgaaccctcgagcggtaatggtgccaacttactgatttag

SEQ ID NO: 8528 - DNA, 216 bp, Escherichia coli; identical to SEQ ID NO: 5123

SEQ ID NO: 8529 - DNA, 981 bp, Escherichia coli; identical to SEQ ID NO: 8396

SEQ ID NO: 8530 - DNA, 2130 bp, Escherichia coli
atgattttatatacaaattcaaaagggattttagctaagaaatattatatacaatccatcctaaatatggaattgcgttatttaaaaaaacaacaaacccctgataaaaatagtgtctttataggctggggtcagaaagataacacaagaaaaataaaaagcatagccgaaaaatggagtgctccttactggcaattggaagatggttttataggatatattggtcatccagggcgaactgggaaagccgtgtctctgatcgcagacccaataggtatatattatgatgccagacaacctagtcagctagagaatttaattgcttcccctattgatagacagttgatagaacgtgcagaacatttgatcaaaaatatcgtacgtttgggtatcaccaaatataactgctacgcacaagatagtacttttgataatgacaatagcataatttgtaattcggataatgcatcgatatatttatcaaccaacactcaacctttgattaacgatagctccccctctcataattttatttcttttgtgagtgattcaaaacctcgtatcttgttggtcgatcaggttctaggtgatttatccattcagggggccatggctagtgaagacgattttctggcaatggttgttgcagcacgtcgtaatcaccctaatgcgcgcatattgttgcgtacgcacccagatacgcgttttagcaaaaaaagaggtgtgctagcgagcttggtcaatcgcgagcctatattagctgaagtagaggtggtgagtgattctatacatccacataagttgctcaatactgttgatgcggtatataccgtttcttctcaagttgggtttgaagcattgctcttgggtaaaaaggtatactgttttggcatgccattctatgctggttgggggttaactcatgacagcaaaaagtgtgctcgccgacaagaggcaatgtcagtctatggtttctcctccatttcattacctcaattagttgctgctgcattgattcgttatccttactattttgatcctatcctagagaaatgctgtgaggtcgaagatgtcattgatatcattgcgcaccagcaagttgaagctacacgctggcggcgcctctatttggtcgggttctctctatggaaacgctcatttatgcgtacattctgtgctcatttagccaaagagctttgttttgtgagttctttgcctccacatcttaaagatgatgagcatgttttagtctggggaaatagttatccagagttacaatctgttattcgtgttgaagatggctttattcgttccaatgggttgggttcaaatttttgtcgaccctcatcactttgtattgatcctgtaggaatatattttaatagctttagaccaagtaagttggaacaattgcttaatacatatcctttggataataaaatattgattcggggcaatgcattgctaaggctattacgaacatccagagtgagtaaatataacgtaggtgtatctcacgaattccacccaccacaagatggccgcgagttggtgctagtagtaggacaggtggatggagatgcatcaattttatatggaagcccatttatccgtagtaatgaacaattattatgggcagtacgaaaagctaaaccaaatgcacatattctttttaagccacatccagatgtgatttccggtaatagaaagggtgctgtttcagcaaagtgtcaatctcaatgtgttgacagcttggtaatagatattgaactggcctctctttaccctcacattgatgagttgcatacaatgacttcgctgagtggattcgaagccttagttcagggagtgaatgttattacttggggacaacctttttatagtggatgggggttgacacaagacatatatcctccaacgagacgtcagcgtacattaacactaagtgcgttagtgtatattacattaactaaatatccacgatatatcgattggaaaactggtctttggtgtagttctgaacaattaattcatcttatggcagggcaaaataagactccagtcgtaggtctaaatcgttggagacgctggcggattaaatttaattatttatttcaatcactaaaatag

SEQ ID NO: 8531 - DNA, 1251 bp, Escherichia coli
gtgaatattttgttgttacaagggcctttaggacctttttataagatattaagccagcatctttctttagccggacactatgttataaaagttaatttcaatggtggtgatgaatgctggccttgtgtaggagataaaataaactattatgatacacctgaggaatgggatgctttctttcgacagatattaaaaaagaatgcaattgacttagtaatttgttacggtgattgccgttattaccatcgtgttgcacaccatatttgtgctaaaaaaaatataccgttttgggtatttgaagaggggtatttacgcccggattttgtaactctggagccaggtggtgttaatgcatttagccagtggtatgaacaaagggagcggttaccatatttaatgtggtcgaatgaattcaaagctccaatgacggttggtaaaacatttgctatgagagcatggtatgctagttactatcatattaataaagcactgaaacactatcgctacccttattttgttaatcaccgcccttggagtttgtggcaagaaacgatgggatggataaaaggagcatatgttaaataccgtcacttacgaacagataaaagcctattggaatttttgaaaaaacatcatgcgggacatatcttcttggttcctttacaagtttcagaggattttcagataagagaacattcagattttgatagtattgaacagatgattgagaatattgtttcttcgtttgcaaaacacgcaagtgaagaagatgttctattatttaaacatcatcctatggatcggggatatgttagttaccataagtgtattgaacgattgatttcagtgtattgtttagataataggattttttatggtttcgaaatacctttgcctaaactctatccatttttaaagggagtcgtaaccattaacagtactgtgggattttctgcactattgcatcatgttccaacaatatgtttgggacgagccctatatgatatttctcgattgactacaaaaggctcgctatcatcattttggcaaaaacaagatcccgtgtgcactttaaccttcaatcgtgttagaaactctttattacatttgacgcaattaaatgcgagcttttatcagcatctgaattggagtgcacgagcagcgatagtaaaaatgcaacttattgaaccaatggcaaatgaaattgatcgaaaatcgaatttatcagtattaaaaatggggcgtgaatga

SEQ ID NO: 8532 - DNA, 906 bp, Escherichia coli; identical to SEQ ID NO: 5092

SEQ ID NO: 8533 - DNA, 819 bp, Escherichia coli
atgcgattagcaagtcgttttggttatgcaaaccagatacgtcgtgaccgtccactgacacatgaagagctgatgcaccatgtgccggggattttcggggaagagaaacacacgtcccgaagccagaactatacgtacatccccaccatcaccgtactggaaagcctgcagcgggaaggctttcagccattcttcgcctgccagacccgtgtgcgcgacccgggccgccggggatacaccaaacacatgctgcgtctgcggcgggccggagagataaacggagagcatgtccctgaaattattctgctcaactctcatgacggtacctccagctaccagatgctgccgggttacttcaggttcgtctgccagaacggctgcgtctgtggtcagtctctgggggaagtgcgtgttccacaccggggagacgtagtggagaaagttattgaaggggcttacgaggtggtgggcgtgtttgaccggatagaggagaagcgtgatgccatgcagtcgctggtcctgccgccaccggcacgccaggcgctggcacaggcggcactgacttaccgttatggtgacgaacatcagcccgtcaccaccgccgacattctgacgccacgacgccgggaggattacggtaaggacctgtggagtgcttatcagaccatccaggagaatatgctgaaaggcgggatttccggtcgcagtgcaaaaggaaaacgtatccatacccgggccattcacagcattgataccgacattaagctcaaccgtgcattgtgggtgatggcagaaacgatgctggagagcctgcgctga

SEQ ID NO: 8534 - DNA, 147 bp, Escherichia coli
atgtcagggatgaatgatattcggctgaaattccggacagccgtacgcgtaaccgttccggtcacagacggatggccagatgccattgcctgtactcagtctgcacagactgagctctccggggcgtcgggtgattctggtgcctga

SEQ ID NO: 8535 - DNA, 2091 bp, Escherichia coli; identical to SEQ ID NO: 6130

SEQ ID NO: 8536 - DNA, 258 bp, Escherichia coli
atggatgaagaaagggtgttttcactcagctatgaacaactgacccggtttgcggaaaaacgcatccgggaatgcaatctggacagccagggcgcgatttatctctgcgagtcagccaaagcaggagccgtgctgatcttctggcatgaactggccataaatggctatgcctcaatgaatgccataaagagacaggagctcattgacgccgactttcagcgcctcagaaacctcatctggccggaggatgacaggtaa

SEQ ID NO: 8537 - DNA, 264 bp, Escherichia coli
gtgtggggggagaggaagatcctgaaccgccggaaaccggatctgcgcggcagaaaagacgcaaatgatatgataataaaaaacacacataaaatcatatcagatatgatttttatcattgatgataaaaccatatctaatattatcagaaatcaggagcacacaaatcatgcaggatattatttttacctgtcagaacattatcagatggagcgtgcaggatggatgaagaaagggtgttttcactcagctatgaacaactga

SEQ ID NO: 8538 - DNA, 414 bp, Escherichia coli
atgttttttattgagaatgaaggtcaggctgttgccagaacggattactggcagtctgtacaggcgcaggccggatatgtctacctcagctggaatgccggcgcagccaggctgcttgtcccggatgcggcaaaacatttactcagggagatgcggggggctgagtacgtcatcatcagtaagggaacgctgcatggccgcgatgcgctggaactggtatttgaagacggcagcgatgcgccgttcgtgatccacatgctgagtgagcagtgcgatcgcctgctccccgaaaacaaccagggaggggggtttgttgtcaccgtctggacgcgtggcggtaaccagctccgttatccgggaaagtaccgggttgtggaaaacctgcccgacgtttccccgtggagtgaacactga

SEQ ID NO: 8539 - DNA, 780 bp, Escherichia coli
atgcagcacctgccagcaccgatccaccatgcccgggatgccgctcagcttcctgttgccatcgattatccggcagcgctggcactccgccagatgtcgatggttcatgatgaactgcccaaatacctgctggcccctgaagtgagcgccctgctccattacgtcccggatctgcgccgcaagatgctgctggccacactgtggaacaccggtgcgcgcattaatgaagcactggcgctgacgcggggggatttttcgctcacgcccccgtatccgtttgtgcagctggccactctgaagcagcggacagaaaaagccgccaggacggcaggaaggatgcccgccggtcagcagactcaccggctggttccgctttccgacacctggtacgtcagccagctgcagacgatggtggccacactgaaaatccccatggaacggcgtaataaacgaacaggcaggacagagaaagcgcggatctgggaagtgacggacagaacggtcaggacctggattggggaggcggttgccgccgctgccgctgacggtgtgacgttctctgtcccggtcacgccacatacgttccgccattcctatgcgatgcatatgctgtatgccggtataccgctgaaggtcctgcagagcctgatggggcataagtccatcagctcaacggaggtctacacgaaggtgtttgcactggatgtggctgcacggcaccgggtgcagttttcgatgcctgagtccgatgcggtgtctatgctcaaaagaattccataa

SEQ ID NO: 8540 - DNA, 645 bp, Escherichia coli
atgcctgttattgctaatacgcatcccaaaggtggtgtgggtaagacaacttcatccgtaaacattgttggtgaaatgaagtctgatacagttgatctggatactcataccgggctttctatcattctggggctgagacctgaaggaaaagaaatttccgtgaaagtacccaaaacagtggatgagttaatcgaaattatgactccctacaagaacagcgataagacgttacttattgactgtgggggatttgactcagatcttacccgtactgcgattgcctttgcagactgcgttattgtcccttcaaaagactccctgactgaacgtattggtttgatgcattttgatggagtactggacgaaatcagctctatcatggggaccgatataactgctcacctgtatctctgtaaagttaatcctaacaagaagaaattccctaagcttgatgcaatcctgccatcgttcaaacatctgaagctgatgaagagccgcatttctgctcgtgcagaatttgaggatgtcattgagactgggatgggaatcactgagtctgttcatgggcgctattcggcaggaggtaaggaagttattgccctgatcgaagaaatcaatcatctgattgaaaataacaaacagtaa

SEQ ID NO: 8541 - DNA, 309 bp, Escherichia coli
atgagcaaagcgaaatttagtgcacaggctgaaaaactgaaaaacctggtggattctgccagattacaaacttcttcttctgccgtaacagcaacagccccgtctcagccaaatgaaggtgcagaggaagtttcaggtcgtcccgtggctgccaggacgaaggctaagaatcttaaggccataccgctgtcgtattttgaagctcatgcggaacttaaagcgaccagtaaaacatctctggattttagctcatatattattgaggctataagagagaagcttgaacgtgatggtgcaataggtcaataa

SEQ ID NO: 8542 - DNA, 981 bp, Escherichia coli
atgaaaatctttattgatgatggttctaccaacattaaacttgcctggttggaggatggtgacgtgaaaacgttaatcagccctaacagctttaaaccggaatggtcttttagtttactggatgatgctgctccggctaattacgagatcgacggcgagaagttttcatttgatccattaagtgctgatgctgtcgtaacgactgaaacacgctatcagtacagtgatgtgaatgttgtggccattcagcatgcgctacagcagaccggcctgaaagcgcagcctgttgatgtcatcgtcacattgccgatctctgaataccttgacgccaacaatcagaaaaataagcaaaacattgaaagaaagaaaaaaaatgtgatgcgtgaagtacgggtgcaggggagtgatgcatttgttattcgcagtgtttccgttcttcctgaaagtattcccgctggtttcagtgttcttgcggggcttgaggatgatgaatcccttttgatcgtagatctcggtggtacaactcttgatgtgtcgcatgttcgtagcaaaatgacagggattacaaaaacctggtgtgatccgaatatcggcgtgtccctgattacatccggggttaaggaacagatggctgtacatgctaatacaagagtgagctcattccaggctgacaatatcattgtgcaccgtaatgaacctgactacctttcccgtcgcatttataatgctgaacagcgtgagtctatcattaatgttatcaatgaacggcagaagttgcttattaaacgagttaatgatgtcatcagccgtttcaccgactatacacatgtaatgtgtgttggtggtggggctgaaattgtggccgaggctgtgaagaacctgactaaggttcctgatgagcgcttttatctgagctcatccccgcagtttgatttagtcatgggaatgataaaaatgaaaggtggtgtgactaatgagtga

SEQ ID NO: 8543 - DNA, 417 bp, Escherichia coli
atgagtgatgaaaataaatccagacgctgctcatttgaacttttcccggatgaacggacaggagataagatagcagatgagctcattgcaaatgaaaaactgaaggagcggggacgtttcatgcgcgcgatgttagttactggtgcggcgtttgcagctatagataaacgtcttcctttgctgatatcggagttactgacagaaaatacgactctggatgatattaataaggtgatttccagcgtaataccaggtgctttttcggttgaaaagaaattgcttgaattactggaaaaacaatctggtctccatacgtctgtggattgcagtactcctcttacagagcagagtctgtcgagaaatgacggtgaagaccagaccagaagaaacgctgaaaatatgttcggagatgactga

SEQ ID NO: 8544 - DNA, 1275 bp, Escherichia coli
atgtttgcactggctgatatcaacagtttctacgcctcatgtgaaaaagttttccgcccggaccttcgcaacgaaccggtcatcgtactcagcaataacgatggctgtgtgatcgcgcgcagcccggaggcaaaagcccttggcatcagaatggggcagccctggtttcaggtgagacagatgcgcctggagaagaaaatacatgtattttccagcaattatgcgctgtaccacagcatgagccaacgggtcatggctgttctggagtcgctttctcccgcagttgagccctactcaattgatgaaatgttcattgatttgcgggggataaatcattgcatctctccggaggtttttggtcatcagctcagggaacaggtaaagagctggacaggactcaccatgggggtgggcattgcgcctacaaaaacgctggctaaaagtgcacagtgggcaacaaagcaatggccacagttttccggagtggtcgcgctgacggcagaaaaccgtaatcggaccttgaagctactggggctgcagccagttggtgaggtctggggagtaggacgcagactgacggaaaagctgaatgcgctgggtattaacacagcactgcagctggcgcaggctaacacggcattcatccggaaaaacttcagcgtcattcttgagcgtacggtacgcgaactcaacggcgagtcctgcatatccctggaagaagcaccaccggcaaaacagcagattgtctgtagtcgcagttttggtgaacgaatcacagacaaagatgccatgcaccaggctgttgttcagtatgcagagcgggccgcagagaaactacgtggggagcgtcagtattgccggcaggtgacgacatttgtacggacatccccctttgcagtaaaagaaccctgttacagcaatgccgctgtggaaaagcttccattgcccacacaggacagccgggacattattgccgccgcatgcagagccttaaaccatgtctggcgtgaagggtaccgctatatgaaggcaggagtcatgctggctgatttcacaccatcgggtatagcgcagccgggattatttgatgaaatccagccccgtaaaaacagtgaaaagttaatgaaaacactcgatgaactgaaccagtcgggaaaagggaaagtgtggtttgcggggcgaggaaccgcccctgaatggcaaatgaaacgggaaatgttgagtcagtgttatacaactaaatggcgagatattcccctggccaggctgggttag

SEQ ID NO: 8545 - DNA, 384 bp, Escherichia coli; identical to SEQ ID NO: 8439

SEQ ID NO: 8546 - DNA, 570 bp, Escherichia coli
atgacctacaaatacaaccccttctggcagcaacgtattcgtgagacggtgcggcacgcactgaatgttcattcccgcctgacggcattgcgggttgacctgcgtttcccggatgtaccggcagcaacggacgcagctgtgatatcccgcttcatcaatgccctgaaagcccgaatcgacgcttaccagaaacgtaagcatcgggaaggtaaacgcgtgcatcccacaaccctgcattacgtctgggcccgggagtttggggagtgcaaaggtaaaaaacactatcacctgatgctgctggtcaaccgggatacctggtgtcgtgccggcgattaccgcgctccgggatcactggccgggatgattaaacaggcgtggtgcagtgccctgggagtggatgccggacgttatgacacgctggcacattttccggtcaggccggcggtgtggctggaacgcgatgatgacaccggctttcagcaggtgctggagcgtgctgactatctggcgaaggagagtaccaaagcttacggcaccggtgagcgcaactttggctgcagtcgtggctga

SEQ ID NO: 8547 - DNA, 207 bp, Escherichia coli; identical to SEQ ID NO: 6172

SEQ ID NO: 8548 - DNA, 492 bp, Escherichia coli; identical to SEQ ID NO: 6084

SEQ ID NO: 8549 - DNA, 426 bp, Escherichia coli
atgcaatatgcgaaacctgtcactctgaacgttgaagagtgcgaccgtctctcctttctgccgtatctgtttggcaacgattttctgtatgccgaggcgtatgtgtacgcgctggcgcaaaaaatgatgccggaatatcagggcggcttctggcacttcatccgcctgccggacggtggcggttacatgatgccggacggtgaccgtttccacatggtgaacggtgcaaactggtttgaccgtaccgtgagtgctgatgccgcaggcatcatccttacctcccttgtgattaaccgccagttgtggctgtaccacgacagcggggatgcaggactgacccagctttaccggatgcgcgatgcgcagttgtggcgtcacatcgaatttcaccccgaatgcaacgcgatttacgcggctctggactga

SEQ ID NO: 8550 - DNA, 669 bp, Escherichia coli
atgaatcagaagagaggttgcttaactccacaaagaaaacatttctgtcaatgtggtctcacagcaatattttctataagaaaggaaaggaaaggaaaggaaaggaaaggaaaggaaaggaaaggaaaggaattttgcgatgtaatggtcgtctttggcaatgatgtaatcatcatgtcagataaacttattaattataatattgaaattgacgaaaaaatcgcatggaatagatggtataaaagtgctatcgaaagcagcataaaacagctaaatggtgcatataaccatataaactcatatcccgacaatctatatactgatgctcaagcaacagagccattctcaatggaattaccacattcggatgaaatatgcattcatttaattgctatcgcaaatggttgctctaacgcatgctatagaaaatacggtcgctatggattaaatattgatacagcatgtaccggaaaagacaccttatttactataggtatacccacaagaaaattcgtccatatattcaatgatagcagtctagataaaatatttacatgtttagatacaaccagagatttcattgattacattcaagctagggaaaacttacttacaacttcagataagtacattaaaatatactcaataaacctcaagatgcgggtgtga

SEQ ID NO: 8551 - DNA, 261 bp, Escherichia coli; identical to SEQ ID NO: 5979

SEQ ID NO: 8552 - DNA, 198 bp, Escherichia coli; identical to SEQ ID NO: 8087

SEQ ID NO: 8553 - DNA, 639 bp, Escherichia coli
atgaaaatcaaaaatttaaagaataaagagtttggaaaagatatatatattgttgcaaatgggcattcggcaaatacatctgaaatagctgataagttaaatggaaaaattgtaataggaatgaatgccactccattattgacagaaatgtatgggctaaatattcattactatactgttagtgatgagaggtttttaattgatgatgataaatatctaattgctacagaaaaagttcataagagtactgtacgggtatttcgtcaggaattaataaagcatgatgctcctggccttattgatggaacatactatgtcagagcgattggccgagatggatttagtttcaatctcgcgaatggtttttactttggttgtacaacgacaatgctatcaatacaactagctgcgtttcttggagcaaagaatatctacttgcttggtgtcgatttacagtatccacgtagtaaaccacgattctattctgaaaaaaaaacatctcctattgataattttacgtgcgttcagataaaaaatattagagaagcatataaacagctaaaacagcataatatcggacttttcaattgctcaaaaaattctcttttaagaccttatttgccgtactcagaaatttaa

SEQ ID NO: 8554 - DNA, 957 bp, Escherichia coli
atgaatattgtacatatatctaaaacgccactcgcaggaagcccaaatcgtttttcagatgagttaaataaacttgatacagtgcaatctgtttgcttcatagagcgtgattatcctggcgatctctgtggaaaatttatcggttccagtataataataaatcaaaatactaagccattattaattgatgtagtgagcaaagctgatgtctgtcatattcataatgatttaagccatgaaataattaatctaatcttgtctaactgcaaacaatgtaaatttatatatcatgtacactctccattaagagaggggcctttatttttttataattatgagtcaatgggaatcgattttttccgtaaaattgttgttgctcaataccaccctaggctttatcaagattttattccactattaaatattgtaccatttaagccgaacctatcacctactcccattactgataaaataagaataatatttagtccaagtcataaccgagtgggaggaagatggaatgataaaacatcaacagaattgagaaatgcattaaatttaatcagtaaaaaagatgatatcgagttagttatacctgataagttatcgccgcataccttatttgaactacgtaggagttgtcatattactattgatgaaatagttacaggttcatatcaccagatttcacttgaaggtcttgctgctgggaatgttgttattaataacagcgattgccttagtaatacttttcttgagcaggttgctgaagctgacagtgctccaccttttattatcatgaataataaaaatgtcacacataaattaaatgagctgattaacaatagagatgaaataattaaaattcaacatagtagtctatcatattataatagcttccttctcccaggtaaaactatttccagactattgcaaatttacaatggtgaaatatga

SEQ ID NO: 8555 - DNA, 828 bp, Escherichia coli
atgtgtataagagacagaattaaaactgactgtggctgtaaaccaataaattatgatttttcatcacttttggttaaggttagaaaaagttcacttccgaaaaatgaaccaatttattcaaatatcatctcatacaaaaatgactttattggattcagggataataacatatttcttctgaatgtaaatgagaagtcactaagtaactatcttgatatgagagaaatccaaaactcgccttggaatacatcacctttctcaggatataaaaatatttttatagttgatcctgccaataatcttcctttgtttttaaaatcgacatctccttttttaaatattcattgtatttttactgaaaatgtgtcgactcaagaaattgaacgttgtttaaaatggtcgaaaggtattgatgtatgcattatccatagcaagcatagtatttcattaaataaagcgaagaagatatatacattctgcacgactaaccaactcattgatgctattcataatatcattttaattcatggtgctaaactattcgatttgctggttccgtgttttggacatgtaccatatattgaaaatatagattctataaatgaaagtgattgtgatgtttatatcaagcttagagggaagttacctataattggtcaaaggaaaagtttttatgactttgtttctattttgtcaaaaaacattgaatatatcctatgtcgtgaatcaataatgcagcgttatgaaaatattatcatgcaagaaaatataagttatttcatatctgaagttagttttgaaggcttcaggttggagattgagaattga

SEQ ID NO: 8556 - DNA, 426 bp, Escherichia coli; identical to SEQ ID NO: 6184

SEQ ID NO: 8557 - DNA, 201 bp, Escherichia coli; identical to SEQ ID NO: 5078

SEQ ID NO: 8558 - DNA, 570 bp, Escherichia coli
atgacctacaaatacaaccccttctggcagcaacgtattcgtgagacagtgcggcacgcactgaatgttcatccccgcctgacggcattgcgggttgacctgcgtttcccggatgtaccggcagcaacggacgcagctgtgatatcccgcttcatcaatgccctgaaagcccgaatcgacgcttaccagaaacgtaagcatcgggaaggtaaacgcgtgcatcccaccactctgcattacgtctgggcccgggagtttggggagtgcaaaggtaaaaaacactatcatctgatgctgctggtcaaccgggatacctggtgtcgtgccggtgattaccgcgctccgggatcactggccggaatgattgaacaggcctggtgcagtgccctgggggtggatgccggatgccatgccacgctggtgcattttccggcctggccggcggtgtggctggcgcgtaatgatgacaccggctttcagcaagtgctggaacgtgctgactatctggcgaaggagcataccaaagctcactgcaccgatgagcgcaactttggctgcagtcgtggctga

SEQ ID NO: 8559 - DNA, 780 bp, Escherichia coli; identical to SEQ ID NO: 6153

SEQ ID NO: 8560 - DNA, 891 bp, Escherichia coli
atgactgtattaatcaatcatgtaatgagtacgaatgtaaagtcatctatatttagagattttatttttagaataaaagaaaattccttatcctgctttcaacatacggttagtattgaacccaaatcatacgcagatatttatcattttcatcgcccacaaaaatgtgatatagagcaaatcccggaaaaatctctggtaacattacattttgacccttttgattttaggcaacattcttcaatggaagaactttttcaaaaactttcgctatttaaaaaagttgtttttttaaaccaaaattcatttgaacagtgctcatttctgggggagaagcgtgtattaataccacatggctatgatgaaagattacagctaagacagcaaaagaaacctcattttacatttaatgttgctgttataagtagatattatagtgatggccgaaaaggggacgcctatttatttgatttgttagctggtttacctaatgatataaggctatatttggttggtaattgctggcctaaaaggcttgaaaaaagaagcaagcagatctatgtaatacatccaactagctattacgatattataaggatttatagtgctattgatatggttctaattacgtctccctatgaaggaggccctgcatgtctacctgaagctcttgcagcaggttgtttagttttttcatctcgtagtggtatggctgaagatctattggatactcggtttctccttgattacaacctcactagtgatataaataaaatattaatggcgaagtctttatttaagaatgaaattgaaaattataaagcacataatctaattacgtgggaaacggtttcgcatcggtataattgtttgtatcagagtatgttatga

SEQ ID NO: 8561 - DNA, 978 bp, Escherichia coli
atgaaacgacatctgaacaccagctacaggctggtatggaatcacattacgggcaccctggtggtggcttccgaactggcgcgctcacggggaaaacgcaccggtgtggcagttgctctgtctcttgctgctgtcacgtcactcccggcactggctgctgacacggttgtccaggcgggagaaaccgtgaacggtggaacactggaaaatcatgacaaccagattgtcttcggtacggccaacggaatgaccatcagtaccggtctggagtatgggccggataacgaggccaataccggcggacaatggatacaaaatggcggtatcgccaacaacactactgtcaccggtggtggtcttcagagagtgaatgccggaggaagcgtttcagacacggttatcagtgccggaggcggacagagccttcaggggcaggcagtgaataccactctgaacggcggtgagcagtgggtacatgaaggcgggattgcaacgggtaccgtcattaatgagaagggctggcaggccgtcaaatccggcgcagtggcaaccgacacggttgtgaataccggcgcggaaggggggccggatgcagaaaatggtgataccgggcagtttgttcgcggaaatgccgcacgtaccaccatcaataaaaatggtcgtcagattgtggctgttgaaggaacagcaaataccactgtggtttatgccggcggcgaccagacggtacacgggcatgcgctggataccacactgaatggcggttaccagtatgtgcacaacggaggcacagcctctgacacggttgtaaacagtgacggctggcagattgtcaaggaaggtggtctggcggatttcaccaccgttaaccagaaaggcaaactgcaggtgaacgccggtggtacagccacgaatgtcaccctgaaacagggtggagcactggtcaccagtgcgtattaccgtgaaggagatcggtga

SEQ ID NO: 8562 - DNA, 198 bp, Escherichia coli
atgacccgcctgcaggacgagctgcgcacggaatctgtccggtctcaggcccgtgaacagtttaccggtgcggtggaccggatatttgacactgcggagagcgtctgtattgcctctgttgcacgcgcggttctgcgtgccgtccgtgactcggtggtctctgttgcccgcgctgtatggaactggattttcttctga

SEQ ID NO: 8563 - DNA, 234 bp, Escherichia coli
atgagcgaatatttcagaatacttcagggactgccggacggctcctttacccgcgaacaggcggaagccgttgccgcacagtaccggaacgtctttatcgaggatgatcagggaacgcattttcgcctggttgtccgtcaggatggcacgttgatctggcgctcctggaattttgaggactgtgccgggtactggatgaaccagtacatcagggatttcgggattcttaagtaa

SEQ ID NO: 8564 - DNA, 528 bp, Escherichia coli
atgagtgcacgtggtatcaacaaggtcatcctcgtcgggcgtctgggcaatgatccggaagtccgttacatccccaacgggggcgcagtggcaaacctgcaggtggccacatcagaaagctggcgtgacaaacagacgggggagatgcgggagcagacggaatggcaccgcgtggtgctgttcggcaagctcgcggaagtggcaggtgaatatctgtgcaagggtgcgcaggtctacatcgaaggtcagcttcgcacccgtagctgggaagataacggtatcacccgttacgtcactgaaattcttgttaagaccacgggcaccgtgcagatgctgggacgtgcaccacagcagaacgctcaggcgcaaccgaagcctcagcagaatgggcagccacagagtgctgacgcgacgaaaaaaggtggcgcgaaaacgaaaggccgtggacgtaaggccgcgcagccagagcctcagccgcaaccgccggagggggaggattacgggttttcagacgacatcccgttctga

SEQ ID NO: 8565 - DNA, 462 bp, Escherichia coli; identical to SEQ ID NO: 8356

SEQ ID NO: 8566 - DNA, 435 bp, Escherichia coli; identical to SEQ ID NO: 8357

SEQ ID NO: 8567 - DNA, 741 bp, Escherichia coli
atgccttttgatagagagtatatcctaaaaaaatatgaacacacgtataaatacattgattatttattatatccatcaattaatgcagagcggttagtggtgcttcttagtggatattcacaacgaaaaacttacaacagatattcttggttctgggatgacactgagaaatgggatggttcaacagcatatctatttcttaacgacacagagaatacatggtattgtgggcatgaaaatcaaaagatcaatgtttataaggaagtaattttcctaatttcaaatagatacaagttagataataggaaaatatatatagtggggggctccatgggagggtacgctgcattaagattaggtttagaattgaatctagggggcgttatatctataaatcctcagacatctcttgaagcagcctctcttcataaagatccttcatggtttcaatcaattaataaatgtggtgaaaattttattcccgttgccgaaattatacgaagaaatgagcctactaagatatatctagaatgtggggattatttagctgactcgtttgatctggagagcataagtcaagcaatagtagaaaaaggtggtttatttatcctaaatcatcattcatcagacaaacatgtgacttcaagtccaaacaaagaacaacttgatatgttgatatcattttttagtgacgatacgataagtaatttagccgctgagaataatgtcttgtcttcctga

SEQ ID NO: 8568 - DNA, 486 bp, Escherichia coli
atgaaaaccatttcacataattccaccacatcttctgtttccgtaaccgctgcatcagggaatgaccagcctcagttggttgccaccatagtccctgatgaacagcgcatcagcttctggccgcagcattttggcctcattccacagtgggtggccctggagccccgtgttttcggctggatggaccgtctgtgcgaagactactgcggtggtatctggaatctgtacaccctgaacaacggcggggcatttatggcccccgaaccggatgacgatgatgacgaaacatgggtactgttcaatgccatgaacggcaaccgcgctgaaatgagcccggaagccgctggcattgctgcctgtctgatgacgtacagtcatcacgcctgtcgtacggagtgttatgccatgacggttcattattaccgtctgcgggattacgccctgcagcatccggaatgcagcgccattatgcgcattattgactga

SEQ ID NO: 8569 - DNA, 573 bp, Escherichia coli
atgctgcgtctgcggcgggccggagagataaacggagaacatgtccctgaaattattctgctcaactctcatgacggtatctccagctaccagatgctgccgggttacttcaggttcgtctgccagaacgggtgcgtctgtggtcagtctctgggggaagtgcgtgttccgcaccggggaaatgtggtggacagagtcattgaaggggcttacgaggtagtgggcgtgtttgaccggattgaggaaaagcgtgatgccatgcagtcgctgattctgccgccaccggcacgccaggcgctggcacaggcggcactgacttaccgttatggtgacgaacatcagcccgtcaccaccgccgacattctgacgccacgacgccgggaggattacggtaaggacctgtggagtgcttatcagaccattcaggagaatatgctgaaaggcggaatttcaggtcgcagcgctaaaggaaaacgtatccatacccgtgccattcacagcattgacactgacattaagctcaaccgcgcattgtgggtgatggcggaaaccctgctggagagcctgcgctga

SEQ ID NO: 8570 - DNA, 222 bp, Escherichia coli; identical to SEQ ID NO: 6179

SEQ ID NO: 8571 - DNA, 369 bp, Escherichia coli
gtgtcagacaaactctccgggataactcatcccgatgacaatcacgaccgcccctggtgggggcttccctgcacagtgaggccctgttttggcgctcgtctggtgcaagagggtaaccgcctgcattaccttgccgaccgcgccggtatcagaggccgcttcagcgacgcagatgcataccatctggaccaggcctttccgctgctgatgaaacaactggaattaatgctcaccagcggtgaactgaatccccgccatcagcataccgtcacgctgtatgcgaaaggactgacctgcgaagccgacaccctcggcagttgtggttacgtttatctggctttttatccaacatccgaaacgaaaaagtaa

SEQ ID NO: 8572 - DNA, 348 bp, Escherichia coli; identical to SEQ ID NO: 5977

SEQ ID NO: 8573 - DNA, 456 bp, Escherichia coli; identical to SEQ ID NO: 6167

SEQ ID NO: 8574 - DNA, 684 bp, Escherichia coli
atgtcccgttttgtcctcggtaactgcatcgatgttatggcccgtattcctgataacgccattgatttcatcctcaccgacccgccatatctcgtcggttttcgtgaccgttccgggcgcaccatcgccggcgataaaaccgatgagtggctgcaaccggcctgtaatgaaatgttccgcgtgctgaaaaaagacgcgttaatggtgagcttctacggctggaaccgcgtcgatcgctttatggccgcctggaaaaatgcgggattcagcgttgttggtcacctggtcttcaccaaaaactacacatcgaaggccgcatatgtgggctatcgccacgaatgcgcctacatcctggcaaaaggccgtccacgtctgccacaaaacccgctgccggacgtgctgggctggaaatattcgggcaatcgccatcacccgacggaaaagcccgttaccagcctgcaaccgctgattgagaacttcacacacccgaacgcaattgtgctggacccgtttgcaggcagcggctcaacctgcgtcgccgccctccagtccggacgccggtatatcggtatcgagctgcttgagcagtatcaccgtgccgggcagcaacgccttgccgccgtgcaacgggccatgcagcagggggccgcgaatgatgactggtttatgccggaggctgcgtaa

SEQ ID NO: 8575 - DNA, 462 bp, Escherichia coli
atgctccacacactcactgaccagatacatttccaccgccgaaaaacgtgctccccggttcaggatggcatcgagcaccacgggcaggttttcgtcgtcttcatcgagccagcaggggtgatcgctttccttcacaaccaggcgaaagcggcgcgtctggcgggtcagcaacgtctgaccggttgtggtcagcgccgccctgatacgctgcgcatcttctgccacccggcaactgacactgcgtaccgcatcgcgcactgcatcaagaactgccctgatttcgtcttcagtcagccattctccggcatacgggaaaaacacctgtgttccgtctgccggaagtaccggcagcgactgccactgactgccagacagtaccagttccgccccggttccggtcagtttctgaatggcggaggccaggagcggcggcagtacgccgccgtgacggttgatgagtaa

SEQ ID NO: 8576 - DNA, 759 bp, Escherichia coli; identical to SEQ ID NO: 6176

SEQ ID NO: 8577 - DNA, 510 bp, Escherichia coli
atggtcgggaagcgctgtcatgagcgcactgaccagcgtatccagttcccagccggtgcaggccgatacggccacaaccggatgtacgggccggaacagccggaataccgcatctgttttctcacgaatgttctgtgcctgtgcgggagaaggctgaatgccggccatatcccattcatggcagggctccgttttgtcggcctgcgtcaccacaaacagcacctgctgatgtccccggtgcaggatgtgtcgccagaaatactcatccacagacagggcacggtcatcggctttaatcagccacagtaccaggtcaagttcaggcagaatgtcacggtacagggcttcatactctgcatccctgtcccggctctcgcccaccccgggcaggtcagtgataaccatgctgtaaccgtgaccactcagacggaagcgctgcacttcccgggtgccggcgtgaacatcactgaccggtgtgacctccccctgaaacagggcattacagagtga

SEQ ID NO: 8578 - DNA, 573 bp, Escherichia coli; identical to SEQ ID NO: 8569

SEQ ID NO: 8579 - DNA, 318 bp, Escherichia coli
gtgaagtggcctgtggggtatgaggtgaatatcagccgtcagggagaaaacttcattcaagtggatttcgacacgccgtggtgtcagccggaaagcaacgttgttgcagaattaagccgccgtttcggctgcacgctggagcactggtacgccgaacagggctgcaatttctgtggctggcagcgatatgagcgtggagagcttgttgatgtgctgtggggggaactggaatggtcttccccgacagatgatgatgagctgccggaagtcaccgcgccggagtggatagtcgacaaggtggcgcattacgggggatga

SEQ ID NO: 8580 - DNA, 318 bp, Escherichia coli
gtgaagtggccttgtgggtatgacctgaatatcagtagtcagggagacaacttcattcaggttgatttcgacacgccgtggtgtcagccggaaagcgacgttattgcagaattaagccgccgtttcagctgcacgctggagcactggtatgccgaacagggctgtgatttctgtggctggcagttgtatgagcgcggagagcttgttgatgtgctgtggggggagctggaatggtcttccccgacagatgatgatgagctgccggaagtcaccggacctgcgtggatagtcgacaaggtggcgcattacggtggatga

SEQ ID NO: 8581 - DNA, 435 bp, Escherichia coli
atgaaaactgaactgaccctgaatgccctgcagtccatgaacgcacaggaatatgaagatatccgtgctgcgggaagcgatatgcgccgtaatctcactcacgaggtgatgcgtgaagtggacgcaccggttaactggatgatgaatggcgagtatggcagtgagttcgggggctttttccccgtccaggttcgtttcacgccagcccacgaacgtttccacctggcattatgttcgccgggagacgtctctcaactctggatgctggttctggtgaatggtggtggacagcctttctccgtcgttcaggtgcaacatatcttcacgcctgtcgcgatcagtcacacgctggcgctcgccgcgacacttgatgcgcagggatacagtgttaacgacatcattcatattttgatggcagaaggaggtcaggcatga

SEQ ID NO: 8582 - DNA, 366 bp, Escherichia coli; identical to SEQ ID NO: 5940

SEQ ID NO: 8583 - DNA, 159 bp, Escherichia coli; identical to SEQ ID NO: 6188

SEQ ID NO: 8584 - DNA, 282 bp, Escherichia coli
atgttctccgtttatctctccggcccgccgcagacgcagcatgtgttttgtgtatccccggcggcccgggtcgcgcacacgggtctggcaggcgaagaatggctgaaagccttcccgctgcaggctttccagtacggtgatggtggggatgtacgtatagttctggcttcgggacgtgtgtttatcttccccgaaaatccccggcacatagtgcatcagttcttcgtgtgtcagcggacggtcacggcgtatctggttcgcataaccaaaacgactggctag

SEQ ID NO: 8585 - DNA, 222 bp, Escherichia coli
atgaactatgcaggacacgaaaaactgcgcgccgaagtggcggaggtggccaatgccatgtgcgacctgcgtacaaccatgaatgagatggagcagcggtacagctttaatgccgacaccctgccggaacgtctggtgcgtcagacgctgtttcgcgcaaaccgcctcctgatggaggcatataccgaaattctggaactggaagcgtgctttaaagattga

SEQ ID NO: 8586 - DNA, 135 bp, Escherichia coli
atgaagaaaggtgatgcggctgaacatgcagagcaccatatgaaagacaactgctgggtgcctggctggatgtgtgcaccacatccacagacggataccactgaacgcaccgataacctggctgatgccgcctga

SEQ ID NO: 8587 - DNA, 471 bp, Escherichia coli
gtgggtgcaacctatgctaaatcagatcgcactgacggtcaggtcgcctatggtaagagcaaattcaatgcctccggcaaaaatgcggaagtatgggctgcaggcctgaaatatgatgcgaacaatatctatctggctaccacatattctgaaactcagaatatgaccgtttttggtaataaccatattgcaaacaaagcacaaaactttgaagcagtagcacaatatcagtttgacttcggtctgcgtccatctgttgcttaccttcagtcaaaaggtaaagaccttggtgttcatggtgaccgagacttagtcaagtatgtcgatgtcggtgctacttactactttaataaaaacatgtccacttttgttgattacaaaatcaacttaattgacgatagtaagtttaccaaaacagctggtattgataccgacgacatcgtcgctgtaggtctggtttatcagttctaa

SEQ ID NO: 8588 - DNA, 702 bp, Escherichia coli
atgtttggccatctgctacgatactttagtttctgtaaaaaagatttattagtatttcatcctgaatctgattattcagataatttacgtaaagccttctcttttacaaaaaggctgggatttaatgaagaatggaatggagtcacaaaaaacaaagaatacgattatcaggatgtattcagtcatgtctgtctgcagtctggtgtgacagacttttccgcttcagcaggacaatgcttaaagtggagtcattattttcagccatattttgagaatatccttgaatgtcgggtatgggttaccgtcggacaactctggaaacaggaaagatttatttacaatccgtcagttgcggattttcagcgctggtctgaaaaagggattcagcctgaagatttcagacatcactcggggtttaattttcatgcgtggttgacgacggaaaatggtgtgattgtggatgtttcctttatgagtacgttatcgcggcgattacctgaacacctgagtgaagtcagtggaagtgtgattattggcccgccagagacggttcttcctgagcataaatatgttcccatgattgtcggccagaggattgttgagaaaatagaaaaacgctctttcattgattttctggcgcacgacgatattgatttatatacagtgcctgcaatcttggttccggtatggaaagaatgttaa

SEQ ID NO: 8589 - DNA, 567 bp, Escherichia coli
atgtatacagaatcaaacgttaagctttcctgtaatgccctctggcaaaagtgtgtccttgcaactctgtatcgggctgcagctacacatcctaaaattaaattattacaatttaaattaataccttaccctggtatgaataaggcaattccatctctgatggctgattttactggtgaactgcatagactaatttctgaatatttgcagtgtaagcgacgtaaagataaatctgttgagcccacccctttatattatctctggagtagggaagctgtggctaacgataccactccttatcttatggtgctgctacttaataacgatgtctggtgtaatagtcgtaaggtggtggttctcagaaatctgattgagcaggcgtggggaaaagtattggatgaagataactctgttacacatctggttgtgtatcctgaagtgctgtcgttggtatttgatgcagctaacacatataacgctgagcttggtgtactggaacagacggcccaggcttacattgaatcgcatggtgccattgaacgtcatcttgggtgtagtgacttttaa

SEQ ID NO: 8590 - DNA, 615 bp, Escherichia coli
atgattacgattgaaactctttacggtgaatgtcatgaggctcacgggttaaaaataagaaaccaggtgaataacctcttccagaaacatcccagaataacggcaatacgggtggatctccattatcctcccgtgattgacaacggggataccattacctgttttcctaacctgagtcccggagagatatctcgtttccgtaactcgctgaatgcgaaaattaatgcagatcaacaccgtaaaaaacaacaaggcaaacgcacctacgcaacgtcggtttgtattatctgggcgaaagaatatacgcagtcctttaaatgtcattatcacgtctgccttttttttaacaaagacgcctattaccacctgggagactatgagcgctctgacaccctgagagggttaattaccggagcctggtacagtgccttagggttagaactggaagatcaccagggactagttcatttccctgctaatggacgttacatcctggatattaacgatcctgatttccctgagcagtatcagcgcttattggcacgtctggattatctgacgaagctcgacactaaagcatcaggtcagcgtaactttggctacagcggtttttga

SEQ ID NO: 8591 - DNA, 561 bp, Escherichia coli
atggcgagttttgcatacatagactctgaaaaatggtcaaaacttaatcgattaaaaaccatgattcagagatattttaaagaaccactattgcagttaacaggcgaattgggtcgcccggcttatactctggcagacagaaaacggttagttcgactcctgacgcaggatatgcaaaggggtgatattctgattactaaatcgttaacttgttttggtaatacgccggaaaaaatacaggaggttttatctttaagtatcagacaaggtattaatatttgcttttttacgtcatcagagttgccggatggtgatgatattcctgtggtactcaccgggatgattttacctacagatattagaggaaaaatccccgacattagtatccggaaaattaaaagaaaaccaggaaggaaagaagggagtattcatagtaaaaatatcagacagttgaaattgcaggggttcagtcagtcacaaacagccagaaaattaagcatcagtttatccactgtaaaaagacactgggataaaggtattgttgatctaactgcagagtaa

SEQ ID NO: 8592 - DNA, 744 bp, Escherichia coli
atgaaacgtatctctttctctcttgcagaaacatatgaagctgatgtaattaaaaagtatcagcatttaaaaaaatgctcattttcagcagcgattaaagagtgtttaaagctaggggctcctgttttaaacaggataaatgaaaatattgctgctataactgatatagaggataagctacgtcagttttttaatgaggaaccatttgtgcaacggacaaagcctgaaataacaaaaggagagttttttcatagcatttataaatcgcatatcaaatatgaatatgatgttctcgatagaaagatatttcctcatgaaagcaccagaaatgctatgggagttgcagagaaaaagggaattaaagagaatgcgaacttaatgctggaatattataaagttgagaaggcaatttgtatttacacgaacagaaaagtttcccatgccctgaatcgtgcaggagggttttataaaaccattctgattaaaaccagtgtttttggggattatttttttgacttttgcaattcagtttgcctgccgatagatgagttgattgagtatggtacgaaagaaacagtgaggcgacatcagattcgtagtacaggattttgtacttttcatattccgattttttatatcaataataaggctgtaatagtgcctgttctgagaacagaggaagtttcacaaagttccagaacaggtggagatgttattattattaacccatttgaagatgaatga

SEQ ID NO: 8593 - DNA, 228 bp, Escherichia coli
atgtggaagccgttaagagatgagaaccgtttatcaattttgaagatctatggatacacctgtgacagactggtacgagaaaaggaacgccagaaaattacgtctatttctcgttcacaagcctggaaactggaacgtgaaggaaaattcccgccacgtaaaactattggaaagaaatcctgtgggtggttattaagtgatctattgtggtggattagtcagtattaa

SEQ ID NO: 8594 - DNA, 1605 bp, Escherichia coli
atggtaactaaaaaggtaaaaacaaaccacccgtactatcgtgttttatccggcacctccatgccgtttccccacatacatgaagctgtttccgaacagttgcttctactcattttcaaagcacgcagattgtatctggatccagaatatcgtccctggtttgatgaacaacatcggattctctcggcattacgcgctaacacaaaactccaaagtattttagagaaaaacagagagaactactccataagtgagaccgataatccactatctaaagagctgtatgctgcttttcaggttatgtgccatttatacaatggttttgataacagactcgtcagcctgaaaacctggggagatatgaacagggaaccaacagcaaaatttgtcggccaaaatagtggtggctggaaaacacctgagatggaagaattcgtcagaaacgatttgttcaatattctgacagattgtaaagctcattgctcaccacttcccgctctggttcgacaaggatattgccatcaggatctttctgttgcgcactcatgtactaaagaattactggaacaactgaaccgataccatcaaattgatgaatctgcgatacttgccagaacccttggtttggctattaacaactgctatcactcagaaacagagattcctgaatggctttctccttttgaaaatgaatacaaaagtccctggaattgtgagaaaccagatacgaacgatgtgagtaaacttagaaaacaattgctaacaatcgggcgtacagaattcgtggacaaaatgttttcgctagccaataaaaatgcaacaaagataatatatgatggatacgttaaactttatgctctggaaatatatgaatggttaaataaattagtgcaatattttaaaggaaatgattttattcgttacacctggaagttcacaacaattatttccgatgaaagtgacacgattgaaaacaccaccgcatgggaaaaagactattgtcaaatcactatacagcgtgatgaacttctgaaactgatttataccaataccctgcaggatgcagcaatgaatcttgctgattgcctgcaacaggcatacatagaaccgttaaaaagggaaataaattatccaggaataaacattgatgcaaaagagcgtaaaattagaaaatctattgaattcaggagcgaactgaataacttcacaaacatcatgaaacaactggaaatatttgaaaaatggtataacgccaataaaattctgttggtaagtaacaaaaagatacgtacagaaaagattgacgtgaatattcgtcttgcaggactgaaaggctatgatctgaatgaaggtatacctgatggtcagggacgcagaattaaagatggtgtgaatgaactcgtcaaggcagatggcagtctacaacttccacaagatatcagtgacacttcgcttaaccgttaccgtcaagcagttcaacacattattaaggacgagatcgacacgttgctgacagcacagagggaaaaaaataaaataaatccatatagcgaagatagatactcgatacgacctttatggggaaaatgtctggtcgaacagtaa

SEQ ID NO: 8595 - DNA, 597 bp, Escherichia coli
atggctgtaattccaatgtcttactcccctgctactgtagctcgtcgtttttcgatactggatggagtaactattcagggcgtgctttaccagatcatctgggatccaaagactccgtttgctgcggtaatcgaagctgcaccttctgttattgatggtgatgttcgccataaggttgttgccactctggagcttcagcgtcgtccccggcttgaaggcgtgtttgtccagaaattctgggaagaacaggatgttgctcagattgaagggattgttgtcgatggcgctgtacgtgatgttggtcttgcaacgtttgtttatgaaacgatagtcacaaaagcgggcgttgtactattaagtgataacgagcaatatgaaggaggtaaagctctctggcagcatattgcgcgtcgttcaacgaatctgaaggtgtttattttagatactgattccgcacggtattacccgtttgatggcgaacggatcagttatgacgggaaaagcatcccggaatcagaaatctggagtgaacatcctgagcgaaacagacacgctgtcgttcttgtggctgaatctgttaatggtaaagccgcataa

SEQ ID NO: 8596 - DNA, 1317 bp, Escherichia coli
atggccgtcaatcttactgaaacagccatccgagcattgaaagcaaaaaagacatcgttctatgtctggagcaacagctctcaacgtggcactggacgacttggtgtcaaagttcagtcttctggcagcaagattttctatttccgctattacgtggaaaaagggaaaaaagaaagattcattcaattgggtatatggcctgagatgaaactggccacagcgaatgaactggcaaaaaagtatggtgcttggctcattgaaggaaaggatccccgggcagaactggaacgacaacagtttgcagaacagcagcggatacaactccatcaatcacagggctcatttgaagcattgattcatggttatgttaacaaaatgaaaattgataataagaggacatggcaggatgttctgaaacgccttgaaaatgaatgctatacagtgatcccccgtgaaactaaagctaaagatgtgacttccggacagattaaacatatcttggccgggatcattcagcgcggtgctgtggttcactctaaccggatccgttcttacctgatggctgcatttaactatggactgaaagcagataacgatccgatgaacacaagtgtagggattacttttgggctggaggcaaatccagtgtcagtgataccgaaacagtcatctgctgaaaaagtcggtgatacctggctgacacttgaagagttgcgttttctaatggaacattttgctgaagcaaccaacgttggattattgatgcaacatttgatccgattctgtatctataccggagggcaacgtcccttcgaaatgatcgccagtcagtggtgtgatgttgattttcaacaaaaaacgctgctggtgactgctgatgtctctaaaaataaacgagagcatttgataccgttgactgaatcagcattacaggaattatcctgtgtgcaggagttaacaaaagaaaaatccagcccttacatttttccactttcgactaatggtaagcgtccggttcgtacggacagtctggctcgcgctatcatgtatttccgggcttttaatcctgactttaaaatttttacagcacgtgacttacgtcggacctgtaaaacgttaatgggagaagctgggatcagtaaggaaatccgcgatcgtattcaaaatcatgcgttgaacgatgtcagttcaaaacattatgatcgatacgattatttgccagaaaaacgcagagcacttgagatctgggaggaccgggttaataactatcaacagcaaacaggcaataatgttgtcaatctgtttggcagaaggtga

SEQ ID NO: 8597 - DNA, 333 bp, Escherichia coli
atggaaaccgtggcttacgctgattttgcacgtctggaaatgcgcgtcggaaagattgtggaagtgaaacgccatgaaaacgccgacaagctgtacatcgtacaggttgatgtgggggaaaaaactctgcaaaccgtgaccagtctggtgccgtactacagcgaagaagagctgatgggaaaaacagtggtggtcttatgcaatctgcaaaaagcgaaaatgcgcggtgaaacgtcggaatgcatgctgttgtgtgcggaaaccgatgacggcagtgaaagcgtgctgttaacgccggagcggatgatgcctgcgggcgtacgtatcgtataa

SEQ ID NO: 8598 - DNA, 891 bp, Escherichia coli
atgaaaaatattaaattacttggttcagctatgttggtgagcctggcattgttctcgcaaagttcgttggcaaaagagtataaaattggtgcgtcattattaacacaacaacatccattctatattgatcttgcgaatgccatgaaagaagaggcaaaaaaagacaatgtcaatttaagtgtctctattgccaaccaggatttaaacaaacaactttctgatgttgaggattttattactaaaaaagtggatgccattattgtctctccggtcgattcgaaaggcgtccaggcagcgataattaaagccgataaggccggtattcccgttatcaccgtcgacgtcgctgcggaaggcgttccggtcgtatcgcatgttgcgaccgataactatgcgggaggcgttgaagcaggcaagttaatgggtaaacttttgcatggtaaaggtactgtagccattatttcttatccggcactacaatcggtggttgcgcgcgttgatggttttaagaaagggttaagcgatacaccggatattaaaattgttgctgaacagcctggtattacgcgggctgaagcgttaacgactgcgcaaaacattatgcaggcaaacgccaacctgaatggtctgtttggctttggtgatgatgcggcgctggcagcggttatcgcagcaaaatctgcgcataacgacaacatcaaaatcattggttttgacggcatgaaagaagcgtgtgatgctgttgacagtgaaaaaacgtttgcggccgtgattcggcaatatcccgatcaaatgggggctaaagccattgatgccgctgttgatcacctcaatggtaaaccggtagaaaaaatgatcccggtacaacccggcgtttatacaggtaaatag

SEQ ID NO: 8599 - DNA, 282 bp, Escherichia coli
gtggcgataaaacgcgcccagcgtggggccagctattacaagcttaaaaacggtacattacacgcccagcatgttgcaggtcacgatatcgaaattatcgatccaacgggtgcaggcgactgctttggcgcaacgtttatcactcttttcttatccggtttcccggcacacaaggcgctgcaatatgcaaatgccagtggcgcgctcgccgtaatgcggcaaggtccgatggaagggatatcctcactggcagacattgaagactttttgcagcagcactga

SEQ ID NO: 8600 - DNA, 174 bp, Escherichia coli
atgaaatgtattattggaaataaaaaatgggtttgtggattcagggatgaattaaaagtatcacaaaatattatacgctcagggattctttttttactatcgatattatttattaataatgcgtccgcgggcgggtttggccttggcgtaacgcgattgatttatccggcataa

SEQ ID NO: 8601 - DNA, 2595 bp, Escherichia coli
atgaacctaaagctcaaaagatgcgaatattggatggcggcacaaaagcagatgaaacgggttgtgccgcttcttctggttattatgcctgcatgttcaatcgcgggaatgcgctttaaccctgcttttctgtcgggtgatactgaagctgttgctgacttatcccgcttcgagaaagggatgacttatcttcctggtagctatgaagtcgaagtttgggtcaatgattcccctttactctctcgtactgtaacttttaaagcagacgatgcgaatcaactgattccctgcctttcacttgctgacttattaagccttggaattaacaaaaatgcgctgccagagcaggctttggcttcatctgaaaatagttgccttgatttgcgtatctggtttcctgatgtgcattacatgccggagctggatgcacagagacttaaactgacctttccgcaggcgataataaaacgtgacgcccgcggatatattccaccagaacagtgggataacggtattacagcttttttgctgaattatgacttttctggtaataacgatcgtggtgattactcttcaaataactattatttaaatcttcgcgctgggatcaatattggtgcatggcgttttcgcgattattcaacctggagtcgtgggagtaattcagcaggtaaactggagcatatcagtagtacgttgcagcgcgttattattcctttcagaagtgaattaacgctaggagatacatggtcatcatcagatgttttcgacagtgttagtattcgtggcataaaactggaatctgacgaaaatatgttgcccgatagtcaaagtggtttcgctcccacggtgcgcggaattgcgaaaagtcgcgctcaggtaacaatcaaacagaatggttatgtcatttatcaaacctatatgccgccgggaccgtttgagattagcgatcttaacccgacatcatctgcgggagatctggaagttaccatcaaagagtctgataattcagaaactgtctataccgtaccttatgccgctgtccccatcctgcaacgagaaggtcattcaaaatattctactacggttggccaatatcgaagcaatagctataaccagaaaagtccttatatatttcagggggaattaatttggggtttaccctgggatattacggcttatggtggggcacaattctctgaggattaccgggcgttggcgctcggccttggcctgaatctgggtgtatttggtgcaacatcgtttgatgttactcaggctaacagttcgcttgtggatgggagcaaacatcaagggcaatcttatcgttttctttattccaaatcgttagttcagacaggaacagcattccatattattggctatcgttattcaacccagggcttttacactttaagtgatacgacataccaacaaatgtcagggactgttgttgatccaaaaacgttagatgataaagattacgtttataactggaatgatttttataacttgcgttatagcaaacgtggaaaatttcatgctagtgtatcgcaacctttcggtaactacgggtctatgtatttatcggctagtcagcaaacatactggaatactgataaaaaagattctttataccaagttggttataacaccagtattaagggtatctatctaaatgttgcgtggaattacagtaaatcaccagggacaaatgcggataaaattgtctcgctaaatgtctcattacctataagtaattggttatcttccacgaatgatgggcgctcatcatcgaatgccatgactgcaacgtatggttatagtcaggataaccacggacaggtaaaccaatatacgggggtatctggttctctgttggagcagcataatctcagttataacatacaacatggttttgctaatcaggataatagcagtagtggttctgttggtgttaattatcgtggggcatatggttccttgaattccgcctacagttacgataatgaaggtaatcaacaaataaactatggcatcagtggtgctcttgttgtacatgaaaatggtcttacgttgagtcaaccattaggtgaaactaatgttttgataaaagcgcctggagcgaataatgtggatgttcagcgggggacaggaatatccactgactggcgtggatatgcagttgttccttatgcaacagaatatagacgtaataatatttcattagatcctatgtcaatgaatatgcatactgaactggatatcacttccactgaagttattccgggaaaaggtgcgttagttcgtgcagagtttgctgctcatatcggtattcgtggtttgttcacagttcgttatcgtaataaatcagtcccattcggtgctacagccagcgctcagattaaaaacagtagtcaaattaccgggattgtcggcgataatggacaactttatctctcaggattgcctttagaaggtgttattaatatccagtggggagacggtgttcagcaaaaatgtcaggctaattacaagctccctgaaacagaactggataatcctgttagctatgcaactctggagtgccgctaa

SEQ ID NO: 8602 - DNA, 174 bp, Escherichia coli; identical to SEQ ID NO: 4526

SEQ ID NO: 8603 - DNA, 243 bp, Escherichia coli
atgaaacattcatttgaaataaaacttgccgctgtaaatcattacctggctggtcatgcaggcatcatttctacggcaaaactctttcaactttctcacaccagcctctcacactggattaatctttttcttcttcacggtcctcggcactggattgcagacacaagcgtagctattctcctgaagataaactttgcgtggttctttatgctctcgggcattctgagtctctaccccgggtag

SEQ ID NO: 8604 - DNA, 1167 bp, Escherichia coli
atgacatcgacgatgcatatggacagggccgataagaataaagttggcaccgttgaaattgaggatctacgggttattccggttatttttctgcccggagtcatgggttcaaaccttatggataagaaaggaaaatccatctggcgatatgatgactctatgagtctgatgggctggtcactacctacatcaggaccaaaagagaggaaaagattattgcatcctgacagggtggaggtcgataatcgtgggagaattcccgcacctccggatgcccaagaaaaacttattcagttaggtcaacaatatccggaggacccatccgataaagaagcaatggataattacactcaggcagtacgtgacattttggataatatagagccagaagcgaaattatttggttcaagaaaagatcgcggctggggagaggttgcaaatgctagctacggttcctttctcgatgtattacaaacagcattgtaccgggacaaacctacaaagaaaggtgagacgttaagtgcgacctaccagcaactactcgatgtacctttgggtttggagtatggtcctgactcacttgatgaagagtatcttgaagtcataaggttgtatcaatttccggtccatgtcgttggctataactggcttggttctaatatgctctcagcaatcagactacaagaacagatcaagaaaattgttggaggctatcaaaaacgaggaatgaaatgccataaagttattctggttacgcattcaatgggaggactagtggcaaggtacttttcagagtgtctttcggggaatacggatgtctacggtattgttcatggcgtattaccatcaattggtgctgcggcgacatatacccgaatgaaacgtggaactgaaaacccagagtcaaatccggaagggtatgttatcagtcatatcttaggtcgtaatgcagctgaaatggtagctgttttttcccagtcgccaggaccaatggaattactacccatgaatgattatggtgaagagtggcttaatattgtcgatcgtgatggtagtacattaacgctccctaaaaatcttcccattaaagaaggtattgcccccgaagaacgcacctacgctgaactttatctaaatagagaaaattggtggatgagaatctattga

SEQ ID NO: 8605 - DNA, 1197 bp, Escherichia coli
atgaaaacctggatctttatatgtatggccgtagcaatattgctatggtttctgagtacgttaaggcgtaagcccagccaaaagaaaggctgtattgacgccattatacctgcttataacgaaggcccgtgtctggcgcagtcactggataatctgctgcgtaacccttatttttgccgggtaatttgcgttaacgacggctccatggacaataccgaagcggtcatggcggaagtcaaacgcaaatggggcgaccgctttgttgccgtcacgcaaaaaaataccggtaaaggtggtgcgctgatgaatggcctcaattacgccacctgcgatcaggtttttttaagtgatgccgacacctatgttccgcccgatcaagacggaatgggctatatgctggcggaaattgagcgtggcgctgatgccgtaggcggcattccctctactgcgttgaaaggcgcgggtctgttaccacacatccgcgcgaccgtaaagttgccgatgattgttatgaagcgcacgctacagcagcttctgggcggcgcaccgtttatcatcagcggtgcctgcgggatgttccgtactgatgtattgcgtaagttcggtttctcggatcgtactaaagtcgaagaccttgatctcacctggacattggtggcaaacggctaccgtattcggcaggcgaatcgctgcatcgtatacccacaggaatgtaacagtccgcgtgaggagtggcgccgctggcggcgttggattgtgggctacgcggtctgtatgcgcctgcataaaagacttttatttagccgcttcggtatcttcagtatatttcctatgctgttggttgtgctttatggcgttggtatttatctcactacctggtttaatgaattcatcaccaccgggccacatggtgtggtgttggcaatgttcccgcttatctgggtcggcgtagtttgtgttattggtgcatttagcgcctggtttcatcgttgctggttgttggtgcctttagcaccgctttccgttgtgtatgtattattagcttatgccatctggattatttatggacttattgccttttttactggacgcgaacctcagcgcgacaaacccacccgctattccgcactggtggaagtgtcaaccgcttattcccaaccttctgtcacaggaactgaaaaactatctgaagcttaa

SEQ ID NO: 8606 - DNA, 162 bp, Escherichia coli
atgctggcaaccgaacgccgcgatctcgggcttgatgatggctctttctggcccgtactggaaggtatcccggcaacagagatgttcaaagttattccactgtcgccaggccatacctatgggatgtttatggaacgctttaaagagttaactgagtcgtaa

SEQ ID NO: 8607 - DNA, 867 bp, Escherichia coli
atgaatcaaaatccattctcattctatgactttcttggatatttaataccaggtggtttttttatcctattaatgtatttctgtggtttgacattcgatctagatattgttattgacttaagtgaattgctcagaggtcaaagtcaaatctttggcattttgaactacgcttcaatagttattatatcttatatagctggacattttatttctatcacgtcagcattttttatcgaaaaatacatgaataaagaattaggatatccttccaaatatctatttaaaaaattgatagatacctcagaaagcatttgtagcccatcatgcgatgagagaagcgctgataaaaaaacaaaaataaagaatcgcataatcaaatgcgtattatgtccaataatactatgggattttataacacaaaaactatgttattctcaatctctaccatttcatttagctaatacaacatggttaatgatcaaagaaggttatgagaaaaagttcataacaaatcgccaattattacaagataaaaacggacttgatgatgatctcttcagattggcatatcattatgtttatgagttttcaaaacaacatcaaacaaaaattcaaaactatgttgcattatatggtttttgcagaaacatatgtttaatctttataatttcattttgggtatcagttccaacctttatttatcgattatgtactcatagtgattatctttatagtttactttcaataatgcttagctttttcttcgtctatgttttctatgttggttttgttaaattttatagaagatatactttagaagtattaatggcatttgctgtacttcaaagtaacgacactattcgttaa

SEQ ID NO: 8608 - DNA, 618 bp, Escherichia coli
ttgatcagtacggaaccaatgtcattagtagcacaaataggacagtattcgtggtgtatcacagtagttagcgtctgcttagttttcattggatggcgagttgcgtacaataattctgtaaaactggcgacacgttctgaatcgaaatcaattattgatgctatttcaaagttagttattgaaatttctgatatttcttctaactattggctcagtcagacaactcaacctaaaattagagcatcaaagcatcgattgttaaggttgcaaaaggatagaacaaaggcttctgtttcatacttgttaactatcttggctaaagctcaacaagtttccaaactgatttgcattttggaaagcagaggactgtatatacctgacgaggtgttctcatctgtactagagaaagcaactctggattgtgaggtcgctcacaagctttcagatgccgatcgcccggttaaagcacaagaagtaattgatgcttgtatgggagttatcgaagcgttacatacttcttttcaaaggtaccaccctcccaaaaaggatcgtacctttatgcaaaggttaaaaatttggtttcaaacagtagacgattggcataatgacttaaaataa

SEQ ID NO: 8609 - DNA, 327 bp, Escherichia coli
atgagaaatatcgtcatagcgaaggagttctccagaacacctttcggacgttacacaacggatagcccacacagtgcggaaagatttcgtagagagtttttggtgcctgcgctgaagggtactgaacaggagattgtggttgattttcgcggtatagcactgggtgttggttcctctttcttagaagaggcgtttggaggtctcatccgtaaggaagggatacctaaagccaacgttaaagcacgtttgattataaaaagtgatgttccgttctacaaagaacagattgataaatttattgatttagcacaaccagaaagagtataa

SEQ ID NO: 8610 - DNA, 912 bp, Escherichia coli
atgaccatactggtacccccaagcaaattttgcatttactcagatgattctagggctgggacattgaacttcatcaactcgattgaatcgattggagtaaaaaataaaggtcgagttatagttgatttgtccaaggtaaaatttgcctcagctgcggcatcggtactgttctttgccatagtaaatagagctcaatttttaacccgggaccctaattttatacgttttaaatggcctaaaaaggatgataacccatctgggcatagatggatcgttggtactggacttgctcgtgctttgcttgctggcacagaagagaaactgaatgcacttacgagggaggaacgatactttcagtcagctgtcgaaccttacgagcatattgttgaaacagtactcatgctgcagaaaagtgctctgcttaataatgaacagttaggcttactgctgacagcgattagtgaagctttgctcaatgtttctcatcatgcgtatgaagatgaggggttcgagtcagatattcagcttctcaaaggtaaacgatggtggcagtgcgcttggttcaatcgtgatgaaaataaagtcgtttttatcgtttgtgaccttggattggggatttatagaagtttcgtgcctaatggtgatggtcatagcattcaaaacgaagtatcttctgtggaaagagctatgttagtaggggaatcccgctttgttggttccggacggggaaatggctctgaagatatcaagagacctattggggcaggttgtgaggataatgagacacttctgatactaataggaagggctcgttatagctataattctaatgacagtagtcctcgatgtgagaagctagctgagtacataccgggtactttactacaatggtcgctggttcccaggagatga

SEQ ID NO: 8611 - DNA, 1422 bp, Escherichia coli
atggcgacatggcaacttggcgggctgcctagcatggcaccgcaaaatgataatgctcctcgttcttccgttcctcagcctgtgcagtatcagcagcagccaaacgtaggtttaatggcgctacaggggctaagaggcgttgctgagattaatcagcaggcacgtcaacaacagcgtaaagcagagtttcagaaagcatatgccggggcttttgagtctggagacagaaacaaaatgcgcagtcttatttctgagtatccagaagaatttgaaagcgttcagaaagggatgggctttattgatgacgaccagagaaattctattggtcatcttgcgactagtgctcaaatcgcatcttcgctcggaactggggcatttggaaaattcatagcagataacgaagatgaaatgcgtcgcttgggaatttctcctgagtctgttgccgaaatgcatgttaatgatccacaggggttccagcggcttgctggtagtatggcactgttttctctcggtcatgagaagtatttcgatatcaaagatcaaatggaaggtcgggatattgagcgtggcaagttggcagaaacaatccgcagcaatcaggctggcgaagcacttcaggcgagagggcaggatattagccgagcaaatgcgttaacgtcagcatatgcaccaacagcagcaatgcagaattacaatcagtacgctcaaatgttaaaggcggatccagagggggcggcggcatttgcggcagcggctggaattaatacaaacgccaaaaaattaatgagtgttagagaaaacgatgatggcactgtcacaaaatactacacagacggaagtgaagagcagggaaaactaaaccagccaatatctggagatgggtttcgtccaatagctttgccaacagcccaaaagatcatggaaaagtcgccagaaggggctaaaaaagctgctggatttgcatacagggttagggatgctcttgattcaatagatacactgaaagaccagcttagcccacagcgagtggcgatcattaataatgctttgggtaatgggacgctggctaacttaacgctcagcccaacagaacagcaatacgttgttaatgctaatgacgcaataatggcaatactccgtcaggaaacaggggcagccatcgtacctgctgaaatgtcaaaatattatcaaatgtatttccctcagcctggcgactccacaaaaaccattgataccaagcgccggaagatggaaaaccagttcaattcgctgaaagctgcttctggtcgagcttatgatgctttgcgggttatttcagcagttgacagaggaacttcttcttcgtcgcagacattgccgcaatctgagcaggtatcacagccagcagccagcagtaacttttcttcactatggggtgattaa

SEQ ID NO: 8612 - DNA, 678 bp, Escherichia coli
atgttaattacccatatagctcataaacatctcaatcgtgccgtatacgaaaaaggcggtgatggtggtgcctctaaagctcaggcgaaggcccagcagcaggcaattgatttgcagcgcgagcagtggaatacggtgatgaataatctcaagccgtatgcagaagtcggattgcctgctttacaacaactacaaggactgatgactctggaagggcagaataaagccgcgaatgatttctttggttctggtttatataaaacacaggcagatcaggcccgttatcagaaccttgtctcagcagaagctaccggggggcttggctcaacagctaccagtaaccagttatcttccattgcgcccatgctttataacaattggcttagtgggcaaatgcaaaattatggaaacctgctaaatgtcgggatgaatgcggcatcagggcaggcaacggcagggcaaaactacgccaataataccggacaactcttgcaggggcttggcgctattcgtgcaggtcaggcgcagcagccatccagtcttgcgcgtggtattggtggggcagcatcaggcgctttagcgggtgcgcaacttggttccgttgttcctggaataggaactgcggccggcgctattggtggtgggcttattggtcttgttggggggcttggattctaa

SEQ ID NO: 8613 - DNA, 462 bp, Escherichia coli
atggaactaaaatttattgataaccctgtgcgattacaggcctttcttaacgatcctggcaataccgaaaatattgttgagccggggcacacgtactacatcaagcctgatgcggtatatctcggcatctacgaaggattagtgctggctggcgttcatgaagtgcgtaacttctggcatagcgttgttgaatgccatgcggtgtacgaccccggattccgtggtgaatatgcactgcaaggacatcgattattctgcaaatggcttctcgaaaactcaccattccttaacagcatcactatggttcctgacaccacgaaatacggacgggcaattatccgtttgcttggcgctacccgtgttggtcaccttgatgatgcttatatcaggtgtggtaaacccgtcggcgtaacgctttatcagttaactcggcaacaatataaggaattcagcgaatgttaa

SEQ ID NO: 8614 - DNA, 162 bp, Escherichia coli
atggctatttcagtaaagccggtattgataagtgagaagcaaatggaagcgataaagaaaattcaggaagagcagcgtaaaaaatcaggaattggagtagcgccaactctgcatgaaattgcacgagggttaatagataaggcgctggcaggctgtatgtga

SEQ ID NO: 8615 - DNA, 2757 bp, Escherichia coli
atgcgaaacattgatcttatccgtcaggttatcagtgcgtctgaaaacaactggcctcatgtgctgggctgcctgaacataaatgtccctgactctccgcgccgtcatgctccctgccctgcatgtgggggcaaagatcgattccggttcgatgacaacgggcgcggtagcttcatctgtaatcagtgcggcgctggtgatgggctggatttaattaaacgcgtaaataactgcgacacaacagaggcggcgcttcttgccgctgatgttctgggtattgattaccggacaacggaaacaccagaagccaccagccagaaacgggaacaactggaaaccgagcgccagcgacgcgaacaggagcgcctgaaaagggcagagaaggacgaacaacaaagacgggatacgttttcccgtcagtttgatgacatgcgcagaaaggctgtaaacggcaaatctgattatctggttgcgaaaggggtaggtgattttacattccccgtgttgcccgatggatctctgttgctggcgctggtggataaatccggcgcagtcacagcagcacagactattacatcacatggtgaaaaaagactcctgacaggttcagcaaagcggggggcatatcacgccataaacgcgccagaaacaacacagagcatcttaatcgcagaagggctggcaacggcattatctgcccatttaattcgtccagaggcgctgacagtggcggcgattgatgccgggaacctgttatatgtcgcccaggtactgcgggataaatttccttcagcacaaatcatcattgctgcggataacgaccacagcgaaggaagacaaaacacggggagaatagcagcagaaaaagcagctttatctgtttctggatgggtggcattacccccgacagatcacaaagcagactggaatgattaccaccaaaaacacggcattaaatgcgccacagaagcgttcaataagtcaatgtaccaaccacagggtaatggcgtgaaacaggagccacagaccattgagggaagcgattttaaggttatggataccgacccactgaaaccaagaatagaaagccgcgaggatggtatttattgggtatctccgagagctgacagccagagtggagaaatcatcaataacgaaagctggttatgttctccgttaagcgttatcggtactggcagagacgataaagaccagtatctcattcttcgctggctgtcgtttggttctgaaacgccgacaaccgctgccattccactggctgatattggtgaacgtgaaggatggcgcacacttaaagctggtggggtaaatgtcacgaccaaaagcagcctcagagcaatactggcagactggctacaacgcagtggctctcgtgaattgtggcgtgttgctcatgccactggctggcaatgcggagcgtacatcatgcctgatggggaaatcatcggaacacctgaaaatcctgtgctgttcagcgggagaagctcagccgcagccggatataccgtctcagggagcgcgaaaagctggcgtgataacgtggcgcgtctggcctttggtaactattcaatgatgaccgggatcggcgcagcactggcagcgccattgattgggctggtgggcgctgacgggttcggcattcatttctatgagcagtcgagcgcaggtaagaccaccacggcaaacgtggcgagcagcttatacggcaaccctgatttactgcggctgacgtggtacggaaccgcgctggggctggcaaatgaggccgccgcccacaatgacggactaatgccgcttgatgaagttggtcagggcgctgatcctgtcagcgtttcacagtctgcctatgcgttatttaacggtgtagggaaactgcaaggcgctaaagatggtggaaaccgggatctaaaacgctggcgtacagtggcaatcagcaccggagaaatggatttagaaacatttatcgctacttccgggcgaaaaaccaaagccgggcaactggtgcgactgctgaatattccgttgagtaaagcagtacgctttcacgattaccagaacggaaaacagcacgcagacgcactgaaagacgcttaccagcatcaccacggcgcagccgggcgtgagtggattaaatggctggcagaccaccagcaacaggctattaaaaccgttcgtgattgcgaaagcagatggagaaacctgatcccatccgattatggtgagcaggttcaccgtgtagccgcgcgatttgccattctggaggccgcattgctgttaggcgaggttgtaacaggctgggatgctcagacatgccgtgatgcgatacagcacagctataacgcatggttgcgcgagttcggcacaggtaacaaagaacatcagcagattattgaacaaacggaggcatttcttaatgcctatgggcttagccgttttgcaccatttccatacagcccggcagatttgcccatcaaagatttagccggataccgtcagcgtggagaacatgacgaaagcccaatgattttctacacattcccggccacatttgaaaaggagatcgcatgtggtttcaacgcaaaacagtttgctgaagtgttgaaaaaagccgggatgctaaccccaccaaacagcggtcgtggataccaaagaaaatcaccacgtattcagggacgacaaataaacgtttatgtactcaattaccagccaggagattataactcatctgaagaatga

SEQ ID NO: 8616 - DNA, 372 bp, Escherichia coli
atgcgtgaaaatgcagaaatggcgcttagctccgcaatcggagagcaggtggcaaagattgctggtgctgtgtggattcataaccttcattctactggtgaagagaaaatggcaattcagacgccagagggacgcaccattactacatctctgaagccgtcagatgtttgtgatctgatttgcgcattcatgtacccagcaatgaggactgtccacggcgataagtggaaacttgcgacaaccgctgaatttgatatgtggctaaacaatgatggcatgctgactgattacggaataaccaagtggcagatgctggttagccatatcgcaaacgctatagaccacgtggggtacggtgatgcgaaacattga

SEQ ID NO: 8617 - DNA, 342 bp, Escherichia coli
atgattactaaaaatttccgactgaatgcgctggcaaataagtatgcgtcggcactgtataaacacattacctccaccagcggcggggactatttcatggttgatgcggacggcgaggccgtccgtgtggaaatcgtcaatggtgtaaaaggcgttcgcagcctgatcgatagctacacactggcagccatgaaagtgttctacccgcagtgggaaaccgtggggatcgagcttcttgatcgttgcgtcactaaggacggattgactgacgtcgggcgtgagatatggcaaagcatggttaatgacattggcgcaactgtagcgggaggttctcatgcgtga

SEQ ID NO: 8618 - DNA, 603 bp, Escherichia coli
atgaataatttcttaactttccatgcagaagcaacgcctgacggcgtaaacatcatgtaccgcagcaacgatggcatgacagaacgcgttgaggccgtttcatatattgatgccgtaaatcgtctggatgccggggattatgacgataaaccagatgaaggtatgtcaatacatctcgctattgccgatggcggcaaccagggatatttcgattacacatcacagcataacgtcattatgtggagatggctgatcgcaacagtattcatgctggaaatgagagaggaaaacggcactgtcagcatcattgatgatactggcaatccttccgaagtggctgtttattccaacggcatcgtcgccatgccgctgtatccagtagcagagcgcctcgctatggcaaacaacattgagggcgcgatgatagaacgttttggcatcgagtctggcacagaacgcgccatcattttctacagagccatgatggatgtggaacaaggagcactgactccatttggtcgtgaaacgcttgctgaacttcacaacagctttatagctgaactgaatgaaaacggcatgccagcggaaccagtgacgcactga

SEQ ID NO: 8619 - DNA, 222 bp, Escherichia coli
atgaccaacatccagctcattgaagcgcaatgtcgtatcgaacaggttcagactgttttagggttctggcttgaaggggccagccccagcaacagagacaagttaatgattggcgcggttatgtcactgctcaatggcgtaccagaagctattcaggaagcagacgaattgttgggcaaatatgagttacagaatcattcaggcgaggcgaaacatgaataa

SEQ ID NO: 8620 - DNA, 264 bp, Escherichia coli
atgaatatcaacttaatttatcgtcatccgtgtgagctggaaattgaatcattgctgagccgtgaagagccatatccagacacattcactcttgcagatcgcacgactgaacggcttaccagagcgcgcacaggtctggttcatgtgatgaatgagattcttccatcggtgggaggggaacaggcgacagtaatcactagctggctacaaaaagttacctctctgatagatatcagtttaatcgatgcggagagtgcgaaatga

SEQ ID NO: 8621 - DNA, 195 bp, Escherichia coli
atgaataactcaattaatacccctcgccttacgtccgcacttcaattaatcgagcaagtagcagctgtcctggttgctgtcagtctctcggctgaagaaatggatgctgctgatgtcgtggatgcgattaaagcgtgctcatctttggttaacgatgcccgtgcagagctggtaattcttgggggtgaaaaatga

SEQ ID NO: 8622 - DNA, 1068 bp, Escherichia coli
atgctaaccgtccagaagaagacattttcactggctggtatgtcgccaaaatccagcaatatgacagcaaagtcaggcattaatacagcagatacaagcaaagtttatcatttgctggtggtaggagcggatgccttaactatgtcagaaattacggtcgatggtgttagcgttgagaaggtcagcggctgcgccagagaatttctggtcgtagatcacctgttctgctcgtgtagtgactccacaaaaacattcgtccacgcgcgtgacgttaacgaaatgagcgcgatgtactgtgcttctggttcttccaatagtgagttttcggagtccataaaaaagagcttgccgttatgcggcaacacggtttatggttataaggcacctcataaaacgggtgccgggtttcgcagcccggaaatgtacgaggcgacacatgacgcgccgagcgtctttttttgtgccgttagccagactcacacttttttcagtgatgtggttataatccgcgtcgcttgcaaaattatggtgggctggacagggcagccgaaaggctggccggtttccttgtacgccggtactgcgaactctgttcagtccaccaccagcgagtttcgcagctccggtggtgggaagaattcccagtacaaggaggctgccacatgctggctactacccctacccaaaaaccgcaatttatctggattatcgccgcagttcgccgcgattgcccgacaattaccgccaaaattcatcatattgctgccgagtctgaacgcgatgctcgccgttctctggtgcgcgatcacatctgcttttttgctggtcgtatccgcatggaggtggcacatgattaaaacctacgatgtgcatatggaccccctcgaacgcacaagccagatcatcacactgacagaagtgattaacgacattctggtgagcaactctccctcacgagacgaaagactgaaggcgttactcgcgatattggacctcgccgttcgtgacgttcatttcctgctggaaggtggacaaatgccatgcaaaacgggggcaaccaatgaataa

SEQ ID NO: 8623 - DNA, 183 bp, Escherichia coli
atgtctaagccaacaggaacaccacaacctcaaaaacgctacaaagatgcccacggagcactcgttactgtcgaaagcgtgtctcacaaccgagtgacgttttatcgcgacgggtatcaatcgccatgcgtacaaccgctggcgcgtttcatgaaggagttcgcggaggttaacaaatgctaa

SEQ ID NO: 8624 - DNA, 834 bp, Escherichia coli
atgaacatcgaaaaaagcagattaatttctgaggctgcccctcatctgaacgcctctctgggcacaattaacggtaatgaatttgccgcaattgtcccggttattcctggtcatatcggtgggcgtgaaaccaatattgttagcgcaaaagcattacacaaagcgttgggcgtgggaaaagacttctctacatggatcactgatcgcatctctgaatatgacttcaccattgggcacgattactcagtccataaaacaatttccccaaatttggggaaaagcccgaatggcgcggcttacagcaagattaagcagtctggcagacccggcaaagactatctgttaagtgtcggaatggcgaaagaactggcaatgatcgaacgcaatgatcagggtcgcgctatccgccgttatttcatccagtgcgaggaagaattacagcgtagcgtgcctgaaatcgccgcccgctatcgtcgccagctaaaagcccgtatcagtgccgcaaacaactttaagccaatgtgcgatgcgctgaatatggcccgtgccgagatggggaaaacgacgcagcaacaccactacacaaacgagagcaatatgatttctcgtatcgttcttggtgggctaactgctaagcagtgggcgcggataaatggctattctggcgaacctcgcgaccatatgaacgcagaacagcttgagcacctctcatatctcgaaagcaccaatatcacgttaattgatatgggcatggaatatgagcagcgcaaaggagaactcacccgcctgtcgcaacgctggctcgccaagcgtctggaggcggtcaatgtctaa

SEQ ID NO: 8625 - DNA, 432 bp, Escherichia coli
atggaaaagaaaaaccgcccattacaggcggctaattcagatattcgcgtatctgatgttacgccccttacaaaatcccttcaagcaccaaagcgcacaccgaaaaagcatcgtgccagagtctatatgctgcgtactggtatagagggatggacagaaaatgacattcttcgctactgccgtctgtcttctggtcgtaactatgcaacagagttagaacgccagcttggaatcactctggagcgtatcgacgaaaagaatcctgatggtatcggaacacaccttcgctaccgtttctcctgccgtggtgatgttctgaaagtgatcactcatgttaaccatcttgcgagcataaatgatcacaacggactttctcagcaggaaattgccgacattctgaaactctacccggacgcgtttaacgccgcctaa

SEQ ID NO: 8626 - DNA, 204 bp, Escherichia coli
atgaacaccgacactattcctacaaaaggctatatcagacgcttccgcctggctgaattgctgggcgttagtgtatccaccatcgaccgtaaagtaagaaacggttcactaccacgtccggtaaagctgggagaaaaaataactgcgtttgatgcggttgagattcacaactggctggcagaacgccgcgggaaggtggtctga

SEQ ID NO: 8627 - DNA, 966 bp, Escherichia coli
atgaacgactctcatgaaacaactgcggtgcatagaaatttatggcaggaatcaggtattccacctttggactactgcacgatagagcgagcatcaaaattattaaattgtgaaattgatgatatatggcattggaaagatagactacatatagacttttatgtctatgctgactttcttgatttcattgaagctgatgccaccatccacttcaaaaaagatgctgattttataactgatttattacttatgtacccagaagaagtaaggtttacatttccttttcttattaccagcgcaagcaacgaagtttatatcccagcatctgaaagcggtgcttatgagctattttatgcacataaaccactgacagttgaagacagagacaataaaaatgtttttgaacaaattggcaaaaactcttttattgtaagaaaatcaattgcatgtggattgttgcgtgtacgcggtagtacaaaacgacattatcattcacaagaatgtggagagccatatgtgcgacttgaagcaacatttgattgtgatctatataaattcaaaatgcaaagttcccagattcacctgagtagcctgtcagataaaaacatttatataacaaaggctgatttagaataccttcacgacgcaaaggttaatggaagttttgacgcagctaagagcaaaaaacgatacgaaatggcggtagaacaggaactaatacctgaaataaaaaatagcaaccataatgccgagagacatgctgaaaacagggaaaaacttttcaaatcagcaatatatcttttgtcaaagtatcctgatgaatgccgtggcaaaaagaaagaaataagccctgagaagtggcgggattgcatagtggctcataaagacgaaattccaccgttagcaatcacaaatgaagatgtgattttgagacacttacgtgctgccgccaacggtaaggggtag

SEQ ID NO: 8628 - DNA, 1260 bp, Escherichia coli
atgccaaaactcacagatatgcagatccgcgcatggataaaggcgggagacagatttgatggcaaggcagacggcaacggcctttatatttgctaccccaaaaactacacagtcccgttctggcgattccgctataagctcgcaggaaagcagcgggctatggttataggctcttactccgaactgtcactatcaaaagccagagaaacagcaaaagagctgtcagccagagttgctcttggctatgacgtagcagcagagaaacaggaacgaaaagctgaagcactggcaaaaatggaggctgagaaaaacgccatgcgtgtttcagatctggcctccgaatacttcgagcgccagatacttccgagatggaaacatcccgatatccttcgccggagaattgataaggatattaacccctgcattgggcatatgaaggtggaggacgttaagccacgccacattgacgacatgttgaaaggtatcgttgaccgaggagcaccaacgatagcaacagatgtattacgctggacacgccgtatctttgactatgggataaaacgccatgctctggagataaacccttgttcagcgtttgaagtatctgatgctggtggtaaagaggtttcccgcgaccgttggctaactcgcgatgagcttatcaggctattcgaggctatgcgcaccgcaaaaggattcagccgccaaaacgaactgacatttaagctattgctggcactatgcgttcgtaagatggagttatgcgccgcacgatgggaagagtttgatttagatagtgctgtatggcatttgccggaagaacgcagcaaaaacggggaccctattgatatacctctaccttctccagccgttgaatggttgagagagctacacaccttttcatgtaatagcgcatgggtgcttccagccaggaagatgcaaaacagaatgatcccacatattcaggaaagcactttacccgtagcactggctaaggttcgcgccgaaatgccggatgtgcctaatttcacgattcacgacttccgacgcaccgcacgtactcatttagcagcgttgggtgttgatcctgttgtggcggaacgatgcctcaatcatcgcattaagggcgtagaggggatttataaccgccatcagtattttaatgagcgtaaagcagcactggcacagtgggctgatctgctggtggcactggaaagcggaaaagactacaacgtaacgcctctcagaagggcgaactaa

SEQ ID NO: 8629 - DNA, 222 bp, Escherichia coli
atgaaaggcagaacgccacacattgaacatcaagccaaccacttctcggatgttcgcaatgagatgattgccattcgcggtgatatgcacggcttggagcgtcgaattattgataagattgatgaaaatagagataaggccagtgaaaatcaaaagtggatcatcgtcctgttgattttatcaattcttatcccgctacttatcgcattggtcacaaaatga

SEQ ID NO: 8630 - DNA, 456 bp, Escherichia coli
atggtctttgcaatgagcaaatctaatctggtcgcgttccgcatcccatctgaattgcaggatgagtttaatcggtctgttctcgcttctggaggggataaaacctcctggcttgttgatgcgattcgcatgaagctgggacagccggaaaagtctattgattcacgaatgcttgggctggtggagcgcatggaaaaagccgctgcgtcgcttattgccggaaagccgaacatcccaccaaagccatataacgaaacggcagttataaagatcattgccgataccatccgacagggatttgataatgggcgcgtgatagctgaacggatcaatgaagcaggctatcaaacaaaagctggtaaagcgtgggataaagatatttacagcgcgtggaagcgtcagggaagcaatgctgaaaagttaaaagcggtgattgattgtaaggtcagcgtataa

SEQ ID NO: 8631 - DNA, 288 bp, Escherichia coli
atgataagggacaggaaagctgaagaactggagtcaaaagggctataccggagagctgccgcacgatgggcagaagtcatgatgctggcagatggcgataaagaacgtgaacatgcagcaaacagacgctctgaatgtatccgtaaggcggcacgcccaccagcaactacagacagattcggagatttaagacaggcagttaagcgaactcattcggctcttggtatggatgaggaagcgagagggtacttcaggcgttatcgcgataaagattgccagagacagtaa

SEQ ID NO: 8632 - DNA, 1158 bp, Escherichia coli; identical to SEQ ID NO: 4573

SEQ ID NO: 8633 - DNA, 2214 bp, Escherichia coli
atggctggagaccgccatggtgtaaataacctccatgttgcatgggttcgctcaggagatgacgggaagacctggacaacgccggaatggcttacagatttacatgaaaactatcccacagttaactatcactgcatgagtatgggggttgtcagaaatcgcctttttgctgtaattgagacgcggaccgtgagcggaaataaactgcaggttgcagagttgtgggatcgcccaatgagtcgcagccttcgcgtttatggtggtataacgaaagcagcaaatcagcaagtcgcttatattcgcattactgatcacggattatttgctggtgattttgtcaacttctcaaactctggtgttacaggtgttaccgggaatatgacggtgactactgttattgataaaaatacttttacagttacgacgcaaaatacccaggatgtggatcagaataacgagggtagatactggagttttggtacatcatttcactcgtcaccatggagaaaaaccagtcttggaactattccttcttttgttgacggaagcactcctgttactgagattcacagttttgcgacgattagcgataacagttttgctgttggctaccataatggtgatattggtccacgcgagcttgggatactctatttctctgatgctttcggttctcctggtagctttgttcgcagacgcatacctgcagaatatgaggcgaatgcatctgagccatgtgtaaaatattatgatggcattctgtatctgacgaccagggggacattaagtactcaacccggtagttcattgcacagaagctctgatttaggtacatcatggaattctcttcgcttcccaaataatgttcatcactcaaaccttccttttgccaaagttggcgatgagctgattatttttggcagtgagcgcgcatttggtgagtgggaaggaggagaacctgataaccgttatgcaggaaactatccaagaacatttatgaccagagttaacgtcaatgagtggagtctggataatgtagagtgggttaatgttactgatcagatttatcagggcggaatagttaactctgcggttggtgttggttcagtttgtatcaaagacaactggctgtactacattttcggtggggaagactttctaaacccatggagcataggggataacaacagaaaatatccttatgttcacgatggtcacccggctgatttgtattgtttcagggtgaaaattaaacaggaagaatttgtttcaagggattttgtctacggagccactcctaacagaacgcttcctacttttatgtcgacgtcaggcgtgaggacggttcctgtacccgttgatttcacagatgatgttgccgtccagtcactgactgtccatgcaggtacatcaggacaagttcgcgcggaagtcaaacttgagggtaattacgccattattgcgaagaaagtaccgtctgatgatgttaccgctcagagattaatcgttagcggcggtgaaacaacgtcttcagcagatggtgcaatgataacgttgcatggttccagaagcagtactccacgtcgcgcggtatataacgcactcgaacatctttttgagaacggagatgttaaaccttatcttgataatgtaaatgctcttggtggtccgggaaacaggttctcgatagtttatcttggctccaatcctgtggttaccagtgacggaacattaaagacagagccggtctctcctgacgaaacattgctggatgcctggggtgacgtcaggtatatcgcttataaatggctgaacgctgtcgctataaagggggaagaaggggcgaggatacatcatggtgtaatcgcgcagcaacttcgtgatgttcttatttctcacggactcatggaagaagaaagcacaacatgccgctatgcctttctttgctatgacgattatcccgcagtatatgatgacgtcattactggccaaagggaaatgccgctgactgataatgacgggagcatcattgttgatgaggatgataatccagtgatggtaatggaagacatcattgagcgcgttgaaataacgccagcaggatctagatggggggtcagacctgatctcttattctatatcgaggcagcatggcagcgcagagaaatagaaagaataaaagctaggttagacttaatagaagggaagcactaa

SEQ ID NO: 8634 - DNA, 639 bp, Escherichia coli
atgacagacattacagccaatgtgattgtatcgatgccttcgcaactcttcactatggcgcgttcttttaaagccgtagccaatggcaaaatttatatcggtaaaattgacactgacccggtaaatcctgaaaaccggattcaggtttatgtagagaacgaagacggctctcacgttcctgtttcgcaaccaatcatcattaacgctgctggttaccctgtatataacggacggattgccaagttcgtaactgtgcaaggccattctatggctgtgtacgatgcgtatggcgtacagcagttctatttccagaatgtgctgaagtatgatcctgatcaactacggcagcaattagaagacccagatggagcgaataaatacccaaaacttcagatagcaagatggagagacagttatgatgtaagaggttggggggctattggtgatggtgttcatgatgatacatcagctctatcagaattactttctgttgcaacaggtggtgaaaagatagatgggcgagggcttacttttaaagtatcaactcttccagatgtcagtcgatttaaaaatgctcgttttttatttgagagaataccgggtcagcctcttttttatgtttctgaagattttatctag

SEQ ID NO: 8635 - DNA, 366 bp, Escherichia coli
atggtggatggaaaacccgtttttcccggtatgaaactgtcgaaggaaaaatgcgaccaggtcaacgccattgagcgtgataaggcgctggcatgggtggagaaaaacatcaaagtgccattgagcgaaccccagaaagcggggatcgcgtcattctgtccgtacaacattggtcccggtaagtgtttcccgtcgacgttttataaacgaattaatgcaggtgatcgcaggggagcgtgtgaggcgattcgctggtggattaaggacggtggcagagactgccgtattcgttcaaacaactgctacggtcaggtatcccgtcgtgaccaggagagcgcgctggcgtgctggggtatcgacagataa

SEQ ID NO: 8636 - DNA, 534 bp, Escherichia coli
atgctgagacacaacgttcctgtgcggcgggatctggaccggattgccgccgataacggatttgactttcatatcatcgacaatgaaatctattgggatgagagtcgggcttatcgctttactttgcgccagattgaagagcagatcgaaaaaccgaccgcggaactgcatcagatgtgcctggaggtggtggatcgcgcggttaaagatgaagagatcctgacgcaactggcgatcccgccgttgtactgggatgtgatcgccgaaagctggcgcgcacgcgatccttcgttgtatggccgtatggattttgcctggtgtggtaatgcaccggttaagttgctggagtacaacgccgatacgccaacttcattgtacgagtcggcttatttccagtggttgtggctggaagatgcccggcgcagcggcgttattccgcgtgatgccgatcagtacaatgccattcaggaacgcctgatttcacgttttagcgagctttacagtcgggaaccgttttatttttgctgctgttag

SEQ ID NO: 8637 - DNA, 447 bp, Escherichia coli
atgggtaaattcaaatttcccaccgcttataccatcttgttcgtgctgattgcgttagttgcggcaatgacctggattgtacctgcgggaaaatatcagatggtgacaaatgccgcactgggaaaggaagttcctgttgcaggcacttacgcacctgttgaggcgcaaccacagggtattacggctgtcctgttagcgcccatcgacggcttgtacaaccatcaaacctacactgcgggagcgattgatgtcgcgctgtttgtcctgatcatcggtggatttttgggagtagtaaataaaaccggagcaatagatgccggtatcgaacgagtgacaactcgccttaatggtcgggaagagtggatgattccgatcctgatggcgctcttcgctgctggcggtactatttatgggatggcggaagaatcactccccttctacacgtag

SEQ ID NO: 8638 - DNA, 1764 bp, Escherichia coli
atgcatgatataaataattctttctttgcggctacaaaatgtgctggtatttggcgtaaaaatacaaaaaaatcacatgcattaatacttaatctcatcatgttttgtgagatgtttttatcatcattatcatccttggttgtggtcaatgatcctaaaaaaatgaagaggatttttccattatttatcgtttctgaaaatattaatattcatgctgaacctgatatcgaatgttttcgagttatcgatagggcatttgatgaggtagccaattacaccggaagaatattttcttatttacggactcatgggccattgaaactaacttcttgtgtgaataaacaaaccttgctttcaatgggagggtaccttaatgagtggaatgtttttgactcattaagcagagtaagagactttttcagactaagtagtgcagtatttacaaaattggataataacatttactctcttgaggttgatagtttttgtttataccgagattatgagattgcaagaaatagactaatgatgagagcgtcacatctatatagcgaagttcatgaatttagtaacaaacattttcatctaaatagttgggtaaaggatcatatgccatcttacttaaattctgatggcgtttttagctcatttcatctaagcgagttggaaaatatgtctcctgatgaccttcatgaagaatatgggaatatatcattatttaattgggtgcacgcttatcaatgtttagtcgagttatctaaagaagaaatgagcaaaagattttcatcgacaaaacctatacccctacagttggatcgctggctgatcataaaaagccgtgagagttggttatcattctttcaacgtaaggggattgcagcagatgcagcaaaaaaactgatagattattttaccttcaattcaaaatcacatgatcttaatgattgcccatttattccctgtatggacggtttatgcttaatgcctgcattaatagcaaatagctcagtgactcgctctctaatgtcattatttggttccaaaaaaatttctcaagcaagtaaagggcgatttcatgagcaacaatttataaaacgagttcgtgatgcggggattaaagcttctccaattgatgctcatgctaattatcagtgtgattgcgtgattctcctggatgattgtttgatttttacagaactaaaatcaaatggtcaaccaatatattatggtaagtactatcagcaagtgtgtaacatcgttggagatagctcattaatacatgatcataataataaatttatgcgttcttattttcaacaaataaatcgaatttctgaacattatcttaatcatcttgatgtgatcattaaagaattcgaactaccatcaacatggcaacccaaaggtgtgtataagcttattgttactacaactatgctcggtgggaaatatcatgtggatgatacatatgtagcggataaatatgcattatctagtttttttcaacgaatacctggagtgatatatcaaacaaatgaaaatggaaaaatggcgaaaaatatcattgatgggtttgagtgttgcgaaggggaaatcactatcgataagtttatagattatctttcctctttgcccagtattaatgctgtacgtaaaaatataaaaaaattaacttatagtgttcgatttaatgaaaaattagtccatcacccttattatgattcttgggcttttggtccatatattcgtaagggaaatgattag

SEQ ID NO: 8639 - DNA, 1293 bp, Escherichia coli
atgattaaatcaaaaatcgtgctgttatcagcactggtttcctgcaccctgatttcaggctgtaaagaagaaaataaaaataatgtatccatcgaatttatgcattcttcggtggagcaggagcgccaggccgtcatcagcaaattgattgcccgttttgaaaaagaaaacccaggtatcaccgtaaaacaagtgcccgtggaagaagacgcctataacaccaaagtcattaccctttcacgtagcggttcgctgccggaagtgatcgaaaccagccatgactacgccaaagtgatggacaaagagcagcttatcgatcgccaggcggttgccacggtcatcagcaacgtcggtgaaggcgcgttctacgatggcgtactgcggattgtgcgcaccgaagatggcagcgcctggaccggtgttcctgtcagcgcatggattggcgggatctggtatcgcaaagatgtgctggcaaaagctgggctggaggagccaaaaaactggcagcaattgctggacgttgcacagaaactgaatgacccggcgaataaaaaatacggtattgcgctgcctacagcagaaagcgtgttgacggaacagtctttctcccagtttgcgttatccaatcaggctaacgtctttaacgccgaaggcaaaatcacccttgatacaccagagatgatgcaggcgctgacctattaccgcaaccttgctgccaacaccatgccaggttctaacgacatcatggaagtgaaagacgcttttatgaacggcaccgcgccgatggcgatttactccacctatatccttccggctgtgattaaagaaggcgatccgaaaaacgtcggtttcgtggtgccaaccgagaaaaattctgcggtctacggcatgttgacctcgctgaccattaccgccgggcaaaaggccgaagagacggaagcagcagaaaaatttgtcacctttatggagcaggcggacaacattgccgactgggtgatgatgtcgccaggcgcggcgctgccggtgaacaaagcggtggtgactaccgccacctggaaagacaacgacgttattaaggcgctgggagaattgccgaatcagctaatcagcgaactgccaaatattcaggtctttggcgcagtaggggataaaaactttacccgcatgggcgatgtgacggggtctggcgtggtgagttcaatggtgcataacgtcaccgtggggaaagccgatctccctggcacgctgcaagcgagccagaaaaagctggatgaactgatcgaacagcactaa

SEQ ID NO: 8640 - DNA, 129 bp, Escherichia coli
atgaacggttatctcaattgcgaagatttaatcgatccggtggtgacctttgccaacagcccggaaagctacatgcagtatgtcgaccagcatccggaacagagcatcaaaatgggcgtcacgttttaa

SEQ ID NO: 8641 - DNA, 1056 bp, Escherichia coli
gtgaaaagtgcaatgacaagctctccactgcgggtcgcgataatcggcgcaggccaggtggcggataaggttcatgcttcgtactactgcacccgcaatgatctggaactggtggctgtctgtgacagccgcctttcccaggcgcaggcgctggcagaaaaatacgggaatgcatccgtgtgggacgatccgcaggccatgttgctggcggtgaaacctgatgtggttagcgtctgctcacctaaccgttttcattacgaacataccctgatggcgctggaagctggctgccatgtgatgtgcgaaaacccgcccgccatgacggcagaacaggcgcgggaaatgtgcgataccgcgcgcaaacagggcaaggtgctggcctacgactttcaccatcgttttgcactcgatacgcaacagctgcgtgaacaggtgaccaacggcgttttgggagagatttacgttaccaccgcccgcgccctgcgtcgttgcggtgttcccggctggggtgtctttactaataaagaattgcagggcggaggcccgctgatcgacatcggcattcatatgctggatgcggcgatgtatgtgctgggttttccagcggtgaaaagcgtgactgcgcatagctttcaaaagatcggcacgcaaaagagctgcggtcaatttggcgagtgggacccggcaacctacagcgtcgaagattcgctgtttggcaccattgaatttcataacggcggcattctgtggcttgagacctcatttgcactcaacatccgcgaacagtcgattatgaacgtcagcttttgtggtgataaagccggggcgacgctgtttccggcacatatctacaccgataacaacggtgagttaatgacgctgatgcaacgggaaatggcagacgacaaccgtcatctgcgcagtatggaagcctttatcaaccacgtacaaggtaagcccgtgatgatagccgacgccgagcaggggtacatcatccagcaactggtggcggcgttgtatcaatccgcagaaacagggacgcgtgtggaattatga

SEQ ID NO: 8642 - DNA, 2157 bp, Escherichia coli
atgtcacctcgtcagataaggggttattattgcgaaatcatcgcttcacggaaagacgtcagaatgaaagctacagaagcccgcctactcgattttttaaaacgttcgcagcagttcgttattaccatttatcaacggacttattcatggacagaacaacaatgtcggcaactttgggacgacatcattcgtgccggaaagcgtgacgatatatcagcgcattttatcggttcggttgtttatattgagcaggggttgtatcaggtttctggtatttctccgttactggtcattgatggtcaacaaaggctgacgaccgcaatgttgctgattgaggctttatcgcgtcatcttggcgaagacgaagtttttgatggcttttcagcaatgaaattgcgtaattattatttactcaatccttatgagtccggcgagaaaggatttaaattactgctgaccgagactgataaagacagtttgctggcgttaataaaacaaagaccaatgccagaaaactattcccatcgaataatggaaaactttactttctttgatgaacaaattaccaaactcggtgatgacttgatccccttatgtcgtgggttagcaaagttattaattgtcgatgtggcgcttaatcgtggtcaggataatccgcaactgatttttgaaagtatgaactccaccggtaaggcattaagtcaggccgatctggtgcgcaattttattctgatgggcctcgaaccagagcatcaaacccggttgtatgaagatcactggcgtccaatggaagtcgcgtttggtcagcaaggttacagcgaatattttgacagttttatgcgtcattatctgacggtaaaaacgggggagatccctcggacagatgaagtctatgaggcatttaaactccatgcccgcagccagagtgttgctgaaaaaggcgtagatcggctggttgaagatattcacatctacgcggagtattactgtgcaatggcattgggaaaagaaagtgacaaatcgcttgctacggcttttcaggatttgcgcgagttaaaggtcgatgtggcgtatcctttcttactggcgctttatcatgactataaaaatggcgttttgtctcacgaagatttcctgagcataattcgtttaattgaatcttatgttttccgccgtgcagtatgtgcgattccgacaaattctcttaacaagacgtttgctactttttataaggtcattaataaagaaaaatatctggaaagtattcaggtacattttctgaatctgccttcatatcgtcgtttccccaacgatgatgaatttaaacgggaattaaaagttcgtgatctctataatttccgtagtcgcagctactggttacgacgactggaaaacgataaacgcagagagcgcgtggaagagtttacgattgagcatattatgccgcagaacgaaaatttgtcggctaaatggcgtgaagagctgggaagtgactggcaacgcattcataaagaactgttgcatacgttggggaatctcacattaacgcgctataactcccgctacagtgacagacctttcgcggaaaaacgcgatattgaagacggctttaaacatagcccgctctatttgaatatcggtcttggacagtgcgaaaaatgggatgaagcagccattcgcgcccgtgcagatcgtctggccgatctcgcggttcaggtctggcaagcgcctgctcttcctgaagaggttttagctgtttatcgggcgcagccggagaacaaaaccagttacagcctgagtgattatccttttcttgctgatggttcgcatagccgggtgttatttgatcatcttcgcgatgaagttatgcgcctggacgcagggatcacgcaggaagttttaaagctctatattgcgtttaaagctgaaacgaattttgttgatgttgtaccgcaaaaaagccgactgcggttgtcgcttaatatgcagtttcatgaactggtcgatccgaaaggtattgccaaagatgtgacaaatgttgggcgatggggcaatggtgatgtggaaattggtttcagtgacctcgcacaacttccttacattatgggattaattcgtcaggcatttgaaaaacagatggagagcgcgttggtataa

SEQ ID NO: 8643 - DNA, 1368 bp, Escherichia coli
atgagtgctgggaaattgccggaggggtgggaacagattgaaataggcgacattgctgatgtcatctctggtgggacaccaaaatcgggagtcgctgaaaattttgcaccttcgggtgagggagtcgcctggcttacgcctgccgatttgagcggttataaagagaaatatatctcacatggtgccagagatttaactacactaggctattcctcttgttcagcaaaactaatgcccaaaggcactatactttttagtagccgggcaccgattggatatgttgctattgctgcaaatgagattgcgactaaccagggtttcaaaagttttgcttttccttcagacatttttcctgattatgcatattactttctccgcaacatcagacatattgcagaggaaatgggcacaggaacaacttttaaagaaatttctggtagttctgcgaaaacattaccatttgttcttgtaccgtttgccgaacaaaaaatcatcgctgaaaaactcgatacgctgctggcacaggtagacagcaccaaagcacgtcttgagcaaatcccacaaatcctgaaacgttttcgtcaggcggttctgggtgcagcggtgagaggaaaactaactgaagactggagagataattcaagcctgtctgggtggagagaaggcaaacttggggagtttataaaaaaaccaagttacggaacgtcatctaagtctaataaagaaggactcattcctgtattaagaatgggcaatcttcagggaggaaagttggactggacggatctagtctatacgtcagataccatagaaattgaaaagtataaacttgagtacaatgatgtattattcaatcgtacaaatagtcctgaacttgtcgggaaaacagccatatataaatcagagcaaccagctatttatgcaggttatttgattagggttcaatgtttacctgatttaaaccctgactatcttaactaccatttaaatagcattttggggagacaatattgctattcagttaaatctgatggggtcagtcaatcaaatattaatgcacagaaattaattgcatacccaataactgttcccccccttcccgaacaagctgaaatcgttcgccgcgtcgagcaactcttcgcctacgccgacacaatagaaaaacaggtcaacaacgccttagcccgcgtcaacaatctgacgcaatccatcctggcaaaagcgttccgtggtgaactcaccgcccagtggcgggccgaaaacccggaattaatcagcggtgaaaacagcgccgccgcgttgctggagaaaatcaaagctgaacgcgcagccagcgggggtaaaaaagcctcgcgtaaaaagtcctga

SEQ ID NO: 8644 - DNA, 1590 bp, Escherichia coli
atgaacaataacgatctggtcgcgaagctgtggaagctgtgcgacaacctgcgcgatggcggcgtttcctatcaaaactacgtcaatgaactcgcctcgctgctgtttttgaaaatgtgtaaagagaccgggcaggaagcggaatacctgccggaaggttaccgctgggatgacctgaaatcccgcatcggccaggagcagttgcagttctaccgaaaaatgctcgtgcatttaggcgaagatgacaaaaagctggtacaggcagtttttcataatgttagtaccaccatcaccgagccgaaacaaataaccgcactggtcagcaatatggattcactggactggtacaacggtgcgcacggtaagtcgcgcgatgacttcggcgatatgtacgaagggctgctgcagaagaacgccaatgaaaccaagtctggcgcgggccagtacttcaccccgcgtccgctgattaaaaccattattcatctgctgaaaccgcagccacgtgaagtggtacaggatccggcagccggtacggcgggctttttgattgaagccgaccgctacgttaagtcgcagactaacgatctggacgaccttgatggcgacacgcaggatttccagatccaccgcgcgtttatcggcctcgaactggtgcccggcacccgtcgtctggcgctgatgaactgcctgctgcacgatattgaaggcaacctcgaccacggcggcgcaatccgtctgggcaacaccctgggcagcgacggcgaaaacctgccgaaggcgcatattgtcgccactaacccgccgtttggcagcgccgcaggcaccaacattacccgcacctttgttcacccgaccagcaacaaacagttgtgctttatgcagcatattatcgaaacgctgcaccccggcggtcgtgcggcggtggtggtgccggataacgtgctgtttgaaggcggcaaaggtacggacatccgtcgtgacctgatggataagtgtcatctgcacactattctgcgtctgccgaccggtattttttacgcgcagggcgtgaagaccaacgtgctgttctttatcaaagggacggtggcgaacccgaatcaggataagaactgcaccgatgacgtgtgggtgtacgacctgcggaccaatatgccgagctttggtaaacgcacgccgtttaccgacgagcatttgcaaccgtttgagcgcgtgtttggcgaagacccgcacggcttaagcccgcgcactgaaggtgaatggagttttaacgccgaagagacggaaattgccgacagcgaagagaacaaaaacaccgaccagcatcttgctaccagccgctggcgcaagttcagccgcgagtggatccgcaccgcgaaatccgattcgctggatatctcctggctgaaagataaagacagtattgatgccgacaacctgccggagccggatgtattagcggcagaagcgatgggtgaactggtacaggcgctgtctgaactggatgcgctgatgcgtgaactgggggcgagcgatgaggcggatgcgcagcgccagttgctggaagaagcatttggtggggtgaaggaatga

SEQ ID NO: 8645 - DNA, 3513 bp, Escherichia coli
atgatgaataaatccaacttcgaattcctgaagggcgtcaacgacttcacttatgccatcgcctgtgcggcggaaaataactacccggatgatcccaacacgacgctgattaaaatgcgtatgtttggcgaagctacagcgaaacatcttggtctgttactcaacatccccccttgtgagaatcaacacgatctcctgcgcgaactcggcaaaatcgccttcgttgatgacaacattctctctgtattccacaaattacgccgcattggtaaccaggcggtgcacgaataccataacgatctcgacgatgcccagatgtgcctgcgactcgggttccgcctggctgtctggtactaccgtctggtcaccaaagattatgacttcccggtgccggtatttgtgttgccggaacgtggcgaaaacctctatcaccaggaagtgctgacgctaaaacaacagcttgaacagcaggcgcgagaaaaagcgcagactcaggcagaagtcgaagcgcaacagcagaagctggttgccctgaacggctatatcgccattctggaaggcaaacagcaggaaacagaagcgcaaacccaggctcgccttgcggcgctggaagcacagctcgccgagaagaacgcggagctggccaaacagaccgaacaggaacgtaaggcttaccacaaagaaattaccgatcaggccatcaagcgcacactcaaccttagcgaagaagagagtcgcttcctgattgacgcgcaactgcgtaaagcaggctggcaggccgatagcaaaaccctgcgcttctccaaaggcgcacgcccggaacccggcgtcaataaagccattgccgaatggccgaccgggaaagatgaaacgggtaatcagggctttgcggattatgtgctgtttgtcggcctcaagcccatcgcggtggtagaggcgaaacgtaaaaatatcgacgttcccggcaagctcaatgagtcgtatcgctacagcaaatgcttcgataatggcttcctgcgggaaaccttgcttgagcattactcaccggatgaagtgcatgaagctgtgccggagtatgaaactagctggcaggacaccagcggccaacaacggtttaaaatccccttctgctactccaccaacgggcgcgaatatcgcgcagcaatgaagactaaaagtggcatctggtatcgcgacgtgcgtgatacccgcaatatgtcgaaagccttacccgagtggcatcgcccggaagagctgctggaaatgctcggcagcgaaccgcaaaaacagaatcagtggtttgccgataacccgggcatgagcgagctgggcctgcgttattaccaggaagatgccgtccgcgcggtggaaaaggcaatcgtcaagggtcaacaagagatcctgctggcgatggcgaccggtaccggtaaaacccgcaccgcaattgccatgatgttccgcctgatccagtcccagcgttttaaacgcattctcttccttgtcgatcgccgttctcttggcgagcaggcactgggggcgtttgaagatacgcgtattaacggcgacaccttcaacagcattttcgacattaaagggctgacggataaattccccgaagacagcaccaaaattcacgttgccaccgtacagtcgctggtgaaacgcaccctacaatcagatgaaccgatgccggtggcccgttacgactgtatcgtcgtcgatgaagcgcatcgcggctatattctcgataaagagcagaccgaaggcgagctgcagttccgcagccagctggattacgtttctgcctaccgtcgcattctcgatcacttcgatgcggtaaaaatcgccctcaccgccaccccggcgctgcatacggtgcagattttcggcgagccggtttaccgttatacctaccgtaccgcggttatcgacggttttctgatcgaccaggatccgccgattcagatcatcacccgcaacgcccaggagggggtttatctctccaagggcgaacaggtagagcgcatcagcccgcagggagaagtgatcaacgataccctggaagacgatcaggattttgaggtcgccgactttaaccgtggcctggtgatcccggcgtttaaccgcgccgtctgtaacgagctcaccaactaccttgacccgaccgggtcgcaaaaaacgctggtcttctgcgttaccaatgcccatgccgatatggtggtggaagagttgcgtaccgcgttcaagaaaaagtatccgcaactggagcacgacgcgatcatcaagatcaccggtgatgccgataaagacgcgcgcaaagtgcagaccatgatcacccgcttcaataaagagcggctgcccaatatcgtggtaaccgtcgacctgctgacaaccggcgtcgatattccgtcgatctgtaatatcgtgttcctgcgtaaagtacgcagccgtattctgtacgagcagatgaaaggccgcgccacgcgcttatgcccggacgtgaataaaaccagctttaagattttcgactgtgtcgatatctacagcacgctggagagcgtcgacaccatgcgtccggtggtggtgcgtccgaaggtggaactgcaaacgctggtcaatgaaattaccgattcagaaacctataaaatcaccgaagcggatggccgtagctttgccgagcacagccatgaacaattggtggcgaagctccagcgcatcatcggcctggccacgtttaaccgtgaccgcagcgaaacgatagataaacaggtgcgtcgtctggatgagctatgccaggacgcggcgggcgtgaactttaacggcttcgcctcgcgcctgcgggaaaaagggccgcactggagcgccgaagtctttaacaaactgcctagctttatcgcccgtctggaaaagctgaaaacggacatcaacaacctgaatgatgcgccgatcttcctcgatatcgacgatgaagtggtgagtgtaaaatcgctgtacggtgattacgacacgccgcaggatttcctcgaagcctttgactcgctggtgcaacgttccccgaacgcgcagccggcattgcaggcggtgatcaatcgcccgcgcgatctcacccgtaaagggctggtcgagctccaggagtggtttgaccgccagcattttgaggaatcttccctgcgcaaagcatggaaagagacgcgcaatgaagatatcgccgcccggctgattggtcatattcgccgcgctgcggtgggcgatgcgctgaaaccgtttgaggaacgtgtcgatcacgcgctgacgcgcattaagggtgaaaacgactggagcagcgagcaattaagctggctcgatcgtttagcgcaggcgctgaaagagaaagtggtgctcgacgacgatgtcttcaaaaccggcaacttccaccgccgcggcggtaaggcgatgctacaaagaacctttgacgataatctcgacaacctgcttgataaattcagcgattatatctgggacgagctggcctga

SEQ ID NO: 8646 - DNA, 915 bp, Escherichia coli
atgacggttcctacctatgacaaatttattgaacctgttctgcgttatctggcaacaaaaccggaaggtgcagccgcgcgtgatgttcatgaggctgccgcggatgcattaggactggatgacagccagcgatcgaaagtcattaccagcggacaacttgtttataaaaatcgtgcaggctgggcacatgaccgtttaaaacgtgccgggttgtcgcaaagtttgtcgcgtggcaaatggtgcctgactcctgcgggttttgactgggttgcgtctcatccccagccaatgacggagcaggagatgaaccatctggccttcaattttgtgaatgtcaaacttaagtcacggccggatgccgtcgatttagatccgaaagccgactctcccgatcatgaagaacttgcaaagagcagcccggacgatcggttagatcaggcgctaaaagagcttcgtgatgcggtggctgatgaggttctggaaaacttattgcaggtttctccttcgcgctttgaagtcattgttctggatgttttgcatcgcctggggtatggcggccaccgtgatgatttgcagcgtgttggcggtactggagatggtggcatcgatggtgtgatatcgcttgataaacttggcctggagaaagtttatgttcaggcaaaacgttggcagaatactgtaggcaggccagaattacaggcattttacggcgcactggctgggcaaaaagcgaaacgtggggtgtttattaccacttctggatttacttctcaggcgcgtgactttgcccaatccgtcgagggtatggtgttggttgatggggaacgcctggtgcacttaatgatcgaaaacgaagtaggggtttcttcacgtttgttgaaggtgccgaaactggatatggattattttgagtga

SEQ ID NO: 8647 - DNA, 2223 bp, Escherichia coli
atggacggctcagcgaatatgtccggtacatttactcaggaaaacggtcgtctgaccattcagggccacccggttatccatgcttcaacgtctcagagtattgcaaatacagtctcgtctctgggcgacaattccgttctgacacagcccacctcatttacacaggatgactgggagaacaggacgttcagctttggttcgctcgtgttaaaagatacagactttggtctgggccgcaatgccacactgaacacaaccatccaggcagataactccagcgtcacgctgggcgacagtcgggtatttatcgacaaaaaagatggccagggaacagcatttacccttgaagaaggcacatctgttgcaactaaagatgcagataaaagcgtcttcaacggcaccgtcaacctggataatcagtcagtgctgaatatcaatgagatattcaatggcggaatacaggcgaacaacagtaccgtgaatatctcctcagacagtgccgttctggagaactcaacgctgaccagtaccgccctgaatctgaacaagggagcaaatgttctggccagtcagagttttgtttctgacggtccggtgaatatttctgatgccaccctgagtctgaacagccgtcctgatgaggtatctcacacacttttacctgtatacgattatgccggttcatggaacctgaagggagacgatgcccgcctgaacgtggggccgtacagtatgttgtcaggtaatatcaatgttcaggataaagggactgtcaccctcggaggggaaggggaactgagtcctgacctgactcttcagaatcagatgttgtacagcctgtttaacgggtaccgcaatacctggagcgggagcctgaatgcaccggatgccaccgtcagcatgacagacacccagtggtcgatgaacggaaactccacggcaggaaatatgaaacttaaccggacaatagtcggttttaacgggggaacatcatcgttcacgacactgacaacagataatctggacgcggttcagtcagcatttgtcatgcgtacagaccttaacaaggcagacaaactggtgataaacaagtcggcaacaggtcatgacaacagcatctgggttaacttcctgaaaaaaccctctgacaaggacacgcttgatattccactggtcagcgcacctgaagcgacagctgataatctgttcagggcatcaacacgggttgtgggattcagtgatgtcacccccacccttagtgtcagaaaagaggacgggaaaaaagagtgggtcctcgatggttaccaggttgcacgtaacgacggccagggtaaggctgccgccacattcatgcacatcagctataacaacttcatcactgaagttaacaacctgaacaaacgcatgggcgatttgagggatattaacggcgaagccggtacgtgggtgcgtctgctgaacggttccggctctgctgatggcggtttcactgaccactataccctgctgcagatgggggctgaccgtaagcacgaactgggaagtatggacctgtttaccggcgtgatggccacctacactgacacagatgcgtcagcaggcctgtacagcggtaaaacaaaatcatggggtggtggtttctatgccagtggtctgttccggtccggcgcttactttgatttgattgccaaatatattcacaatgaaaacaaatatgacctgaactttgccggagctggtaaacagaacttccgcagccattcactgtatgcaggtgcagaagtcggataccgttatcatctgacagatacgacgtttgttgaacctcaggcggaactggtctggggaagactgcagggccaaacatttaactggaacgacagtggaatggatgtctcaatgcgtcgtaacagcgttaatcctctggtaggcagaaccggcgttgtttccggtaaaaccttcagtggtaaggactggagtctgacagcccgtgccggcctgcattatgagttcgatctgacggacagtgctgacgttcacctgaaggatgcagcgggagaacatcagattaatggcagaaaagacggtcgtatgctttacggtgtggggttaaatgcccggtttggcgacaatacgcgtctggggctggaagttgaacgctctgcattcggtaaatacaacacagatgatgcgataaacgctaatattcgttattcattctga

SEQ ID NO: 8648 - DNA, 525 bp, Escherichia coli
atgagttttcttttgccgtgtggtggaattatgaataatatagatttattaaaaactataacaaactacaaaaaaatcaaaaatccggcatacccggctcaggagagtctgttaatacacttatatattagagtaaatgacaaaatccagagtattatagaaaatgaattgagcgagtatagaataaacacttcaacatttatggtgttagtttcattatatatgtctgatgattattgtcagtccccttctgatatttacaaggagttacaattctccaaaacaaacatcacacacatcatagacaaattagaaaaaaagaatattgccaaaagaattaataataaaaacgatcgtcgaagcaaaagtatttgcttaacccctgacggagttacacttgctcaaaaactaataaacactcaaaatgtaatgctaaagaaaatctggagcgggctatcagatgatgaaatgaaaacatttgaactcgccaacaaaaaattattatcaaaccttaatgttaattga

SEQ ID NO: 8649 - DNA, 1452 bp, Escherichia coli
atggctacgtggcaacagggtattaattctggtgggtttctggctggcatcggtacgcaaaatgagaatgcgccaaaggcaagcgacattaacgcaacgcttggtctgatccgcgaaaacaatgaactggctcgatcaggtgcaaataacgttgctctgacaggtcttcgtggtctggctggagttgctgatatttataagcagcagcaaaagcaggagcgtaaagcggcattccagaaaggttatgcggatgcttatgcgtccggcgacagggagcagatgcgtaatcttattacagcattccccgaagagtttgaggaagtccgtaaaggcatggggtatgtcgatgacgcccagcgggatgattttggcaatctggcgcttaaggctcaggtcgcttcgtcgcttggtccgggtgcatttggcaggttcatgatggataacgaaaaggagatgcgtcgtttaggtatccctccagaaactattgcggaaatgcaggttaatgacccgcagggcttccagcacttcgcaggtaatctggcactattttctctcggtcatgagaagtatttcgatatcaaagatcaaatggaaggtcgggatattgagcgtggcaagttggcagagacgattcgcagcaataaagctggggaaggtttaaaggcgcaaagcattgctgttagccgtgaaaactccctgcgcactgctggaggtgctgttcctgcatctgttaaagaatatcaatatttcaacagcctgtctccagagcaacaaaagacatatcttcgtgttcgaggtcgtcctgatgctggcggggagaatgttgtgcaactggcagatggcagaacggtaacggttggtaggaagcttcacggcgctggtgctaatgcgttctacgaaggaatagacaacgagggcaatatgattcgcgtccccgccagttctattgctgctccggctacatcggcagctaatgcacagaattacgaaatgaagaaagatcttgatgcaatttctggcgcatcaattgacgatcttggcttcatgacaggtattacaggttcttcaggttcttttgctcttggtgcagatattcgtagcagggcatctggtgttgaggagaggaggctatacaacgctgcacagcgaatcatgggcaaaatgcaaaatcaggggattgcagcagcccgagatatgggggcatctggcatcaacaccgaagcagaggccaataggtattttcagggtatgccaaagcctgatttctcaagtcctgaagcgctgcaacaatcaatgcgcgacattcagcaatataccgacaattacaaccagcaatataacgttaatgttggtaatggcgggaagaaatcatcaaggcaacagccagctactcagcaatcagcaggaggtagctacacgtcaaaatcaggcattcaatttacggtggaatga

SEQ ID NO: 8650 - DNA, 153 bp, Escherichia coli
atgccttcgatgatagcgataattttactcatcatccttcacatctggctctgtagacagggtggtgatcacttctggagtgaatccagattaaacatctcattgctgatgcttgatattgagcatctggcgcgcggtaaggggctgcgttga

SEQ ID NO: 8651 - DNA, 189 bp, Escherichia coli
atgaacgccacaattcaaacgataccagagcttcttatccagacacgaggcaatcagaccgaagtggcgaggatgctttcctgcgcaagaggaacagtgctcaagtacaaccgagacagcaaaggcgagcgtcacgtaatagttaacggcgtcctgatggtcaaacaaggcaagaggggaagacgatga

SEQ ID NO: 8652 - DNA, 363 bp, Escherichia coli
atgaacgaatatcagtttgtgcttccatacccgccgtcggtgaatacctactggcgaagacggggaagccaatattacataagcgataaaggccagaaataccgaaaagacgttcagcaaatcatccgccaactcaagttagacattttcaccaaatcacgactccgtatcaaagtcatcgcagacgttccagactcccgccgccgcgacctcgacaacatcctgaaaggtttactcgactcccttatccacgccggatttgcggaagacgacgagcaattcgatgacattcgcgtaattcgtggtgtgaaagtaccaggcggacggcttggaataaaaatcaccgaactggagaacgcatga

SEQ ID NO: 8653 - DNA, 291 bp, Escherichia coli
atggctaacctacgcaaagaagcgcgcggaagagaatgtcaggtacgtatttacggcgtatgcaatggcaaccctgaaactacagttctggcacattaccggatggctggaatttgcggaacgggaatgaagcctgacgacctgatcggtgcatgggcttgtagtgcgtgtcacgatgaaatcgaccgacgcacccataatctcgacaacaaagacgccagactttaccacctcgaaggcgtgatcagaacgcaggcgatactgctgagggaggggaagattaagtcatga

SEQ ID NO: 8654 - DNA, 723 bp, Escherichia coli
atgaatgagttaatgaatggcaatgccatcaaaatgacaagcattgaaattgctgagttggttggtaagcgtcatgacaatgtgaaacgtaccatcgaaacgctggctaaaaatggtgttatccggcttcctcaaattgaggtttccgaaagaatcaataacttagggttcaatgttcagtacgagcattacgtcttcgagggcgaacaaggtaagcgagacagtattgtcgttgttgcccagttgtcgccagagttcaccgctcgccttgttgaccgctggcgagagcttgaagaagctgcggttaatatccccaaaacgctaccggaagcgttgcgccttgctgccgatcttgctgagcagaaaatgcaactggaaaaccagctcgcaattgtcgcacctaaagttgagtttgccgatcgcgttggcgaggccagcggaattttgattggaaactttgcaaaggttgttggtattggtcaaaacaaactgtttgcgtggatgcgtgatcacaaaatccttattgcttcaggttcccggcgcaatgtgccaatgcaggaatatatggatcgcggctatttcacagtgaaagaaacagcggtcaacacaaatcacggaatacagatatcgttcaccacaaaaatcaccgggcgtggtcaacagtggctgaccagaaagctgctcgataacggaatgctgaaagtaacaggggaggctgcttaa

SEQ ID NO: 8655 - DNA, 177 bp, Escherichia coli
atgcttagcccatcccaatcccttcaataccagaaagaaagcgtcgagcgggcattaacgtgcgctaactgcggtcagaagctgcatgtgcttgaagttcacgtgtgctccgattgctgcgcagaactgatgagcgatccgaatagctcaatgtacgaggaagaagacgatgaatga

SEQ ID NO: 8656 - DNA, 420 bp, Escherichia coli
atggattattcacagttaagtgattttgaaattaacagacgagtatgtgaggctttagatatggaggagcatttcttcatacctgatgacgaagcagacttcgattctgagatccccactgacgaaagaggtcctatttggcagacgcaaaaaagggatattaatggcttccgttcttcaaacggaaattgcttcaatccttgcaataatcctgaatacgcgtggccaattatcactgaaagcaaaatcagcactatgtggatgacagcggaaaaagaatggtgcgcatggtcaggaggtgatttagaggaaggttgttgggaatgggaaaatattcctggctactacttctgcggtgaatctccactccgcgccgccatgattgtatttctcatgatgcaggacgccaataatgcttag

SEQ ID NO: 8657 - DNA, 177 bp, Escherichia coli
atgaggcgacagcgacgaagtatcaccgacatcatctgcgaaaactgcaaataccttccaacgaaacgcaccagaaataaacgcaagccaatcccaaaagaatctgacgtaaaaaccttcaactacacggctcacctgtgggatatccggttgctaagacatcgtgcgaggaaatga

SEQ ID NO: 8658 - DNA, 411 bp, Escherichia coli
gtgaagcaaacaatattcctccgaactaagcaacaacagcaagctgcaataaatgccatcctcgcaacaccactcgataaagacaagccagtcaccatccgcattactgactacaagcgcaaccttgaccagaacgcaaaatttcacgcgatggtcgcagatatcgctaggcaagttcagtggcgcgataaatggttaaaaccagaacaatggaaggttttgttgatcagcggtcatgcagtggcaacaaaacaggaagctgatgttttgcccgggcttgaaggcgaatacgtcaacattcgcgaaagcagcgcgcagatgagtgtgaagcatatggcaagtctgatcgagtacacaacagcatgggctattggtcagggtgtcagatttaccgacaggaggtacgaatga

SEQ ID NO: 8659 - DNA, 186 bp, Escherichia coli
atgagtcgacgaagtagctttttggggtttgtaatattcctgtcctgcactggttacatcgtaatctggtcaatttcgaacattgaccgtggcgggaaatatctcattgtaatgttctttcctttgtttcttgggtggtacgccgcaaggttgctggaagaatggggttacaggcataaaaaataa

SEQ ID NO: 8660 - DNA, 315 bp, Escherichia coli
atgacgaaagcagatgccagtttgaagagagttggttacgacgtggggggcgaatcttcagaccttatccgttaccctgaaaatcaccatgaaattggcagtggtgatattggtggtcaatacgtgatggacgatgttcaaggccactggcaaacgtggcaggcatcgagagcagctattgaaattgagctgcaaaagccaaagaaaggcccacttcccggtgattatcacattggctatgactcaggtgcagaatcgcaatacgaaagcgatgtagaggctatccgcgccgctggaatcaaagtgaaggagtga

SEQ ID NO: 8661 - DNA, 207 bp, Escherichia coli
gtggttgagttgattttttctgcattgaggattctcggtgctatgtggatggtggcgacgttcattgtggttgccagcagttttgtccggttggtaggcgaaggtaaagacctggttggtgtgcttttcggtagcatttttctgtgggtgattatcggtgttatgcctgttgtcgtagcaaaagtggcgtggcgttttgtgagttaa

SEQ ID NO: 8662 - DNA, 1377 bp, Escherichia coli
atgagacaggatatcgaagcgagcgttatcggtggcctgctgattggtggattaactccaaccgccagtgacgttcttgcaacgctggagccggaagcgttttcaattccgctctaccggaaagccttcgaggttatccggaagcaggcgagaaacagaaacctaatcgacgcgctgatggttgccgaggcgtgcggagaggagcatttcacgtcaatcctgatgaccagcaaaaactgcccgagcgccgcaaacctgaagggatatgccggaatggtcgcggataactatcaccgccgtctggtgctggaaatcatggatgaaatgcgtgaaccaatccaaagcggaaccatcgacgcatcgagtcaggcgatggatgaacttgtaaaacgtctctcagccatcagaaagccccgtgacgaggttaaacctgtacggttaggggaaatcatcaccgactacactgacacgcttgacaggcgtctgaggaacggagaagagtccgataccctgaagaccggaatcgaagaacttgatgccatcaccggagggatgaacgcggaagacctggtgataatcgctgctcgtcctggtatggggaaaaccgaactggcgctgaagattgccgaaggcgttgcaagccgcgttattcctggttctgacgtccggcgcggggtattgattttctcaatggaaatgagcgcattgcagattgcagagcgaagcattgccaacgccgggaggatgtcggttagcgtactgcgaaatcctgcatcgatggatgacgagggctgggcacgtgttgctaacggcatgagtcagcttgcagatttggatgtatgggtagtcgatgcctcgcgattatcggtcgaagaaatacgctcaatcgcagaacggcacaaacaggaaaatccaaacctctcactcatcatggcggattatcttggcctgattgagaagccgaaagcagaccgcaacgacctcgcaattgctcacatctccggaagcctgaaggcgatggcgaaagacctgaaaacaccggttatttccctgagtcagctttcacgcgatgttgagaagcgaccaaacaaacgcccgacaaacgcagatttgcgtgattcaggaagcattgaacaggacgcagactcaatcatcatgctctatcgggaagcggtatatgacgagaacagtagcgccgcgccatttgctgaaatcatcgtgacgaaaaaccgttttggctcacttggtacggtttaccagcggttctgcaacggacactttgttgcatgtgaccaggatgaagccagacagatttgcacagcatcaaatgcacctgctgcgcgtggcagacgatatgcacaaggggctgacgtatga

SEQ ID NO: 8663 - DNA, 888 bp, Escherichia coli
atggagaaccagaaaactggttacattccgttgtaccggagcattctgaaacagtcatgggcgaaagatgtttatcttcgcaccctgtgggaaaaccttctcctgaatgccgccagaaagccatacaaagcgaatttcaaaggtcatgaatggcatctgcaacccggtcaactggttgtgacagcagctgatttaggtcttcagttatgcgacagacatggcaagccagcaagccgtgatcaggttgagcggatgcttcaggtttttgtgaaagaggggatgatctccattgatggagagaagcaaaaaggccgtgtgataaccatcacaaattaccatgaatatgctcaaaaaatggacaatttacccgcacatgaagccgcacaaacaaccgcacatgatgccgcacatgatgaagccagcaatagcgcggctttcagcgtacatgccgcacatgaaagcgcacatgaagccgcacaaacaaccgcacatcatgaacaagaaggtattaacaagaatataaataatacccccctaccccccaatgggggaggcgatgggcaggttaaacctgaacgtcgcaaggcagaacgaatcgactacgaatccttcctgaacgcctacaacaccgaagtcggtgacagactgccacacgctgttgcggtcaacgagaaacgaaaacgccgcctgaagaaaatcatcccgcaactgaaaacgccaaacgtggacggtttcagagcgtatgtcagggcgtttgtgcatcaggccaagccgttttacttcggagacaacgacacgggctggacggctgattttgattacctgctgagagaagactcgttaacgggagttcgggaagggaagtttgcagacagggggattgcatga

SEQ ID NO: 8664 - DNA, 273 bp, Escherichia coli
atgcgaaacaaaggctttaatccacctgatacacacaaagaagctaagcgtttgcgcttccttcgttccattgatgaaagaactcaaatctcttttgtgaaagttgccagaactgagcttctgaaggctgaggcgagggcgttgctcccgtctctaccaaaagaggagggatatacgttcattccaaacgcatttctggaaaagcttctcaaagaagacatatccgtaagtcagtttaacgatgttcttaaggtctttcgtcaaggcaggtag

SEQ ID NO: 8665 - DNA, 294 bp, Escherichia coli
atggttcgtgcaaacaaacgcaacgaggctctaagaatcgagagtgcgttgcttaacaaaatcgcaatgcttggaactgagaagacagcggaagctgtgggcgttgataagtcgcagatcagcaggtggaagagggactggattccaaagttctcaatgctgcttgctgttcttgaatggggtgttgtcgacgacgacatggctcgattggcacgacaagttgcttcgattctcaccaataaaaaacgcccggcggcaaccgagcgttctgatcaaatacaaatggaattttaa

SEQ ID NO: 8666 - DNA, 186 bp, Escherichia coli
atgtacaagaaagatgttatcgaccacttcggaacccagcgtgctgtagctaaagcgttaggcattagcgacgcagcagtctctcagtggaaggaagtcatcccagagaaagacgcctatcgactggaagtcgttacagctggcgccctgaagtatcaagaaagcgcttaccgcaaagcggcataa

SEQ ID NO: 8667 - DNA, 360 bp, Escherichia coli
atggaagctgtagaaccatatcataagcgtgcaatagataactggtacgatacaaccgtagactgttcagaagattcgttttggttggacgtgaagggagactcaatgacggctccggccggtctcagtatccctgaaggaatgataatactcgtcgatcctgaagtagagccgcgtaacgggaaactggtagttgcaaagctcgaaggagaaaacgaggcaactttcaagaagttagttattgatgcaggcaggaagtttctaaaaccacttaacccacaatatccgatgatcgagatcaacggaaactgcaaaatcatcggcgtagttgtcgatgcaaaactagcaaaccttccataa

SEQ ID NO: 8668 - DNA, 300 bp, Escherichia coli
atgacagtagtcattacatatctggctgacgataacgccagaaatcgccgcagagcacgcagacaggctcaacgtgaacaggcgatgcaagaacagcgactggcgcgaaaaattgcgctaaagctctctggttgcgtcagagcggataaagcagcatcactcggaatccttcgctgcaagaaggcagatgaagtcgagagtaaacagaatcgtatttactaccgcaagccacgcagtgaaatgggtgtgacttgtgttggtcgccagaaaatgaaattaggcagcaaaccacttatttga

SEQ ID NO: 8669 - DNA, 171 bp, Escherichia coli
atgcaacagttcgctattgcaggggcggcatcggttcgccctttcaacccgattttatcggtacagcattcacgaaaaaacattttaaccggagcagactttaaacaaccaagaatgaaaagcttgctcgaaaagctttgggatattttgaaacaacaaggccgtccatga

SEQ ID NO: 8670 - DNA, 159 bp, Escherichia coli
atgagttttacggataactggtcagacgaagaattcattcgtcagataaaagaattaatcggtaacgaaggagatattcatgtcacttgcaaccacagtgaaggagagcaagttacagagacgcatgtacacgcagaaagctctctggtatcgccataa

SEQ ID NO: 8671 - DNA, 9621 bp, Escherichia coli
atggataatacctctggagattttccatgtaataagatggacacgcgtaagcagttaccgctaacaccaagtcaacaggggtttttattccattccttaaaggataagaaaaggagtaactaccatgagcattttacatgcattttttctcagcatgtagatagcgcccacttcaagtgggcgctggaaacgttatttcgaaagcatgagtgttttcgcactgattataactgggagattgatgagcgcccttgtcaggtggtgaagaccgatgtgttgccggatatatatgtgttagactgtgagcaagaggaaatacgttttctactagctaatgatgacattatcattcctgtcccgcaggatgacggtattgatgctataattcctcaactgctacaggctgatttaaaatacccattttccttgaaaacgatcccagtccgggcctaccttattcagtcaacgaaagaaagtgcttttatactatcataccatcatattgtgatggatggctggagcttatcccttttcattaaacagttgctccaactctatggagcggctgtggtcagtggtgtgagggatgatagcgccattatcccctcatctctgaaaccccttgtagacacactgtcggcccgacgtcacacctttcagcacgactattgggctgcatatcttcgggagggaacaccaacttgtatcgtgccgctgtcacaatatcacacagatactgaagccgagaacaattcttacgttaatcaaacaaatcatgtggagatcaatttgtctccggatgtgtgtcagaaaatacagacgctatgcagcgattatcgtatcacccccgcagtaatcttctatgtggcctggggcatcctgctacaacgttggtgctatgctgacgatgtgttattcggcgcgacaatatcagggcgaaatataccaattgatggtatagaagaaacactagggctatttattaacacgttgccgctgcgtctgcgtgatgatggggcgacactgttgcaacacttacaacgtatgcaccaaacactaatagctcactacagcaatgaacatgatgccttagccagcatacaacggttggtacataaagaaggtcatgctggggatctttttaataccttagtggtgttggagaattatcccgttgatatgacattattgtcatgcgcgtcgcccgtggcaattcgccatctcagtgtacatgaacaaacgcactatccgctgaccttgaccatcactcaacagaagggattccgtttcagtattgcatatgcccttaactacctgaccaacaacatggcgcaagcgttgctgatgcacctgagttatctgcttgaacaactggtggacaatccgcagcgccccattgctgcgttggtaaacttgtccccatgccagcaggcgcaggtacttcaaccctatctggaacgcatggcatgccgggattgggatagtcaatccaacgtcatcgaacaatttcatcaagttgctgcgacttcgccagcacaggtcgcagtggttgatgaattgtgcgcgttgacctattcggagttggcagcacaagctgagcagctcgcggcttatttggtacagcagggtgttatggttggcgatactgtaggcataattagcgaacgccgggtaaacaccgtggttgccatcatcgccatcatgttgatcggggctgcttatgtgcccatcagccccgactacccagtgggtaggatgcaggaaattattgatgacagcggcttggcgctgttgctggtacatggcaaaccgctagatgcattaaacgttgcgcagagtgacctctgtgcatttcccgtcgcgccctcggtggtatttccggttatcacaccagattctcgcgcttatgtgatttattcatcggggtcgacgggtaagccaaaaggtatcgcggtggcgcaccgcggtttattgcgcctgatacaaggcgacagcccgctgaaggtggagagcggtgagacaacgctgctgacctgcccatttgagtttgatgtttcggtgtttgagatgtggtctaccttgctcaaccacggcaaactagtattactcagcaaacaggcattacttgatatcaatcacattcgccgcacgatcgctgatgaacaggtggcgcgcgcctggtttacctcatccttgtttaactcctatgtggcagaaggtgccgatttcttcggtatgttacaacacattacggtgggcggcgaagcagtatctgcgtggcatgtcaacgacgtgatgcaaaaatacccgcatctggtggtgacaaacggttatgggccgacggaaaacactatttttaccaccgcatatcgtttcaacgggttgcaacccgcccgagtcccgataggatacgcggtaccgggcacctcgctctacattaccgatctccatgggcatttgttgcctatcggtgccaccggtgaactagtggcgggtggagtgggggtcgccatcggctatcagaacaacccggcgctaagtgcgacggtttttgtccctgatccttttattcccggcggtatgatgtacaaaactggcgattatgcccggttgctggatgatggctgtgttgactgttttgggcgtaaagacggtcaaattaagatcaatggacaacgaattgaaaccggagagatcgagcagcgcctgctggagtgctccggcattatcgaggcggtagtggttccttaccgcgtacgtgaaacgctgcatattgcggcagtggtctgcgtcaatgatagctatgatgaggtggaagttcgagggcaattggctgacagattgccgccattcgctattccggaatccttggtggtggtgacggagattgcaaaaagccatagtggcaaggccgacttggcgcagttgcggtatctcctgcccgcaactcagtgcaacgccgtgtccaccacgatatcagaggtgcatagtgacatggaacatgcgctgcatgctatctggcaacgcgtacttgatagacaagacattgatagcaatgcctcctttttcgccctcggtggcacctcattggataccatcagggttaaaggggatattaagcggcaacttggcttggagattgatattaccgatctctttaagtacccaacgctcacggcgttagcacattttctcgatactgccgtatcgccggaggatgcaattccaacgcgtgctgttgtctacagcgacatgccggtggcgattgtcggtatggcgggacgtttccccggtgcggcgaatattgcagcgttgtggacgctggttgtaggaggggaatcgggattaacactgttcagtgatgaagagttgcgcgcgcatggtgtgacacctgacacgcttaaacaagcgaattatataaaaaccaaagggattgttgatgatcacgaatggtttgatgcggatttctttggttatactcccaacgaggcggaatgtatggatccgcaaattcgcttattgcatcagtgctgctggcaaactctggaacacgctgggtgcgatcctgccacctttactggtgcgattggcatttatgccggactgctgacatccccccactggcttaatgcggtaatgcaagacactaccgactctaccgccctgtacaaggccagtatcctgaatatccattccgtcacagcattgattgcccatgcgcttaacctcaccggccctgccgtgacgcttgacaccgcctgctccacttcggcagtggctatccaccaggcctgcatcgcactacgtaaccgggattgcgatgcggcattggcgggcggcgtttctatcgagatgcctgcgtaccggggctatgaatatcatgaaggcatgatcaatgcgcgagatggtgtctgtcgtcctttcgatagccaagcctctggcacagtcaccggtgatggcttaggaatgctgctgctaaaacgtctggacgacgcgctggcggatcgggactgcatctatggtgtgatcaaaggttcggcggtcaataatgatggcaataacaaaatcggctataccgcgccgagtgtgatcgggcaatcaacggtaatccgcaccagtttgcgccgtgccggttttgatagcgacagtatcggattggtggaagcgcacggcaccggtacggtgctgggtgatcctattgagttacgtgcgcttaatgaggtgtttggcccaacacctgttccgttttgtgtggtttcagcgctgaaaagtaatattggccacctcaactccgctgcgggagtggcgggcgtcatcaaaacaacgctcgccctgcatcatcaagtgttgccaccaacagcgcactttcgccaactcaatcctgctatagatctatcgcgttctgcattgtacgttaaccagcaagtccaaccgtggccgtcgacgcgtcctcgtcgtgcactggtgagctccttcggcatcggcggcaccaatgccagcatcgcactagaagcacatcaacatgaggacgacccttcagcgacgggggtacgcgacagctatctgttgttgttctccgctaaaacacccgctgcgttagagttgcgcgtggcctccacactggaatatgtcaagcatggagtaggggtgcgcctgccggatgtggcttatacattgcaaactggacgcacagcctttgaccatcggcgggcttatttggtgagtcgtgggtcgaaaatcgatctctcctgtgccacgatattgcaagcggaaatcttcaatggtcagcgcacgacagcggagatctgcttcatgtttcctggtcaaggtagccaatatcacggcatggccagcgcgctctatgctcatcaacccatgtttcgccagcacatggatcgctgctttgctgcattccaacgctattcgacggtcgatctcaaggcgttgttgtttgacgatgaggatacgcgggatattgatcaaacgcagttcacacaaccggcgttgttctgtgtcgaatacagcctagcgcgcaccttgattgatctggggattacgccggacagtatgatcgggcacagtctgggcgagtatgttgcggcctgtattgctggcgtatttactcttgaggatgcgctgcacgtcattgaggcgcgcggacgtttgatgcagtccatgcgtcccggtagcatgatggcggtctaccttagtcgcgaacagttgaccccatggctagctgcagaacggggtattgaactggcagctaataatagcgcgcatttttgcgtagtcgcgggcgagcaggcggccatttcccgtttgagcacacgcttagtcgagggcgggatacagcacaggcgcctgaaaacctctcacgcattccactcggccatgatgacgccgatgctgcacgattttgcacagttgctggggcaaatcccgatgcacgcgccgcacaagcgctttatatctaatgtaagcggtacatggattactgaggagcaagctacctcgccggattactgggtgcagcaagtgcgcaacgcggtgctgtttagcgaaggtgcggcgcaactgttggtacaacccacgctgtttatcgaatgtgggccgggtaatacgctctctacctttattcaaggacataaccaatacagcgatcagccgaccctgttgacgctacgcaaagccaacgcggcgatcgatgatgagcacatgttgcatcgtacgctggcggcgctgtgggtcaggggggagaatattgattggagacgctttaaccagacggcactcggcaagcacattccattgccggattaccccttcgaacagacttattactatcgctatggtgctgcactttccggttatcgccagtatccaaatcctctgcgccgtccgcaagatgagtggctccagcgtgtgctgtggcggatgcacgacacatccttgcgggaggcgttctatgcgccgggcgaattgatcatcattattagtgctgacggcgacaagttacagcagacgctgatgagtagtggtgtcgacagcatcacaatgccgctgccgatatcgtcagaggacgacgtgtgggataatgaccgtattctgacgcatttccacgacatctgcgcacttttagcacacaaaacctaccgacagttacattgcttgtatgctcccggtgcggaggcaggatcatcgttgacacagtcgctctcgggactttatcgtgttgctcgctggtgtatgcacagcaccacgccgctggcgtccttaacagtattgacccatggtgcgtttcgcgtacaggaagaggataatcccgaaccgacgctggcagcgttgtcgggcgcagtaaacgtgtttgcccaagagctgcacccgaccgaagtacgattgatcgatatcgatgcgcagagcagtgatgagaatctgaacttgctaacccagcgtctggccccgaaacaagaaacggtaatggcgctcaggcaggggatgctttacctgcgacgctttatcccgacacggctgttggcgcacttaccccctcaaacagggtgtataccgggcaacgtactgtggattatcggcggtgaaaaggggattggccgcatgatcggcgaagcgcttgctcagcgtgagggagtccgtgtggtactgagcagccgcacaggttatcaccatgaagcggtgcagcaggacgcattagacgttatccactgcgacgtgacgcaggcggaggcggttagagcttgtctggcaactctgctcgaacgctatggacggttggatggcgtgatttttgctgccgacgctaccaccacattgacactgcatcaattgagcgaatctgcgctacgcgacacgctaacggtgaaagaacggggtactgctaatgtgctgcatgcgttagcgcaacggaatctgctggatgagcgtctgctactgctgttctgtaactcgttggctgccgtgaatgcggagattggccagacaggctatgctaccgccagcgcctatttggatgcactggcacagcaactgcgtacccgctacaaggtgaatgcgctcagtatcgggttggatgcattgcgtgagcagggcatgttgttggatgctataaacggcagtgaatacgatgtcttgcgtggactgcgcccattgatgacgggaacgttgctacaggcttataaacaacaaggggctgacaccagctactacgcgcgattatcccccgagtccgattggctgctggatgagcaccggatatccggtatcgccacgctgccgggaaccggctatctggcgctggcgtatgaagctctgcgccattactttgtgcaagaccaaatctgcattgatgaattggtctttttggcaccgttgactgtgatggacaactgcagtgttgacgtttttgttgacatttcacctaacgggcaaggagttagtgtcgaggtgaaatcaatgacggagcgctttagtggcacgttaacaacccatgccagaggcagggcgacgcgtctgatggtagacgataatgttgtgtgcgatctcacggggctgatgcgcgagatgcacactatcactcctccaacaaaggaattatcgagcacgcacttccactatgggccgcgctggcacagcgtacaacaactgtatggcaataccgcccagactcaggttttcgcaacgctggccctgcccaccgttgccgctaatgatacgatcgcactgcaccctgcgctgttggacatcgccagcagtgttgtcgaacaactgcctggttttcatactgattcggtacctttcctttatcaggatttacgcctgtaccgcccgttgccgaacaccttacatgtggcgctgactgtcaatcggcacgatgaggagggtgacagctacgctttcacgctctacgacatggcaggcgagatggttgcccgctgtgcggcaatggtgaagcgcaaggtacagctccacatacaagatgtcgatgacgacacgcgactgcgcgtgcccagtgccgataactaccaactgcggctggccgctgagggggagggggcaggaaagctagcgttgtgccctacgccgcgcttagcgctgggggattcacaagtagagattgaggtactggccaccggactgaactttaaggatgtgctgttcaccacgggattgctccggcagcagccgggtgaggctccgctgcaattgggactggagtgcgccggacgcattactcgcgtgggtaaaaatgtcactgaatttgccccgggagaggatgttatggcggtgctaaacggtggttttgtccagtacgcacgggtagaaagcgattgcgtagtgagaaaaccagcccattgtcgcatcgaacaggcggctgcgctgcctatcgcatacctcaccgcctattacgcactggtggtgcgcgctaatttgcaacccggagaacgagtattgatccacagtgcggcggggggcgttggcttggctgcgctacatattgccaaacgctgcggagcacagattttcgccacagcaggtagcgagcagaaacgcgattacttgctttcgctaggcgtacatgccgtagctgattcacacgacgaacagttcgctgccactctgctgaccgcatcggacggacaggggatggatgtgatccttaactccctcacaggccgtctgcttgacgctagcctcgcgctgctggcaccgctgggccgttttcttgagctgggcagcaaggacattgtggaagacaaagcgctaccgatgcgtttcttcgcccaaggcggcacctttattccgattaattttcacgcggcgcatggtgcgtttagtcgctacctgcaacagattgtcgcttggatagatgataacacgctaccgctccttccatgcaaatccgtaccattgcccgaggttgcacgcgccttcgccaccctgaccacgccgcagcatattggcaaggtggtggtaacgcatcgcactgcggcaggcatggaccggctgaacgccatgatagcagaaaggcgcctcggcggctatgcgctcagcatgagcaatgccgaggtgatgcgccaattgtggccgatactgaacactcgcagtccgtgggcgcaactgctgctctcacctcgggcgatcgatagattagcgcggggcaaccgggtggatcgcggtgtaccgtctgccgctaacgatacgattactcagcagacagtgaaaaagcggccccgtccggaaattggcgtgccttacagccccgcgacacgtgaagtggaacgcgtgctctgccaaatcctggaagagtatctgggtctggatagagtaggcattgacgacaactatgccgaattaggggcaacctcactcgatatggtgcaactgagtgggcaaatggcgcgtcactatccgcaagtgagcgtggtgtcgctgtacaaccacgccaccgtgcgccagctggcgacgttttgccagcccccggagggcgagtcaaatgcgccatcaccacagcctgcagtacagacgaatacgcgcgcgaatcagatagcaaaacgtgctttgcaaattgcgaaaaatactgcgcgcagtcacacgtctttgcattaa

SEQ ID NO: 8672 - DNA, 309 bp, Escherichia coli
atggaaaagaaattaagcagtaaatacattcatatgtatatgagtatatcccgagtgttcattcgtttgacaggcaatgtattaaaactgtttccttttgctatggtgatatgccctgtggtgtggttttatctttgccctgaacatattatctcagacattgttaacgactggcaggatgcagatacactggaaaaaatactgcttgtcaaactgtatctgaagacggttcttattctgacagtggtaagcgttgttgtcttgtctctttcgtcagataagtttatgtctgttaagcgcaggaaatga

SEQ ID NO: 8673 - DNA, 519 bp, Escherichia coli
atgagttttttatcatttttacgaaagataagtaataaagaaaaagaaatttttatcagtgaggagcgttttttctccctgctggaaagggtgagtgcttttgatgtggtcagagaatgggctgaaaatggtggagcatattatcctctgctggagtgccgtcggcttacagatattgaagatgtcaggaaatcagaggatatactgaaccgactggagtttattgacagaagatttcgggaatttatcagcattatgtctgaatataatcgtaatgataaatctaaaaacaggtgggagagggaattgtctgaatatccaccggaaaaaatataccaggtccggagagagggaaaccatctgtcattaaaaaattacggtgatgatattactctgaacagagataccgccgtggctacggtgcagattactgtcagcagaaaatgcattactcaggaagaaatggatgaattatatgcattgtctgagagactgaaagaaaagtgtgccggtaattaa

SEQ ID NO: 8674 - DNA, 372 bp, Escherichia coli
atgactttacctgccgggtattaccggattgacccggacatccgtgcactggtggccgcgatgaacgttcacggatttcgtacatatgcgtcctgtcaggggcatggtttccctgttacgaaactgccgccttatattgcctttgtctgtccggtaaaaaaggcggctcttcttgagcagcgactgcggcaggatgcggagtccatgatgccccggttgctgtggggctggtccgtcggggcttcttttaacagtgaccttcagctctgtttccggcttcagcctgaaggccctcatcactggtatcaccggtactgtcgccgctcactgcgtgcagacttcaggacgctggtccgcttactgaatccgtaa

SEQ ID NO: 8675 - DNA, 423 bp, Escherichia coli
atggcgctgacaaagaagcagcgggaaaaactgcgtatgaaattcggcggtcgttgtgcgtactgcggctgtgaactgccggaaaaaggctggcatgccgaccatgttcaggcggtgctccgcaagtcagagcagtgcatgaaggctgcagaaaagcgcattttcaggctgaaatccaccggtgatgttttcagaccggaggccgactgtccggaaaacctcgtcccggcctgtgcgccgtgcaacctgctgaaaacaacatattcgctggagatgttcagaacgcaggtgtccctgcaggttgaacgggggcgcagaagcagcgtgaatttcaggaccgcagaacggttcgggctgattcaggtagtgaacaaaccagtcgtgttctggtttgagcaatatcagagggagagtgaggtatga

SEQ ID NO: 8676 - DNA, 258 bp, Escherichia coli
atgaaagtcatattcacgtcgaaccgttttattgattttcttatccggcttttgattacagcgtttgtcatttccccggtaattatctggtcgtgggatacggtaaaagaaaccactgcaggtgagatgcttgctgcttgttttgttattttttactccggtgtgctcctgtttattctgtatttttgtttttctgccctgactggcctgcagaaagatgatgaaagaaaaaatgatgaaaggaatgaagatgaataa

SEQ ID NO: 8677 - DNA, 2235 bp, Escherichia coli
atgagttttaacgcaaaggatatgacccagggcggtcagattgcgtccatgcgtatccgcatgttcagccagatcgccaatatcatgctttactgcctgtttatttttttctggatactcgttggtctgattttatgggtaaaaataagctggcagacgtttgtgaacggctgtatttactggtggtgtaccacgctggaaggcatgcgggatttaatcaagtcccagccagtatatgagatccagtattacggcaaaaccttccggatgaacgctgcccaggtactgcatgataaatatatgatctggtgcggagagcagctatggtccgcattcgttctggccacagttgtggcactggttatttgcctgattaccttctttgttgtttcctggattctggggcgtcagggtaaacaacagagcgaaaatgaagtcacaggtggtcgtcagctgacagacaatccgaaagatgttgcccggatgctgaaaaaagacggcaaggactccgatatccggattggcgacctgccgattatccgggattccgaaatccagaacttctgtctgcacggcacggtcggggccggtaagtcggaggttatccgtcgtctggccaactacgcccgtcagcgcggtgatatggtggtgatttatgaccgttcaggggaatttgttaaaagttactatgatccctccatcgataaaatcctgaatccgctggatgcacgctgtgctgcctgggatttgtggaaggagtgcctgacacagccggattttgataataccgcgaacacgctgatcccgatgggcacaaaagaggacccgttctggcagggttcaggacgaaccatttttgcggaagcggcgtacctgatgcgcaatgaccccaaccgcagctacagcaaactggtggacacactgctttccatcaaaatcgaaaaactgcgtaccttcctgcgtaattcaccggcggccaacctggtggaagagaaaattgagaaaacggcgatttccatccgtgctgtgctgaccaactacgtgaaagccatccgttacctgcaggggattgagcataacggtgagtcttttaccatccgtgactggatgcgtggtgtccgggaagatcagaaaaacggctggctgtttatttcgtcgaacgccgacacccatgcctccctgaagccggtgatctccatgtggctgtccattgccattcgtggtctgctggcaatgggagaaaaccgtaaccgtcgtgtgtggtttttctgtgacgagttacccacgttacacaaactgccggacctggtggagatcctgccggaagcccgtaagttcggtggctgttatgtgtttggtatccagtcctatgcccagctggaagatatctacggtgagaaagcggcggccacgctgtttgacgtcatgaacacccgtgcctttttccgttctcccagccataagattgcagagttcgctgccggtgaaattggtgagaaagagcacctgaaagccagcgagcagtattcctacggtgctgacccggtacgtgacggggtatcgaccggtaaggatatggagcgtcagacgctggtcagttattccgacattcagtctctgccggatctgacctgctatgtcactctgcccggaccgtatccggcagtcaaactctctctgaaatatcaggcacgaccgaaggtcgctccggagtttattccgcgtgacatcaacccggaaatggagaaccgtctgagtgccgtacttgccgcaagggaagcagaaggtcgtcagatggccagcctctttgaaccggaggttgcctccggagaagatgtgactcaggctgaacagccacaacagccacaacagccacaacagccacaacagccacaacagccacaacagccacaacagccacaacagccacaacagccacaacagccgcaacagccggtgtctcctgccatcaacgataagaagtcagattcaggtgtgaatgttccggcaggggggatcgagcaggagctgaaaatgaaaccggaagaagagatggaacagcaactgccacccgggatcagtgaatccggtgaagtggtggatatggccgcttatgaggcatggcaacaggaaaatcatccggacatccagcagcagatgcagcgtcgtgaagagatgaacattaatgtgcaccgggagcgtggggaggatgttgagccgggagatgatttctga

SEQ ID NO: 8678 - DNA, 558 bp, Escherichia coli; identical to SEQ ID NO: 7533

SEQ ID NO: 8679 - DNA, 858 bp, Escherichia coli
gtgactgatcttcaacaaacgtattaccgccaggtaaagaacccgaatccggtgtttataccccgtaaaggtgccggaacgctgaagttctgcgaaaaactgatggaaaaggcggtgggcttcacttcccgttttgatttcgccattcatgtggcgcatgcccgttcgcgtggtctgcgtcgacgcatgccaccggtgctgcgtcgacgggctattgatgcgctcctgcaggggctgtgtttccactatgacccgctggccaaccgcgtccagtgttccatcaccacactggccattgagtgcggactggcgacagagtccggtgcaggaaaactctccatcacccgagccacccgggccctgacgttcctgtcagagctgggactgattacctaccagacggaatatgacccgcttatcgggtgctacattccgaccgatatcacgttcacaccggcgctgtttgccgctctcgatatctcagaagaggcggtggcttccgcacgccgcagccgtgtggaatgggaaaacagacagcgcaaaaagcaggggctggataccctgggtatggatgagctgatagcgaaagcctggcgttttgtgcgtgagcgtttctgcagttaccagacagagcttaagtcccgtggaataaaacgtgcccgtgcgcgtcgtgatgcgaacagggaacgtcaggatatcgtcaccctggtgaaacggcagctgacgcgtgaaatctcggaagggcgcttctctgccagtcgtgaggcggtaaaacgtgaagtggagcgtcgtgtgaaggagcgcatgattctgtcacgtaaccgcaattacagccggctggccaccgcttccccctga

SEQ ID NO: 8680 - DNA, 267 bp, Escherichia coli
atggtgaggtacttcgggttccttgccaaccgggtgtgtggagagaagctgccgcaggtgtaccgtgctctggggatggataaaccggaagcagtggagaaagtgtgctatgcacaaatggtgaaacagttcctgagtcgtgacccgttcgaatgcgtgctgtgcggcggccggatggtataccaccgggccattgcggggctgaatgtatcagggctgaagaaaaacgtgcgggatatcagtctgctgaggtatatgccggcctga

SEQ ID NO: 8681 - DNA, 249 bp, Escherichia coli
atgaaaaagatgattattgcagcaactgtgctttctgctctgtttatggtcaacgtccaggcggcagacacgatggcgaaagactccatatctaagccgcatgctgaaatgtgcaaagacagcatgtgcaaagatgccatgaacaaggatcatatgaggaaaggcaatatgggcaaaatggacaagatggacaagatggacaagatgaaaaaggatgatatgggtaaaaaagacagcatgaaccagtaa

SEQ ID NO: 8682 - DNA, 771 bp, Escherichia coli
atgaaaaaagagcgttttctctccaagagtgatgcccattacctggtgaaggatgcagaaaagatacttagccaagacaggcgccgcttactgtgtcagggactgacgctgggtggcattatgatgctgaccggctgtgatattagcgataacgcggatgtggaaaatgtgttgtcgcggatgtcccgatttaatgatcggattcaagggttcctgttcagcgaacacaatctggcaccggaatataccgctgctgatataacccatccattcccctttaacgctttttatggggatgaggatattccgcaggttgagggtagcgattaccaattggagatccgtgggctggtgcgcgacaccagaagttggagtttacctgaactgtatcgcatgcagcaggagagccagataacccgccatatctgcgtggaaggatggagcgcgattggagagtggggcggagtaccattccgtcattttctgacgctgattggcgccgatatgcgcgcgaagtatgtcagtttccgctgtatggatgactattacaccagtattgatatggcgaccgcactgcatccacagaccctactgacgctgacatggaataaccaaatcctccctaaggaatatgggtatcccatgaagttacgcatacctaccaagctgggatacaaaaatccaaagcatgttcaggtcattgaaataaccaaccatttcccaggcggttattgggaagatcaggggtacaactggtttggtggctgttaa

SEQ ID NO: 8683 - DNA, 600 bp, Escherichia coli
atgcaactatcacattcacaaccggtacaccctttatggctgcgctgttgccactgggtcaatgcagtggccattgcgggtatgttgttcagcggctggcgcatttataacgcgtctcccttgtttcattttaagtttccgacatcgttgactcttggtggctggcttggcggtgccttgcagtggcacttcgccctgatgtgggtactggtcatcaacggtgcggtatactttttgctgggtgtcgccagcgagcgctttcggcgcaaattcttcccgctctcgtggccgttgctgaaagaaaccctttcccaggcgttacgaggaaaactgcagcacgcggacctgcgcgactataatatggtgcaaaaaatcgtctatctgcttgttcttcttgacggtgtagggctggtgttttcaggcctagtcctgtggaaacccgtccagtgttcgttgctaagtacgctgctaggtggttatgaagcggcgcgttatatccactttttgtgcatgagtgcgatgacgctgtttatcgttattcacctgctgatggcgctactggtaccgcgcacactgttggctatgctgcgtggttgctaa

SEQ ID NO: 8684 - DNA, 723 bp, Escherichia coli
atgaataacgcaaaaaaaatactgttggtggaagatgattacgacatcgccaccctgttgcggctgaatctgcaggatgagggctatcagattgtccatgaggcggacggcgccaaatccctagcattactcgagaagcaggtctgggatgcggtgctcctcgatctgatgctaccgaatgttgatggcctagagatttgccgccgtatccgtcaaatggcgggctacctgccggtaattatcatcagcgcccgcaccagtgaaattcaccggattctggggctggaaatgggcgcagacgattacctgccaaagcccttttctgttcaggagttgattgcgcgcgtcaaagcgctgtttcgtcgccaggaagccatggggcaaaatatccgtctggaaggcggcctgatccgctgtcacggtttgcatatcgacccactggcgcgcgaagttcgcttgtgtggcgagttgatcgatctcactccccgcgagtttgacctgctgtactggttcgcccgtcacccgggtgaagtcttttcccgtctttcgctactggacaacgtctgggggtaccaacatgaagggtacgagcatacagtgaacacgcacatcaaccgtctgcgcactaaaattgagcatgatgctgccgagccggagattatcctgacggtctggggtaaagggtacaaatttgctgtcgataaaacggagccgcactcatga

SEQ ID NO: 8685 - DNA, 1473 bp, Escherichia coli
atgattcgtcgtctgacattaagccagcggttaacgctggtgtttaccgccattcttctgttttgcgccgctgcggcatgtggcatccagatctacagcagtaatcagtacggcaacgtgatggtgcaacgtttgtctgctggtctggcacaacaaatcgtcatcagcgaaccgctgctggataacaccgggcaggtcaatcgccagacgctaaaaatcctgtttgatcggctcatgacccttaatcccagcgtggagctctatctgatctcgccggatgggcaactgctcgcggatgctgcgccctcggggcacctcaaacgtcggcgtgtaaatatcgcgccgctgcaaaaattccttgccgggagcgcctggccggtatacggcgatgacccgcgaagcacggataaacaaaaagtgttcagcgtggcccccatccacctgaatggtgagctgcgcggctatttgtacatcattttgcagggcgaagaactcaatgccctcgcggatacgctgtggcaaaaagcgctctggaatgcgctactgtggtcactgctactggtggccgtgtttggtctgttggccgggatgttggtttggtattgggtaacgcgcccagtaaaacaattgacggcgaatgtcagcaggattgaacaggacagtatgagcgcgatcaaacagctggcaatgcaggagtctgacccgcagcccggcaatgaagtcgcggtcttgcgtaatacctttattgagctggcacgtaaagtcgccagccagtgggatcaactctccgataacgatcggcaacgtcgtgagtttatcgccaatatttcccacgatctgcggacaccattaacgtcgctccttgggtatctggaaaccctgtcaatgaaagcggatacgctctcaccggaagactgccgtcactccctggcgattgccctgcgccagggacataaagtgaggcatttatctcagcagcttttcgaactggcgcgccttgagcatggtggtatcaagccccacctggagcgatttgccatcggcgaactcatccaggatgtggcgcagaaatttgatctcaccatcgaaacccggcaattacagctacggcttgatatacctcatactctgccgctgatcaatgctgatgtatcaatgatcgagcgcgtggtcaccaatttagtggataacgcggtacgccacactccacagggcggcacaatcaggttgaaagtatggcaagaacatgacctgttgcaggtcgaagtggcggacagcggaccgggggtagaagagaatatgcgggcgcaattgttccagcgaccatcagcgctcagccaaaaagcctcacgcgaaacgcgggggggactggggctactaattgtacgccgaatgctggaattgcatggtggcggcatccacctgatggatgccacacccggtgcctgttttcgcttttttgtgcctttataa

SEQ ID NO: 8686 - DNA, 705 bp, Escherichia coli
atgaacccattcaaaggccggcattttcagcgtgacatcattctgtgggccgtacgctggtactgcaaatacggcatcagttaccgtgagctgcaggagatgctggctgaacgcggagtgaatgtcgatcactccacgatttaccgctgggttcagcgttatgcgcctgaaatggaaaaacggctgcgctggtactggcgtaacccttccgatctttgcccgtggcacatggatgaaacctacgtgaaggtcaatggccgctgggcgtatctgtaccgggccgtcgacagccggggccgcactgtcgatttttatctctcctcccgtcgtaacagcaaagctgcataccggtttctgggtaaaatcctcaacaacgtgaagaagtggcagatcccgcgattcatcaacacggataaagcgcccgcctatggtcgcgcgcttgctctgctcaaacgcgaaggccggtgcccgtctgacgttgaacaccgacagattaagtaccggaacaacgtgattgaatgcgatcatggcaaactgaaacggataatcggcgccacgctgggatttaaatccatgaagacggcttacgccaccatcaaaggtattgaggtgatgcgtgcactacgcaaaggccaggcctcagcattttattatggtgatcccctgggcgaaatgcgcctggtaagcagagtttttgaaatgtaa

SEQ ID NO: 8687 - DNA, 768 bp, Escherichia coli
ttgcaacagtgccctgatttatatgggtataaatgggctcgcgataatgtcgggcaatcaggtgcgacaatctatcgattgtatgggaagcccgatgcgccagagttgtttctgaaacatggcaaaggtagcgttgccaatgatgttacagatgagatggtcagactaaactggctgacggaatttatgcctcttccgaccatcaagcattttatccgtactcctgatgatgcatggttactcaccactgcgatccccgggaaaacagcattccaggtattagaagaatatcctgattcaggtgaaaatattgttgatgcgctggcagtgttcctgcgccggttgcattcgattcctgtttgtaattgtccttttaacagcgatcgcgtatttcgtctcgctcaggcgcaatcacgaatgaataacggtttggttgatgcgagtgattttgatgacgagcgtaatggctggcctgttgaacaagtctggaaagaaatgcataagcttttgccattctcaccggattcagtcgtcactcatggtgatttctcacttgataaccttatttttgacgaggggaaattaataggttgtattgatgttggacgagtcggaatcgcagaccgataccaggatcttgccatcctatggaactgcctcggtgagttttctccttcattacagaaacggctttttcaaaaatatggtattgataatcctgatatgaataaattgcagtttcatttgatgctcgatgagtttttctaa

SEQ ID NO: 8688 - DNA, 705 bp, Escherichia coli; identical to SEQ ID NO: 8686

SEQ ID NO: 8689 - DNA, 789 bp, Escherichia coli
atgacaaatctacaactggaagaaagatttagggcgcttgagaaagattacgatgcgctcatttccacaaaatatactgcgcagaacgttctcactcacactatggaaacctatgttgattctggtaaatataaaaactggatcgccagagtgaaaaagttaatagaggacagctacggaaaagagtctgattattacaatgacttcaatactgtaaacagcaggtggtcttctaattacaatacactgatcaaaagttataaaccgttgtttgatgcggcgagagatgatcttgcgcactctgctgtcagtactaatactcctcaagaaggttcgccgctgagcctcgtacttaatattcttaacaggtttccgacctttgttcgccagttaaagaggcggtacaacggccgtgcgccgcttgaagttaatgatgagtatgacgtacaggatttgatttatgcactgctgacgcttcattttaatgatattagggcggaagagtatacccccagctttgcgggcgcggcctcaagacaggactttcttttgaaaaaagagaaaattgtgatagaggtgaagaaaacccgtgaatctctgggagcgggtaaagttggtggagagttgcttattgatatggcgcgctaccgcgctcaccaagactgcgatacgttgatcttgtttgtatatgacccggattgctacataaataatcctttgggcgtgaaaaccgatctggaatctaaagacgcggaaggaaaagtgaaggttgttattgcgcagttctga

SEQ ID NO: 8690 - DNA, 135 bp, Escherichia coli
atgcatcaggtcgaaggcgtcattaatttcatccaggctcatggtatgcgtgacaaacggttccagatcgatatcacctttcatcgcatcttcatgatgcgccgcgcgataaatgcactctatcttgtgcgataa

SEQ ID NO: 8691 - DNA, 834 bp, Escherichia coli
atggaactcattgaaaaacatgccagctttggcggctggcaaaatgtgtatcggcattattcccaatcactgaaatgtgaaatgaatgtcggcgtctatctcccaccaaaagccgagaatgaaaaattgccggtgttgtactggctttcaggcctgacctgcaacgagcagaatttcattactaaatcggggatgcagcgttacgcggctgagcacaacattattgttgttgcgccggacaccagtccgcgaggcagtcatgtcgcagatgctgaccgttacgatctcgggcaaggtgccgggttttacctgaacgcgacgcaagcgccgtggaatgaacattacaaaatgtatgactatatccgcaacgagctgccgaatttagtgatgcatcattttccagcaacggccagaaagtctatctcaggtcattctatgggcgggctgggcgcgctggtgctggcgttacgtaacccagatgaatatgtcagcgtctcggcgttttcgcccattgtctccccatcgcaagtaccgtggggacagcaagcctttgccgcatatcttggtgaaaataaagatgcctggttggattacgacccggtgagtcttatttcacaaggtcaacgcgttgcggaaatcatggttgatcagggattgagtgatgatttttacgcagaacagctgcggactccaaatcttgaaaagatctgccaggagatgaatatcaagacgttaatccgttatcacgagggttatgatcacagctattattttgtctccagttttattggcgagcatattgcgtaccacgccaataaactgaatatgcgttga

SEQ ID NO: 8692 - DNA, 3075 bp, Escherichia coli
atgactatgattacggattctctggccgtcgtattacaacgtcgtgactgggaaaaccctggcgttacccaacttaatcgccttgcggcacatccccctttcgccagctggcgtaatagcgaagaggcccgcaccgatcgcccttcccaacagttgcgcagcctgaatggcgaatggcgctttgcctggtttccggcaccagaagcggtgccggaaagctggctggagtgcgatcttcctgacgccgatactgtcgtcgtcccctcaaactggcagatgcacggttacgacgcgcccatctacaccaacgtgacctatcccattacggtcaatccgccgtttgttcccgcggagaatccgacaggttgttactcgctcacatttaatattgatgaaagctggctacaggaaggccagacgcgaattatttttgatggcgttaactcggcgtttcatctgtggtgcaacgggcgctgggtcggttacggccaggacagccgtttgccgtctgaatttgacctgagcgcatttttacacgccggagaaaaccgcctcgcggtgatggtgctgcgctggagtgacggcagttatctggaagatcaggatatgtggcggatgagcggcattttccgtgacgtctcgttgctgcataaaccgaccacgcaaatcagcgatttccaagttaccactcgctttaatgatgatttcagccgcgcggtactggaggcagaagttcagatgtacggcgagctgcgcgatgaactgcgggtgacggtttctttgtggcagggtgaaacgcaggtcgccagcggcaccgcgcctttcggcggtgaaattatcgatgagcgtggcggttatgccgatcgcgtcacgctacgcctgaacgttgaaaatccggaactgtggagcgccgaaatcccgaatctctatcgtgcggtggttgaactgcacaccgccgacggcacgctgattgaagcagaagcctgcgatgtcggtttccgcgaggtgcggattgaaaatggtctgctgctgctgaacggcaagccgttgctgattcgcggcgttaaccgtcacgagcatcatcctctgcatggtcaggtcatggatgagcagacgatggtgcaggatatcctgctgatgaagcagaacaactttaacgccgtgcgctgttcgcattatccgaaccatccgctgtggtacacgctgtgcgaccgctacggcctgtatgtggtggatgaagccaatattgaaacccacggcatggtgccaatgaatcgtctgaccgatgatccgcgctggctacccgcgatgagcgaacgcgtaacgcggatggtgcagcgcgatcgtaatcacccgagtgtgatcatctggtcgctggggaatgaatcaggccacggcgctaatcacgacgcgctgtatcgctggatcaaatctgtcgatccttcccgcccggtacagtatgaaggcggcggagccgacaccacggccaccgatattatttgcccgatgtacgcgcgcgtggatgaagaccagcccttcccggcggtgccgaaatggtccatcaaaaaatggctttcgctgcctggagaaatgcgcccgctgatcctttgcgaatatgcccacgcgatgggtaacagtcttggcggcttcgctaaatactggcaggcgtttcgtcagtacccccgtttacagggcggcttcgtctgggactgggtggatcagtcgctgattaaatatgatgaaaacggcaacccgtggtcggcttacggcggtgattttggcgatacgccgaacgatcgccagttctgcatgaacggtctggtctttgccgaccgcacgccgcatccggcgctgacggaagcaaaacaccagcagcagtttttccagttccgtttatccgggcgaaccatcgaagtgaccagcgaatacctgttccgtcatagcgataacgagttcctgcactggatggtggcgctggatggcaagccgctggcaagcggtgaagtgcctctggatgttggcccgcaaggtaagcagttgattgaactgcctgaactgccgcagccggagagcgccggacaactctggctaacggtacgcgtagtgcaaccaaacgcgaccgcatggtcagaagccggacacatcagcgcctggcagcaatggcgtctggcggaaaacctcagcgtgacactcccctccgcgtcccacgccatccctcaactgaccaccagcggaacggatttttgcatcgagctgggtaataagcgttggcaatttaaccgccagtcaggctttctttcacagatgtggattggcgatgaaaaacaactgctgaccccgctgcgcgatcagttcacccgtgcgccgctggataacgacattggcgtaagtgaagcgacccgcattgaccctaacgcctgggtcgaacgctggaaggcggcgggccattaccaggccgaagcggcgttgttgcagtgcacggcagatacacttgccgacgcggtgctgattacgaccgcccacgcgtggcagcatcaggggaaaaccttatttatcagccggaaaacctaccggattgatgggcacggtgagatggtcatcaatgtggatgttgcggtggcaagcgatacaccgcatccggcgcggattggcctgacctgccagctggcgcaggtctcagagcgggtaaactggctcggcctggggccgcaagaaaactatcccgaccgccttactgcagcctgttttgaccgctgggatctgccattgtcagacatgtataccccgtacgtcttcccgagcgaaaacggtctgcgctgcgggacgcgcgaattgaattatggcccacaccagtggcgcggcgacttccagttcaacatcagccgctacagccaacaacaactgatggaaaccagccatcgccatctgctgcacgcggaagaaggcacatggctgaatatcgacggtttccatatggggattggtggcgacgactcctggagcccgtcagtatcggcggaattccagctgagcgccggtcgctaccattaccagttggtctggtgtcaaaaataa

SEQ ID NO: 8693 - DNA, 1050 bp, Escherichia coli
atgaagatcaaagctgttggtgcatattccgctaaacaaccgcttgaaccgatggatatcacccggcgtgaaccgggaccgcatgatgtcaaaattgaaatcgcttactgtggcgtctgccattccgatatccaccaggtccgttccgagtgggcggggacggtttatccctgcgtgccgggccatgaaattgtagggcgcgtggtagccgttggtgatcaggtagaaaaatatgcgccgggcgatctggttggtgtcggctgcattgtcgacagttgtaaacattgcgaagagtgtgaagatgggctggaaaactactgtgatcacatgaccggaacctataactcgccgacaccggatgaaccgggccatactctgggcggctactcacaacagatcgtcgttcatgagcgatatgttctgcgtattcgtcacccgcaagagcagctggcggcggtggctcctttattgtgtgcaggaatcaccacgtactcgccgctacgccactggctggccgggccgggtaaaaaagtgggcgtggtcggcatcggcggtctgggacatatggggattaaactggcccacgcgatgggggcgcatgtggtggcatttaccacttctgagtcaaaacgcgaagcggcaaaagccctgggggccgatgaagttgttaactcacgcaatgccgatgagatggtggctcatgtgaagagtttcgatttcattttgaatacagtagctgcgccacataatctcgacgattttaccaccttgctgaagcgcgatggcaccataacgctggttggtgcgcctgcgacaccgcataaatcgccggaagttttcaacctgatcatgaaacgccgcgcgatagctggttctatgattggcggcattccagaaactcaggagatgctcgatttttgcgccgaacatggcatcgtggctgatatagagatgattcgggccgatcaaattaatgaagcctatgagcgaatgctgcgtggtgatgtgaaatatcgttttgttatcgataatcgcacactaacagactga

SEQ ID NO: 8694 - DNA, 417 bp, Escherichia coli
atgatgtttgccttatgtgtgatagattatggtgcagattacctcaccagtcaacttaaagagtgcagaaaaactcacatgatcgggttacgtattaaagaagaaagagagcgtctatctcttacacagcaagggttggctgatgctataggtgtggcaaagagaactttcattgattgggaaaaagatcgcacttctcctactgcagtgcagttatctgcactatcagaaatcggtgtagatattttgtatgtagttactggggtgcggagtcagcctgttgttgcaccttatgtgtcacaagaaaagaaagagttaatggatgcattcgacgaaatgagccccgaacaacggagggcaattcttgaggtcggcaaagtcttcattcaacccaaaccaagcaaactcgcaggctga

SEQ ID NO: 8695 - DNA, 654 bp, Escherichia coli
gtgtgggtacgtaagttacggtcgctgccgtggcgggtcattatgctggccattctcctgaacaccttcctgctggcgatctggtggctgggatacagcacaggccacgaccgggcctccgctgacggtcaggcggcgctcagccgcctgcaggcggattttgacggataccgggcagaacaggcccggcgtgaggtggcggcgttgcgcgcatggtctgagcgttatcaggagcaggtagccgccgggcaacgggctgaagctggttatcttgagcagattgctcaactggaggaccagaacaaacaactacaggggcaaattaacgatgtcacacagcgctggattgatgaaaaaggtaagagccatcccattgagtgcgtgtttactcgcggtttcgtgcgccagtacaacgccgcactcggatacgacaacgcatccgtcgacaccggtcattcagactcagttgccgccgctggcaccggcactggcgcagcgaccgggcaacctgaaaccgctgacgcccggttacgcaattcgggtgtctcccagcttgacgtccttgccaacatcatcgacaacgcagggcaatgtcgtcgctggcgaaaccagataaacgcgctactggatgaacgggaaggattacagaaatga

SEQ ID NO: 8696 - DNA, 543 bp, Escherichia coli
atgggacgtcgcagcagcattgattctctgccgaaggaggtccgtcgctggcttgagcgggcactgacggagaataatttcaccggctatgcagagcttgaaagtctgttgaaggaaaaggggtacagcatcacccgctcttccctgcagcggtttggctacaaaatggagcagcaactggcccgggtgcgggcggcaaccgaggcagcgcgtctgcttgcccgggaggccggagacgatcctgatgaccgttcagccgggctgataaccctcgtccagaccgaaatgacggatatcctgatgcgcctgcaggagtcgcgggaaaacgacgatcccttcgcccgggcaaaactgctggcaacggcttcaaaaaatatcgccacactgacccgcgcctcggtcaacctcaagcgctatcaggcagaagtcagagagagggttgaacgtgctgccgctgccgccgagaaaattgcccgtaagggcgggctctctgcggaagccgtacaggcactgcgccgggaaattctgggggtggtatcatga

SEQ ID NO: 8697 - DNA, 138 bp, Escherichia coli
atggtgattgccatgcagtacgcgaataaatcagtggataaatgcttattacaacgtttatcgacctcatacaaacaatggtggtttatcgccttgccgcatgaagaaaaatggaaacaggttattccggtgtcctga

SEQ ID NO: 8698 - DNA, 1206 bp, Escherichia coli
atgaaacgagattacggtagtgtcggtaccatagcgttcagagcaagtgctttacttcaggccatgagtcgggatattgaggagcaaagaaaagaattcaatctgacagagtatcatcaaacatatactcgtaatgcggtcgcaaaattgccgaagctgagccgacgcatcgtagaactggccgttaaagaaatggaagaaagtggctatgaatttaataaaaagcgggtaggcaacgtcgagcaatatgcattaacaattcagaacgttattgatatttacgctcaccgacagataccaaaatatcgcgatgttcataaagaaccttacgtaatttttgtcgtcaacttgaaaggtggggtttcaaaaaccgtcagcacagtaacgctggcgcatgcactacgagtacatccggatttgctgcgtcatgaccttcgtatccttgtgatcgaccttgacccgcaggcgtccagcactatgtttttggaccatacccatagtattggtactgtccttgaaactgccgcccaggcaatgctaaataatctcgatgctgaaacactgcgagaagcggttatccgacccactatgattcctggcgttgatgtcatccctgcttctattgatgacggcttcgtagcaagccaatgggagtctttggttgctgaacaccttcctggttttaagccttctgaggtactcaggaaaaccatcattgaccgtatcgctgatgattatgattttgtctttattgatactggccctcatcttgatccatttcttctcaatggcctggctgcgagtgatttacttctcacccctactcccccggcgcaagttgatttccattcaactctcaaatatttgactcgtttacctgaaatgctagaacgtttggaagaagaaggcgttgagccccgcctgagtgcgagcatagggtttatgtccaaaatgaccagtaagcgcgatcacgaaacttcccatagcctggctcgtgaagtgtatgcgagtaatattcttgactcatcgcttccgagattggacgggttcgaacgatgtggtgaatcttttgacactatcatcagtgctaaccctgtttcgtatccaggaagtgcagaggcattgaaaaaagctcgtaccgaagcggaacgatttactaaagccgtttttgaccgcattgaatacattcggggagcatccaaatga

SEQ ID NO: 8699 - DNA, 963 bp, Escherichia coli
atgaaaaaggttttagctcgagggcgagttctcggcaatagcaattcagagttcgctcgcatgcttgaaggtgacggagagatcaaaacgtttactcttaagtctgggaaacaagcaaaattcattaaaacggttgtattaagcggagatatagaatctaaaacgttcgttgatgcatctgttaatggacgtgatcagactatgctttcgcgtgagtcagttagtgacataactcgcacgattaaacttcagcaattttttccggctattggccgggaagtagatggacgaattgaagtattagacggtacgcgtcgtcgcgctgcctgtatctataacaacgtaaaattcgaaatactggttacaaaagacagtattgatattgccgacgcgagacaacttgcaaaagatatacagacagccagagagcatagcctccgagaactaggaaaacgccttgaagttacttatggggtaagtatgacaaaagaagagatcgctcaggctgaaagcatctctccggcaaaagtaacacgcgcatttcaggcggcatcagtaccggatgaaatgatctctgtatttccggtaatcaatgatatttcgctgtcggactatcaatttttgttgaaactgtctgaaaaggtaaccaacaaaaaaatgtcagtggaagagtttatggatagagttcgccaaaaactgatggctttacctgactatccaacaattgagaaaagcaaaattctggcggtcttcaggtctgaaggaaaattgcttacagaccggcctgtaaaaacagttgaaactgagaagttgaaagagttttctgatcgtaaccaatttgccagaaagaagactgaccccagaaagcgtcttgttgtttatgagttctcccgcatatctaatgaggtgcagttagaaatcgatgaggctataaaaaacattctaagaaaactgcctgaatag

SEQ ID NO: 8700 - DNA, 141 bp, Escherichia coli
atgcagacccgggataaccttgagcgcatggtggttatcaaggcatttatcgcggtacgggggctgggcctgcggcagggaggcgtcagtgaagaaacacaaaatgacagctatgagaaaatactgacgccgacagagtga

SEQ ID NO: 8701 - DNA, 360 bp, Escherichia coli
atgatgctgcatgaactctggttacagagcggtattggccagcgtcgctgggaaggattaccggatgatgtcagggaaaccatcaccgtgcatttcaccgccaaaagaggtgacaggtgtgacttctggagtaacgaggatgtttcagtgtggaggaaccgtctgtgtgacaacgtgctgccagaaaaaaacatgccgtttgagctgctgacggttctgccctcccgcctggatgttgaagtgaatggctttaacggtggtgttctgaaagatgttccctctgcatataactggtatacggaacagtatggcatgaagtggcctgtggggcgaactggaatggtcttccccgacagatga

SEQ ID NO: 8702 - DNA, 1017 bp, Escherichia coli
atgactgttgttactgtcggtattgatttagctaaaaatgtgttcgctgtgcatggcgttaatgctgcaggaaaagctgttttagttaagcctcttgtgcgtcgggctaaattgcttgaattgattgcaacacttccagcatgtctgattggaattgaagcatgtacaggtgcacattactgggcaagagagttccagaaaatggggcatacagttcgaattatggcgccgcaactggtttctccataccgtatgggtggccgtcatgggaaaaatgatgctgcagatgccgctgccatttgtgaagctgttacccgtcctaatatgcggtttgttcccataaaatcagttgagcagcaagggcagttatttgtacacagagctcatcagggatatgtcagtgagagaacagcattgattaatcgcatccggggattgctcagtgagttaggtattgttctcccgcaggcgtttaaagcgtttttatccggggtggctcaggtccttgaggatttgcccggttactgtaatcaggttattggtgatcttcttaatgagctttatcacatagaagaaaagattaaaaacagtgaaaaactcattcagcaacttgccagagataactcagcagcacaactactaatgcaattcagggggataggcccgatgactgcaacagcaatcgttgccagcataggtaatggtcatgatttcaagaatggacgtcagtttagtgcctggctggggctaacaccaagacaacaaagttccggggggaaagcacggttagggagaataactaaagccggcgacagctatctcagaacacttcttgttttgggggcgagatctgtattgttgggagcagctaaaaatgatgatccggtcagtcgatgggccctgcagttaaaagaaaggcgaggatatggacgagcgcttgttgcgatagcagcaaaaaatgcacgtatgtgctgggcaatgttgcacctgagagatgaattcagatttcctgcctag

SEQ ID NO: 8703 - DNA, 201 bp, Escherichia coli
atgatggcggggaaaatccccgcctttttcctgccggtccccggacagagcacaaaggaagtcgccgccggctccgctttacccggccatgcggggcatggccttgtgggggttcagttatgtggcctcagcgtcgtgtgcgggctgtgccgtgcctccatcgtagccgggcttctgcgggcgggttgcaaggtaaggtga

SEQ ID NO: 8704 - DNA, 492 bp, Escherichia coli
atgcaatgcgatttacgcggcactggactgattaacggacggggcggcgatgccgcccctgtaaaggagacgagaacatgtactgttaaagaaattatccgcgaagtgctggatacagacgtgccgaacagtgaatgcgtttttgccgtggtgctgacccgtggggatgtgcgtcacatagcccaggactggagtctgacagacgatgagctggaaaccgtcatgcagcggctggacgatgcctttgagcatggtgctgatgtcagcattgttcacgacgttgttcgtgaactgatggaggaaaagcgcgtaaaccgtcttgtaacagtccctgcggtgctgctggaaaaagtgatggtgatggctggtagtgaaatttatcgcctccatgctgtagggagcgagaacgggggcgacggtgacgcatttgtcagggaagaacgtgagattatgcgggtaatgcgtcaggcgctggacggggagaatgggtaa

SEQ ID NO: 8705 - DNA, 579 bp, Escherichia coli
gtggtcactacatccttcagggcagcaggcacaggtgatacagggcaggcggtggaggccgcctgtcagcccgcgcgaaaacccctggcaggctggcgcctgccggaagggaagcgggccacgctggcgcgtcgcccgttacccttcccgtttgtgatgtgtccggaatgttttttcctgatgttatgtttctgtggttactgttcttcttcttcctcttctttccgttcctctcctgtttatgccttttccgggcgtccccctggcggggcgggctgtcgtgaacggagccagcggagctgtctccgccctggcgggcttccatccctgacgcaaaaccccgggtttgcagcgaccggaacggtcgcgccacccctgtcgcgccgtggcctgcgctcccggcatcccggcaaaaagacgccgggatgtaaggagcaacgccgtttcgcaaaccgcgcttcacgtcgttgcagcgggtccctgctcattgcctgccgggtgccacacacccgtatgagtccctgtcgccgggggcatagacagccacaacctgccgcactgactgtccagggtaaatga

SEQ ID NO: 8706 - DNA, 564 bp, Escherichia coli
atgcacagtcagttaaaagaacgtatccggctgatgcgcgcaaggctggataacgccgcgccggttgctgaaatccgggctgaatctcagctttttgtgactcctgccccggtctgtgatcgcctggtgacgctggcggagatcagcaaccgtgatcacattctggaaccctctgccggcaccggggccatactgcgggcgattcgtcatgtcgcgccgggggccatgtgtgatgcggtggagattaacagcgggctggtccggtatctgcgggataattttaacggtgtcagggttcagtgtggcgacttcatggaatggcagccggtgcagtattacagccggattatcatgaatccgccgttcagtcacgggcaggatatccggcatatcctgcgggctttttccctgttgcgtccgggtggtgtgctggttgccgtctgtctgaacgggccgcgccagcaggagaagctgttaccgttttctgatgtccgcgaggtgctgccgtgcggcacatttgcttatacccgtgttccgacgatgattattcgtctgcgtgcctga

SEQ ID NO: 8707 - DNA, 822 bp, Escherichia coli
atgcgattagcttcccgttttggtcgatataattctattcgccgtgagcgcccgttaacggatgacgaattaatgcagtttgttccatctgtcttttctggtgataaacatgaatcccggagtgagcgttatacatatatcccaaccatcaatatcatcaataagttacgtgatgaaggtttccagccattctttgcctgtcagagtcgggttcgtgatttgggacgccgcgaatacagtaaacatatgttacgtcttcgcagggaagggcatattaacgggaaagaagttcctgaaattatcctgcttaattcacatgatggttcatccagttatcagatgatcccaggaatttttcgttttgtctgcacaaatggcctggtgtgtgggaataattttggcgaaatccgcgttccacataaaggtgatattgtcgggcaggttattgagggagcgtatgaagtgctcggtgtctttgataaagtcactgaaaatatggagacaatgaaagagatacatcttaacagtgacgaacaacatttatttggcagagctgcattgatggccaggtacgaagatgaaaataaaacgccagtgacgccagaacaaataattactccccgccgttgggaggataaacagaacgatctctggacaacctggcagcgggttcaggagaatatgataaaaggtggattatcggggcgaagtgcctccggtaaaaataccagaacaagagccattacaggcattgacggtgatatccgaatcaacaaagcattatggatgattgccgaacagttcagggagtggaagtcatga

SEQ ID NO: 8708 - DNA, 261 bp, Escherichia coli
atggtggatgtcaataattttgtgaaattactatgttatattttcgaaaaaggtaagttatatagagaaatatgtttggaaattcgtagtgagactctggcgttcctgcttttttctttgtttacggggggggggcgaagttgcattctgcaacctgataataaatcccttttcagagagggttgcatagtactggagttgacccaatcaaccttcacaggcatcgataaaaatgaacgctactataaaaaacagctctga

SEQ ID NO: 8709 - DNA, 126 bp, Escherichia coli
atgaaacgtgttgcaataccagcgccggcattgcggaaatcagccctgtccccgatgctggcgacactcccgctcatctttctgctgactcctctggtctgccaactgtttgtcatcatttcctga

SEQ ID NO: 8710 - DNA, 306 bp, Escherichia coli
gtgaggtgggaccggtgggggtttcatcttatcaccgggcaacaggccgatcgacttgccgacctggaaagaatgctgcatctgttcagcggcaaaccgatccccgacaaccgggaaaacatcactattcgtctggatgatcacattcagtctgttcagggtaaagagagctatgaagatgagatgttcagcatcagatactttaagaagggctccgcgcacatcacgttcagaaaaccggaactggttgatcggctaaatgacatcattgcgaagcattatccggggcaactatcagccatctga

SEQ ID NO: 8711 - DNA, 207 bp, Escherichia coli
atggataagttaacaacaggtatcgcctatggcacatcggctggtaatgctggtttctgggcattgcagttactcgataaagtaactccgtcacagtgggctgcaatcggtgtgctgggtagtctggtttttggcctgctgacgtatctgacaaacctttatttcaagattaaagaagacaggcgtaaggttgcgagaagagagtaa

SEQ ID NO: 8712 - DNA, 552 bp, Escherichia coli
atgacacaagactatgaactggttgtgaaaggagtccgcaattttgagaataaagtggcggtaactgtagccttacgggacaaaaaacgctttgacggtgaaatttttgacctggacatctcgctggaccgtgttgaaggtgccgcgctggagttttatgaggcagcagccagaatgagaatcagacaggtattcctggatgttgctgccgggttatgtgtaggggatgagcagtcgccggaaaagcgccccataattttagaggcgcagaatgtgtggataacctacaaaggaaagctaccgggaagaattactggttctctgaagacgccaccgacggcattgcggtcagaaaaagatgatattgaatcgcccattgaaaaactggagggcagcgtcgctgatctgaataaaaaattgtcggtgctgatcccttctgaagatgaaaaaaaacgccgcgatgagcagtttgcggcgttttacgattattgcattgaagttactcgcaggaattttgtgaagatttttgaggagggtaaatctcttcagtaa

SEQ ID NO: 8713 - DNA, 261 bp, Escherichia coli
atggattacacaaatctaccaaaacaaacttttgctgatttaatcgcactcaggcaagcagtcgtagctctaatcaacttgttgccggagaaggaaaaggaattagttaaagcgcttcttaacagaactgccgccgatttttcatcatatccactgacagatgaccttgcggaccttcctgaattaattgcagcgtccgccattaagcttactgaagagatttaccctcctcaaaaatcttcacaaaattcctgcgagtaa

SEQ ID NO: 8714 - DNA, 534 bp, Escherichia coli
atgaacgtaaaaatcagatacagcctgtcggctgctgttctggcactgattgccgccagtgctcctgcccctgacattctcgatcagtttctggatgaaaaagaggggaatcacaccactgcataccgcgatggctccggcatatggaccatctgtcggggagcaacgatggtggacggtaaacctgttattccgggaatgaaactgtcgaaggaaaaatgcgcccaggttaacgccattgagcgggataaggcgctggcatgggtggagcgcaatataaaagttccactgaccgagccacagaaagccggtatcgcgtcattctgtccctataacattggccctggtaagtgttttccgtcgacgttttataagcggcttaatgccggtgatcgtaaaggcgcatgcgaggcgattcgctggtggataaaggacggtggacgtgattgccgcattcgttcaaataattgttacggtcaggttattcgtcgtgaccaggagagtgcattaacctgctgggggatagaacattga

SEQ ID NO: 8715 - DNA, 207 bp, Escherichia coli
atgcataaagatcaatacactgatgccccctcccaggagcaggttcgtgtaaaaactatgcttaatagcaccatttcgatgggttacccggatgttgtaattgcatgtatagaacatcaagtatctctggaagcattcagggcaattgaggccgcgttagtaaagcacgataagaatacgaaggattattccctggtggttgactga

SEQ ID NO: 8716 - DNA, 567 bp, Escherichia coli; identical to SEQ ID NO: 4907

SEQ ID NO: 8717 - DNA, 648 bp, Escherichia coli
atgaagtatgtctttattgaaaaacatcaggctgagttcagcatcaaagcaatgtgccgcgtgctccgggtggcccgcagcggctggtatacgtggtgtcagcggcggacaaggataagcacgcgtcagcagttccgccaacactgcgacagcgttgtcctcgcggcttttacccggtcaaaacagcgttacggtgccccacgcctgacggatgaactgcgtgctcagggttacccctttaacgtaaaaaccgtggcggcaagcctgcgccgtcagggactgagggcaaaggcctcccggaagttcagcccggtcagctaccgcgcacacggcctgcctgtgtcagaaaatctgttggagcaggatttttacgccagtggcccgaaccagaagtgggcaggagacatcacgtacttacgtacagatgaaggctggctgtatctggcagtggtcattgacctgtggtcacgtgccgttattggctggtcaatgtcgccacgcatgacggcgcaactggcctgcgatgccctgcagatggcgctgtggcggcgtaagaggccccggaacgttatcgttcacacggaccgtggaggccagtactgttcagcagattatcagccgggaaataatgcgggcaacggtgtttaa

SEQ ID NO: 8718 - DNA, 300 bp, Escherichia coli
atgacaaaaacagtatcaaccagtaaaaaaccccgtaaacagcattcgcctgaatttcgcagtgaagccctgaagcttgctgaacgcatcggtgttactgccgcagccagtgaactcagcctgtatgaatcacagctctacaactggcgcagtaaacagcaaaatcagcagacgtcttctgaacgtgaactggagatgtctaccgagattgcacgtctcaaacgccagctggcagaacgggatgaagagctggctatcctccaaaaggccgcgacatacttcgcgaagcgcctgaaatga

SEQ ID NO: 8719 - DNA, 405 bp, Escherichia coli
atgaaatcattaaccgcagtgcgtaaaaaaagccctaattatcccgttgagttcaaaatcaaaatggttgaactatcgcatcgaccagagatctccgtagcgcaactcgctcgtgagcatgggatcaacgataatttgctgttcaagtggcgccagtactggcgcgaaggaaaactacgtcctccttcaacaacagaaaacaacgtgcctgagctgctcccgataacacttgatgccgaagatgttgtccctacaacctccccccggtcacaacctgtagctgctgcgacacctgaatcactcaatatcagctgtgaagtgacgttccggcacggatcactccgtctgaatggtgccatcagcgaaaatatcctgaacctgctgatacgggagctcaaacgttga

SEQ ID NO: 8720 - DNA, 348 bp, Escherichia coli; identical to SEQ ID NO: 8336

SEQ ID NO: 8721 - DNA, 1539 bp, Escherichia coli
atgagcagctcacttcctgacgatatcaatgcactgaaacgtctccttgccgaacaggaggcgctgaaccgtgccctgctggaaaagctgaacgagcgtgaacgcgaaatagaccatctgcaggcacagctggataagctgcgccggatgaacttcggcagccgctccgaaaaagtctcccgtcgtatcgcacagatggaagctgacctgaaggcacttcagaaagaaagtgatacccttaccggtcgggttgacgacccggccgtgcagcgcccgctgcgtcaaacccgcacccgcaaaccgttccccgaattactcccccgcgatgaaaaacggctgctgccggcagcgtcatgctgcccggaatgtggaggctcactgagctatctgggtgaggatgccgccgaacagctggagttgatgcgcagcgccttccgggttatccggactgtacgtgaaaagcatgcctgtactcagtgcgatgccatcgtgcaggcccccgcgccttcacggcccatcgagcggggtatcgcaggatcggggctgctggcccgcgtgctgatctcaaagtatgcagagcacaccccgctgtaccgccagtctgaaatgtacggccgccagggcgtggagctgagtcgttcactgctgtcggactgggtggatgcatgctgccggctactgtcaccgctggaagaagcgcttcaggactatgtgctgactgacggtaagctccatgctgatgacacgcctgtcccggtgctgttgccaggcaataagaaaacgaagaccgggcggttatggacctacgttcgtgacgaccgtaacgccgggtcaacgctggcgccggcggtgtggttcgcttacagcccggacagaaaaggcatccatccgcagacccatcttgcggggttcagtggtgtactgcaggcggatgcatacgccgggttcaacgagctgtaccgggatggccggataacggaagccgcctgttgggctcacgcccgccgtaaaatccacgatgtgcacgttcgcaccccgtcagccctgacggaggaagcgctgaaacggatcggcgaactgtacgccatcgaggcagagataaggggaatgacggcggagcagcgccttgccgaacgtcagttgaaaacgaaaccgctgctgaaatccctggaaagctggctgcgtgaaaagatgaaaaccctgtcgcgacactcagaactggcgaaagcgttcgcatacgccctgaaccagtggccggcgctgacgtactatgcagatgatggctgggctgaggcggacaataacatcgctgaaaatgcgttgcggatggtcagtctgggccgcaaaaactacctgttcttcggttcggatcatggaggagagcggggagcgctgctgtacagcctgatcgggacgtgcaaactgaacggagtggagccagaaagctacctccgctatgtccttgacgtcatagccgactggccgataaaccgggtctgtgaactgctcccctggcgcgtagcactgccgactgaataa

SEQ ID NO: 8722 - DNA, 483 bp, Escherichia coli
gtgagagacaaaaccagggaggccatgcggctttttttaggcggcaggtgctacacggctgaaaaacttgaaaaggattatctggctgaagtggctaattacagtaacgaccgatgggaagcaccgcaacgtgcctcacgcctggctgccagcgtaaagcgttacaagacgtcagaaatgctgcgctttatttttgctaccattgcctacgatcccgatccagatttaaccccgctgactgtgagacgtttgtgcaaggcattgttcggcagaaccggaagccagtggctggttgttgaagtttttggggagaaggggcgtcagcaccgcagcgcggacagcaatccggagatggtggaaaaaatggctgccagatatcgtcatgccgctgaactacactggtccgcaacgctggcagaaattgaacgggtaaagcggctttatcagatgaaaattaagaaatccaaaaaagaagtgggttga

SEQ ID NO: 8723 - DNA, 261 bp, Escherichia coli
atggctgaaagcgggtatggtctggcagggctggggatgggtaaggtgaaatctatcaatcagtaccggcttacgccgggcttcgtcggttttactccggtatcacatgtaaccacagcgtgccgccttacatgccgctggcgcggcataagcatatgttggtggctgtgtctgaaaggttatatactctgcataaaacctgacaacacgcagattgccaggcaaatgagcattatgcatccggttatcgcctgcctgtga

SEQ ID NO: 8724 - DNA, 264 bp, Escherichia coli
atgaatagcaccacacattacgaaaacgccaatttcctgcgcgagctggccgaaagcctgcctcgtatttttccagaaggcagtacagacaagtctgcactattgcaacgcctcgctaatgaagaactggcacgggcggaatacgacgaacagatccgagcgaaagttgccgctgctcgcgccgataagcggccgggaatgagttccgtgcaactgcgccagcaactacagggacgttatcaggaactgcgcaatgagttatga

SEQ ID NO: 8725 - DNA, 1233 bp, Escherichia coli
atgcctcttttctccctgcgccctgcggcaaccctctggcctccggtgttactgggaagccagttcgtttttaatattggcttttacgcggtcgttcctttcctcgccctcttcctgcgcgacgacatgctgctctcaggcggacttatcggcctgatcctcgggctgcgtaccttctcccaacaggggatgtttatcctcggcgggacgctggccgaccgctatggcgctaaggcgatcattctcgccggctgcgtcgttcgcgtcgccggttttctcctgctggcgtgcggggcgtcgctgtggcccattatccttggcgcctgcctgaccggcgtcggcggcgccctgttctccccgtcgatagaggccctgctggcgcgggccggtacccacagccaggccaacgggaaacgcagccgcgccgagtggtttgcgctgtttgcggtatgcggtgaactgggagcggtgatcggcccggtggccggaggcgtgctgagcgggatcggctttcggcatatcgccctcgccggcgcgggaatatttcttctggcgctggcggtgctctttttcggtctgcccgccgacgggcacacgacaacaacgcgcagacgagtcccatggtggacgcctttgcgccagccgcgctttgtcgcgtttattctcgcctacagctcatggctgttgagctacaaccaactgtacctcgccctgccggtggagatccaacgttccggcggccgcgagcaggatctggcgccgctctttatgctggcctcgctgttgattatcaccctccagctccctctcgcccgcttcgcccggcgaatgggcgccgtgcgcatcctgccggtgggctttctgctgctgtcggcttcctttgccagcgtggcgttattcgccgccgccccacccgccgaaagttggctgcggttaatgccggcggctggttttgtcacgctgctcaccctcggccagatgctgttagtgcccgcagccaaggatctgatcccgctgttcgccgaggagtcgacgctgggtgcccactacggagcgctcgccactgcaggagggtgcgcggtgttagccgggaatttactgctcggtcatttacttgaccaggcgctcattccgtcgccgcaggcggtttatccctggcttctgctggcgctgtttccgctgtgcagcgccgtcgccctgcgggcgatctgtcgcccgctggcggcaacatga

SEQ ID NO: 8726 - DNA, 762 bp, Escherichia coli
atgagtatttgcgctgaaaatatcacctggaaggcaggcaaaaaggtcatcgtcaataatgtctcgctgcgggtgccgcgcggcgaaacggtcggactgctggggcccaacggctgcggcaaatcctcgctgctgcgcgttctggcgggcctgcgccgcccggatgcaggtcgcgtcaccctcgacggccaggatatcgcccggatggcgaaaaagcagctcgcccgccgcgtggcttacgtcgagcaacacggcatgaccgaggccaatatgcgggtgcgcgacgtcgtgcgcctgggacgcattccccaccactctccgttctcaaactggagcgctcaggatgacgaagcgattgccgccgcgctgcagcgggtagcgatgctggagaaaagcgaacagggatggttaagcctctccggcggcgagcggcagcgggtgcatatcgcccgcgcgctggcgcagagcccgagcgaaatcctgctggatgagccgaccaaccatctggatatacaccatcagatgcagttaatgcagttgatcagcgagctgccggtaaccagcattgtggccattcacgatcttaaccatgccgcgatgttctgcgattcgctgatcgtgatgcagcaggggcagatcctcgccagcgggacgccggaggagattttgtccgaagcgctgctgtgggacgttttccgggtgaaaaccaaaatcgagatctccccttaccacggcaaaaagcacattcatttcatcgtttag

SEQ ID NO: 8727 - DNA, 1038 bp, Escherichia coli
atgagcgtcgccgcgattgagacgcgccgcagcatactgctcaccggctggtgtgtactggcagcgatcgtgctggcgctggtgatcgctgtgggcgtcagcgttggcgagctggccatcccgctgcagaatgtcttttatgctatcagcaacagaaccggcttaaccgctgagccgctcaaccgtatctatgagagcgttatctgggatttccgcctcagccgcgcgctggtcgccgcctgctgcggcgccggcctcgctatctgcggtgtcgtgctgcaaagcttgctgaagaatgccctcgccgaaccctacgtcctcggcgtctccgccggggcctccaccggcgcggtgtcgatcgtggtgctgggccttggcgctggcgcaatttccctctcggcaggcgcctttgccggggccttcgccgccttcgcctttgtcgccttgctgactaacggcgcgcgcggcggcaatgagcgtacgattcttgcgggcgtcgccgcctcgcagttatttaacgccatcacggcctataccatcagcacctccgccagcgcacagcaggcgcgcgatgtgatgttctggctgctgggcagcttcagcggcgtccgctggcccgaattccagttggtcatcgtggtggtgctcgcgggtctggcggtctgcctgtggtatgcccgggcgctggacgcgttcaccttcggcgacgatgccgccgcctcgctggggattgctgtgccgcgcgtgcgcctgatcctcttcaccactgcggcgctgatcaccgccaccatcgtcagcatggccggctcaatcggctttgttggcctggtggtgccgcacgtgatgcgtttcttctttggcccactgcaccgaactttgctgatcgccagcgcgctggcaggggcgatattgatggtactggcggacattgcgtcgcgcctgctgattgccccgcaaagtctgcccgttggggtagtaaccgccctggttggggtgcctttctttgccgtgattatctaccgctcaaggaataagtga

SEQ ID NO: 8728 - DNA, 999 bp, Escherichia coli
atgaagaaggtcctttgcgcgttaggcttgatgttcaccgccgtcagttccgcgctggcaacaacctaccccctgacgattgaaaactgcggctatcaggagaccttcacccggccgccggagcgcgtggtcgcgctggggcaaaatacggtcgaaattctgctgctgctcgggctgcaaaagcaggtggtcgccagcgccttctggccgaccagcgttttaccgcagctggctgagcaaaacgcgaagattaaaaccttgacggtggaaattccgagcctggaatcggtgctggcgcaaaatcctgatttcgttcccgcccagttgccgctgctgctggggccggaaagcaaagtcgccaggcgtgaagatctcgccaccgtcggcgtgaacagctacgtctcaccggggatgtgcgccaccaaaaaggccaccggcgatatgtacggcagccggcaaaagctgtgggatatgacctggctgtatcaggaaattagcgatttttcccgcattttcaacatcgaagatcgtggtcaggcgctgattgccgatttcaaaaaacgtgaagccgacctgcgccaggagtttggtaaaagcaaaaaggatctctccttcgtcttctggttctccagcgcctcaccttcggccgatgcctatgtcggcggcaaaaacagcgcctccggatttatcgccagcgtgctgggcggacataatgcgattacctccgaaaccgagtggcccacggtgagctgggagagcattattgccgccaacccggatgtgatcgtggtcgccagcctggatcgtaaccgctgggcgctggataaggccgaggagaagatcaaattcctcaaaagcgatcccgccgtcagccagctggaggcggtgaaaaaaggccatatcgtggtcatggacggtcaggcgatgaatccgaccattcgcacgctttacggcgcggagcaggtgggcgagcagctgagaaaaatggggctgaactga

SEQ ID NO: 8729 - DNA, 213 bp, Escherichia coli
atgaagtatgtcttcatcgaaaatcatcgggcagagttcagcatcaaagcgatgtgtcgtgtacttcgggttgcccgcagcggttggtatgtctggctcaggcgtcgtcaccagatgagcctgcgccaacagtttcggctcacctgcgatgccgctgtccataaggcattctttgaggcaaagcagcgatacggtgctccccgccttgcataa

SEQ ID NO: 8730 - DNA, 300 bp, Escherichia coli
atgacaaaaccagtatcaatcagcaagaagccccgtaaccaacatacgcctgaatttcgtaacgaagccctgaaactcgctgaacacatcggtgtggccgccgcagcccgtgaactcagcctgtatgaatctcagctttatgcctggcgcagtaaacagcagcaacaaatgaattcgtcagagcgcgaaagcgaactggccgctgaaaatgtccgccttaaacgacaactggcggagcaggctgaggaactggccatcctccaaaaggccgcgacatacttcgcgaagcgcctgaaatga

SEQ ID NO: 8731 - DNA, 792 bp, Escherichia coli
atggaatatacgaacaaatacaaatcacacctaaaagttagattatatgaatatacgattgtgtacacaaataaatgtacgctacatgttacatacggtaatgaacaccttacaataaaagaaggatgcattgctttttttgaaaagcatatagaaataaacatctcaataataaaaagaacgaataccgaaacgaatccatttgaggtcataagcataaataatgatcttttatctaaagtattaactataatggaccctatttattcgtttagttttggacagatgcaaagaaaaagaagattacagcagagaatattcatgatagatggggacataatttccactgagatattcaaaagtataaaatcaatgaaagtatgtaatgagaaagtatacaaactagcgtgtcttttctcgattgttgataacgagtgtgattttttttcatcaatatgtgtatcaacatccatcagtttcactgataaagtcaaaaagataattgagtgtgactttgaaaaaaagtggaagctttctgatatttctgaagaaatgaacatgtcagaggtagcagtaaggaaaaatctcgagaatgagaacattactttccaacaagttttgctagattcaaagatgaattatgcagcaaaattaatactcaacagcaagaatcacataaataatgtttctaagcttataggaatgtccagcacatcatacttcataaaattgtttaatagctattatggtgtcacaccaaagaagttttatttttatcataaatcatcttga

SEQ ID NO: 8732 - DNA, 417 bp, Escherichia coli
atgtttggtgagtatacaaatcctgttaataaggggttggaaggattgacatgggatggaaataagcagaatctgtttgcagcaaaggagatgaaagatgtcataattaccagagctaatatgataagtaatgacatgggaattgacaaaatcatcgatccggtcgccaagtctttaaaggatgtatcaggattgcattatcatacaccaacatcttcgtttttaattctttctcatgaatccccaaaaattatagaggttaataatgagggtagaattacagatagattgtatctggagtctggttggtccggtttgacagaaagtgtcccgcaggccgaagggataactctagattataatggttacttgtatatagtgagtgaaccgaatttgttctatcgttttgcgaaataa

SEQ ID NO: 8733 - DNA, 1608 bp, Escherichia coli
atgactgactttgaaaaacaaaaactgggcaaaacgctctggaacatagctgatcaactacgcggtgctatgaatgctgatgattttcgcgattatatgctagcatttttgttcctgcgatatctatcggataattacgaagcagcggctcaaaaagagctaggagtagactaccccaaacaaaaagaggggaaacgtcaaccaccattaactctgtggtatgaacaaaatgagcaggacattcctgagtttgagaagttaatgcgccgtaaagtgcattacgtaatcgaaccccagtacctttggacaagcattgccgaaatggcgcggactcaacatgtgaaactgcttaatacattacaggcaggctttaagtacattgaggaagaatctttcgccagtgtctttcgagggctgttctcagaaatcaatcttgcctcagaaaaacttggcaaaacatacggtgagagaaatgaccgcctttgcaagataatcaaagaaattgctgatgggttgaaacagttctctaccgacagtgacacattgggggatgcttacgagtatttaatcggtcagtttgcagctggctcaggtaaaaaagccggtgagttctacactcctcaacatatttcagatatcttatctgccattgttacgctggatagccaagaacctgccactgggcagcgttcacacatagacagcgtgtttgattttgcctgtggttcaggttcattgctcctaaatattcgcaagcgcatggggcagcacggtattggaaaaatatacggtcaagagaaaaatatcaccacctacaaccttgcacgtatgaatatgcttctgcatggagtgaaagattcggaatttgatatttttcacggagatacccttcttaacgattgggatatgttacgcgagaccaatccgtccagaatgcccaaattcgatgcggttgttgccaatccgccattcagctatcgctgggaaccttcagaaacattagctgatgatgtgcgctttaaaaattacggtctggcacctaaatctgctgctgacttcgctttccttttacatggattccattttttaaaagaagatggtgtaatggcaatcatcctgcctcatggtgtacttttccggagcggtactgaagcacgtatacgcacgaagctgctgaaggatgggcatattgatacgataattggtctgcctgcaaatctgttcttctctactggtattccggtatgtattctggtgcttaaaaaatgtaaaaaacctgacgacatattattcatcaatgcagcagaacactttaataagggtaaacggcagaatcagatttcttctgatcatataaaaaaaattattgatgcttacaagttccgcaaagaggaaccacgctacgcacgtcgcgtcagcatggaagagattgagaaaaatgattttaatttaaacatctcacgctatgtaagcacagctgaacctgaagaagaaatcaatcttactgcagtacatgcagagctgttttctctggataatcagataaaatcagcaactcaaaaatataacgaatttctaaaagagttaggtttagctcctttgccataa

SEQ ID NO: 8734 - DNA, 1104 bp, Escherichia coli
atgaaactaggaaaaacatttgctgacttgttctcacttagtactcacttacgcacagaactgataagcaagaaggcaatcctgctgtacgcctacaatggtacaggtaagactcgtttatcaatggccttcaaggatacaggtaatcacgatacattgtatttcaatgctttcaccgaagatctcttccactggaacaacgatctggtaggtgatgaagatcgacgcttgctcctcaacagggattcgcgattttttcaggggttatttgagctggaaatggacaaccgtatacgcccgttattgcagcgttatacagacttcgactttcgaattgatacagaagaatgggcgatacgcttctcacgaactgtagatggtcaaatcattgataacatcaaggtttcacgaggagaagaaaatatcttcatttggtgtttcttcttagctatcgtacaattagcacttgatggtgcagatgcttaccagtgggtaaaatatgtctacatcgacgatcctatatcttcattggatgagcataacgcaatcacagttggcagtcatctggcgcaactattgaacaaagcagataacccattgaaggtgatgatctcgtctcatcatccattattcttcaatgtcatgcacaatgaacttgatgctcgtaaatccagaaaggtcgcagcctactttttatcaagatcccgggttgatggcagttattccctaacttatacaggtgcgacaccattctttcatcatgttgcgatactaactgagttgtataaagcggagcaatcaggtgaattatatacctatcatttcaatatgttacgttcagttctggaaaaatcagctagcttccatggtttctcaaatttctcagcctgcattgcgcaggatgctgatgaccctgaaaggattttacattcgagactcatcaatattttgagccatggaaactattcgcttttcgagcctcaacctatgcttgaagaaaataaaacttatttcagaaagattttgcatgattttctgaaacgctatccatttaatcctgatttatttccccaacagattgaggaaagtgaagagaaactatga

SEQ ID NO: 8735 - DNA, 1248 bp, Escherichia coli
atgaatgacaatgttaaacaattttttccccggttgcgctttcaatcatttaaagcttcaggtccatgggaattccaaccattgggaaaactagcgaaacgctcagttcgaaaaaatgttgatggtaaaataacccgcgttctaaccaactcagcagagtatggggttgttgatcagcgagattttttcgagaaagatattgctaaccaaaacaatcttgaagggtattaccttgttgaagaaggaagctatgtttataaccctcgggtttcaacgatggctcctgtaggaccgatttcaaaaaataaaatcggattaggcgtgatctcaccattatatacagtgttcaaatttaatagcaaaaataatgatttttatactcattattttaagtcaacacattggcatcattacatgcgccaagtttcaagcacaggcgtacgccatgaccgaatgaacatcagtaataacgcattcatggagctaccacttcctgtatctactccagaagaacaacaaaaaatcgccaattgtttatcatctttggatgctctactcacagcagaagtccagaaactggatgcgttaaagaaatataaaaaaggcctgttgcagcagctttttcctcgtgaaggagaaaccctgcccaaattacgttttcctaatttccaaggcacaacggaatggaaaatatgtccattgggtgattttattgaggaatatcgaaaaaagtctacatatcaagatgagtatgatgtattaacttctgctagaaatggtcttatcaaacaacgtgaatattacgataatgaacgaattacagaacgtaataatgtcggctttaatattattcctgtaaattacatcacatatcgcagcagaagtgatgatagacgattttattttaacgaaaacaacttaggtataactggaattattagcacatattaccctgtctttcgcataaataaaggcataaataaattctttatcgaattacttgctcaatatgcagagtatgttggcaaacatagtgtcggaacttcgcaaacagttctttcattaaatgaactacgccgaattaagttacctattcccacagaagcagagcaacaagatattgctaattgtctatattctttcgacaacctaatcgtagctcaagctcaaaaagttaaaacacttaaaacctttaaaaagggcctattgcaacagatttttcctaaggttaatgaggtgatcttatga

SEQ ID NO: 8736 - DNA, 2970 bp, Escherichia coli
atgagtacaaccgaaaatcaaattgagcaggatcttattgcccgactgactgaactaaaatacacactgcggcccgacattcgcgatcgtgcatcactcgaaaaaaactttagggaaaagtttgaaactctcaataaggtgcatctgaccgataacgagtttcagcgtctgcttgatgctgttattactcctgatgtgtataatgcagctcagacactacgcaatatcaacagcttcgagcgtgatgatggtacaccactgaactacagtctggttaatcttcgcgactggtgcaagaacgattttgaggtagtgaatcagttacgcatcaacaccgataacagctatcaccgctatgatgtgatgcttcttataaacggtgtaccagttgtgcagatcgagcttaaagcactgtctgttagtccacgtcgtgctatgcagcaaatcgtggattacaaaactgatcctggcaatggctacggtaagacactgttgtgttttatccaactcttcatcgttagcaatcgtactgatacttggtacttcgcgaacaataatgcacgacatttcagttttaatgccgatgagcgattcctgccagtctaccagttcgccagtgaagataacaaaaagattacccagctagaaattttcgccgacaaattcttagccaagtgtactttagcgcaaatgatcagtcgttatatggttctggttgccagcgaacagaagttattaatgatgcgcccgtaccaaatttatgcggtcaaggctatcgtcgattgcattcatcagaattgcggaaacggctatatctggcataccacaggttcaggcaaaacattgacttcgttcaaagcgtccactttgctcaaggataatcctgacattgaaaaatgtctttttgtggtggatcgtaaagatttggatcgccagactcgggaagagtttaaccgttttcaggaagggtgtgtagaagagaacacgaatactgaaacgctggtgcgccgacttttatctgacgactatgccgataaagttattgtcacaactatccaaaagttggggctggcgctggacagcacaaataaacgtaactacaaagagcgtctggagccattacgagacgcccgtatagcatttatctttgatgaatgccatcgctctcaatttggcgaaaatcacaaagctataaaagaatttttccctaatgcacagctttttggcttcacgggaacacctatcttcgagcaaaatgccagctaccagcaaatcgaaggtcaacaagccagcctgcgtaccaccgacgacttattcgaacgctgtttgcatcagtacaccatcactcatgctatcgaagatcgcaacgtcttacgctttcacatagactatttcaaaccggaaggaaagaacccacctaagcccggcgaaggcatcgctaaatctaaggttatcgaaaccattctttctaaacacgattctgcgaccaatggacgcaaatttaatgctatcttggcaactgccagcattaacgatgccatcgaatattttgagttatttgacagcattcagacaaaaaatgcagaacaaaatactgaatttcgaccattgaacgtagcatgtgttttttccccaccttctgaaggaaacaaagatgttcagcagatacaggaagatctgcctcaggaaaaagaagataaccagcaagacccggaaggcaagaaagttgcactcacccgtatcattgctgactacaatacgcgtttcaagaccaatcaccgcataagtgaatttgactcttactatcaggacgtacaaaagcgtatcaaggatcaacagtatcccaatactgacttatctgctgcgcaaaaaattgacataaccatcgtagtggacatgctgcttacgggatttgactccaagtacctcaatacactgtacgtggacaaaaatctcaaacaccatggtttaattcaagcattttcgcgaactaatcgcgttctcaacgatacgaaaccctacggtaacattctcgattttcgtcaacaacaaaagtcggtggaaggggccattgcactcttttccggtgaaaaaattaataacccacgtgaaatttggctggtagattctgctcctaaagtcattgagaatctgcaaacagccacacagaaactggctgactttatgcaatcacagggactggctaatacaccggaagaagttgctaaccttaaaggcgatgttgccagagcgcaattcattaacctgttcaaagatgttcagagacttaaaactcagctcgatcagtataccgatctatctgaagagcaaaaacaacagatcgagaggatcgtgtcagcagatcaattgctgggatttaagggcgtgtatctagaaacggccaggcgcctaaaggaacaacaggacaaagaccaaacattaccagaagtacaacaactcgattttgaatttgtactttttgcctctgcggttattgattacgactttatcatgggccttattgctaatctgactcagcagaaaccaggcaaactcaccctaaatcgcgaagaactcattggactgatccagtccgatgccaagtttatcgacgaacgtgaagatattgctgcgtacatccgtggtctgccagtaaatgaggcattaaacgaaaaacagattcgaacaggttttgaacacttcaaggcagagaagaaggcgaaagaactctctgagatcgccgtcagacatgaccttgcaccagatgccctgcaagtttttgttgatgaaattctacgtcgtcgtatctttgatggtgagcgcctttccgaattaatggctccgctgaatctgggctggaaaacacgtacacagaaagagctggcgcttatggatgaactgacaccgttgctacacaaactggcacaagggcgtgagatcacgggactatcagcctatgaggaacaatga

SEQ ID NO: 8737 - DNA, 219 bp, Escherichia coli
atgcaaaatgcattacatttacaggctctggcattgagggcttcactgatggttcgccttaaagatgaaacattttctatacgtacatctgtcggtattaaacaacttcttcaccaggctgctgatcgtaagtgccactctgccgcctcaatgcttaaagctttggttataaatgatgcgaaagcacacagactaacgccgactcactctaaaatataa

SEQ ID NO: 8738 - DNA, 186 bp, Escherichia coli
atgagtaaacaagaaggtatcaacactctatccacacaacggtctgagacaatcctgaaaaacattcactcgctaaccgactatgggtcggtgagtggcattatgggaaaaactggagccgggagcccctgtctgtgtattcctgtttgccgggaaggtttcgccggtcttgcagagttcctgtga

SEQ ID NO: 8739 - DNA, 183 bp, Escherichia coli
atgtataattgtggtgaatcatattcagaatacgacatatcattatctgacaatgaaaactattacgatgactattatcgtgaacgcccgtgtccgggggaagttttcggctatgataatagtgaggataatgatgaggcagcgtctgattatgcactaaaaataaatgaaaactctgattaa

SEQ ID NO: 8740 - DNA, 1653 bp, Escherichia coli
atgtctgttttattatcgcctttatctcttcaggcagcggatgtccggcgtagcggagatgaagcatttatcattcagcagcagcgtcaggaagcccttgagcaacaactgacgccttcagctcctgatgttcgcctttctgcaccaggctcttttgcccataagattaattttcctgttgaaacgccctgttttcagattaaacagacggaactgaagggggctgatgcgttaccacactggctgcctttacaaaaaatcgccaacggggcggtcgggcattgcctgggggcgaaaggaattaatctgctgatgagtacattgcagaaccgtttggtcgatcatggttatgtcaccacccgggttctggcaccttcgcaggatttaaaaagcggtatcctccggctggttattattcccggtgttgtacgacatgtgcgtctgacaccggacagtgatgactatattcagttgtattcctcatttccggcacacgaaggctctctgctggatttacgggacattgaacaggggctggagaatatgcaacgactgccgggtgtgcaggctgatatggaaattgtacccggtgagcagccaggggaaagtaacattcttattacccgcaaacaggacaaatactggcgactggggttttcgcttgatgattcaggtacccgcagcacagggcgttatctcggtggtataacattttctctggataatcctttttccctgagtgacctgctgtatgtttctgccacccataattttccacattacgggggtaagggcagtaaaaactacacggcccattactctgtgcctttcggttactggcagttttccgtcaccgccagtgattacgattaccatcagacggtagctggtgcggttgaggattaccagtacagtggcgagagtcagaatctgggcatgcagctgagccgggtactgcaccgtaacgggacgcagaaaacggtgctgacttacgatgttcaggcccgcaggtcgcgtaactacattaatgatacggaaatccaggtgcagcgccggcagacagcggcctggcgacttgggctgcagcaccgtcattatatttctcaggccatactggatgccggcgtcagctggcaacgaggaacccgctggtttggtgcacagccggcaccggaggaaatctttggtgaggcaacggcgctcagtaagatcctgcagatgaatgcgtcctttaatctgccctttacactggcagagcagcccttcagttattccttccggtatcagcgccagctgagcaataccccgctgactccacaggaacagtttgccatcggtaaccgctggacggttcgtggttttgacggggagcgaacgctgaatgccagtaacggctggtatatccgcaacgacctggcctggcgtacgccactgccggagcaggagttatatctgggaatggattacggcgaggtggggggagccggcagtgaatacctggtgggacgtcatctggccggtggtgttgtggggctgagggggcaactgttcagtacggattatgacgttttcatcggtcgtccgttttcaaaaccggcgggttttatgacgagtgatgtgacagccggttttaatctgttccgggatttctga

SEQ ID NO: 8741 - DNA, 528 bp, Escherichia coli
atgcgtaacgggaaatatgacgttctgagtcccctgtattccggtgagccgatcaatgaggcggaagtcctgggggcggccgtctggctgtggatgcactcccccctgcatcgtgatgcgccattgcataccctgccggacctgctgctgccggtgattaagcaccgacagtatgtgataacaacagagcaggggcgacctgttttcttcatgagctgggcctggctcagccaggaggcagaggcgcgttatcttacgcagccggcaattcttatgcctcagtcggactggaacagtggcgaccggatgtgggtctgtgactgggttgccccttttggacataccccggatatgagttgtcttgtccggcaggatatttttccccgtcagtgctggcgttcgttatatcaccggggacatgaaaccgggttacgggtgatgaatttccggggtgcacaggtcagtcgtgaagaggtgcgccagtggcgtgtgcagcacccgcttgctgtggatgtgccggagagataa

SEQ ID NO: 8742 - DNA, 8919 bp, Escherichia coli
atgaacagaaattgttaccgcattatttttaacaaagcccggggaatgctgatggtggtggcagatattgcccgttccggtcgcgccggtgcatcaccgtcctcccgcacaggatatccacacaggcaacgtatctgccgtgtcacgccgcttgcattctctttgtggctggcttcggggatggtgcattctgtcagtgctgcaggcattgtcgcagaccatggcgcaccagggtatcagcagcccacgattacgcagacggccagcggcattccgcaggtgaatattcagacgccttctgccggcggggtttcacataacgcatacagccagttcgacgtcggtaaccagggcgtcattctgaataatgcccataacaatgtgcagactcaactgggtggcatggtggccgggaacccgtggctggctaagggagaggccagaatcattcttaatgaagtgaacagtcgcaatcccagccagttgaacggttttgttgaggttgccggtaaaaaggcgcaggtggtgattgcgaacccggccggcatcagttgcgacgggtgcggttttattaatgcgaaccgggccacgctgaccacggggcagccgcagatgaaaaacggcagtctgaccggattcagtgttgaacgtggtgagattcaggttacgggcaaagggatggatgcctcgcgcacggattataccgatatcattgcccggtctgtgaagattaatgcgggtatctgggcgcaggatctgaaagtgaccacaggacgtaacaatgtggatatcgcgcacgggcagattgagaaaaagaccggtgatgtctcttcacagcctcagatggcactggatgtggccagtcttggcggaatgtatgccggaaaaattcgccttgtcggtacggaaacgggggtgggtgttcgtaacgccggtcatattggtgcacaggcaggggcggttaccctgacggctgacggacgtattgaaaacagtggcagtatcagtgcgaaaacggatgtgcatctggcgacaacccgggagctgcataacagtggttctgtttatgcggggcaggatacgcagatacagagtgatggtgtcttcacccatacaggctcagtggcatcacgtcgcaacacccggattcagacagcgcgtctgaccggcggtgagcggagtctgctggccgccggggtgaaagatgacggacgtctggcggcagcgggcaacctgactgtcagtaccaccggcgaactggcggcacacggacaggttctgtccggtggggacatgcaactgaaggggcaggggctggatttaagcaacagccggatacagggacaacatactgagctggatgcaaccagtggaaatctgtccacacagaatgcgcaactgagtgccggtacgctttccgcccggactgtcgggcacttcagcaataatggtggcacgataaatgccgacacactgcagatatcggcacaaagcctgtcaaatcgtaaaggcagtctgactcagacgggaacaggggatttttcgctgagtctgccgggaagcgtggataaccgggaagggctgtttgcggcaaatggcgcggtgcgtctggatgcactgagccttgataatcgcagggggaaagtgcaggcggcgcagtcaggcagtctgcaggtgaggacaaccggcgccgtggataaccagcagggacgtctgcttgccagccgtgacatcctgattaatacacaggcgctgaataacgacaacggactgatttcagctgctgccggaacgggcaggataaaaacacagcaggctgtcagcaatactgagggacgaatggagtccgccggcaggctggatatttcggcagggaatctgaataaccaccagggtacggtggtggctgacgggctgtctgtgacgctggatggtgcgctggataatacgtccggcagactgctttcacagaaaacgctgtctgtgtcaggcagcgaactggtctctgatgatggtctgattcagtccggcagtgacatgacgctggatgtacaggacggggtactcagtaaccggaacacgaaaacacggggtggtatcagcagcgccggtaccctgacagtgcgggccggtatgctgaataaccagcagggatttatggcgggtcagaaggatatgaccctgaacgccggaacgctcgataaccgtcagggcgtgctggggagtcagacgtcattacagatatcgtcaggtacgctgatgaaccagaaaggcgcactgaaggccgggacggatatgttgctgagtggtggtgatgtcagtaatcaggaaggggcgcttgccgccggcggggacctgaatacgcacctgagtgtgctggaaaatcagcaggggacggtggtcagcaacggtaacagcaggctggatgtcacacggtttgataatcagggcggcagactggtggcacagcagtcactgacactttcctcgacggatatcatcaacgatgccggcggcctgatacagagcggtgcatcgctgaatctccgtgctgacacactgagtaaccgtaatagtggtgaccggggcggggttatcagtcagggtccgatgacgctgaatgccggcacactggacagcactgccggtgtgcttttgtcgggagatgctctgtccctgactgcaggcgtggttaacaatacatccggtcagatggtggcaaacggtctgctcggctggaacagccaggcgctgaacaatcagtccggtcttattcaggggaggggtatcagcattaataccgcaggccagacgctggataacagacgcggtacgctgaacagcctgcaggaactgactgtcagtaccggagcaatggataaccggggcgggaccgtgggggcgaaaacgacagctgacctgagcaccacctcgctggataaccgtgaggggggccggctggtcagtgaaggtgaactccgtctgcatacgggaggtctgcagaacagccacggacaaatacagtctgtgggcgacatgttgctcaacagtgtacggggcgttgtggacaacgtctctggtctgattcgcagtggttccgccattacgctgaacgccctgcagtttatcaatcgccacacgcagaataccggtcaggggctggaagcgcagacaatacacatcacgacgcaggaccttgataaccaggagggcagtattctggcagacagggcgcttacggttatggcagacaggacgctcagtaataatgacggcgtcctctcttccggcgcgacattgtctgtcagtggccgtcagctggcgttttcgaaccgtgacggcgtggttaaggccgggcagtcagtatctgtggatgccggtcagctcggtggtgacgggaaactgctttcgctgggcgatatgacgctgaaaagtaacacaacgttcagcaacagtggtcagactattgcgaacggaaaccttacgctttccgttaatggcgatgtctctaataccggcagcctgctggcaggcagccggcttgacctgaacagcatccgccttgaaaacacagagaaaggtgaaatcagtgccgggcagacctggcttaacgtgacggacacactgctgaaccgtgggctgattgacgggaaatatacgcatcttcaggcgaacaccctgacgaattccggtaccgggcgaatctacggcgatgctgttggtgtcagcgctgccacatttaataatctggaagaaaatggcgtggcggcgacgctggccgggcgtgagcgtgtggacttaggggtacagaccctgaataaccggacgcacagcctgatttacagtgcaggtgatatgcatactggtggcatgctggatgcgaatggtgccgccacggggaaagccggtgtactgaataatcacagtgccactattgaagccgccggatatctggtactgagtgccggacaaatcaataacgtcaatgaccatttcaccacggagcgcgtggtggtttccacggaaaaggtgactgagtatcagctcagcggctcagataaacgctggagcgccggtgaaccgggcgtttatgtggataacgattccagtaactcactgaaaaaactgcatacaccggaaggcgccagagataaattcacgcagtatgattacacccgtaccgtggaagaaacccgggtaaaagaatccgacccgggaaaaattctgtccggtgccggcatgacgattgtggcagacaaactgcttaatgataagagtcaggttgttgcaggtggcctgctggatatacaggccggtgatgtggaaaacgtcagtgtcagcggagagcgccatgttacggactcaggaacatccacgtattattaccgtatcaggaaaaaaggaaaggataagcagggggagaaaacctctcagtacactccgcccactgtcattcagaccatcacgctgaagccgggagagctcaccagccacggacaggttcagggcagccaggtcacgctttctcccctgaagccacagggaacggatgtacagacaggactgaccggaaatgtggatgtgacagtagccggtactgaccggataccgcttcgcccggtggtgtcagccggtgaaccggtcattctgttgccggggcagcagtttgaagtcagcgcacctcagggcagtatccatgttgccgggccggatacccgtctgccggacagcagcctgtttaaaacaaacccggcagtgaatgtgccatatctggttgaaacggacccgcgttttacgaaccagaagacgtggctgggcagtgattacatgcagaaggcgttttctcagaacggggataacatgctcaaacgcctgggggatggtttttacgaacagcgtctgattcgtgagcaggttgtcgctctgaccgggcaacggtacctggacggatacagtaatgatgaagagcagtttaaggcgttaatggatgcgggtattgcatttggtaagcaatacaacctgacaccaggtgtggcgctgactgctgagcagatggcgttactgaccggtgatattgtctggctggttaacaccacggtgacactgccggacggcagcacgcagacggttcaggtacctcaggtgtatgcccgtgtaaaacccggtgatgtgaacagcgccggtgcgctgattgccggcagggacatggtgatgaagctggatggtgacctgtttaacagcggtaaactggccgggaagcagaccgtgcagctcagtgcagaaaacattcacaaccaggccggcaccattcagggagcaaatgtcagcctgacggcccggacggatattaacagtaccggcgggctgctgcaggctacggacagcctgctggcgatggccggacgggatatcagtctgaccaccaccacccgtacggcacagcgcgacgccgggcagaaccattttgaacgtaccagtatcgacagtgtggccggcgtgtatgtgcagaacgaccagggaagactggtgctgcaggccggacgggacataaacctgacggctgcaacggtggtgaatcagggtaaggacagcctgacgcaactcagtgcgggcagggatatgacgctttccacagtgaccacatccgcgcaggacaatattacctgggacaaaaataatcgtctgtcgcagggtgtcacacaaagtacgggcagcacgcttgccggtaacggtgatgtcacgctgaccgccggacgggatatgacgtcacaggcggcatcgctgtcagctcagaaaggcctggccctgatggcgggtcatgacgtgacgctgaccggtgcacagaataccagctcgctggatgaataccataaagtgaccggcagcagcgggatgttatcgaaaaccaccacaaccactcatgatgtcactgaccgccggaccatgacgggcagtgaactgaacggggatacggtcagtatcagcgccggacataatctgaacgtcacgggcagcagtgtggccggggataaccgtgtctccctggctgccggaaataacctgaatatcggtacgctgacagaaagcaaccgtgaaacacacctgaaacaggagaaaaaatctgggctgatgagctccggaggtgtgggattcagcatgggcagccagagtctgaaagtcacggacaccgcaacagacaccacacagaaaggcagcacggtggggagtgttcacggtgatgtttcccttcaggcaggtaaccggttgaccgtcaacggctctgacctgattgccggcagggacatggcactcagcggtaaggaggtcagcattaccgccgccacagaccagcatgtacagacacatacggtggagcagaaaacctccggtctgacgcttgccctgtccggcacagcgggcagcgccctgaatacgacggtggagaccgtacaggcggcgaaatctgccggaaacagccggcttgaagccctgcagggggtgaaggccgcgctctcgggggctcaggccgtgcaggccggacgactggcagacgcgcagggagccgatgccggaaataataacacggtgggcatcagcctctcttacggcagccagtcttcgaaatcagaacagcagtcagagcagacggtggcgaagggcagtacactgaccgcaggtaataacctcagtattcaggccaccggctccggcgtgaagggcgtggatggtgacctgacgatacagggcagtcagataaaggccgggaacaacgttctgctgcaggcaaaccgtgacgtgaatctggtatcagcagaaaacacgtcaaagctggaaggaaagaacacatccagtggtggcagcgtgggtgtcggtgttggtgtgggctccggaggctggggtatcagtgtttcagccagcgcaaaccagggtaagggcagtgaaaaaggcaacggtaccacccatacagaaaccacggtggatgcgggaaaccggctgaccattatcagcgggcgggacaccacgcttaccggcgcgcaggctggcggtgaaacggtgaaagtggatgccggtcgtcatctgacactgaccagtgagcaggacagtgaccgttatgacagtaagcagcagaatgccagcgccggaggcagcttcattttcgggtccatgagcggttcggcgagtgtgaacctcagccgggataaaatgcacagtaactacgacagtgtacaggagcagacggggatttttgccggcaggggcgggtttgatgtcaccaccggacagcatacgcaactgaacggtgcggtgattgcgtccacggcaacggcagataaaaacaggctggataccggcacactgggcttcagtgacattgaaaaccgggccgactttaaaacggaacatcagagtacagggctcagtaccggtggcagtgttgctggaaatttcctggggaacatggcaaacaatctgctggtcggtgcaaatcatgaaggccatgcggacagtaccacgcagtcggcagtgtctgccgggaatatcaccatccgggatacgcagagccagaaacaggatgtggcagacctgaaccgtgacgcagcacatgcaaatcagacgctgtcccccatctttgacagggaaaaagagcagcagcgactgcagcaggcgcaactcattggtgagattggtaaccaggtggcagatattgccagaacggaaggacagatagccggtgagaaagcgaagcgggacccggcagcactgaatcaggcccgtgcggagcttgaggcagcaggaaaaccgttcacggaacaggatgtggcacagcgggcctacaataacggtatggcagcctccggttttggaacgggaggcaaataccagcaggcgatacaggctgcaacggcagcggtacagggactggccggcggtaatctgagtgctgccctggcaggtggtgcagcaccgtatattgctgaaattatcaaacagactaccccggacggtgcgggacgtgtggccgcccatgccgtggtgaatgccgcactggcggtggcacagggtaataacgctcttgccggtgccacaggtgcagccaccggcgaggtggtggggatgatagccacacagatgtacggtaagccggtgagtgaactgagtgagacagagaaacagacggtctcgacactggcaacggttgctgccggcctggccggtggtctggtgggagactcggggggggcagcggtagccggcgcacagtcaggtaagacaacggttgagaataatgcgctcagtctgccatcaggaatggtgagttatggtcaggcggttgcctcctggaatcagtatgctgatgccaataatctcaccccggaacagaagctggcaggactggataaacttgccaaaggtgagttaccagatggagccaatataagcaaagttatagttgatggttataaagatggtgtattgattgcaggagcctggtatttgggacctgcagcatcaacaggtaaagtagtcagtggcgcagtcatctcagctattgccaatggtacgtatcagtggtacgacctgagcaaactaggcaatgaaaacaagagctgggattactggggaagtgcctcggcaggcattaccggagcgctggctcctgggcgtaatgtatggcaaaacgcgggcattgtagcaggaggaacgttatttaccgatggtcttgataaaggcgctttagttggtgcaggcacaggttgggctgtaggtggtatggttagtgttgttgcgccacctgtattgaatccagttttgggtactaattctggttttgttagtgatgttattggttccgtaggcggtgaatttgttggtaataaagttaaagataagataggaggaagtaatgttaataaataa

SEQ ID NO: 8743 - DNA, 273 bp, Escherichia coli
atgttaataaataaaaaacatcctgacataaacttgaaacttttattattaagtattgtttatcttattgcttgttgttgcgtgttttttcttattgccagtatcgttattgacgtggtttttaatgataaggtaaatgtaacacgagaagttattatagatatcatagttgtaagtacgatagctggtattgctgggggcgtgggagcatggatctttgccaagatagatgaacgaaagactcgtaaatcgcaaccttctgatccagattaa

SEQ ID NO: 8744 - DNA, 834 bp, Escherichia coli
atgagtcttgaagaaagagaactgctagatttagaaaaagctgtaaaattgttggagcaggctacaattacagaaaaaatgactcaaatggttggaaagccaatagattacttgatgaataaacttcccaaaggggcagaagcacaaatttacagtctggtggaaaaggctcttcataaggctgctgatgctgctttatggagtttaaacaatgagcccaatcgagaagcgtcaactaagacaaataagttttttgccgcggtatcaggagccgtcggtggaacttttggcttttctgcattagcgattgagttaccgctttcaacaacaattatgcttcgttcagttgctgacatagcaagaagtgaaggttttgatctggataaggtggagacaaaacaagcttgtttggaggtgtttgccttgggaggaccatctgagaatgatgatgcagtcgatactgcatactatgcaacaaggagtttcactgctgaggctatgcaaattttatctaaagagctttctgaaattgctacgaagaaagcatctgtaaatgcagccatgaatctaactccgacacaaacaggaaaatggttaaccactttaatagaaaaagttgcaacaagatttggtatagttattacggaaaaaacagcggctcaggttgttcctattattggggcgtttgctggggccacattaaatataatgtttaccgactattatcaagatatggctcgcgggcattttattattaaaagactcgaaaaaaagtatggttctgaattgataaaatctgaatacatgaaaattttaaatttggtgagatcttaa

SEQ ID NO: 8745 - DNA, 198 bp, Escherichia coli; identical to SEQ ID NO: 7894

SEQ ID NO: 8746 - DNA, 201 bp, Escherichia coli; identical to SEQ ID NO: 5078

SEQ ID NO: 8747 - DNA, 2784 bp, Escherichia coli
atgagaaacctctgtttcttactgacgttagtggcaactctgttgctccccgggcgactgattgccgccgccttaccgcaggatgaaaagttaattaccgggcaactggacaatggcttgcgatatatgatttatccgcatgctcaaccaaaggatcaggtaaatttatggctgcaaattcataccggttcattgcaggaagaagacaatgagcgcggcgtggctcattttgtagaacatatgatgtttaacggcacaaaaacatggccgggtaataaagtcatcgaaacatttgagtcaatgggcctgcgttttggtcgcgatgttaatgcctataccagctatgacgaaacagtgtatcaggtgagtttgccgactacgcagaaacaaaatctgcaacaagtgatggcaatcttcagtgaatggagtaatgccgcaacctttgaaaaactcgaagtagacgctgaacgcggcgtaattactgaggaatggcgtgcccatcaggatgcgaaatggcgcacctctcaggcgcgccgccctttcctgctggcaaatacccgtaatttagaccgtgaacctatcggcctgatggataccgtcgccacggtcacaccggcacaattgcgccaattttatcaacgctggtatcaaccaaataatatgacctttattgtggtcggcgatatcgacagtaaagaagcgctggcgctgataaaggataatttaagtaagcttccggctaacaaagcagctgaaaatcgcgtctggccgacaaaagccgaaaaccacctgcgctttaatatcatcaatgataaagaaaaccgggtgaacggcatcgcactctattatcgcctgccaatggtacaagtgaacgatgagcaaagctttatcgaacaagctgaatggagcatgttggttcagctgttcaaccaacgtctgcaggaacgcatacagtcgggcgagttgaagactatttctggcggcactgcgcgcagcgtcaaaattgcacccgattatcagtcgctatttttccgtgtaaatgcacgagacgataatatgcaggatgctgcgaatgcattaatggcagagttggcaaccattgatcagcatggtttttctgctgaagaactcgatgatgttaaatctacccgccttacctggctgaaaaatgcggttgatcagcaagctgagcgtgatttacgtatgctgaccagtcgcctagcatccagctcattaaataatacgccgttcttgtcgccggaagagacatatcaactttcgaaacgtctgtggcagcaaattaccgtgcaaagtctggcggaaaaatggcagcagttaagaaagaaccaggacgcattttgggagcaaatggtaaacaatgaagttgccgccaaaaaagcattgtctcctgcggctatcctggcgctggaaaaagagtacgccaataaaaagctggcagcttacatcttcccaggcagaaatttatcgttaacagtagacgctgacccacaggcggaaattagcagcaaagaaacgctggctgagaatctgacatcattaacactttccaatggtgccagggttattctggcaaaatccgcgggtgaagagcaaaagctacaaattactgccgtatctaataaaggcgatttaagtttccctgcgcagcaaaaatcacttatcgcgctggcaaataaagcagtaagcggaagcggcgttggtgaactctcctcttccagcctgaaacgctggagtgcggaaaactcggtaaccatgagcagtaaagtcagtggcatgaatacattgctctccgttagcgcgcggactaataaccctgaacctggtttccagttgattaaccagcgaatcaaccacagcacgattaacgacaatatttgggcatcgctacaaaatgctcaaattcaggcgttgaaaacgctcgaccagcgtccagcggagaaattcgcccagcagatgtatgagacgcgctatgccgatggccgcacgaaattaccgcaagaaaatcagattgcacagtttactgccgcagatgcgctggctgccgatcgccagttgttttcatctccagcggatatcacgtttgtcattgtcggtaatgtcgcagaagacaaactcgtggcgttaattacgcgttacttaggatcaatcaaacactctgattcgccattagccgcaggtaaaccattaactcgcgcgacggacaacgcatcggttactgtaaaagaacaaaatgaaccagtggcacaggtttcacagtggaagcgttataattcccggactcctgttaatctggcgacgcgtatggcgctcgatgcttttaacgtcgcactggcaaaagatctacgcattaatattcgtgaacaggcatctggagcatacagcgtttcttctcgcctctcggttgatcctcaggccaaagatatcagtcatttgctggcttttacttgtcaaccagaacgacatgatgaactgttaacgttagcgaatgaagtgatggttaagcgtctggccaaagggattagtgagcaagaactgaacgaataccagcaaaacgttcagcgcagcctcgatatccaacagcgtagcgttcaacaattagcgaataccattgtaaatagtcttattcaatatgacgatcctgcagcatggactgagcaggagcaattgttgaaacaaatgacggtagagaatgttaacactgctgttaaacaatatctttctcatccggtgaatacctataccggagtattattgccaaaataa

SEQ ID NO: 8748 - DNA, 2373 bp, Escherichia coli; identical to SEQ ID NO: 5168

SEQ ID NO: 8749 - DNA, 1659 bp, Escherichia coli; identical to SEQ ID NO: 5169

SEQ ID NO: 8750 - DNA, 330 bp, Escherichia coli
atgaaaaccttccgctggaaagtgaaacccgggatggatgtgacatcggctccttccgtcagggaggtgcgctttggtgatggctattcccagcgtgcgcctgccgggctgaacgctgacctgaaaacgtacagcgtgacgctgtctgtctcccgtgaggaggccacggcgctggagtcgtttctggctgagcacgggggctggaaggcctttctgtggacgccgccttatggttacaggcagataaaggtgacctgcgcaaaatggtcgtcgcgggtcagtatgctgcgtgttgagttcagcgcagagtttgaacaggtggtgaactga

SEQ ID NO: 8751 - DNA, 2574 bp, Escherichia coli
atgtcccagccggttggtgatcttgttattgacctgagtctggatgctgtccgtttcgatgagcagatgagccgggtaaggcgtcatttttcaggtctggataccgacgccagaaaaaccgccagtgctgttgaacagggcctgagccgccaggcgctggctgcacaaaaagccgggatttccgtcgggcagtataaagcggccatgcgaaccctgcccgcacagtttacggatatcgccacgcagcttgccggtggtcagaatccctggttgatcctgctgcaacagggcggtcaggtgaaggactccttcggcgggatgatccccatgttcagggggcttgccggtgcgatcaccctgccgatggtcggggtcacctcgctggcggtggcgacaggtgcgctggcgtacgcctggtaccagggcgacgccacgctttcagaatttaataaaacgctggtcctttccggcaatcaggccggactgactgccgatcgtatgctgacgctctcaagagccgggcaggcagcagggctgacgtttaaccaggcgagagagtcactggcagccctggtgaatgccggtgtgcgtggtggtgaacagtttgatgccatcaaccagagtgtcgcgcgttttgcgtctgcatccggtgtggaggtggataaagtcgctgaagccttcgggaagctgaccactgacccgacgtcgggactgatggcgatggcgcgccagttccgtaacgtgacggcagagcagattgcgtatgttgcacagctgcagcgttccggagacgaggccggggcattgcaggcggcgaacgatatcgccacgaaaggctttgatgagcagacccgtcgcctgaaagaaaacatgggaacactggagacctgggcggataaaacagggaaggcattcaaaacgatgtgggatgccattctggatatcggtcgtccggaatcctcagcggatatgctcgccagtgcgcagaaggcatttgatgaggcggataaaaaatggcagtggtaccagagccggagccagcgccggggaaagacctcctcttttcgtgcgaaccttcagggggcatgggatgaccgggaaaatgcccgtctgggtctggcagcggccacgctgcagtcggatatggaaaaagccggtgaactggcggcaagggacagggctgagcgtgagtcgtcacagctgaagtataccggagaggcgcagaaggcgtatgagcgcctgcagacgccgctggataaatataccgcccgtcagaaagagctgaataaggccctgaaagacggaaaaatcctgcaggcggattacaacacgctgatggcgtcggcaaaaaaggattatgaatcgacgctgaaaaagccgtcaggtgtgaaggtgtctgccggtgagcgccaggaagaccgggcgcatgcagccctgctggcgcttgaaaccgagctcaggacgctggaaaaacacagcggtgtgaatgagaaaatcagccagcagcgccgggatttatgggaagcggaaagtcagtatgtggtcctgaaagaggccgccacgaaacggcagttatctgagcaggaaaaatccctgctggctcatgagaaagagacgctggagtacaaacgccagctggctgagctgggagacaagattgaacaccagaagcggctgaatgagctggcacagcaggcggcgcggtttgaacagcagcaaagcgcgaagcaggcggcaatcagcgcaaaagcccgcggcctcaccgaccgtcaggcgcagcgggagtcggaagagcagcgccttcgtgaggtgtacggtgataatccggctgcgctggcgaaggccacatcggcactgaagaacacctggtctgcggaggagcagcttcgtggaagctggatggccgggatgaagtccggctggggagagtgggcggaaagtgcgacggacagtttttcgcaggttaaaagtgtggccacgcagacctttgacggtattgcacagaatatggcggcgatgctgaccggcagcgaacagaactggcggggattcacccgttccgtgctgtccatgatgacagaaattctgcttaagcaggcaatggtggggattgtcgggagtatcggcagcgccattggcggggctgttggtggcggcgcatccgcgtcaggcggtacagccattcaggccgctgcggcgaaactccattttgcaaccggaggatttacgggaaccggcggcaaatatgagccagcggggattgttcaccgtggtgaatttgtcttcacgaaggaggcaaccagccggattggcgtgggaaatctctaccggctgatgcgcggctatgccaccggcggttatgtcggtggcaccggaagtccggcgcaaatgcggcgttcagagggtatcaggtttgagcagaacaacaacgtggtgattcagaacgacggtacgaatggtctgccaggtccacagatgatgaaggcggtgtatgacatggcccgcaagggtgcccgtgatgaaatccaggcacagatgcgcgatggtggtctgttctccggaggtggacgatga

SEQ ID NO: 8752 - DNA, 753 bp, Escherichia coli; identical to SEQ ID NO: 5304

SEQ ID NO: 8753 - DNA, 384 bp, Escherichia coli; identical to SEQ ID NO: 5337

SEQ ID NO: 8754 - DNA, 645 bp, Escherichia coli
atgcaggcggtgaatgccgtgctgtatggcaaatacaccatggaaggggagcagtttgatactgtcgaggtggatttcgggcgctctgaaggaaataacattgagcaggctgacggtaaaaaatggtctgagcaggaccgtgatacgtttgatccgacgcatgatattgacctctactgcgatcaggccagcggccttgtgaatatcgccattatggacggtacggtctggcgtctgctgaatggctttaagctgttccgcgaaaaactggatacccgtcgcggctcaaattcacaactcgaaacggcagtgaaagatctgggcgcagtggtgtccttcaaggggtattacggcgatctggccattgtggtggcgaaaacgtcttatgtggcagaggacggtaccgaaaaacgttatctgccggagggcatgctggtgttggggaatacggcggcagaggggattcgttgctatggtgccattaaggatgcacaggcgttgtctgaaggagtggtggcttcttcccgttacccgaaacactggctgaccgtgggcgatccgtcctgtgaattcaccatgacgcagtccgctccgctgatggtgctgccggatccggatgagtttgtggtggtacaggtgaaataa

SEQ ID NO: 8755 - DNA, 1566 bp, Escherichia coli
atggaaacagctgtagcgtactataaagatggtgttccttatgatgataaggggcaggtaatcattactcttttgaatggtaatccagacgggagtggctctggcggtggtggtggaactggaggtagcaaaagtgaaagttctgcagccattcatgccacagctaaatggtctactgctcaattgaagaaaacgcaggcagaacaggctgcccgagcaaaagctgccgcagaagcacaggctaaagcaaaagcaaaccgggatgcgctgactcaacatctgaaggatattgtgaatgaggcgcttcgccataattctactcatccggaggttattgacctggctcatgccaataatgcagcgatgcaggcagaagcagagcggttgcgccttgcaaaagcagaagaaaaagcccgtaaagaagcggaagctgcggaaaaggcttttcaggaagcagaacaacgacgtaaagagatagagaaggagcaggctgaaacagaacgccaattgaaactggctgaggatgaagagaaacgcctggcagcattgagtgaagaggcccgggctgtggaggtggcacaaaaaaatcttgctgctgcacaatctgagctggcgaaagtggatgaagagattaatacgctcaatacccgtttaagctccagtattcatgcccgtgatgcagaaacgaatacgctgtccggaaaacgaaatgagttggatcaggcatctgctaaatataaagaactggatgaaagggttaaacttttatctcctagggcgaatgatccgcttcagagtcgtcctttttttgaggccaccagactacgggcgagagctggtgatgagatggaggaaaaacaaaagcaggtaacagcatcagaaacgcgtcttaaccagattagctctgagataaatggaatccaagaggctatttctcaggctaataataagcgaagtacagcagtttcacgtattcatgatgctgaagataatttgaaaacagcacagactaatctcctgaactcgcagattaaggatgctgtggatacaacagttagcttttatcaaacgctatctgaaaaatatggtgaaaaatattcaaaaatggcacaggaacttgctgataaatctaaaggtaagaaaatcagcaatgtgaatgaagctctagctgcttttgagaaatacaaggatgtattaaataagaaattcagcaaagcagaccgtgatgcaattttcaatgcactggaggcggttaagtatgaagactgggctaagcatttagatcagtttgccaagtacttgaagattacgggacatgtttcttttggatatgatgtggtatctgatatcctaaaaattaaggatacaggtgactggaagccgctatttcttacattagagaagaaagctgtagatgctggagttagttatgttgttgttttactttttagtgtgcttgctggaactacattaggtatctgggggattgctattgttacaggcattctatgtgcctttattgataagaataaacttaatactataaatgaggtgttgggtatttaa

SEQ ID NO: 8756 - DNA, 123 bp, Escherichia coli
atgtcgccgcataccgtgtcggatgcggcgtacacgccttatctgaccgacaaacgaattatccacaatccgctgatggatatttttccagcaattacacctctgtcgataattaactattga

SEQ ID NO: 8757 - DNA, 390 bp, Escherichia coli
atgaagctgattctgccgtttccgcccagcgtgaacacgtactggcgacaccccaacaaaggggcgtttgctggtaagagcctgataagcgcggcggggcgcaaattccagagcgcggcgtgtgcagcaatagttgagcagttacgtcgtctgccaaaaccaacgtcggcacctgcttcagtggagatcgtgttgtttcctccggataaccggatccgcgatctggacaactataacaaggcgctgtttgacgccctgacccacgcgggtgtgtgggaagacgacagtcaggtgaaaagaatgctggtggagtggggaccggttatcccggaagggaaggtcgagatcactatcagtaagtacgagaaaacggcgggtgcagctgcctga

SEQ ID NO: 8758 - DNA, 327 bp, Escherichia coli
atgacgacgttaactcaatgccagcagcaggtgctggatatgctgatttcttatcagaaagaacgtggcttcccgccaaccaatcaggaggtggcaaccatgctgggataccgttcagtgaatgcagcggtggagcatcttcgagcactggagaaaaaaggcgtcatcacgataaagcgtggcgtggcccggggtatcactcttcataccgcggtgaaggacgacgacagcgaggcggtcgggattatccgctcactgcttgccggtaaggaaaacgccaggctgcgtgcagcccactggttacatgagaggggcctgaaagtatga

SEQ ID NO: 8759 - DNA, 942 bp, Escherichia coli
atgagcactaaattaaccggctatgtatgggatggttgcgctgcgtcaggcatgaagttatccagcgtggcaattatggcccgcctggctgatttcagtaatgacgaaggtgtgtgctggccatcaattgaaaccattgcccgccagattggcgcggggatgagtaccgtcagaacggctatcgcacggctggaagcagaaggctggttaacgcgtaaggcgcgtcgccagggtaaccgcaatgcgtcgaatgtttatcagcttaacgttgcgaagcttcaggcagcggcattttctcaactgtcagattctgacccgtcaaaatctgacgcatcaaaatctgccccgtcaaaatttgatgcgtcgaaatctggcaaaaaagcgggttttcacccgtcagaatctggcggggatccgtcagtaaaatcaaaacatgatccgtcagataaaaaaacttctcgtccggacgcttcgcaaccggacacgcagacggctgaacaggagtttttaactcgccatcctgatgctgttgtattcagccctaaaaagcgccagtggggaacgcaggatgatttgacctgcgcacagtggctctggaaaaaaatcatcgccctgtacgagcaggctgccgaatgtgacggcgaggtggttcgtcccaaagaaccgaactggacagcctgggcaaacgaaattcgcctgatgtgtgtgcaggatggtcgtactcacaaacaaatctgcgagatgtacagccgcgtcagccgcgatccgttctggtgccgtaacgtgctcagcccgtcgaagctgcgggaaaaatgggatgagctttccctgcgcttatcgccgtccgtaagtacgtacaccgaaaaacgcgaggacccgtacttcaaagccagttacgacaacgtggactacagccagatcccggcaggattcagggggtga

SEQ ID NO: 8760 - DNA, 201 bp, Escherichia coli
atgaaagcgtattgggactctttaaccaaagaacagcagggcgagttggccggaaaagttggctcaacacctggctacttacggctggttttcaatggctataaaaaagccagttttgtgctggctaaaaaacttgagcaatgcacgtcaggtgcaattacgaaatctgacttaagaccggatatctatccgaaagattag

SEQ ID NO: 8761 - DNA, 675 bp, Escherichia coli
atgaaaacaatccatgacatccggcggtctaacgccagaaaactgagagatggtgttggcgggaattcttcctttgccactatgattgatcgcgagccaacccagaccagcaggtttatgggagatggtgctactaaaaatatcggtgacagcatggcacgacacatcgaaaaatgtttcgacctgcctgtcggatggctcgatcaagaacaccagacaacgaacatcacaaaaaaacctgatgtttcaatcactaataaacaaatcacattagtccctgtcatatcatgggtacaggccggagcatggaaagaagttggatattctgaggttgatttgagcacagcagaaacgtatccctgccctgtaccctgtggggaaatgacttatatcttgcgggtgataggtgattcaatgattgatgagtaccgcccgggagacatgatttttgtcgatcctgaagtacctgcctgccacggtgacgacgttattgcattgatgcacgatacaggtgaaaccaccttcaaaaggttgatagaagatgggacacagcgttatctcaaagcgttaaacccaaactggcctgagccttacattaagatcaacggtaattgctctataattggtactgtgattttctcaggaaaaccaagaagatacaaaatcaaagcctaa

SEQ ID NO: 8762 - DNA, 513 bp, Escherichia coli
atgggagcgatttatgttaaacgtttgattctgtcggtagcactgataataccgatagcatccaatgcttctgatgctttgaaccagccgagcagtagtctaaatgatggtgttgagactttttttatttcctgctttgatatgcctcaggaaacaactactgatatggacgcttgtcagagagttcagttagctcaggttagttgggttaagaataagtattcggtggccgccctgaatcgtttgaaacaagacaacaaggatgatccacagcgtctgcaggaattaactgcttcttttaacgcggaaagtgaagcttggacagaattaattgagaaagcgtcaaagtccgtccaggttgattatgcaggaggaactatagctggcactgcagttgcatcacgtcaaattggtcttctggaattacaatcccacgatatctgggagcactggctacgattcgaggactcaactcctcctcttttgccagaaccaaagttcaaatctgagtaa

SEQ ID NO: 8763 - DNA, 252 bp, Escherichia coli
atgctgagcagagaggacttttacatgataaagcaaatgcgccagcagggcgcgtacattgtcgatattgcgactcagattggttgctctgaacggacggtcagacgctacctcaaataccctgaaccgccagccagaaagacccgccacaaaatggttaagctgaaaccgtttatggattacatcgacatgcgcctggcagagaatgtctggaatagtgaggttatctttgcggagattaaggcaatgtga

SEQ ID NO: 8764 - DNA, 213 bp, Escherichia coli
atgttgggtggagcggacaatccaaatggtgaattaccgtcttatatcactggcgctgacaatagcgtccaccatatttggtgtccactattctctcaggaatttcaggatctgccagacggtgctgagacgacgcttactgttcaccagaaagtttcatccattttcttccacccaagttgcggaagaaccacttttttgcaccgttcgtga

SEQ ID NO: 8765 - DNA, 753 bp, Escherichia coli
atgtttaaggctatttttactgttggcagtcttcttttaccctgtattgttgtagcaaaaggtattggggtaacggcttcatctaatgatgttgtagatgcgcagctttttagtgttgatttgaatttgaatcgtgtggtttattatcatggttcactaggtgaaaatgtagcggtaaaaaataatcaggcatatcctatgcttgttcaatcaatggtttttgatgaggataaaaagtcaccagcgccatttattactactccacctcttttcagattagatgggagccagacgagtaggattcgtattgtaagaacagggggagagtttcctcaagacagagaaaaattacagtggttatgtgttaaaggaattccacctcagagcgaggataaatgggcagaaggtacaatcactaaaaattcatcatttactgtacaattttctgtgaataattgtatcaaggtatttgttcgtccagacacaattaaaggtcacccagaagactttgcagataaagtgacatggtcaaaaaaaggtactactgttctggaagcaaataacccaactcccttctaccttaacattaaggagttaaatattgggggaaggagtattaaatcgcctaattatatacctccttttggaaaacaaagctttagtattccaggttcttcagttggtaagattcagtggagaatagtaactgattatggtggagatagtaagatctaccaatcagaaggaaagtga

SEQ ID NO: 8766 - DNA, 2553 bp, Escherichia coli
atggaagaaagaaataataaatacgaactgtctgcgctgtatatcgctgttctttcatcattgcctttctttttttgtgcagatgttgcggccagaagctacacattcgagccatctatgttgaatgtagatgggaatgatattgatctttctatatttgaaagtggcgctcaattaccgggtacttactatgttgatattatgcttaatggtaagttggtagatacaaaggaaatggagttttctcgtgagcgtaataaagacggagagtttgttctttcttcatgtcttactcagagtatgttgaatcgttatggggttaaggtaggagactacccagaactttttgttaatagttctaatggtaaggtatgtggtgatttgtctgttattcctggtgcattctcatattttgacttttacaatcaacaactgaatttaagtataccgaatgtagcactatatccaaaatataaaggcattgcatcagaagaactttgggataatggaattaatgcatttctgatgaattaccaagctaatgcacaaataaaccaatatcgtaacaaaaaaaatcgagaagtcagttcttattgggccaggatcgagcctggtatgaatattggttcttggcgcataagaaatttgacaacttttactaaagaaaatggtaattctgaaaaaagagaaagcgtttacacatatgctgaacgtggtctcacatccataaaaagcaatctgctgataggtgagtcctatactaactctgatatatttgacagcatatctttcagggggataatgctccattcagatgagagtatggttccttatagcaagtatgcttttgcacctgtaatcagaggtattgcacagtctcaggctttgattgaggttcggcagaatggttatctcattcatactgttagtgtggctccgggggcttttgaaatctctgacctacctgtcacaggctcaggtggtgatttacaagtttccgttatagaaacaaatggtaaaaaccagtctttcaccgtcccttacactacacctgtgattgctttgcgggaaaactatctgaaatatagcttggttggcggtatgtatcgttcggcttattctggtgtggacaatactgctttgattcagatgacagcaatgtatggtatgccatggaatctgacaacatttgtaggattccaaggctctgaacattacaattctgtcgcaacaggtgtcggattgtctatgggggatatgggggccatatcgcttgatggaatatatgctcgaggacagaaagaaaaacagaataaagaagatggatattcatggagagtaagatacagtaaggtatttgatataacaggaactaattttattgctgctagtcatcagtactcttctgatggttatcagactctttctgatgtacttgatacttatggccatagcaattactcctacggaggttatgctaatcgctctatgcggaatagtctgacaataagtcagtcaatgggggaatgggggacctttagttttgggggggttagggatgaatatagaggaaatagatcgccacagaattctataaatgcgttatatagcaatagtatggaatggggaacattgtctcttaactggagtcagaataagataactgactcttcgagaagtgtgaaagataagaaagaaaatatcttcagcttttgggtgagtattcctctatacagattacttggaaatacgtctaacaatataaatgcaacaacacagatacagaaatatgataaccaaaaaatgcagtatgaatttggtatgaatggtcgtgcattcaacaggcagttgtactgggacattagtcaacgattggcaccaggaaacgaaaattataatgatgccagcagattaaaccttgagtggtatggtacttatggtcagattcgaggcggatacggttacagcgattctctcagacagatgaacgcaggaatatcaggaaccgccatcgttcacagtaatggagttacgtttggacagaaacagggtgggactattgcccttgttgaggcgcagggggtagacggagcggaagttattggatggcctggtgttaaaacagacttcagaggttatacagcattgggccatcttacaccatatcaggaaaacactgtttcattgaaccccgcttctttccctgaatatgcagaagtattgcagacagatacaaaagttatacctacaaaaggtgcggtggtttcggcaaggtttaaaacatctattggtaaaaaggcgttgtttaagttaacaagacacgatgggaaaaaagttccttttggtgctgtggtttcatcagcaacggcagatgataataagcgcgttgtagggattgtaaatgagtcaggtgaagtgtatatgtcaggcctgtctgaaaaaggacaactggatgtgaaatggaacagtcatggaagctgtaaggcagtttataagctttctgataataaaagcattgttaatatatataatgcatccttgacttgtatataa

SEQ ID NO: 8767 - DNA, 423 bp, Escherichia coli
atggtacttaaaggcttactttctttttttcttgtttgttcttcaacggttatcgctgccgaaattaatcttgagacaagggcattttcaggtagttatttatatgatggtgatattatcgctaccggaagtgtattttgcgatgatggcgaagtatctagagtggtccttttaaatataaaacctgtaaatggttctcagagtaatgtatatcatctacagggaagaaataagccttcaaatgaattgactgttaggatagaaggtaacggatggagtccttcagataaagtcgggaatggcatttataaaaaactgattaataaacaagatcagttttatgtggtggctaatggtcgtcagcatgtgagagctgatatctacacaatcagagcaagttctatatgctctaattataactaa

SEQ ID NO: 8768 - DNA, 486 bp, Escherichia coli
atgaaaaagaaacttattgcagctgcagttctgtttatgacggctaacatggcgaatgctgcaactctggataatacatcttccgtaaaagctgactttgaggttgtcggtggttgcactgtctctggaacatggactggtgagcaagtccctgctgctgtatatcagggctcagctaagcgtgtaggtgtacttggtatttcgttgtctggttgcactagccaagtttatttcgaagggaacgataaaaactcagagggactgcctcaagccactgatcctaagggtaataaaatagttattattccatcattcgatgcattaaataatcttgtgtctaaagacgctacacttaatgtgttctatagcaaaaattccctgaatgatggtgacactctttctgttgaattcgttaaccgtgaccagtggaatgctaaagctggtaaacatactatgactcttaatgtaggtacttactctatctaa

SEQ ID NO: 8769 - DNA, 270 bp, Escherichia coli
atggtacgcaacggcacggccatatcgatcaacctccacaccggcccgcagaaaacggttcccgataccgtgtcctggcgtgtccacccgtttcggactcacggctttaaaacgcgtacgaaacagttgcgtactctccgtatcccagaccggctgcacaaagatttcgccgttaaacgcatgaacgcccacaccttcacggataaattccgtgaacgtgcgttttccttccacgtcgatctcgccaaacatcccttctgcgtattctga

SEQ ID NO: 8770 - DNA, 396 bp, Escherichia coli; identical to SEQ ID NO: 5301

SEQ ID NO: 8771 - DNA, 435 bp, Escherichia coli
gtgttcgacggtgagctgagttttgccctgaaactggcgcgagagatggggcgacctgactggcgcgccatgcttgccgggatgtcatccacggagtatgccgactggcaccgcttttacagtacccattattttcatgatgttctgctgaatatgcacttttccgggctgacgtacactgtgctcagcctgtttttcagcgatccggatatgcatccgctggatttcagtttgctgaaccggcgtgaggatgacgaagagcctgaagatgatgtgctgatgcagaaagcggcagggcttaccggaggcgtccgctttgacccggacggaaatgaagttatccccgcttccccggatatggcgggcatgacggaggatgacgtaatgctgatgacagtatcagaagggatcgcaggaggagtccggtatggctga

SEQ ID NO: 8772 - DNA, 807 bp, Escherichia coli
atgagtatggagctgatggttaaagcgatgaaaattcgagtgggtaatccattgcgaaaactggttctgatcaagctggctgataatgccagcgatcagggtgagtgctggcccagctaccagcatattgctgaccagtgcgagattagcaaacgttctgtgatgaatcatattgcggccctttgtgattccgggctggtaaaaaaagtcacccggaaaggtgaaaaaggtaactcaagtaatatctatctccttcatcttgatggtgcaggagattcactagggggtagtgcaaataattcactatctggtgcagcaaattcaccaggtagtgcaggagttgcaccagggggtagtgcaggagattcacccagaaccagtcactcttttgaaccagtcaatgaaccaatagctgttggtgcatctgctgatgagtctgtgcgagttcgttcaaaccgaccggaatactctccggagtttgagcaggcatggctggcatatcccaaacgtgctggtggcaattcaaaatctgcagccttcaaagcctggaaagcccgtttgaatgagggggtaaaacccgaaaccatgctggaaggtgtgaaacgctacgcgggctgggtatctgcgatgggtaacagcggcacacaatttgtgaaacaggctgtcacgttctttggtccggatcgtcatttcgaagaatcctgggaagttcctgcggtatctgcagccagacgcgaggacccgtacttcaaagccagttacgacaacgtggactacagccagatcccggcaggattcagggggtaa

SEQ ID NO: 8773 - DNA, 552 bp, Escherichia coli
gtgggtaagcatcactggaaagtggaaaaacagcctgagtggtacgtgaaagctgtcagaaaaactatcgcggcgttgccggggggttacgctgaagctgctgagtggctggatgtaacagagaacgctttattcaaccgccttcgtgcagatggcgatcagattttcccgctgggatgggcaatgattttacagcgcgctgctggcactcactacattgcggatgctgtcgcacagtctgctggtggggtgtttgtatcgcttcctgaaattgaggaagtagagaacgccgatataaaccagcgcctgctggaagtcatcgaacaaatcgggagttactcaaagcagattcgttcggcaatcgaagatggggtagtggagccacacgagcagacagcaattaatgatgagttgtatctgtcgatttcgaagctccaggagcatgcggcactggtctacaaaattttctgcgctccagaaaagagtgacgcccgcgagtgtgcagctccgggcgtcgtggcgttttgtgtctgtggagaaactaacgcatga

SEQ ID NO: 8774 - DNA, 648 bp, Escherichia coli
atgaaaatcgccgatctcgctgaagcaataggagtggatgcggcaaatatctcgcgcctggaaacaggtaagcagaaacaattcactgaacaagccctgagtaatattgccaggagcttaggtgttgatattgctgatctctttacctcagacttcaaaagtaatactgtatgtaaaaacagtattagtgaggatgttgcgcaggtgaaggatgtattccgtattgaaatgctggatatcagtgccagtgcgggaaatggccttatccagggcggtgatgtcattgatgtgattcatgccattgaatacagaactgataatgctgtatcgatgtttggcggacggccagcaaatcacattaaagtaatcaacgttcgtggggacagtatgtgtccaaccattgagccaggagatctcatcttcgttgatgtcagtatcaatcagtttgatggagatggtatctatgtatttggttttgatgataaaatttatgtcaaacgactgcaaatgatacctgacaaactactggtgatttctgataaccagatttaccgtgaatggggaattaccagcgaaaatgaacaccggtttatggtctttggaaaggtcttaatcagccagtcacaaacccttaagcgacacaattaa

SEQ ID NO: 8775 - DNA, 360 bp, Escherichia coli
atgaataacaccaaaaaatcactaaaagtgctctttattggggaatcctggcatattcatatgattcattcaaaaggatatgacagttttacctcaagtaaatatgaagaaggtgcgacctggttactccaatgtctgaaaaatagtcaggtagatgtcacctatatgccagcacatacggtacaaattgccttccctgaagatgtggcacagttagaacaatatgatgccatcgttattagtgatattggtagtaatactttcctgctacaaaatgatactttttatcaacttcgcataaaaccaaacgctctcgaactggatttgcccctatatttccagacacctgttatcacttaa

SEQ ID NO: 8776 - DNA, 726 bp, Escherichia coli
atgaattcgtctaagatttataaaagtataatttatcaaacgaaagaaacgcaaaccggaactgccacgatccttgttaatgaaggtactggcgataatgttattgcgatctatcccggtgccaacatgacaatgtcgtccgatgaaataactattcagaaagaagcgattattaattctgatgtcatacttctgcagctcgaaacaaattataccgctctgcaacaagcgatcacattggcgcaaaaaaacagtatcccggtcattattaacccggcaccctataatgatatcgtcaacgaacttattcaggatgttgattatatcacccccaatgaaacagaagctggtttactgtccggcatagacgtacacgatcttgaatcagctaaacgagctgcagaagctatccacaataaaggggtaaaaaacacggttatcacgctcggtagcaagggctcgctcgcatttgatggcaaaaaattcattcattcgccagcgtttccagcggtcgttaaaaatacggcaggagccggggatgcttttaacggcgctctggcatcaggacttgcgaaaggaaaatcactggaatcagcactgtgttatgccagcgcctttgcatccctagcggtggagacaagcaatgcttccgacatgcctgaacatgaatctgtgatacatcgaattcagagtatacattatcagcaaactatttttacgcattaa

SEQ ID NO: 8777 - DNA, 1134 bp, Escherichia coli
atgcattcggaaaatattgcggcttacgtcgggctggatgtgcataaagaaacgttggcggttgctattgctgcacctgaacggcttggcgaagttcgttattatggtacgattaacaacgaagcccaggctgtacgtcgattatttcagaaattgcagggactttacggaaacattctttcctgctatgaggctggcccctgtggttttgggctatatcatcaactcacagcgatgaatataaaatgccaggttattgccccttcccgcataccaaaatcaccgacagacagaatcaaaaatgatcatcgggacgcaatttctctcgccaggttactgcgggctggagaacttacccctgtctggatccctgacctgactcatgaagctatgcgggatctaatcagagcccgtgcagcagctaaacgagacagcagagttgcccgacagcgaattctgagcatgctattgcgaacagacaaacattatgcaggaaagcactggacaggaaaacatcgaacctggttagctaatcaatcatttagtcagccatctcaacagattgcttttcaacactattgtcaaagtctggagcagattgaagatcgcatacttcaactcgaccaggaaatatctcgcctgttacctgagtggtctctgtgcaatctggtctgccagttgcaggctcttaaaggtgttggtcagctaattgcaataactctggttgctgaactgggtgatttttcgcgattttccaatcccaaacagctcatggcttttctgggactggtgccaggtgaatattccagtggaaacagtattcgtcccagaggaataacaaaagttggaaacagcgaactgagacgtctgctttacgaagccgcctggtcttatcgtacacctgcaaaagttggggcatggcttatatattaccgaccggactctgtaacacaatattccaaagatattgcatggaaagctcaacaacgattgtgttctcgttaccgaagtctgacagcaaaagggaaaaaatcacaagtagccattacggcggtggctcgtgagttgactggatttatgtgggatattgcacttgctgcccaatcatcattcagtcagcagaagcaaaattaa

SEQ ID NO: 8778 - DNA, 267 bp, Escherichia coli
atgctgcggtgtttcaccaatgccgggcagatcgaccagcgtcattctgcgttcaccgagttgcagggtaagacgatgagcctggcgggtgcagccgttcaggggatgcgtggcgcagatacgggactgaaaaatggcattacacaggctgcttttgccggtgccggatttacccataatgccaatcacgggctcgtaatgaataacactgtggagatgttcaaggattttctggcgaatttcttcaggaagaaacgtcagatatga

SEQ ID NO: 8779 - DNA, 1257 bp, Escherichia coli; identical to SEQ ID NO: 4758

SEQ ID NO: 8780 - DNA, 1041 bp, Escherichia coli
atgagtaatatatatatcgttgctgaaattggttgcaaccataatggtagtgttgatattgcaagagaaatgatattaaaagccaaagaggccggtgttaatgcagtaaaattccaaacatttaaagctgataaattaatttcagctattgcacctaaggcagagtatcaaataaaaaacacaggagaattagaatctcagttagaaatgacaaaaaagcttgaaatgaagtatgacgattatctccatctaatggaatatgcagtcagtttaaatttagatgttttttctaccccttttgacgaagactctattgattttttagcatctttgaaacaaaaaatatggaaaatcccttcaggtgagttattgaatttaccgtatcttgaaaaaatagccaagcttccgatccctgataagaaaataatcatatcaacaggaatggctactattgatgagataaaacagtctgtttctatttttataaataataaagttccggttggtaatattacaatattacattgcaatactgaatatccaacgccctttgaggatgtaaaccttaatgctattaatgatttgaaaaagcacttccctaagaataacataggcttctctgatcattctagcgggttttatgcagctattgcggcggtgccttatggaataacttttattgaaaaacatttcactttagataaatctatgtctggcccagatcatttggcctcaatagaacctgatgaactgaaacatctttgtattggggtcaggtgtgttgaaaaatctttaggttcaaatagtaaagtggttacagcttcagaaaggaagaataaaatcgtagcaagaaagtctattatagctaaaacagagataaaaaaaggtgaggttttttcagaaaaaaatataacaacaaaaagacctggtaatggtatcagtccgatggagtggtataatttattgggtaaaattgcagagcaagactttattccagatgaattaataattcatagcgaattcaaaaatcagggggaataa

SEQ ID NO: 8781 - DNA, 267 bp, Escherichia coli
atgctgcggtgtctcaccaatgccgggcagatcgaccagcgtcattctgcgttcaccaatctgcagggtgaggcgatgagcctggcgggtgcagccgttcaggggatgcgtggcgcagatacgggactgaaaaatggcattacacagactgcttttgccggtgccggatttacccataatgccaatcacgggctcgtaatgaataacaccgtggagatgttcaaggattttctggcgaatttcttcaggaagaaacgtcagatatga

SEQ ID NO: 8782 - DNA, 1224 bp, Escherichia coli
atggctaaaaacaaaggtatctgtcggaataaaaaatgcagtaatcctgtttcagaatttgatgaggcaaatgccttaaggttatgcgatgatcattataagctatggaagcgaaataaagagaatcgtcgggtcaggaatatttgtcgtataattagtagatatgacaaaagtctggactgggagatattttatagagtaagagatgctgcaaaaaataaaacgggaaagagaattattgaggacgcaaaaatattacaccaatggcgtgcttcaaagcaagtaagaaaaagttttcacaagggtgtgcttcggtcacgggaatggcttaatacacaggagttactgagcagaaaacatatatctgttacaggtgaactatttaaattttacataaaagatattatcagattatattgctataagtttctctacagcagagaatatcttaatgaaaacgcatacaaaaaacgatatcagagagatattcaccccagaaaagttaatgttccgatactgcaacttgaagttgcatggataaataataattgccgctcaagtgattcaagcactgatattattatccttccgaggatgataagaagaatggttgtatttaattatacgaagataaataaacaattagagaaagtgttgggggggatagcacgaaaacaaacctcagaaaggaataaaggcggtctctataccagaataaaaaaagaaagtgactttctttctatggatagatttatggtggaaatagaaaatatcataagacctgaaaggtttcctacatcaatttatccagtcttttcacattcatttattgaacgagagcttccgctactgaatcttgcccgatcacagtataaaagagcaataagtaaaagagtggcgaattcaattttttatactttgcaaaaaactaacgtggcattatggctatatcttgaaatgtttgctctggtggcattcattaaactgtatacaggaaaaggttttgaattcataaagaacatgtgtgtatttatcgattatgagaaagggataataaaatccacacatgaagaactgctgggtgaaattaaacgtaacattcaagtgaatttgaaggtgaatcctgataattttccagagttaatagatatatacaattcatgctttagtgaaaatatattgtcatatgatattcaggatggtaattttaaatggcgctcatga

SEQ ID NO: 8783 - DNA, 1128 bp, Escherichia coli
atgaagaagttattattagtgttcggtactaggcctgaagcaataaagatggcctctatcattgaattattaaaaaaagattgtagattcgaatataaaatatgtgtgacaggccaacataaagagatgcttgatcaagttatgcaagtatttgatgttaaacctgattataatttacggattatgcagcctgggcaaacattagtatctgtagcaacaaatatactctcacggttaagtgaagttttaattatagaaaagccagatattatacttgtgcatggggatacaacgactacccttgctgctactttagctgggtattaccaccaaataaaagtttgtcatgtggaagcaggattaagaacaggggatatttactctccttggcctgaagagggcaatcgtaaagttacaggggcattagcatgtattcatttcgccccaacagagagatcaaaagataatctcctgagggagggggtcaaagtaaataatatatttgtaacgggtaataccgtcatcgactctttatttattgcaaaagatatcatagataatgaccctaatataaagaacgctttacataataaatttaattttcttgataaaagccgacgagtagtacttataacaggtcatcgaagagaaaatttcgggaaaggttttgaagatatatgctttgcaataaaggaattagctttcatttatcctaatgtagattttatttatccggtgcatcttaatcccaatgtaatggaaccagtacatcgtatattagataatatatgtaatatttaccttattgagcccttggattatttgccttttgtttatttaatgaatgagtcatatttaatattgactgattcaggggggatacaagaagaagcgccttcgttaggtaaaccggttttggttatgcgtgatactactgaacgccctgaggcggttgaggctggtactgttgtattagtggggacttctaagataaaaatagtaaataaagtaacggagctattaaacaatgctgatatctacaatgctatgtctctgttacataatccatatggcgatggaacagctgctcaaaaaattcttaatgtgctcgcccaagagctaatttaa

SEQ ID NO: 8784 - DNA, 849 bp, Escherichia coli
atgcaaaaatcaacaactatatatgttcattctgtttataatttattaaaggttataacgctcattgatctaaaaaaaacaattcttgatatacatggtgttgtaccggaagaacttttggcagataataaaaaattacttagtaaagtatataacatggtggaaaaaaaaggtgtccttggatgcaaaaaattaatacacgtcagtacagaaatgcaaaaacactatgaagcaaaatatggagtaaacttggctgaaaggtcaatagtgctcccgatttttgaatataaaaatataacccaatcgcaaaacaaatggacagaaaataaaatacgaagtatctatcttggaggattacaaacatggcaaaatattgataaaatgattcaagtttgtgatgacacagtgataaacaatgaagcaggtaagtatgaattcaactttttcatcccacagagtaacttggaagggtttatagataaatattcgttaaaattacataatatcaatgctaatgcatctacgctatcacgtgatgaagtaattccctttctaaaagaatgtcatattggttttgtattgcgcgatgatataatagtaaacagagttgcgtgccctacaaaattggttgaatatttagagtgtggtgtcgttccagttgtgctctccccacttataggtgatttttattcgatgggatatcaatacattactacagaggaaatggctaacagaagtataagtttgttggatcttgaaaaaatggctgcacataatttacaaattttgacttcttatcagaagagaacctacaaggcacagaaagaacttattgctcaactgtgctga

SEQ ID NO: 8785 - DNA, 294 bp, Escherichia coli; identical to SEQ ID NO: 5215

SEQ ID NO: 8786 - DNA, 354 bp, Escherichia coli; identical to SEQ ID NO: 5217

SEQ ID NO: 8787 - DNA, 762 bp, Escherichia coli
atggacgataataatcaaacttctggacaaccaaagccagagccagaagaatgtgtgaaagagcaaaaaataacagatcattttaaaataatgattgataaggctcgtaaggcacaaaagttggttttgataaaaagagcagatgatcttttgagatggggagcacaggaggaatatgatttcagtaagatctttggtgttaaaggaaataaggaggttaatataagaaaatatggacataatacaggtaggcgcatgaatgctagatttcttatgatggatggtgtgagaagattaatgattatagctaatgatttaacaatgagcagttttataaattatacaggttgtaatgaatttgcagcattcgtcagcccaagtaaggatatgccctatataattaacataggcgcaaaatttgagtatagagatggcaaaaaaaatccagtaacgggaaaggattctcatgttgctactttatgtcatgaaatgtctcatattcagtggtattatggggataataaaaaaggtggtatgtggtcacaggattatacaactactgataaatattcaacgtgcaaagaggatgaagtttcatatgacgaacatatccgtattgcaactaaactgatctctaaacaaaaagatcaaatatttgagaatgcatataacatagaaagatattttgaaataagattaattgaaagtgagatagactcgattgatgatgaaatattaagcaattcagttaagaaaaaatag

SEQ ID NO: 8788 - DNA, 1182 bp, Escherichia coli
gtgcgtgtgtcgcaggcgtgggcggggccgggatttggtaatctggcgataccgcgggtgggccaggaggtgattgttgattttctgaacggggacccggaccagccgctggtcatgggccggacgtaccatgaggacaaccgttcgccgggggacctgccgggaacgaagacgcagatgacgatacggtcgaagacctataaaggaagcggttttaatgagttgcgctttgaggatgcgacggataaggaacaggtctatatccacgcgcagaagaacatggacacggaggtacttaacgaccggacgacggatgtgaaacatgaccatacggagaccatcgggaacgaccagaagataacggtggtgaaggggcagacggttcaggtcgggaccagaaaagaagggggccacgaccagagtatcacggtggcgaacgaccggtgcatcacggtacgtaatgaccagacgctgcaggtgacgaatgaccggacggtgagcgtgagtaatgatgacggcctgtacgtcagaaatgaccgtaaagtgacggtggaagggaagcaggagcataagacgacggggaaccatgtcagcctggtggagggaaagcacagcctggtggtgaagggggacctggcgaggaaggtgagtggcgcgctggggataaaggtcgacggggatatcgtgctggagagcagcagccggataagcctgaaggtgggtggctcgtttgtggtcatccattcagggggcgtggacatcgtcgggccgaaaatcagtctcaatagcggcggtagtccggggacgccggtgccggcgctgcaaccgacggtgctgaagacactgggggatgagaagagtggtgatggcagtgattccggagaagaaaatgaagactctggagggaactgcgtgaccggaagtggtggtgatgatcgaggtgacgatgaggatgaacctgaaaaatatactctccagttccattttacagacgatgacgggataccgtattcagaaacccgctacattgccttctttgaggatggcacgcagacccacggagaaacggatgaagaggggtatacagagcgtttttttgtatctagcaaacatgaaattaaagtgaagttgctatttgcgaatgatgattttctctcaatggaaggacactatggacgataa

SEQ ID NO: 8789 - DNA, 693 bp, Escherichia coli
atggacttattgccttttttactggacgcgaacctcagcgcgacaaacccacccgctattccgcactggtggaagtgtcaaccgcttattcccacccttctgtcacaggaactgaaaaactatctgaagcttaatgttaaagagaaaaatattcagattgcagaccaggtgattattgatgaaagtgccggtgaggttgttatcggcgcgaatacccgtatttgccacggtgccgttattcaggggccggtagtgattggcgcaaactgcctaataggtaattatgcgtttattcgtcctggcacaataatcagcaatggcgtaaaaattggttttgccaccgaaattaaaaatgcggttattgaagcggaagccacgattggtccgcaatgctttattgccgactcggtagttgcaaaccaggcatatttgggcgcacaagtacgaaccagtaatcatcgtctggatgaacaacccgtgtctgttcgaactccagagggaattatcgctaccggatgcgataaattaggttgttatatcgggaagcgttcacgccttggtgtacaagttattattttgcctgggcgaattatttccccgaacacgcaacttggcccgcgcgtgattgtagaacgtaatttacctaccggaacttattcactccgacaagaacttatccgtacaggagattaa

SEQ ID NO: 8790 - DNA, 216 bp, Escherichia coli; identical to SEQ ID NO: 5212

SEQ ID NO: 8791 - DNA, 474 bp, Escherichia coli
atgaaaacattgtctcagaacaccacctcttcggcctgtgcaccggagactggcctgcaacaactggttgccaccatagtccctgatgaacagcgcatcagcttctggccgcagcattttggcctcattccacagtgggtgaccctggagccccgtgtcttcggctggatggaccgtctgtgcgaaaactactgcggtggtatctggaatctgtacaccctgaacaacggcggggcatttatggcacctgaaccggatgacgatgatgacgaaacatgggtactgttcaatgccatgaacggtaaccgcgctgaaatgagcccggaagccgccggcattgccgcctgtctgatgacgtacagtcatcacgcctgccgtacggagtgttatgccatgacggttcattattaccgtctgcgggattacgccctgcagcatccggaatgcagcgccattatgcgcatcatcgactga

SEQ ID NO: 8792 - DNA, 411 bp, Escherichia coli; identical to SEQ ID NO: 4965

SEQ ID NO: 8793 - DNA, 390 bp, Escherichia coli
atgaagcttatcctgcctttcccgcccagcgtgaacacttactggcgacaccctaacaaaggggcgtttgcaggtaagagcctgataagcgcggcggggcgaaaattccagagcgcggcgtgcgcagcaatagttgagcagttacgtcgtctgccgaaaccaacgtcggcacctgcttcagtggagatcgtgttgtttcctccggataacaggatccgcgatctggataactataacaaggcgctgtttgacgccctgacccacgcaggtgtgtgggaagacgacagccaggtgaaaagaatgctggtggagtggggaccggttatcccggaagggaaggtcgagatcactatcagtaagtacgagaaaacggcgggtgcagccgcctga

SEQ ID NO: 8794 - DNA, 327 bp, Escherichia coli
atgacgacgttaactcaatgccagcagcaggtgctggatatgctgatttcttatcagaaagaacgtggtttcccgccaaccaatcaggaggtggcagccatgctgggataccgttcggtgaatgcagcggtggagcatcttcgcgcactggagaaaaaaggcgtcatcacgataaagcgtggcgtggcccggggtatcacgcttcataccacagtgaaggacgacgacagcgaggcagccgggattatccgcgcactgcttgccggtgaggaaaacgccaggctgcgtgcaactcactggttacatgagaggggcctgaaagtatga

SEQ ID NO: 8795 - DNA, 642 bp, Escherichia coli
atggcagcgacgcacacactccctctggcgtcaccgggaatggcacgcatctgcctttacggggatttgcaacgatttggccgccgcatcgaccttcgtgtgaaaacgggggctgaagccatccgggcactggccacacagctcccggcgtttcgtcagaaactgagcgatggctggtatcaggtacggattgccgggcgggatgcaggagaaaccgaattatcatcccgtcttaatgagccgctggcaaatggtgccgtgatccacatcgtgccgcgtcttgcgggagcaaaaagtggcggtgtgtttcaggcggtgctgggtgcggcgttgattgctacggcaatctggatgccggggatcagtatcgctttcagtgacattctcttttcaatgggtgcggcgatgacgcttggtggtgtggcgcagatgctggcaccgaaagccagaactccccgtacacagacaacggataacggcaaacagaacacctatttctcctcactggataacatggttgcccagggcaatgtcctgcctgttctgtacggtgaaatgcgcgtggggtcacgtgtggcatctcaggagatcagcacggcagatgaaggggatggtggtcaggttgtggtaattgggcggtaa

SEQ ID NO: 8796 - DNA, 906 bp, Escherichia coli
gtggatagcgcacgcgcccttattgcccggggatggggagtaagcttcgtcagccgttgtctccgggtgtcgcgtgcgcagttgcacgtcattctcagacgagccgatgactggaaggacggccgccgcagccgtcacacggatgatacggatgtgcttcgccgtatacaccatgttatcggagagctacccacatatggttatcgtcgggtatgggcgctgcttcgcagacaaacagaacttgatggtatgcctgcgatcaatgccaaacgtgtttaccggatcatgcgccagaatgcgctgttgcttgagcgaaaacccgctgtaccgccatcgaaacgggcacataccggcagagtggctgtgaaagaaagtaatcagcgatggtgctctgacgggtttgagttccgctgtgataacggagaaaaactgcgggtcacgttcgcgctggactgctgtgaccgtgaggcactgcactgggcggtcacaacgggtggcttcgacagtgaaacagtacaggacgtcatgctgggagcagtggaacgccgctttggcagcgagcttccggcgtctccagtggagtggctgacggataatggttcatgctaccgggcgaatgaaacacgtcagttcgccaggatgttgggacttgaaccgaagaacacggcagtgcggagtccggagagtaacggaatagcagagagcttcgtgaaaacgataaagcgtgactacataagtatcatgcccaaaccagacgggttaacggcagcaaagaaccttgcagaggcgttcgagcattataacgaatggcatccgcatagtgcgctgggttatcgctcgccacgggaatatctgcggcagtgggccagtgatgggttaagtgataacaggtgtctggaaatatag

SEQ ID NO: 8797 - DNA, 198 bp, Escherichia coli
atggaatcattaaccacagaaacggcgctggatattctgattgcgtggctacagaacaatatcgactgcgaatccggaattatcttcgacaacgatgaggataaaatggattcggcagcactgctgccctgcattgaacaggccagggaagatatccataccctgcgccaactgcagcttctgcaacagaaccggtga

SEQ ID NO: 8798 - DNA, 435 bp, Escherichia coli
atggggcgcattgtcgttgacgtcgatggtgttaatcttgctgaactgattaacgtggcctgcgacaatggctactcccttcgtgttgttgatgaatctgaccggaccgcaactgacagcatgcccccctccgctgccctgagcggtatacgctgcagcaccgcacatatcacggaaacagacaacgcctggttgtactcgctgtcacaccagaccagtgacttcggcgaatcagaatggattcattttaccggtagcggatatctgttacgtaccgatgcgtggtcatacccggttctgcaacttaaacgtctgggcctgtcaaaaacattccgtcgtctggttgtcacactcatccggcgttatggcgtcagtctcattcacctggatgccagcgctgaatgcctgccgggtttacccaccttcaactggtaa

SEQ ID NO: 8799 - DNA, 474 bp, Escherichia coli
atgaaaacattgtctcagaacaccacctcttcggcctgtgcaccggagactggcctgcaacaactggttgccaccatagtccctgatgaacagcgcatcagcttctggccgcagcattttggcctcattccacagtgggtgaccctggagccccgtgtcttcggctggatggaccgtctgtgcgaagactactgcgggggcatctggaatctgtacaccctgaacaacggtggcgcatttatggcacctgaaccggatgacgatgatgacgaaacatgggtactgttcaatgccatgaacggtaaccgcgctgaaatgagcccggaagccgccggcattgccgcctgtctgatgacgtacagtcatcacgcctgccgtacggagtgttatgccatgacggttcattattaccgtctgcgggattacgccctgcagcatccggaatgcagcgccattatgcgcatcatcgactga

SEQ ID NO: 8800 - DNA, 150 bp, Escherichia coli
atgtcagggatgaatgatattcggctgaaattccggacagccgtacgcgtaaccgttccggtcacagacggatggccagaagatgccattgcctgtactcagtctgcacagactgagttctccggggcgtcgggtgattctggtgcctga

SEQ ID NO: 8801 - DNA, 990 bp, Escherichia coli
gtgagagcactactgacccctgaaattgccccgcgtatggggatcgtattgttcaggcccggttcagagctgatgcccctgtttatgcaggggcgtgtcctgctggagcctgagccggaacgttattcatcttttgccagtggtgccgttccggcggcatcacaaccgctggcggatgatcctgccgttcgggccgtgttccgcaatgaggcagttattcgtcgtgcggggggcgtggaatgtcttgaaagctggttacttcgtgaaaagggctgtcagtggcctcattccggatggcacagcgagaacatgaccacaatgcgacacgcgccgggcgcaatccgtctgtgctggcactgcgataacctgcttcgcgatcagttcacggaacggctggaatcaatggcaacggataactgtgcccgctgggtgttgtctgtcgtgcgtcgggatctcggttttgatgacagtcacgttgtgacaatgccggaactgtgctggtggctggttcgtaatgatctggcggatgccttaccggaaagtgcagcccgtaaggcactgagattaccgaagcctgttgtgccatctgtcacccgggaaagtgaccttgtgccttcggttcctgccaccagcatcatccaggataaagcgaaaaaggtgctggtgctgaaagtggatccggagtcgccggagtcttttatgttacgccccaaacgtcgccgctgggttaatgaaaagtacacgcgctgggttaagacgcagccgtgcgcatgttgtggaaagccagctgatgatccccaccacctgataggccacggtcagggtggaatgggtacaaaagcgcatgacctttttgtgttgcctttgtgcagaaagcatcacgacgagctgcatgcggataccgtgacatttgaagagaagtatggctcccaactggagctgatatttcgttttatcgatcgtgcgctggcaattggcgtactggcgtaa

SEQ ID NO: 8802 - DNA, 831 bp, Escherichia coli
ttgcaggcgcgtttcacgcgggtagttcgagaacaggcacgcggcaaccagaatataaaggaactgggcgctttcgtagatttcgccggtcacgcggttctgtaccagatatttgccttccagctgcttaacggcagcataagagaaggtcatatcacggtcgtgatcgataaacgtgtccatctgcttgaactcttcttccgtgtagtcttccagcagatgattatcgtatttgcccatctcgaccattttcaccacatggtcgtacagcgcaggcggctcaaactgaccgtaggcttttttacgcaggtggaagatcgccagacgtgcggcgagatactgataatccggcgcatcacgggagatcaggtctgcggcagccttgataatggtttcgtggatgtcagaggtcttgataccgtcataaaactgaatgtgggagcgcagctcgacctgggaaatcgaaacgttatgcagtccttctgccgcccaatccagaacgcgatggattttgtcgagattgatgcgctctgtgctaccgtcgcgctttgtcaccagcagattctgattcatgtatgtcgtacctgtttttcaatagcttcatgcagactacctgtagtgagggaagctgctaagaacactatatatagggggtatgtttgggattcactgcaagatagtgtgaaactggccctcttgcaagtgcataactttgtggataactcaggaaggaaaaagtggcttccgcgcaccttaggtcagacaaggtgtccgggaaagtcaatgggaagagaaaaatttgttaaaaataaccgttcggtgaattcttga

SEQ ID NO: 8803 - DNA, 795 bp, Escherichia coli
gtgcctgctgcctcgctgacggcaaaaggcaccatacaattgagcagtgccatcaacagcacgtctgaaatactggccgccacaccgaaagcggtcaaggctgcatacgatctggcaaacggaaaacaaccggcagatgccacgctcactgctctggcaggacttgccactgcagcagatcggttgccttattttaccggagcagaccgcgcagcgctggcaacccttacagctattggtcgcgctattatcgctaagggcagtataaaagatgtcctcaattaccttggtttgggggaaggctctgcattgcctgttggtgtgcctgttccgtggcccaccgccacaccgccagcaggctggttacagtgcaacggagctacgttcaccaaagaacaatatcctgttctggccagagtctacccgaccctccgtcttcccgatttacgcggtgagtttatccgtggatgggacgacgggcgcaaagttgatacggggcgttcattgctaagtggtcaggctgcaacatttattcgtacagctttgcaggattattacggttacgatctgaatactaatgtcaaagtaggtatcgcttttgctactgctgattctgttataaccgttggaaacccagctaatcctaaagcaggaaataatagcgattatgttcctgcatcagcagataactctataacgggtattcaaaggacagcggaggataattttaccggggcatggatatcaatgcgcccccgcaatgttgcgtttaattacatcgtaagggccgcataa

SEQ ID NO: 8804 - DNA, 378 bp, Escherichia coli
atgaaaacattacctgtattacccgggcaggcggccagttctcgcccgtctcctgttgaaatctggcagatactgctcacccgactgctggaccagcattacggcctcacgctgaatgacacaccgtttgccgatgaacgtgtgattgagcagcatattgaggcaggcatttcactgtgcgatgcggtgaactttctcgtggaaaaatacgcactggtacgaaccgaccagccggggttcagcacctgtacccgctctcagttaataaacagtattgatatcctccgggcccgccgggcaaccggcctgatggcccgcgacaattacagaacggtaaataacattaccctgggtaaacatccgggggcgaaacaatga

SEQ ID NO: 8805 - DNA, 369 bp, Escherichia coli
gtgtcagacacactccccgggacaacgcatcccgacgataacaacgaccgcccctggtgggggctaccctgcaccgtgacgccctgtttcggtgcacgtctggtgcaggagggtaaccggttgcattaccttgccgaccgcgccggtatcagaggccggttcagcgacgcggattcgtaccacctggaccaggcctttccgctgctgatgaaacaactggagctcatgctcaccagcggtgaactcagcccccgccatcagcataccgtgacactgtatgcaaaagggctgacctgcgaagccgacaccctcggcagttgtggctacgtttatatggctgtttatccgacgcccgaaacgaaaaagtaa

SEQ ID NO: 8806 - DNA, 687 bp, Escherichia coli
atgattaatcctgcgaatggcaacacaaagccgatgtttgttggtcagggcgatcagatattcatgaacgacgtgttcctgaaacgcctgacggctccgaccattaccagcggcggtaatcctccggcattttccctgacaccggacgggcggctgacggcgaaaaatgccgatatcagcggtaacgtgaatgcgaactccgggacgctcaacaacgtcacgattaacgagaactgtcgggttctgggaaaattgtccgccaaccagattgaaggcgatctcgttaaaacagtgggcaaagctttcccccgggactcccgtgcaccggaacggtggccatcagggaccatcaccgtcagggtttatgacgatcagccgtttgaccggcagattgttattccggcggtggcattcagcggcgctaaacatgagcgggagaataacgatatttattcgtcatgccgcctgatagtacggaaaaacggtgctgaaatttataaccgtaccgcgctggataatacgctgatttacagtggtgttattgatatgccagctggtcgcggccacatgacgctggagttttcggtgtcagcatggctggtgaataactggtatcccacagcaagtatcagcgatttgctggttgtggtgatgaagaaagccaccgcaggcatcagtatcagctga

SEQ ID NO: 8807 - DNA, 618 bp, Escherichia coli
atgatgggaagaacgcgcgttcaaaaggcaatagccagcggcaaggctacacctgaggatgtaacaaaactcgtttttagccaaaacccatcagaacgttctcagctttacaggcttctggatgacaatggtaggcaaaacgcacgagcagccatagttcagaatgctgtagataaggcgactgatccgtctggaaatattagtgttgaaaagtttattaatgcgttacaccggaacaggaagcaatcagcaactttctttaaaggcgtacatggaaaggaactggacggcgttattaaatacctcaacgatacaagacacgcggcaaaagcgaacgttcaaaacttaaatggtcagcagctttatggattgttagttggtggtggcatcataaacgcagcagtattagcggggatgctaaaaacggctgcgtttgttgttcctgctgctggtgtcgtaggaggagctgcgaaggcatacgaaagccctgttatacgaaatgccttgttacgtctggcaaatacgccaaaaggtagcacagcatatgacagagcgatcagtacggtcacacaatcgctcaccagagtcgcacaggcatcacaaaaagaagctcaataa

SEQ ID NO: 8808 - DNA, 234 bp, Escherichia coli
atggcacccgaaccggatgacgatgatgacgaaacatgggtactgttcaatgccatgaacggtaaccgcgctgaaatgagtccggaagctgccggtattgccgcctgtctgatgacgtacagccatcatgcctgtcgtacggaatgttatgccatgacggtccattattaccggctgcgggattacgccctgcagcatccggaatgcagcgccattatgcgcatcattgactga

SEQ ID NO: 8809 - DNA, 477 bp, Escherichia coli
atgcaacagctttcctttctgccaggagagatgacgcccggcgagcgcagcctcattcagcgggccctgaaaaccctggaccgccatcttcatgaacccggtgtggccttcacctccacccgtgcggcacgggaatggctgattctgaacatggcgggactggagcgtgaagaattccgggtgctgtatctgaacaaccagaataagctgattgccggtgaaaccctcttcaccggcaccatcaaccgcacggaagtccatccccgggaagtgattaaacgcgccctgtaccacaatgccgctgccgtggtactggcacacaatcacccgtccggtgaagtcacacccagcaaggcagaccgccttatcacggaacgtctggtacaggcactgggcctggtggatatccgggtgccggaccatctgatagtcggtggcagccaggttttctcctttgcggaacacggtctgctttaa

SEQ ID NO: 8810 - DNA, 312 bp, Escherichia coli
atgggagttgagcagaataatttcaggcacatgctgaccggttatctgtccggcccgccgcagacgcagcatatgtttggtatattcccggcggctctggtcgcgcacacgggtctggcaggcgaagaacggctgaaagccttcccgctgcagattttccaggacggtgatggtgggaatgtacgcataccgttcactgcgggaggtgtgccggtcttctccaaaaatactcgggacgtggtacatcagttcttcgcgtgtcagtgggcgctcccgacggatctgatttacatgaccaaaacgactggctaa

SEQ ID NO: 8811 - DNA, 279 bp, Escherichia coli
gtggtggcgaaaacgtcttatatagcagaagacggtaccgaaaaacgttatcttccagatggcatgctggttctggggaatactgctgcagatgggatccgttgttacggtgccattcaggatgctcaggcgttgtccgaaggtgtggtggcctcttcccgttatccgaaacactggctgacggtaggggatcccgcccgtgaatttaccatgacgcagtccgcgccgctgatggtgttgccggacccggatgagtttgtggtggtacaggtgaaataa

SEQ ID NO: 8812 - DNA, 585 bp, Escherichia coli
atggataaaagagctaaaaatcagatagtcgatagcgatattgcacgtttgttactcaagctcagaaagtctcgaaacttgactgttacagagcttgcccaacgatctggtgtcagtcaggcgatgatcagcaaagttgaacgaggcacttcaagccccagtgcaacaatacttagtcggttagctaatgcactgaatattacgctatcaaagctttttgcagagcttgagatgcaacagaattcacttgtacttttggctgaccagcaacaacactggattgatgaagaaacaggcattacccgctggtctttgtccccagcgggtgcatgtccggaactaataaaagttgaaatcccccctatggggcaattgactatccctgcctctgcaaatgagcatctttccggacaaactctgtggatgttaaacggcagccttgattttcgagtcaatcatcagactcatcatttacaagccggtgattgtcttgctcttacctttgccagcgagtaccaaatgagaaacccagatagcggccagagttgttcttacattgttgcttacagtcaaaaaaatccatga

SEQ ID NO: 8813 - DNA, 438 bp, Escherichia coli
atgttaaaaatcagaatgtcgcgaccatctgaggcacaagaaattatccaaatttggaaaaattccgttgatgccacacacgattttcttacagcccatgaccggcaggagattgaaaaagaagttgtcagctttttttcagaaacccctgtgctggtagcaacaaaccaggaagatcagccactaggattcatgtttttgcatgagggacatttagaggctctttttgttgatgcgtcagctcgcggacttggcgtcgggaaacatctgatctcacatgcgctggctctacatcctgatctaagcgtcgatgtaaatgaacaaaatcatcaagctgtaggtttttatcaacatatgggctttaaactttcaggacgttccgagcgggacaatcaaggcagaccctaccctctattacatctttataaggcaatgtaa

SEQ ID NO: 8814 - DNA, 249 bp, Escherichia coli
atgcgtattgaaatctgcatagccaaagaaaaaatgactaaaatgccaaccggtgctgtggatgcgttaaagcaagaattaacccgacgcatcagtaaacgttatgacgatgtagaggtgatcgtaaaagccaccagcaacgatgacctttctgttacgcgcaccaccgataaagattcagctaaaacttttgttcaggaaactctgaaagatacctgggagtctgctgacgagtggtttgttcactaa

SEQ ID NO: 8815 - DNA, 369 bp, Escherichia coli
atgctggatgaatcaattcctcttaccaccggcgaatttgaagagtgggggaatccgcaggatccgcaatattacgaatatatgaaaagctacagcccgtatgacaacgtcactgcacaggtttatccgcatttactggtaacgaccggtttacacgattctcaggtgcaatattgggaaccggcaaaatgggtcgctaaattgcgcgagctgaaaaccgatgaccatcttttattgctctgtaccgacatggactcaggtcatggcggtaaatctggtcgctttaaatcgtacgaaggcgtagcgatggaatatgcttttctggtcgcgctggcacagggaacattacccgctcagtcagcggattaa

SEQ ID NO: 8816 - DNA, 801 bp, Escherichia coli
atgaaaaaaacattcatgggaattattgttttatcgtcactgtcacactttgcggcggctgaaagttacactgaaaaattttatcgtaaattaacaactgcagaattatcatgggctcaaaaacaagaagccttaaaggaagtcaattgcagtgagtatttaattaaaaaaacaattaccaccattgatggttttaccattttgtcggaggatatgttattcaccaaaagaccaatttttcctcaaggaaagatagtttgttctatcagtccgtataatgaagaaaataaagaattcagtttttcttcagaagagcaaggcactgttgacggcgttgcataccatttaagtcatggacgcgtagttgcaggttacatcggagacggactattttcatgggaaatggaatgcgaaaaccgtaaatcgacgaataatgatagtagtgcaaaattttgctatgtgaaagatttacagttttatgttcagtatattcctgagctgaaagaaattaacgttccgaaaggctatgttataagtcatggggagactcatttctctgctattaccaggtttatggtcgataaacaagaaatctctattaattcaaagttacctttcatctatggtgaatctgcaaaggaagtttttaaaataattaagccaacatcaacgatttcctacgttgctgttaatccattaaacaacaaagaaagcgattatgaagtttctggtaaaatgattgagcagttacctgctgcattaaaaatactagaacgtacctggtctttatacaaaaattaa

SEQ ID NO: 8817 - DNA, 783 bp, Escherichia coli; identical to SEQ ID NO: 4541

SEQ ID NO: 8818 - DNA, 3318 bp, Escherichia coli
atgagcaaacaatcacagcatgtattaattgccctgccccacccgctgcttcacctggtcagtttaggtttagtctcgtttatctttacccttttctcgcttgagctttcgcagtttggcacccaactcgccccattgtggttcccgacgtccatcatgatggtggcgttttatcgccatgccgggcgcatgtggccggggattgcgctgagctgctcgctgggaaatatcgccgcatccatcctgcttttttccaccagctcgctgaacatgacctggacgaccatcaatattgttgaagccgtggtcggggcagtgctactgcgtaaattgctgccgtggtataacccattgcaaaatctggctgactggctgcgtctggcactcggcagcgccattgttccgcctctgttggggggtgttctggttgtcctgctgacgcccggagacgatcctctcagggcatttttgatatgggtactttcagaatccatcggcgcactggcactggtgccgctggggttgttatttaaaccacactatctgctgcgccatcgcaacccacggttgctttttgagtcgctgctcacgttagccatcacactgacgttaagctggctttcgatgctgtatctgccgtggccttttactttcattattgtgctgttgatgtggagcgccgtgcgcctgccacgaatggaagcctttttgatcttccttaccacggtgatgatggtgtcactgatgatggccgctgatccctccctgcttgctacgccgcgtacatacctgatgagccatatgccgtggctaccgtttttgctgatcctgctgcccgccaacatcatgaccatggtgatgtatgcctttcgtgcggaacgcaaacacatttccgaaagcgaaacccgttttcgtaacgcgatggaatattccgccatcggcatggcattagtgggcaccgaagggcaatggctgcaatccaacaaagcactctgccagtttctcggttacagtcaggaagaactgcgcggactcacctttcagcaactgacctggccggaggatctcaataaagatctgcaacaggttgaaaagctgatcagcggtgaaataaacacctattcaatggaaaaacgctactacaaccgcaatggcgatgttgtctgggcgttgcttgccgtctcactggtacgccacacggatggcacgccgctctattttatcgctcagattgaagacattaacgagctaaaacgcaccgaacaggtgaatcagcaactgatggagcgcatcacgctggctaacgaagcgggcgggattggcatctgggagtgggagctaaagccgaatatttttagctgggataagcggatgttcgagctgtatgaaattcctccgcatatcaaaccgaactggcaggtgtggtacgagtgcgtgctgccggaagatcgccagcacgccgaaaaagtgattcgcgattcattgcaatcacgctctccctttaaactggaatttcgcattaccgtgaaagacggcattcgccatatccgcgccctcgctaaccgggtactgaataaagaaggcgaagtcgaacgcctgctcggcattaatatggatatgaccgaagtgaaacagcttaacgaggcattgtttcaggaaaaagagcgcctgcacattacgctggactccatcggtgaagccgtggtctgtattgatatggcgatgaaaattacctttatgaatccggtggcggagaagatgagcggctggacgcaggaagaagcattaggtgttccgctcctgacggtgttgcatattacttttggcgacaacggaccattaatggagaacatttacagtgccgacacctcacgttccgcgattgaacaagatgtggtgttgcactgtcggagcggcggcagctacgacgtgcattatagtattacgccgttaagtactctggacggcagcaatataggctcggttctggtgattcaggacgtcaccgaatcacgcaaaatgctgcgccagctgagctacaccgcctcccatgatgcactgacgcatctcgccaatcgcgccagttttgagaagcaactgcgtatcctgctgcaaacggtaaacaatacacatcagcgacatgcactggtgtttatcgatcttgatcgctttaaagcggtgaatgacagcgccgggcacgccgctggcgacgctttgttgcgcgaactggcgtcattgatgctgagtatgctgcgctccagcgacgtgctggcgcgactcggtggcgatgaatttggtctgctgctgccagactgtaatgtcgaaagtgcgcgttttatcgctacacgcattatcagcgccgttaatgactatcactttatctgggaaggacgagtacatcgggtaggtgccagtgccgggattaccttgattgatgacaacaatcatcaggcagctgaagtgatgtcgcaggctgatatcgcctgttatgcctccaaaaatggtggacggggccgggtgacgatttacgaaccgcagcaagctgccacacatagcgaacgggcggcgatatcgcttgatgaacagtggcggatgattaaagaaaatcagttgatgatgatcgcccacggtgtcgcttcgccgcggatcccggaagcacgtaatttgtggctgatttcacttaagctctggagttgcgaaggcgagattattgatgaacaaacatttcgtcgtagcttcagcgatccggcacttagccatgctcttgaccgacgggtattccacgattttttccagcaggccgcaaaagctattgccagtaaaggcttaagtatcgccctccccctttccgttgccggtttgagtagcgccacgctggtgaatgaactaattgagcagctggaaaatagccctctaccaccacggttattacatctgattattccggcagacgcgattttagatcacgcagaaagcgtgcaaaaactgcggctggcgggatgtcggatcgtattcagtcaggtgggccgcgatctgcaaatcttcaactcgctgaaagcaaatatggcagattacctgctacttgatggtgagttatgcgccaacgtgcagggaaatttgatggatgagatgctgattacgatcattcaggggcacgctcagcggctcgggatgaagaccatcgccgggccagtagttttacccctggtgatggatacgctttctggcatcggcgtcgatctgatttatggcgatgtgattgccgatgcccaaccgctggatttgctggtgaatagcagttatttcgcgattaactaa

SEQ ID NO: 8819 - DNA, 462 bp, Escherichia coli
atgaaaaagatattacttatgttgagtctgctattttttactaccgcgggctttagtgaagtttcggatacgttagtgacgggaggttatgataaacaagcgatgtctgacgccattcaacatgcgcggaaagaaactgataaattcatcgaggttatgaataaaaaagatgccgatactttcgcggtcaaagccccgataaccgatcacggaagaacagagcatttctggcttacggatgtcacttattctaacggcatgtttattggcgtaataagcaatgaccctggtattgttacaaacgtagaatatggtcaggagtggaaaatcaagaaagaagatatttcagactggatgtatacgcgcggggataaaatttacggcggttataccattgatcctttattggtcacctatccaaaagaagaagccgacgagctaagagcaaaattagttcgctaa

SEQ ID NO: 8820 - DNA, 1368 bp, Escherichia coli
atgtgcccgccattcagacgattcccgatagtgtttcataattcctccatttttctcccttattggctggctacactagtatcattccgcgaaacgtttcaggaagagaaactcttaacgatgaaaggtagttataaatcccgttgggtaatcgtaatcgtggtggttatcgccgccatcgctgcattctggttctggcaaggccgcaatgactcccagagtgcagccccaggggcgacgaaacaagcgcagcaatcgccagcgggtggtcgccgtggtatgcgttccggcccattagccccggttcaggcggcgaccgccgtagaacaggcagttccgcgttacctcaccgggcttggcaccattaccgccgctaatactgttacggtgcgcagccgcgtggacggtcaactgatggcgttgcatttccaggaaggccagcaggtcaaagcaggcgatttattggcagaaattgaccccagccagttcaaagttgcattagcacaagcccagggccaactggcaaaagataaagccacgcttgccaacgcccgccgtgacctggcgcgttatcaacaactggtaaaaaccaatctcgtatctcgtcaggaactggatgcccaacaagcgctggtcagtgaaaccgaaggcaccattaaggctgatgaagcaagcgtcgccagcgcacagctgcaactcgactggagccgcatcaccgcgccagttgatggtcgcgttggtctcaagcaggttgatgttggtaaccaaatctccagtggtgataccaccgggattgtggtgatcacccagacgcatcctatcgatttgctctttaccctgccggaaagcgatatcgctaccgtagtacaggcgcaaaaaaccggaaaaccgctggtggtagaagcctgggatcgcaccaactcgaagaaattaagtgaaggcacgctgttaagcctcgataaccaaatcgatgccactaccggtacgattaaagtgaaagcacgctttaataatcaggatgatgcgctgtttcccaatcagtttgttaacgcgcgtatgttagtcgacaccgaacaaaacgccgtggtgatccccaccgccgctctgcaaatgggcaacgaaggccattttgtctgggtgctgaatagcgaaaacaaggtcagcaaacatctggtgacgccgggcattcaggacagtcagaaagtggtgatccgcgcaggtatttctgcgggcgaccgcgtagtgacagacggcattgatcgcctgaccgaaggggcgaaagtggaagtagtggaagcccagagcgccaccactccggaagagaaagccaccagccgcgaatacgcgaaaaaaggagcacgctcctga

SEQ ID NO: 8821 - DNA, 192 bp, Escherichia coli
atgatcgtgcaaaaagagctggttgctatttacgattatgagatccctgtacctgaaggccgttttccttcagacttgaaatccataaatgctctgaattatttacaggttccgtctatcgactggagcgattccggctacatccaacatttcatcaacgtgatcgagaagatgccgaccactaataaatga

SEQ ID NO: 8822 - DNA, 1716 bp, Escherichia coli
atgtcttccatgacaacaactgataataaagcctttttgaatgaacttgcccgtctggtcggtcattcacacctgctcaccgatcccgcaaaaacggcccgctatcgcaagggcttccgttctggtcagggcgacgcgcttgctgtcgttttccctggctcactactagaattgtggcgggtgctgaaagcctgcgtcaccgctgacaaaattattctgatgcaggctgccaatacaggcctgaccgaaggatcgacgccaaacggtaacgattatgatcgcgatatcgtgatcatcagcaccctgcgtctcgacaagctgcacgttctcggcaagggcgaacaagtgctggcctatccgggcaccacgctctattcactggaaaaagccctcaaaccgctgggacgcgaaccgcactcagtgattggatcatcgtgtataggcgcatcggtcatcggcggtatttgtaacaactcgggcggctcgctggtgcaacgtggcccggcgtataccgaaatgtcattattcgcgcgtataaatgaagacggcaaactgacgctggtgaaccatctggggattgatctgggcgaaacgccggagcagatccttagcaagctggatgacgatcgcatcaaagatgacgatgtgcgtcacgatggtcgtcacgcccacgattatgactatgtccaccgcgttcgtgatattgaagccgacacgcccgcacgttataacgccgatccggatcggttatttgaatcttctggttgcgcaggtaagctggccgtctttgcggtacgtcttgataccttcgaagcggaaaaaaatcagcaggtgttttatatcggcaccaaccagccggaagtgctgaccgaaatccgccgtcatattctggctaatttcgaaaatctgccggttgccggggaatatatgcaccgggatatctacgatattgcggaaaaatacggcaaagacaccttcctgatgattgataagttaggcaccgacaagatgccgttcttctttaatctcaagggacgcaccgatgcgatgctggagaaagtgaaattcttccgtccgcattttaccgaccgtgcaatgcaaaaattcggtcacctgttccccagccatttaccgccgcgcatgaaaaactggcgcgataaatacgagcatcatctgctgttaaaaatggcgggcgatggcgtcggtgaagccaaatcgtggctagtggattatttcaaacaggccgagggcgatttctttgtctgtacgccggaggaaggcagcaaagcgtttttacaccgtttcgccgctgcgggcgcagcaattcgttatcaggctgtgcattccgatgaagtcgaagacattctggcgctggatatcgctctgcggcgtaacgacaccgaatggtatgagcatttaccgccggagatcgacagccagctggtgcacaagctctattatggccattttatgtgctatgtcttccatcaggattacatcgtgaaaaaaggcgtggatgtgcatgtgttgaaagaacagatgctggaactgctacagcagcgcggcgcgcaataccctgccgagcataacgtcggtcatttgtataaagcaccggaaacgttgcagaagttttatcgcgagaacgatccgaccaacagtatgaatccggggatcggtaaaaccagtaagcggaaaaactggcaggaagtggagtaa

SEQ ID NO: 8823 - DNA, 309 bp, Escherichia coli
atggcacaggtcgcgataattaccgcctccgattcggggatcggcaaagagtgcgcgttattgctggcgcagcaggggtttgatattggcattacctggcactcagatgaagaaggggcaaaagataccgcgcgtgaggtagttagccacggcgtacgtgcggagatcgtgcaactggatctcggcaatctaccagaaggtgcgcaggcgctggagaaacttattcaacggctggggcgtattgatgtgctggtgaataatgcgggcgcaatgaccaaagcgccgtttcttgatatggctttcgattag

SEQ ID NO: 8824 - DNA, 774 bp, Escherichia coli
atgtccgagaataaattaaacgttatcgatttgcacaaacgctacggcgaacacgaagtgctgaaaggggtctcattgcaagcgaatgccggagatgtcataagcatcatcggatcgtcgggatcgggtaaaagtacctttctgcgctgcattaacttcctcgaaaaaccgagcgaaggatcgatcgtggtcaatggccagacgatcaatctggtgcgcgataaagacggtcaactcaaagtcgccgataaaaatcagctgcgcttattgcgcacacgcctgacgatggtattccagcacttcaatctctggagccatatgacggtgctggaaaacgtcatggaagcgccgattcaggtgttgggcctgagcaagcaggaagcgcgcgagcgggcggtgaaatatctggcaaaagtcgggatagacgaacgtgcgcaggggaaatacccggtacacctgtccggtggtcagcaacagcgtgtttctatcgcgcgggcgctagcgatggaaccggaagttttactgtttgatgaacctacttcagcgctcgatcctgaactggtaggcgaagtgttgcgtattatgcagcaactggcagaagaggggaaaaccatggtggtagtgactcacgaaatgggctttgctcgtcatgtttctactcacgtcattttcctccatcaggggaaaatagaagaagaaggggcgccggagcagttattcggtaacccgcaaagccctcgtctgcaacagttccttaaaggttcgctgaaataa

SEQ ID NO: 8825 - DNA, 438 bp, Escherichia coli
ttgattgccgccaaaggttcaccgattcagccaacgctggattcactgaaaggtaaacatgttggtgtgctgcagggatcaacccaggaagcatacgctaacgagacctggcgtagcaaaggcgtggatgtggtggcctatgccaaccaggatttagtctattccgatctggctgcaggacgtctggatgctgcgttacaagatgaagttgctgccagcgaaggtttccttaagcaacccgccggtaaagatttcgcctttgcaggcccatcagtgaaagacaaaaaatacttcggtgacggcaccggtgtagggctgcgtaaagatgatgctgaactgacggctgcgtttaataaggcgcttggcgagctgcgtcaggacggtacctacgacaagatggcgaaaaagtatttcgactttaatgtctacggtgactga

SEQ ID NO: 8826 - DNA, 657 bp, Escherichia coli
atgaaacaaacggttgcagcttatatcgccaaaacactcgaatcggcaggcgtgaaacgcatctggggagtcacgggcgactctctgaacggtcttagtgacagtcttaatcgcatgggcaccatcgagtggatgtccacccggcatgaagaagtggcggcgtttgccgctggcgctgaagcacaacttagcggagaactggcggtctgtgccggatcgtgcggtcccggcaacctgcacttaatcaacggcctgttcgattgccaccgcaatcacgttccggtactggcgattgccgctcatattccctccagcgaaattggcagcggctatttccaggaaacccacccacaagagctattccgcgaatgtagtcactattgcgagcttgtttccagcccagagcagatcccacaagtgctggcaattgctatgcgcaaagcggtgcttaaccgtggcgtttccgttgttgtgttaccgggcgacgtggcgttaaaacctgcgccagaaggggcaactacccactggtatcatgcgccacagccggtagtaacaccggaagaagaagagttacgcaaactggcgcaactgctgcgttattccagcaatatcgccctgatgtgtggcagcggctgtgcggggcgcataaagagttag

SEQ ID NO: 8827 - DNA, 2424 bp, Escherichia coli; identical to SEQ ID NO: 4559

SEQ ID NO: 8828 - DNA, 921 bp, Escherichia coli
atgatgaataataaagtcagcgtcactaacagcaataatccaaccatctctttgtctgcagtgatctatttccctccaaaatttgatgaaacccgtcagtatccggcaattgtggtatctcacccaggtgggggcgttaaagagcaaacggccggaacctatgccgaaaaactggcggaaaagggatttgtcactattgcttatgacgcatcttatcaaggtgaaagcggcggcgagccgcgtcagttagaaaacccatacattcgtactgaagacgtcagtgccgtgattgattacctgacaacgctttcttatgtcgacaatacccgaattggtgcgatgggaatttgtgccggagcaggatatacagccaatgctgcaattcaggatcgccgcatcaaggccatcggtactgttagtgcggtcaatattggttcgatgttccgtaatggttgggaaaacaatgtgaaatctattgatgccctaccatacgttgacgcgggttcaaacgcccgaaccagcgatattagcagcggagaatacgccactatgccactggcaccaatgaaggagtccgatgcgccgaacgaagaactgcgtcaggcctgggagtattaccacacccctcgcgcgcagtatccaacagcaccgggttacgctactttgcgcagccttaaccagattattacctatgatgcttaccatatggcggaagtgtacctgactcagccgatacagattgtggcgggcagccaggctgggagcaaatggatgagtgacgacctgtacgatcgagcatcaagccaggataaacgctatcacattgttgaaggcgcaaaccatatggatctttatgatggcaaagtctatgtggctgaagcaatttcagtattagctccgttctttgaggaaactctgtaa

SEQ ID NO: 8829 - DNA, 273 bp, Escherichia coli
gtggtctcattccacgatccgctggcctgtattgaagatcccagacacagcgaattaggtgaatggctggcccaggcgtttgaattgcctctggtaaccagcgtcggttatgaaacgcctggctctttcggcagttggtgtgcagatctcaacttgcattgcatcaccgcagagtttccacccatctcctccgacgaagccagcgaaaaatatctctttgcgatggcaaacttgctgcgctggcatcctaaagatgcaattcgcccgtcgtga

SEQ ID NO: 8830 - DNA, 504 bp, Escherichia coli
gtgtcgacacacaacactcatattaatgaaactattcacctgctttcagatacatacagcgcagaaaaacaattaacccgggcgctggcaaaactcgcaagagcaacatcaaacgaaaaattaagtcaggcttttcatgcgcacctcgaggaaacacatggacagattgaacgtattgatcaaattgtggaatcagaatcgaatctgaaaattaagcgcatgaaatgtgtggcaatggaaggtcttattgaagaagctgatgaggtcatcgaaagtaccgagaaaaacgaagtgcgtgatgccgcactgattgccgcagcacagaaagtcgagcattatgagattgccagttacgggacattagcgacgctggctgaacaattaggttatcgtaaagcagcgaagcttctgaaagataccctggaagaagaaaaggccaccgacatcaaattgactgatctggcccttaataacgtaaataagaaagccgaaaataaagcctga

SEQ ID NO: 8831 - DNA, 264 bp, Escherichia coli
gtgggggctttatccctggcggcattggttgctggaaagagaaaacccccgcacgttgagaggtcaaacctgacaacagaacgggggctaatcttgaaccatcaacaattcaagaatagccgcaaaatgttgtcattacaacaaaaaggcggctatatgacgctcgcgcagtttgccgtgattttctggcacgacctggcagcaccgatccttgcgggaattattaccgcagcgattgttggctggtggcgtagccggaagtaa

SEQ ID NO: 8832 - DNA, 198 bp, Escherichia coli
atggaagccttcaccgaaaaagatcagttcttccacggcgttggtgttgacggtgtgtacctgccgttccataaagcaaaccaattccttggcatggaaccgctgccgacatttatcgctaatgacgtgataaaaatgcctgatgttccccgctatactgaagaatatcgcaagcatcttgtggaaatttttggttaa

SEQ ID NO: 8833 - DNA, 399 bp, Escherichia coli
gtgtgcgaaatcaatcgttcacgctattcagcttacctgttgcatgttcacgttgtttttatgacaaaataccgccgtccagtttttggtgaattgcatcatgcaaacatgcgtcagtatgtagcggaggtatgcgcggactttggcgccgagttaaaggaatgtgacggcgaggcagaccatgttcacatgctgattgaatacccaccgttggtgcaactcacaaagctggtaaacagccttaagtccgttaccagtaggcggctgcggaatgattttattgatttgcgcgccgcgtattcaaagcccgtactctggtcacgctcttatttcatcggttcatgtggtggagcaccgctggaagttgtgaaaaagtatattcagaatcagcgtggctga

SEQ ID NO: 8834 - DNA, 1206 bp, Escherichia coli
atgttaatccagaaagcatataaatacaggctctaccccactgaccagcaggcgcaaaggttgcgtcagttgtgcggttgcgctcgctttgtctggaactatgcactgaatgaaacactgagcattcatgacgcgggcggaaaaattccgtcagctttcgacctgaataaacgacttacgggctggaaaaaactccctgagctggcctttctttctgagggttacactgacaacctccagcagaaactgaaagacctgcggagcgcatgggatcgctgttttgataaatccctgacggctgaaaagcccgttttcaaaaagaaaaccaaaggctgcgactctatccggttcgtcaatttcagcaaatattgtgggctggattatggccgtgtgaaactcccgtcaggactgggctgggttaaatttcgtcagtcccggaagattgaaggcgtcattaaaaattgcaccatcagccagcatgccggacactggtatgtgtcttttcaggtcgaattagctgttaccgatccgattcacgcatcgaccagcgcaataggcctggatgcaggtataacgaagctggcaacactttcagacggcacggtctttgaaccggtaaacagcttaaaaaaaaatcaggataagctggctcgcttacagcgccgtctggcccggatggttaaattctccgccaactggaaaaagcagaaagcgaagatttcccgtttccactctcatatcgcaaacatccgccgcgattaccttcataaaaccacgacgacgatcagcaaaaaccacgcgatgatagtcattgaggatttaaaggtttcgaacatgtcaaaatcagcagcgggtacggtagaccagccggggcgcaacgtcgcggcaaaatcaggtcttaaccgggcgatactggatcagggctgggcagaaatgcgccgccagctcgaatataagcaggcatggcgcggcggtgatgtactggcgattaatccggcgtacaccagtcagaaatgcgcatgttgtgggcatacatcgaaaaataaccgcaggacgcaggcgagctttatctgtaccgcgtgcggctatacggcaaacgccgatgtaaacggcgctcgcaatatattaacagcaggttttgaagtcatggcggcaggacaaatattgccgtcagtccgtaaaggacgcgcccgtaaggcggcgtaa

SEQ ID NO: 8835 - DNA, 1653 bp, Escherichia coli
gtgaggaacacgctgaaacaggccatcgtgctgtggggaatggtgttactgctggtgctgtggtcagtgtttatcagtccgtctggcgtgctgagatgggccggtgcggcggctatcgttctggcggttgccgcgttgttgatttatcggcgcaggcaggcgtggacggagatgaccggcgatgccgggttgtcatcgctgccgccggaaacctaccgacagccggtagtgctggtctgtggcggtctgtcggcgcacctgtccactgacagcccggtccgccaggtttcagaagggctgtatctgcatgttcctgatgaagaacagcttgtggcgcaggtggagcgattgctgacccttcgcccggcgtgggcatcgcagcttgccgtggcgtataccatcatgcccggcatacaccgggatgtggcggttctggccggacggctgcgacggttcgcccacagtatggcgacggtgcgtcgtcgggcaggcgtaaacgtcccctggcttctctggagcgggctgtccggctcgccgttgccggaaagagcgagttcaccgtggtttatctgtaccggcggcgaagttcaggtagcaacatccacagagaccaccatgcccgcgcagtggattgcacaatccggcgtacaggagcgcagtcagcgactctgttacctgctgaaagctgaaagcctgatgcagtggctgaatcttaatgtgctgacggcactgaacggcccggaggcgaaatgtccaccactggcgatgaccgtggggctggtcccctcgttgcctgcggtggataacaacctgtggcagttgtggatcaccgccagaaccggcctgacgccggatatcgcggacaccggcacagacgatgcgctgccattcccggatgccctgttacggcagttgccgcgtcagtcgggctttaccccgctgcgacgagcctgcgtgaccatgctgggcgtcaccaccgtggcgggtatcgccgcgctgtgcctgtcagccacggcaaatcgccagttattacggcaggtcggtgacgatctgcaccggttttatgccgtcccggtggaggaatttatcaccaaagcccgtcacctgtcggtgctgaaagacgatgcgaccatgctcgatgggtattaccgggaaggagaaccactgcgcctcggtctggggttataccccggcgaacgcatccgccagccggtattacgcgccattcgcgactggcgtccgcctgaacaaaaaatggaggtgacggcttcgcttcaggttcagaccgtgcgtcttgacagtatgtcgctgtttgacgtcggacaggcccgcctgaaagacggctcgacaaaagtgctggtggacgcactggtgaacatccgggcaaaaccgggctggctgatcctcgtggccggatataccgatgccaccggcgatgaaaaaagcaatcagcagttatcgctgcggcgtgccgaagcggtgcgcaactggatgctgcagaccagcgacatcccggccacctgttttgccgtacagggactgggcgagagccagcctgcggcgaccaacgacacgccacagggccgggcagtcaaccggcgtgtcgaaatcagtcttgttccgcgttctgacgcctgtcaggacgtgaaataa

SEQ ID NO: 8836 - DNA, 2463 bp, Escherichia coli
atgaacgtacagttcttcgaccacgcacaccacaagctcaaaattcgcggcctgcaaagtccggtggatgtgctgacctttgaaggccgcgagcaactgagtaccccgttccgctacgacattcagtttaccagcagcgataaagccatcgcgccggagtcggtgctgatgcaggatggcgcattcagcctgacggcaccgccggtacagggaatgccggtacagactgccctgcgcaccctgcacggcgtcattaccggctttaaacatctctcatcgtcacaggacgaagcccgttacgaagtgcgccttgaaccccgtatggcgctgcttacccgcagccgccagaacgccatctaccagaaccagacggtgccgcaaatcgtcgaaaaaatcctgcgcgagcggcaccagatgcgcggtcaggacttcgtgtttaacctcaaaagcgaatacccggcccgcgaacaggtgatgcagtacggtgaggacgacctgacgtttgtttcacgcctgctgtcagaggtgggtatctggttccgctttgccaccgacgcccgattgaaaatcgaagttatcgaattttacgacgaccagagcggctacgagcgcgggctgacgctgccgcttcgccatccttctgggctgtttgatggtgaaacggaagccgtatgggggctgaacaccgcgtacagcgtggtggaaaaaagtgtctccacgcgggactacaactaccgtgaagccacggcggaaatgaccacaggccagcatgacgccaccgggggcgataacaccacttacggcgaagcctaccactatgccgacaacttcctgcaacaaggcgataaagaggcagcggaaagcggcgcgttttatgcccgtatccgtcacgaacgctacctgaatgaacaggccattctcaaaggccagagcaccagttcactgctgatgccggggctggagataaaagttcagggcgacgacgcgcctgcggtgttccgcaagggcgtgctgattaccggcgtgacgaccagcgcggcgcgtgaccgcagctatgagctgacgttcacggcgataccgtactcagaacgctacggctaccgtccggcgctaatcccccgcccggtcatggccggaacgctcccggcgcgggtcaccagcacggtgaagaacgatatctatgcccatatcgacaaggacgggcgctaccgagtcaaccttgactttgaccgcgatacgtggaaaccgggttatgaaagcctgtgggtacgccagtcgcgcccgtatgcgggagacacctacggcctgcacctgccgctgctggcgggaacggaggtcagcatcgcctttgaggaaggcaacccggacaggccgtatatcgccggggtaaaacacgactcggcgcacaccgaccatgtgaccattcagaactacaagcgcaacgtgctgcgtaccccggccaacaacaaaatccggctggatgacgagcgcgggaaggagcatatcaaggtcagtaccgaatatggcggcaagagccagctaaacctcggccatcttgttgatgccgggaaagaacagcgtggcgaaggctttgaactgcgtaccgatctgtggggcgcggtgcgggcgaagaaagggatttttatcagcgctgatgcgcaggataaggcgcagggtcaggtgctggagatgcagccagctctggctcgcctttctgcagcgttggtgacaatggaatctctggctgccagtgcgcaacaggctcaggcactggcggcagatgtgagtcgtcagcagacgctgttgcagcaaaaaattgagcagttacagcaggaagtgctactgggtagcgcacctaagggcgtggcgcttgtcagcggtgaggatatgcagttgtctgccagcgataatctgactctgacagcaggtaagcaactggatattggcgtacagaaagactttacgctggcagcaggaaaacagctcagcttgtatagccgtgcgggagcaaagctctttagctcacataacgatattgatattcaggcgcaggggggaaatctgaccacctggtcaacacaggacacctatatatcgagtggtaaaaagctggtggtgacagcgcaggatgagttaacactgatttgtggcgggggctatatcaaaattaaaagtggcaatgtggagattggcggtccgggaaaactattggttaaaaatgccggtattaagaaagcaggctccggtagtatgcagggcgtgatgaagtcgtttgagcctgaaagtttcgatgaaaatttcattatttcgaatccagcatcaggtaagccgatagcaaatcaaaaatatgaaatacacatgccagatgggagtgttattgccgggataaccgatgcaatggggtattcctctcttgttgcgtcaaaagcatctgatgacctaaaaattattctgaaaaaatga

SEQ ID NO: 8837 - DNA, 825 bp, Escherichia coli
atgttgaaagaatggatgatatttacgtgcagtttattgactctggctggggcgtcactgcccctcagtggctgtatttccagaggccaggagtctatatccgaaggggcggcatttggggcagggatcctgcgcgaaccgggagcaacaaaaaaagccgacacgaaagacctcaatgtgccaccaccggtttatggtccgccgcaggtgatatttcgcattgatgacaaccgctatttcacgctagaaaattatacccactgcgagaacgggcagacgttttataataataaagcaaaaaacattcatgttaaaatattagacgcttcagggtatttatttaaaggccgcttattctggttatcaacgcgtgatgattttctggcctttcctgccacgttaaataccagacacgcttcctgtatggggtcgaataaaggctgtatgaatgcggtcattgtcactaccgatggtggaaaaagacgcagtggtgtgccatacggcagttatacccagaatccgaccggtgccacgagggattatgacatgctggtgatgaatgacggcttctacctgcttagatatcgggggggacagggcagatttagtccggtgatacttagatggattctcagtactgaagatagctctggtgttgtgcgttcagaagatgcttatgaattgttccgtcccggagaagaggtaccctccaccggtttttataaaatcgacctgtcacgtttttatcccaaaaacaacgttatggaaatgcagtgtgacaggacgctggagccagttcaaccttcagagagtaaaattcaatga

SEQ ID NO: 8838 - DNA, 1977 bp, Escherichia coli
atgagtaccaataaatcagagccaacccgaaaggtcgatgttcatcttacggataatggtactccttttgcctattcaatgacctctcataaaaatgtcaaagtccgtgcggaagttcaaccaccgctccagttacccggcttaattatttttgttcacggcgttaattctgaaggcgaatggtacgattatgctgagaggtcgttatgcgccggactcaatcagcgcctggggcttgaaggtgagcatggtcttaaggaaaacaactatgaaggaggtttctttgtcaacagcgataaaagtgagggtggttgggaacatacctacgaaatagagggttcccaaaagaaatgggtttcaggccccagaaaaataacaaaaggtggtgacggtcgttccccggttattcgtttttactggggctatcgtgcggcggataatgaaaccgatacatacgccattccgctaaaaaataaaaagggggacaactattatgaccttcccccggaatcgcgtaaagccaaaggcccttggttttggggcggcggtccgttccagaatggctgcaaccaactggtcagcctgtggagtaaaaccgggtttaataacaatccatccctgctgggggttccgcttccgttcagtactcaggtactgaacggcgaacgtgacaggctactaagcgacgccccaccaagacactattacgctcatgcggctggtcgtctggccaaattaattaaaaccattcgcaaccagcatccggaagacaccgttacggtgctgtcacacagtcaaggaacaatgattgcgctggcggcggcagccatcgaagcgccggatgcgctgtttgtgatgaactccccctatgcgctggagaatgaacctaccacctatatttcctacccgataaaggaaattatcagccgtaaggccagatcggcgacgtttgccgatattgtcaaaaaggtagcggaaaacaaaacgcggctgaagcaacagggctgcgacaatctgctggcaggcatgagcagcgacggtaattcatggatcccggaaggtaaaacacataacggactaccggagcgggacaaccatggaacgacgtggatttattgtaatccccatgaccgagttatggggtcttcccccctgcgcagtattggctggcaggggctgccggatactaaagatggcacaccacataccttatttaaacaggctggagatacgctttatgttcgtatacttgggcgcaatacaccctgcggcggtacgccgaccgcacagacccatttcagtaatttgggtgatggcaaacccttctgggacagcacaacaacgctgttacagagggcaacgtggccggatccggacagcgggcagacattaactattaacgcgccgcaggtgccggaaccgctgacagctgaagaactaaagaattttgatcaagactatgcccgtgacgaaaagcaaagcggcggagcaggatatgcttacgggcagattaacccagagacgaaaaaacctgtcgataccgactatcgttattacatttcactgtatggctattttgaccggaagatggtgccgaaaaaagactcgggatactaccagtcagggccggggtcgaaagaggacagggtaaagtatgaaaagcagtcacaagaagagatgctggaggaggtaagaacctatgttcagcgtccaacagatcacagtaccctgccatcggatgagcgatttatgagccgggtggtggcctatgatttacccatcggttactgctggcattcgtgggacaaagcgggtctggaagagcttcgtcgtcaggctgactggctggaaagcgatgactattactttagtggcaagctgactgttccgccaataccgcctgcgataaaacaggatgtcgccgaagatgctgaacagagaaaggcagaagaaaaggcccggttacgtaatgtgtga

SEQ ID NO: 8839 - DNA, 261 bp, Escherichia coli
atgggaaaaaatgtggtagtactcaatgacgcaacttctcacggtggcaaagtctcttcggcctcttcaacctttgatattcagggaaaaaaggctgcactgctgaatgataccgtcacttgcccgaagcatggtactaacccaattgtggagtgtgataccagttatgaggagggtggacgtgggattgttgtgcatggctgtaaaagcgcctgcggctcggtggtgtatgccagtctgccggatgtggagataggctga

SEQ ID NO: 8840 - DNA, 1434 bp, Escherichia coli
atggggtggtcaaaaccgaaaattcccaccagcaaagacgtgcagcgctggtctccttgggtatgcctttttattctgtttgccggggcatttgtcgcgctcacatatgggatactgcattcccctgcggacggactccccgccctcgccagcggttactggttgcccttgacaggcaggatgatggctggagtgatgacagccctaaccggctatttgttgtggtgggagtttcaggcatattacgtctggtgctggaatagtcggcggcacagcgcactccttgtctggcagcagcgagcacatcagcaccgctacttagcctgccatgttctgctgacctcagacacgcaactgcttcctcgcctcgcaggtacttcttatgaagataataataatgatcctcctttaacattattggcagaggagccgctgatacccggtattgcgcgttttgagcaactttgccagttactgataaaccagattaaagcttctcttattcagcattatccttccggtcagatgactgtactgattgaaacctctgcatcggataaagagcgtgagcgaacaacccttattcgtttatggaaagaggatgaattaccctggatactggacatccatatgtcacccactccccttcctctcagtgatgagaataaccacttatttgatattgataaccctgttcttgttttggcgttgcactaccgccagccggaggaaaacctgccggaattcgccagcgcattgttactgttgccgcccgagttactgaaagtttctatacggcgggatacggtgcgggtgtttcgcccgatgccactaaacattgatgcgatctcccgtgagttgactgaactgcgggatatggcgcaacagccagtgaatgccagatatctggtctggcacagtggtctgacacaggcatcacaacaggctctgggccgtgtggtgaacgaccttccgttatccctgcataacgatatcgccactggcggaattattgatgtggataaagttatcgccgcttacgggcctcctgccggttggctgatggtggcaaccgccgcagagatggtcagatacgggccgggaagtcactggttgttacaggtcagaaataaacaggccagtgctgtggtgacgggcaacggctatccggcgattaatcaggaataccttgatacaacctcatctccttatcccgcaggttccctaatgctggcggttatgctcaatatactggtgctctggtttatcgggcggtacagccaggaatggctgttttcctgggcaggcgtagccatgacactgttgctgatgatagtgacattgccaggcatcgtctttggtttacgaagcgctgttgctcatctgcaataccctcgctttatacaggctatcgttcgcgcccagaaggaataa

SEQ ID NO: 8841 - DNA, 816 bp, Escherichia coli
ttgcggcatcagaaagcgatgaacagcgaagccgttgtgcgtctggcggaagcctcacaggatcgctatggctttaaagatttcaaacttaagggtggcgtgttacctggcgagcaagaaatcgacactgtccgtacattgaagaaacgcttccctgatgcgcggattaccgttgatcccaatggtgcctggctgcttgatgaagccatttctctgtgcaaagggctaaatgatgttcttacctatgcggaagacccgtgcggcgctgagcagggtttctccggtcgtgaagtgatggcggagtttcgacgggcgaccggcttgcccgtcgcgaccaacatgatcgccaccaactggcgcgaaatgggtcatgcggtgatgctcaatgcggtagatattccacttgccgatccgcacttctggacgctttccggtgcagtccgcgtggcgcaactttgcgacgactgggggctgacctggggctgccattctaataaccactttgatatctctctggcgatgtttacccatgtgggcgcggcggcaccgggtaatcctaccgctatcgatacccactggatttggcaggagggcgattgtcgtctgaccaaaaatccgctggagattaaaaacggaaaaattgccgttcctgatgcgcccggtctgggcgtggaactggactgggaacaggtacaaaaggcacatgaggcctataaacgtctgcctggcggtgcgcgtaacgacgcaggcccgatgcagtacctgatccccggctggacctttgaccgtaaacgtcccgttttcggccgtcattga

SEQ ID NO: 8842 - DNA, 1353 bp, Escherichia coli
atgagttctttaagtcaggctgcgagcagtgtggaaaaacgcacgaatgctcgttactggatagtggtgatgttgtttatcgtcacatccttcaactacggcgaccgcgctacgctttctattgccggttcggaaatggccaaagatatcggccttgatcccgtgggaatgggctatgtgttctctgccttctcatgggcgtatgttatcgggcagatccctggtggctggttgctggatcgttttggttcaaaacgcgtctacttctggtcgatctttatctggtcgatgtttaccttgctgcaaggcttcgtcgatatctttagtggattcggcattatcgttgccctgtttacactgcgcttcctggtcgggcttgctgaagcgccctctttccctggcaacagccgcattgttgcggcctggtttccggcgcaggaaaggggaacggcggtgtcgatttttaactccgcccaatacttcgcaacggttatcttcgcgccgattatgggctggttgactcatgaagtgggctggtcacacgtcttcttctttatgggcggtctgggcattgtcatcagctttatctggttgaaagtcatccacgagccaaatcaacatccgggcgtaaatcagaaagagctggagtacatcgccgcgggtggcgcgctgatcaatatggatcagcaaaacaccaaagttaaagtgccgttcagcgtgaagtgggggcagatcaaacagctgctcgggtcacggatgatgatcggcgtttatatcggtcagtactgtatcaacgccctgacttacttttttattacctggttcccggtttatctggtgcaggcgcgcgggatgtcgattctgaaagcaggctttgtggcttctgttccggcggtttgcggttttatcggcggtgtgttgggggggattatttccgactggctgatgcgtcgcacgggttcactgaacattgcgcgtaaaacaccgatcgtgatgggcatgttgctgtcgatggtgatggtgttctgcaactacgtcaacgttgagtggatgatcatcggctttatggcgctggccttcttcggtaaggggatcggtgcgctgggttgggctgtaatggctgatactgcgccaaaagagatcagcggtctttccggtggcctgtttaacatgtttggtaacatttctggcatcgtcacgccaatcgcaattggttatatcgttggcacgactggctcctttaatggggcgctgatttatgttggtgttcatgccttaatcgcggtactcagctacctggtgctggtgggcgatatcaagcgtattgagctgaaacctgtcgcggggcaataa

SEQ ID NO: 8843 - DNA, 1401 bp, Escherichia coli
atgcaaccttcacaaccagcagagaaagcgaatgtttcatcggcagatctgcgtcgcgcggcgtggacctgctctctcggcagcgcactggaatactacgatttcgcactttacagcctggcatccgccattatttttggtccactcttttttcctaatcaggaaccgggaatggcgctgatcgccagttttggcacctactttctcggatttgccgtcagacctgtaggcggaattctcttcggctcattaggtgatcgtttgggccgtaagttcgtcctgttagcaacggtgttgttaatgggaatcgccagcacgttgatcggggtattacccacttacgaaacagcgggaatctgggcgccaattatgcttattgcattacgcctgctgcaagggcttggtgctggggctgaacaggcgggagccgccgtactgatgaccgaatatgctcctgacggcaaacggggttattacgccgcgctgccgttcctcggaatccagattggtacgtttatggcatctgccgtttacttcatcctgctgcataatgtgacaaatcttgccgaaacctggtggtggcgcttgcccttcctctccagcgtggtgattatcgcggtggctatttatattcgactgcatcttaaagaatcgccatcattcgcaaaactcgaagctcgtcaacaagttacagaatcacccttacgaaatttgctgaaaacatcacgccgtaatgtcttcgtcgggattggcttacgtctggcagaaaacggcggctcgtcgatttatcaggctttagcgatcagttatatcgttggtgtggttgggctggacaaatcagttggtacgctatgcctgatgtctgcggtagtagtcggtgcaattatggtgcctattgccggttggctgaccgatcgcttcggcagggttcttgtctatcgtagtctggcgatttttcagttgttgattacctttccggtgtggtggtctttcagccacggtaatgttcctgtcactattgtctctctttctctggccttagggattggagcctggggtatgtttggtgcacaaggtgcttttctgcctgaactctttggtgctcgccatcgttatattggcgtcgcactggcaagggaagtttctgccgttattgccggagggatcgcgccactggttggttctgcaatcatttcctgggtgatccacactaacgatcccagtggtattgctgcctggatgccaatcgctatttaccttagtctgctgaccgttggtacgattattgcgactttctttgctccagaaacacgcgatcgtgatcttgatgatcttgccgacgctgaaacgatcagcgtttcccaacataaccagactacgggcacctaccatgacgcataa

SEQ ID NO: 8844 - DNA, 561 bp, Escherichia coli
atgacaaagataaaatttgttttcttttttctgctaatcgcaggtataacgcctgccgcgacgggggcttgcccggtgcagacacctgacggtgtcgcagataagttttattcaacctatgttttttctgataccggctttaagagtgaaaaagaccagctggcattttttcagaattacctcaccccctcgctttatcaacttattgttggcgcgtatgacagaaataaacgcgactacgccattgatcccacggccaaacctacttttggtgacgggattattttcacgtcttatccttcggatagttactatgagaaatttgatggcgtgacgctaccgtcatcgtttaaacctggtgataacaacgtcactgtcaccctccattttcattttagcgttgatgataaaaaggcctggcaggacgaagcgctaatggcgcgttccgctgatgatggctgttggcagatcgacaatatcatattccacgaagacgaagataactcggttctgagccttaaagagtggctaaaaaaagggattgaaagcccggcagaataa

SEQ ID NO: 8845 - DNA, 597 bp, Escherichia coli
gtgttccggcggcgctggtcacaccacggcattgtgcctacccgtaccactgacttccagattatgttcctgttctctatgggcgtgacccgtgggaaatgggggactctggttaacaccctttgctccttcaaacgccactatgatgccaacacaccgctggcgcaggtgatgccggaacttgttgaacaatatcctgacacttacgcgaacatggggattcacgatctgggtgacaccatgtttgcctggctgaaagaaaacaaccctggcgcacggttgaatgaagcctattctggcctaccggtggcggaaatcaccccgcgtgaagcgtacaacgcgattgtcgacaacaatgtcgaactggtatccattgaaaatctgccaggacgtatcgcggcaaactcagttatcccgtatccgccaggaatcccgatgctgctgtctggtgaaaacttcggcgataaaaacagtccgcaagtaagttatttacgctcactgcaatcctgggaccatcatttccctggatttgaacacgaaacagaagggacagaaattattgacggtatttaccacgttatgtgtgtgaaagcgtaa

SEQ ID NO: 8846 - DNA, 909 bp, Escherichia coli
atgaatacagatacgtttatgtgcagcagcgacgaaaagcagacccgtagcccactgtcgctgtattcagaataccagcggatggaaattgagtttcgcgcaccgcatatcatgcccaccagccactggcatggtcaggtcgaagtgaatgtgcctttcgatggcgatgtggaatacctgatcaacaatgaaaaagtgaatatcaatcagggtcatatcacgctgttctgggcctgtacaccgcaccaactaacagataccggaacctgtcagagcatggcgatttttaatctgccgatgcatctgtttctctcctggccgctggataaagacctgattaaccacgtcactcacggcatggtgatcaaatcactggcgacacagcaacttagcccgtttgaagtgcgccgctggcagcaggaattaaacagtccgaacgagcaaattcgccagctcgccattgatgaaattggcctgatgctcaagcgatttagcctctctggctgggaaccgattctggtcaataaaacctcgcgcacacacaaaaacagcgtctcgcgccatgcgcaattttatgtcagccagatgctgggctttattgccgaaaactatgatcaggcgctgaccatcaacgatgtggctgagcacgtcaaacttaacgccaactatgcaatggggatattccagcgggtcatgcaattgacgatgaaacagtacataaccgcgatgcgcatcaaccacgttcgcgcgttactgagcgataccgataaaagtattctcgatattgccctgacggcaggctttcgttcgagtagccgtttttacagcacgttcggcaaatatgtcggcatgtcgccgcaacaataccgcaaacttagccaacagcgccgccagacgtttcccggctaa

SEQ ID NO: 8847 - DNA, 282 bp, Escherichia coli
atgtacgttcgcgggcgtaaaatggtggcgtttctggtctgttgtgtcgcgctggcgataagcgcgatgtatgagttaatcgagtggtgggcagcgctggcaatgggccagggcgcagatgattttctcggtactcaaggcgacccgtgggatacgcaatccgatatgttctgcgcactactgggcgcattaacgacggtgatattcctcgctcgctttcattgccgccagctacggcgctttggcttaatcaccagagcgccggaagcgattaccccttaa

SEQ ID NO: 8848 - DNA, 1458 bp, Escherichia coli
atgaaaacaccctcacagccgcgcgcgatatactatatcgtggcgatccaaatctgggagtacttcagtttttacggcatgcgtgccttactcattctctatctcacccatcagcttggttttgatgataaccatgccatcagcctgttcagcgcatatgcttctctggtttacgttacccctattctcggcggctggcttgccgaccgcctgctcggcaaccgcactgcagtgattgccggcgcgctgttaatgacccttggccatgtggtgctgggcattgatacaaattcaacctttagcctgtatctggcgctggcaatcattatttgtggctacggtttattcaaatcaaacatcagctgtttgcttggcgagctctacgacgagaacgatcatcgacgtgatggcggtttttcgctgctgtatgctgcgggcaatatcggttctatcgcagcccccatcgcctgcggcctggctgctcagtggtatggatggcatgttggctttgcccttgcgggtggcggcatgtttatcggtttgttgattttcttaagcggtcatcgtcatttccagtccacgcgtagtatggataagaaagcgctcactagcgtgaaatttgccttaccagtatggagctggttagtggtgatgctctgtttagccccagtattttttaccctgctgctggagaacgactggtccggatatttgctggcgatcgtttgcctcattgccgcacaaatcattgcccgcatgatgatcaaattccccgaacaccgccgtgctctttggcaaattgtattgttgatgtttgtcgggacgttgttctgggtactggcacaacagggcggcagtaccatcagcttgtttatcgatcgctttgtgaatcgtcaggcattcaatattgaagtacctacagcactattccagtcggtgaatgctattgcggtgatgctcgctggggttgttctggcctggctggcgtcgccagaaagccgcggcaattcagcattgcgcgtctggctgaagtttgcctttggcttactgctgatggcttgtggctttatgttgctggcatttgatgcccgacatgcagcggctggcggtcaagcgtcaatgggcgtgatgatatccgggctggcgctaatgggctttgctgaactctttattgacccggtggcgattgcgcaaatcacgcgtctgaaaatgtctggcgtattaaccggtatttatatgctggcaacaggcgcggtcgccaactggctggcaggcgtcgtggcacagcagacgacagagtcgcaaattagcggtatggcaattgccgcttaccagcgattcttttctcagatgggagagtggacgttggcttgtgtcgcgatcatcgtggtattggcctttgctacccgttttctgtttagcacgccgacgaatatgatacaggagagcaacgattaa

SEQ ID NO: 8849 - DNA, 855 bp, Escherichia coli
atgtctgatatcacagcctcccgtccggaagtggtcaacgggcatacggacgttatctgctcaaccagtatctgccgcattctggctgtacgaaaaagtacactgctgcaaatcgacacacttatccggcaactggctgacatctcagttctgacggaaagcattggaggtaaaaccgcccgggactgggccatgaaacaggattttcgctgtggctgctggctgatggataaacctgaaacagcaatgaaagccatcacccgcaatctcgatcgcgaaatctggcgtgacctgatgcaacgttccgggatgctgtcattaatggatgcgcaggcccgtgatacatggtaccggtcactggaatacgataattttccggaaatcagtgaagcgaacattctgagcacatttgaacaactgcaccagaataaggatgaggtgtttgagcgaggggtgatcaacgtcttcaggggactgaactggaattacaaaaccaattgcccctgcaaatttggcagtaaaattatcgtcaacaacctagtgaggtgggaccgatgggggtttcatcttatcaccgggcaacagactgaccgactcgtcgacctggaaagaatgctacatctgttcagcggcaaaccgatccccgacaaccgggaaaacatcactattcgtctggatggtcacatccagtccgttcagggtaaagagcgcaatgaagacgagatgttcatcattaaatactttaagaagggatctgcacacatcactttcaaaaggctggaactgattgacagaattaacgatataatagccaggtactttccttctgtgctctcagcctgctcccgagtgtga

SEQ ID NO: 8850 - DNA, 198 bp, Escherichia coli
atgaaatcattaaccacggaaacagcactggatattctgattgtgtggctgcaggacaatatcgactgcgaatcgggaattatctttgacaacgatgaggataaaacggattcggcagcactgttgccctgtatcgaacgggcccgggaggatgtccgtactcttcgtcatctgcagcttctgcaccagaaccggtaa

SEQ ID NO: 8851 - DNA, 786 bp, Escherichia coli
ttgatttatgcgacttcatttgaagcgaatgcgttatcggtcattaacgtggcgacgggggagattattcagtcgattaccaccggcgcacatcctgacagctttatcctctcgcgtgatggcacaaaagcctgggtgatgaatcgcaccagtaatagtgtgtcagcgattgatctggtggcttatcagcatgtggcggatatcccgctggagaaatacgacgggacggggatgagcggtaaaccaggcgcctgggttatggcactttccccggatgaaaaaacattactggttccgggagcaggcagaggtaacatcgtgcggatcaataccatcacgcatcagaaagaagactttcccgcaggtaatgcgcgtggtgtcgtttctgcgatgggattccgaccaaaaaatggtgagattatttttgccgatagccaggggatttcacgtataagagctgaggatcaacaagccagcattatgacgcaatggtgtagcaggagcgtttattccgttgagggtattagcccggacggtcagtatttagcgttggtgtcatatggcctgcaaggttatgtcatcctgctcaatattaatgccgggcagattattggcgtttatcctgccagctacgttaataatcttcgtttttcagcggatggtagaaagatatttgttatggcgaagaacgggctaatacaattggacagagaaagttcacttgatccgcaggcaattattcgtcatccccaatatggcgatgtggcttgtatccctgaaccgtaa

SEQ ID NO: 8852 - DNA, 1068 bp, Escherichia coli
atggataagagtaagcgccatctggcgtggtgggttgtcggggcactggcggtggctgccgtcgtggcgtggtggctgttgcgcccggcgggtgtgccggaaggctttgctgtcagcaatgggcgcattgaagcgacggaagtggatatcgccagcaaaattgccgggcgtatcgacaccattctggtgaaagaaggccagtttgttcgagaaggtgaagtgctggcgaagatggatactcgcgtgttgcaggaacagcgactggaagccatcgcgcaaatcaaagaagcacaaagtgccgttgccgccgcgcaggctttgctggagcaacgccaaagcgaaactcgtgccgcacagtcgctggttaatcaacgccaggcagaactggactccgtagcaaaacgtcatacgcgttcccgctcactggcacaacggggggcaatttctgcgcaacagctggatgacgaccgcgccgccgctgagagcgcccgagctgcgctggaatcggcaaaagctcaggtttctgcttctaaagccgctatagaggcggcacgcaccaatatcattcaggcgcaaactcgcgtcgaagcggcacaagccactgaacggcgcattgccgcagatatcgatgacagcgaactgaaagccccgcgtgacggacgcgtgcagtatcgggttgctgagccaggcgaagtgctggcagcaggcggtcgggtgctgaatatggtcgatctcagcgacgtctatatgaccttctttctgccaaccgaacaggcgggcacgctgaaactgggtggtgaagcacgtttgattcttgatgctgcaccagatctgcgtattcccgcgaccatcagttttgtcgccagcgtcgcccagttcacgccaaaaactgtcgaaaccagcgatgagcggctgaaattgatgttccgtgtcaaagcgcgtatcccaccggaattactccagcagcatctggaatatgtcaaaaccggattgccgggcgtagcgtgggtgcgggtgaatgaagaacttccgtggcctgacgacctggtggtgaggttgccgcaatga

SEQ ID NO: 8853 - DNA, 174 bp, Escherichia coli
atgtgcgacaactggttgcgggtagatcgtattgagctaacggtgttcgtcgataacgcgccagcaattaaggtctataaaaaatttggctttgagattgaagggactggcaagaagtacgcgctgcgtaatggtgaatatgtcgatgcgtattatatggcgcgggtgaagtaa

SEQ ID NO: 8854 - DNA, 753 bp, Escherichia coli
atgaaatgtattattggaaataaaaaatgggtttgtggattcagggatgaattaaaagtatcacaaaatattatacgctcagggattctttttttactatcgatattatttattaataatgcgtccgcgggcgggtttggccttggcgtaacgcgattgatttatccggcagaaagtaagcaaataacactcagtgtgcaaaatagcggtgacaacaccagttatttaattcaatcatgggttgatgacagtaaaacggaaaaaaagagccaggattttgttatcactcctcccctctttatgttaccaacgcgtaaagaagcttcattacgtatcatgtttcttggtaagactaatttgccgaccgatcgtgaaactttgtattggatgaatgttaaagcaattccgccaacagatgagaaaaatacacagaagaataccttacagttggcattacaaaacaaaatcaagctattttatcgcccggaaaatctacctgtgcaaccaggaaaagcacgaaatatgttgcggtttaagtatgagggcaaacaactaaaagttatcaatccttcgccttattacctgacactgacaggaattaaagtacaagggagtaaattgcccaatatgtttgtaccaccgaaaagtgatattacggtctcgtcgccagtgacgttggctggtgaaattacttatcaaacaattaatgactttggcgctacgacggagcggcagaaaggaataatgcagtaa

SEQ ID NO: 8855 - DNA, 315 bp, Escherichia coli; identical to SEQ ID NO: 1771

SEQ ID NO: 8856 - DNA, 1212 bp, Escherichia coli
atggcgctaaccgatgttaaagtgaaaaccgcgaagccaaaagaaaagccctataagctggctgatagcggcggtatgtatctgctgattaacgctaatggttccaaatactggcgtatgaagtaccgcttcgctggtaaggaaaagatgctgtctattggcgtttaccccgatgtaacgcttgccgacgctcgtgagaaacgcagtgaagccaggaaaatacttgcggctggtggcgatccgggtgaggcaaaaaaagaagaaaaaatcgcgctgcaaatgagtttgaaaaacactttcgaggccgttgctcgcgagtggcatcagtcgaaagccgatcgctggtcattacgctatcgtgatgaaatcatcgacacctttgaaaaagatatctttccctacatcggtaagcgccctattgctgaaattaaaccaatggaactactggaagcactgcgcaagatggagaaacgcggagcgctggagaaaatgcgcaaggtccgtcagcgctgtggtgaagtgttccgctatgcaattgtcactggcagagctgactataaccccgctcccgatcttgccagcgcgttagctacaccgaaaaaagtacatttccccttccttactgccaatgaacttcctcacttccttaacgatctggcgggttataccggcagtatcatcacgaagacagccactcagatcattatgttaaccggtgtacgcacgcaagaactacgtttcgcacgctgggaggatatagattttgagacaaaactatgggagatcccggcagaagtgatgaagatgaaacggccccatattgtgccgctctcagaacaggttattacgctgtttaaacagcttgaaccgatatcaaaacatcatccgctggtctttatcggcagaaacgatccccgcaagcctatcagtaaggaaagtgttaatcaggttatcgaattactgggatataaaggcaggctgacggggcacggtttccgccacacgatgagtactattctgcatgaaaaaggctttaactcagcgtggattgaaacgcagcttgcacacgtcgataagaacgcgattcgcgggacgtataaccatgcacagtatcttgatgggcgtagggagatgatgcagtggtatgcggattatattggttccctgacaagagagaatgttatccatggggattttaagaacacaatctag

SEQ ID NO: 8857 - DNA, 1326 bp, Escherichia coli
ttgtcagatctcgtaccaaaattgccagagccagtacttcctgcattacctacaactattctgcctgccatttccgaacttactgcatcattgggtatcccccgtcatgttttggcaagagacgaggaaattcagtatgcatggcgcgaccttccccgtgaactgcgtgaaattccaccagatcttcgtggtgaactggtcgccagaatgtgtgttgctgtcagcactggcctatttgatggggcaatgaactacgcatggaatgccgctatccttcagctaagaacaaaaatacggaattttggcctacccattgtcgcgcagattctgcaatcggactttgaagaaaagcatctattggagcttcaggatagccgacttcttgaacttgcactcaagctaaacctagttaacgaagatgggttcttttttcttgatcaatgtcgtgaagttcgcaataacttttcggctgcccatccgacaatgggcagcgtaaatgatcgagaatttacaacgttcttaaaccgatgcgttcgttatgctctagctgatgcatcctctccgaaaggggtagacattggggcatttatctcggcagtcaaaggtcctagatttaatgcgaatcaacatgatgtgtgggtgcaaagacttgtagatacacacgatgctcagcgtcagatgctggttggaatggtgcatggtatctattgcgatccaaatacatcagaaccgtcgcgtttgaacgcattggatataggcagctcactaaaagaaatttttactgcatctcttcgctcagatcttgtcaacaaacatagcgagtatgcagcaaaaggagacgagccacgtcatgcggcatctctccaatttttcgagaaacttggtcttttgacgctgctaaacgagtctgagcaacatgctgtcttctaccgagcaattgagcgactttggaatgtgcataacggaacaaataatttctacaacgagccaccatttgcagaacggttattagaactgtcgctacacggagcggtaccggaaactgcacaagagcaattcgttcaggtagttgtctgctgcaatattggcaatggttacggtgtttgttgggctgcagctacaagctacgaacaattaattcgtaacttttctccaagggaaattgcaacaatgattcgtttggcaagcaacaatgacaatagtcttgggcgccgtgtaaacgcattaccgtcatgccgtgcgagatttaaagctacactcgctttaattgatccagctagtatccctagtggagttaaagcggcttacgaccatttcataaagtag

SEQ ID NO: 8858 - DNA, 198 bp, Escherichia coli
atgccatatatacaagtagagaaagatggtcttctgtatgaggccgagtatttctatgaggatggtatggttacagtttttggaataagaggtgggcaatccagcgtagatcttaacggaatgacagagaccgctgctgcacgcactgctttacgaaatcttattagagaaaacaaagtagatcctttatctgaataa

SEQ ID NO: 8859 - DNA, 1827 bp, Escherichia coli
atggctgaaaattatttacaaattcgcaagcttgtatttcgggggcaaaataaagaatcagttttgtctttttctgaaggggtcaactcgatttgcggtgcttcagatacaggcaagtcttttattgcggaatctcttgatttcatgttgggaggaaagaagttacgggaaattgtagaactatccacctacacggagattgaactctatttagttagtaatgctggaaaacgttggcgtcttcatcgtgcagttgctggtggaaaatttactctaactgatttggatgaccataatttaaaagacgtacctcttaaacaaaagcacgtccaaggaaaaagagataatctgtcaggctttatgcttgagcagcttgggttatttaataaaaagatattgaaaagtcgtgataaggcaacaactcgagggttaagttttcgagatttagccagattagcactgattcaggaaggtgaaatacaaaagaaaggctcgccttttttatccgataatcctacaaataaaacctctgagttagcaaccttaaagcttttgcttacaggtgtagatgatgcttcaataaaaaacattaaagatactaatactgacacttcagcacagattgtattaatagatgagtttattattgagctaaataatgaaattgatgatttgggtatagttcgcagcgatatattatcgcagtttagccgtcttgagcagacaattatgctacagcgtaattttcttgcttctcaacaagatgagcttaataacctgttattggaaaggggaaaatattatgaatctaaaaataacatccagaagcggttagatgaaatctctgaactattagccaggttcactctactatatgagcattatgtagtagacattgatcgtctcaaatcaattcaggaaagtgggttgatttttatgcatattgaagcagtaccttgtcctcattgtggagctagtccagatcatcaagatctggaaaaaatatgtgatggggacgttaattctattataaactcagctacagccgagatagttaaaattgaaacgttgttgagtgagctaaataatacagtatcggatcttcgtggtgaagagcaacatctaaaaaaagaatactcaaaatgtgaggaaacttatcagcatttagataaaacaattcgagatatagttgctccaaaagttgataattttagccatgcttatacagcattagttgataaaaaatctgaaattcaaaggtctgttgatttatttataagaagggaacggctggaaaaaagaaaagccgatttattgaataaaagttgtattgtacatgagaaaactcagttggaaattggtccctctgattctgtaatgcataacctttcattgaaaatttcctccatactaaaagcatggaatttccctggtgaatgcaacgtatttttcgacaaagttgcttcagactttgtgatagatggtaagcccagaggtagtcgaggaaagggactacgagctattacacatgcagcagttagtgtcgcattactagagttttgtcaggaggaggagttacctcaccccggtttccttgttttagattcacctctcctcgcctattataaaccagaaggtgaagatgatgttgctttacaaggaactgatcttaaagaaaaattctatgaatatctttctaagtatcatactaataatagtcaaataatagtgattgaaaatcctcatcctcctgaaaacatgagcgaaaagattactacgacaatttttactaacaaccctaaaattggtcgtcaggggttactatag

SEQ ID NO: 8860 - DNA, 486 bp, Escherichia coli
atgaaacataatttacatacagagccattcaatagtccttttgaagctggtgtacgttcacttgcgattttagttgcggcatttcctgaagcctatgacttacaacggctcgttgaaatggattacctcgttgttcattcaggcgatgttaatggcccggcaagcctacatgcacctctacctatgcgtgcaggtgaattactagtaaggcatggtttgattgaaaaaggattactgctcatgattagcaggggattagtgcaaagagttgcagcaagggatggatttagatatcaggcgggggaggttgcagctccttttatggcatctcttacaactgaatattcatgtagattaaaaagatgtgcagagtgggcggttatacaatttaatgatttaacaattcaggaaatacggaacattacacatcgattctttcaacaatggtcgagtcagttccaaaatattcagtcatctggaggataa

SEQ ID NO: 8861 - DNA, 1101 bp, Escherichia coli
atgattttagaaagtgatctaagagatatacaccctaaatgggccggtggggttccatcaactatgcatatacaggatgggctacccattcctaagtcagtacgagttcaatctttcagccctgctgaatgggaggagttcactgaagaatgggctagttatcttaaaaatgaatatataaccgttagacgttttggtggttcaggggatcttggtattgatatcgctggtttttgttcaaaaaacggttttgaagcggtatgggacaattatcaatgcaaacgatatgatcatcctctcaggcccggggaggtttgggttgagatgggtaagatcatttactattcatttctaggcgaatatttgccgccacgtaaacatttttttgtctgttctcagggaatcggaacaagtcttgagcagttgctaaataagcccactgaattaaaagaaaaattagctgaaaattggggtaaaaattgccaagacaaaatttcatctgtcatagatgtcccattgactggtgagttaaaaacctactttgatatgtttgatttcactatattctcttcaaaatcattagttgaacttattgaagtacactcaaaaacagtttttcactcagtccgatttggtggtggattgccgtgtcgtccgaatccagatttgccgccagataaaccagccgataatgagagtcgctatctacgtcaactccttgatgcttatggagatcatttaggtacccattttcctgattctactttcttagattcacataaccagtttaaaagagactacctacgtcagcgtgagcgtttttaccatgccgagtcactgaaaaattttgcgcgagatacagttcctgcgggaacatttgatcaattacaggatgaaatttttcatggagttattgatgtatgtgaagatttccatgacagtggatttgaaaggatgaaagcaacaatcaagcaagcaaccatcatcgcggtaacatctaaccctttagtatcgtcttttaaaactcaagatcgtcaaggtatttgtcaccaattggctaacgatgatcgtttgaattgggttcctaataatgaaacataa

SEQ ID NO: 8862 - DNA, 684 bp, Escherichia coli
atgaaaacacagcatgatcatcatgaccgcctgtctgtcaggctatcagtcattatcagccgcttactggctggtgaatctctggagcttaaagtattagctgatgaatttggtgtctcagaacgcaccctacagcgggattttcagcaacgcctgatccatctggatcttgagcatcgcagcggaagttaccgacttatccgccaaacaggccgggagcacttacccaatacatttgcgtttatacgtaattcaggaatttcaggaatcattccggctcaaaaccgcaagttgatccggttgattgccagcaattccggcgtatcgccgtgtcttattgggcatggggcattatcttctcccgtcacgcagactgcctgttttctgaaactggcggaagctatccgcgactaccgcgccgttacattattggttaacggtaaaagctacgaagcagtagctccccgccgtctgatatttcagtccaaaaactggtttcttgttgctacccgcaccagaaatttacaggtgtttcggatggaagacgttaacgccgtaaccgttctggatacctctttccgcagaaagcctgaacttgatgctctgactgccagtgaagagtttatttcagccctccctcactttcgtttcataagtgacgtaattcagaccttcagagagtaa

SEQ ID NO: 8863 - DNA, 1014 bp, Escherichia coli
atggatgacccggtaaagggcgaaggccggatgattactgatgccagtggcgtcaccagaagggaaggcgggattttgggaatgtggagcaatatatttccagaacgtaatggtagcaacgagcaaaaaggtgatagcacaccgcgcatacccgacatcagggatattcttgatattttccctcagccactgcgggaaaagctgttgaacaaaatcagtgaagccatcgactatgaacccgtgattggtgtcatgggaaaaactggcgcggggaaaagcagcgtatgtaatgcgctgtttaaaggggaggtttgtgcagttagcgacgttgaggcatgtactcgtgaagttcaggaattgcatatacgcttcggaaaacattcgctgaagataattgatatacctggtgtcggtgagaatgcccggcgggataaggagtatgaagatttataccgcaatttgcttccctccctggatctcatcctgtgggtaataaaaggtgacgatcgggccttttctgcggatgagcatttctacaacaatgttctgctccctgctggtgggggtgagcgcgttttattcgtccttaaccaggttgataaaattgagccattccgcgagtgggatactcatctgcatcagccatctcctgcacagcgcatcaacatcgaaaagaaagaagcctacattactgaacgatttggttttacgcactatccggtgacacctgtctccgccgatgagggctacaacattcttcgtctggtagagactattattcgggctttgcctgatcgggctaaaagtagcacggcttcgcagtttaaggatgagttcaaaaccgaagaggtcaagacggaagcaaaaaacggcttcggcagcgtaatctccgggatactcgacgacgttattgattcttttccgttaccaaagcctgtcaaagagcttacccgtaagggtaaagacaaacttatcgagtgggctggtaatgcctgggaccatttttttggatag

SEQ ID NO: 8864 - DNA, 786 bp, Escherichia coli
atgaaactaatcattatacctgcattgtttgtatctttatttgcattccaccctgcttatgcagtcggggcctatgacctgcaatgtatgcttgataacggcgagcaaatgacactcagccacgtcagcaataccgtttatatcagttttgaaaatcctggcggtgactccgaagagagcggctctgttattaaactggatattccttccggcgaagcgaaacagattctggcggctaatccgggagcaggaaccgcttctttcacattacgtggagaaaatgaagatatcgaaggcgcggttgcagtcaattactcagaatatgatggtacaggtgatgcttattacactgtcatgaatgcaatggggcaggaaaccagcacagtatcatgcaagccgggtaccattaaggtttccagaagcctccttcagaatggcattaatggcgttggtagccagcaggctaataaacctgatccctctcagcaacagcaggcacagcaatctacgacaccaccgtttaaagttcagttcggcagctccgtcagcaatgaaggctggaataccaaatatggtgttattcagctcactatcactgatgacaacgtggtgctgaaatccattcgggtaaacagagggaactgtaaaatggagagcgtcggtaacagaaccctgccagccaaatataaattcggtgatgtggctacgttcaaatatatgaagtgtgaccgtatcattgaagctgatattgtgaccgatacggggagctggacatttaattcctaa

SEQ ID NO: 8865 - DNA, 219 bp, Escherichia coli
atgagcaatcaactgaataccgatactgacctgatgaatgacaaactggtgacgatggcatttattaccacgtttactggcctgactgacaaatggttttataaactgattagtgaaggcaagtttccaaagcctatcaaactggggcgtagttcccgctggcgggaaagtgaagttaaacgctggctgacggaacgtattgaagaatcccgctattaa

SEQ ID NO: 8866 - DNA, 615 bp, Escherichia coli
atgaaactgaatgaacgatatggcaagcctaatgcacactatatgaaacgtctggaagagattacccgttatgcgatggatgattacgccagaatactggctttcagagtggatttattactgccagtggataatagccataaagggtatgactcagcggttattacccgttttatagcctcactgaaagcgcagatagccgcatatttacaacggcgcaggagagacggtaaacgtgtttatccctgtaagctgcgatatgcatgggtaagagaatttggtgaactgaatggcaacaagcattatcacatgctgttgctggttaatcgggaagtattcagaaacaccatgctgaatacggagaattcagcgcaacctcgcggattgctggtgggaatggtggcgcgggcatgggctgtggcgcttaggcgtaccggagatatggcaaataaagtcccctttcatttaccgggcgtctcttatgaacttgatcgcagaaatggcacaaatacggactttttccgcagctacatatatcacatcagttatctggcgaaggagtacaccaaaaaccacgatgacggtgaacgtaactttggttgtagtcagggataa

SEQ ID NO: 8867 - DNA, 954 bp, Escherichia coli
atggccgttaatgtgcgctcatcaatagcagtgaaggatatccgaaccagcaggttcctcttctggtacatcaggaaaaacattcagggagcaaatcaattcgcgtttgatgggaacaatccagatacatccctttcggagagaattattaatacagccctcgaggccgggtatcccgatcccattcagcggggcaattttattcgctcactggaactggcgattaatacgacgcttctgccggagaaatattttagttggttaaaagaaaatgaaagagcgacgttctggctatggggcgtgatgtgtcttgattaccgctgtatggagtcaattaacgaaaagttgggcacaaatttaaacattaactggtatcagaaagccggaataacagattctcctgcaagccatagcgaaagatactcaatcatcgttgcattactggactatattaatattgagactaatcaggcaccattgatgagacagtggctatatgagaggcttgtattctggagggcaaatgaacatcagagaataaaattacgctggcttactgaggataatagtgaagtctgtacatgggcttataattacgttaataaattccagaaagagcacggcggtaatacaggaaaccatttagaccccgttcagattccggaaccactgaatagtgtagaaacctatcatgccatttatgccatgctggatttatggtcagcggatgatgacctccagcagaaagcggtaaagaaaataaataaagcgttttaccaaaaaaacttcagacgtaaactttctgaaaaacgggaacgggagtctatcagtgatacgcataaagaacgtctgtattttctggttaaattttacaagtcagataaaatatctgttattgaaaggctaatagacgaaagggttcagggaatagaaacaagattatcccgtggttga

SEQ ID NO: 8868 - DNA, 441 bp, Escherichia coli
atgaaattagccagccgctttggtcgcgtaaatcaaatccgtcgcgatcgcccattaacgcatgacgaattgatgcagtatgtccccagcgtattcggggaaaataagcacgaatcacgcagcgaacgctatacctatattcccaccattaccctgctcgataacctccagcgtgaaggatttcatcctttctttgcctgccagacccgcgttcgtgatgtgggtaaacgtgagcatacaaaacacatgctgcgtctgcgccgggaagaccagatcaatcacaaccaggtgccggaaattattctgctcaacagcccggttccagttcttatcagatgctgccagggctgttccgttctgtttgttgtaacgggctggtctgcggcgagtcgtttggtgaagtacgggtaccgcataaaggcaatgtggtggagaaagtga

SEQ ID NO: 8869 - DNA, 387 bp, Escherichia coli
gtggagaaagtgattgaaggcgcttatgaagtcctcagtgtttttgaccaggttgaagagaaacgcgatgccatgcagtcgctgatgctgcctccccctgcgcaacaggcgctggcaaaggcggcgctgacttaccgctttggcgaagagcaccagccggtgacggaatcccagttactggctccccgccgctggcaggatgaatccggtgatctgtggacgacctaccagcgaattcaggagaacctgatcaaaggcggtttaaacgggcggacggcaaaaggtggtcgcacgcacacccgcgccattcaaggcatcgacggcgatatcaaactcaaccgcgccctgtgggtgatggctgaaaacatgttgcaactggcctcataa

SEQ ID NO: 8870 - DNA, 474 bp, Escherichia coli
atgtctgaactgatgctaacaccggtattttcggtgagtgaacaacgcgttatccgccgtgcgatgcgtctgctggagaaatatcaacgcaatcctggcgaatcttttctttcctctgacgccacaaaaacctggctgcaactgcatctggcacgacaggagcgggaaatgtttgttgtgctttacctcgataaccagaaccgactgctggaacacgaaacgctatttctcggcacgattaacagtacagaagtacatccccgtgagattgtgaaatctgcgctacggcacaatgccgcagcagtaatccttgcgcataaccatccctccggcgtggcggaacccagtcgggccgacagacttattacaacgaatattgttaagacactggatttggtgaaagtgagggtgctggatcatttcattattggggcgggggatgtcctctcttttgccgaacggggctggctgtaa

SEQ ID NO: 8871 - DNA, 315 bp, Escherichia coli
atgcaacaagaatgggggcttccctgtaccgtaacaccacgcttcactgctcgactggtacaggaaagacataacctgcattacctggctgatcgggccgcaatcaccgggaaattcagctccccggatctgctgcatatcgaccaggcttttccggtgttgatgaaacaactggagctgaaactggctgacggtgaactctccccctgccaacaacgtaccgtcacgctatacgccaaaggactaacctgcgaagccgatacgctgggttcctgtggttacgtctatatcgctatttatcccactcaacgctga

SEQ ID NO: 8872 - DNA, 426 bp, Escherichia coli
atgaaaattattcctgcaacgacgctgcgggcgacgacgtcatatctgtctcctgtcgtggtctggcaaacattactggcccgcctgctggagcagcactacgggctgaatcttaatgacacaccattcaacaatgaaaaggtgattcaggaacacatagacgccgggatcactctggtcaatgccgtcaattttctggtggagaagtacgaattggtccgtatcgacaggaaaggatttagctggcaggaacagacgccttatcttcgtgcggtcgatattttgcgggcgcggcaggcgaccggcctgcggattcagtgcaaaaacacgaatataatcagccggatggctgattcaagacatgataaaagactttaccagcgcacgtttaaagcgtgcaagagatgttattatactaaaacataa

SEQ ID NO: 8873 - DNA, 1398 bp, Escherichia coli
atgagaatcgacaaactgtcactgcttaactttcgttgcttcaaacagctcgatatcacttttgatgagcacattacgattctggttgcaccgaatggcgcgggcaagacgacagtgctggatgcggtacgcctggcgctgttcccctttattcgtggttttgatgccagcctctacgtgaaagataaatcactagcgatccgtaccgaagacttacgtctgatttaccgccaggaggcactgaacatggaaatgtcgtctccagccaagattacagctaccggagaatgggcaagcggaaaaacggcaacctggatgctcgataaacgaggagaacagccgccacatgaagataagatggcggcgcagcttacccgctggggtgagcaactccagaaacgagtacgtgaagagcatagcttgcaacaagttgaacttcccctaatgctttatttggggactgctcgcttatggtatcaagaacgttatgaaaaacagcctactgagcagcgcctggataatagtgccttttcacgtttgtccggctatgacgattgcctctcagccacatctaactataaacagtttgagcagtggtatagctggctatggcttagctaccgtgaacatcaaatcacacaacttgaatcaccttcagcaaagttaaaagaaggtgttcgtgttcaacggatgaaagaagccattcaggctatccagcaggccattaactgtctgacccagcaggtgacaggctggcacgatctggaatacagcgccagccataaccagcaactggtaatgagccatccgcaatacggcaagatccccttatcccagctcagcgatggcttgcgaaatgccgtcgcaatggtggcagatatcgcatttcgctgtgtcaaactcaatcctcatttacaaaatgatgcagccttaaaaacgcagggaattgtgctgatcgatgaagttgatatgttcctgcaccctgcctggcagcagcaaattatccagtctttacgcagcgcatttccgcagatccagtttattgttacgacccatagcccgcaggtgctcagtacggtaaaacgcgagtccattcgtctgcttgagcaggatgagaatggcaacgggaaagcgttgatgccgctcggagcaacctacggcgagccgagtaacgacgtgctgcaaagtgtaatgggcgtcgatccacagcctgcggtgaaggagaaggcagacctgcaaaaactgacaggatgggtggatcaggggaaatacgacgagccgaaaacgcagcaactgatggtcgcattggaagttgcgttgggtgagaagcatccacagcttcaacgcttacagcgcagtattgcccggcagagactgctgaaagggaaagcgcaatga

SEQ ID NO: 8874 - DNA, 564 bp, Escherichia coli
atgaggcatgtgatcaaaactcaacttgggaccgttgccttactgaccgcacatgaaaacccaccacaagatgctgatcaatcaaccaggcgctggcgaaatttcagaagagataaagccgctgtaatggtccagctcattaacgagcagtatcacctttgttgctacagtgaaatacgctctgatcttcgtggtcttggttatcacattgagcacgttgagaataagagccagcatccagaacgtacttttgattatcagaatctcgctgccagtgcattagattcaggggagaacggcggtttatcttccctgaaaggaaaaaatgcttttggcggtcatgcccaaggaaaacaagatgttgtagatatggcaaaatttatccattgccatattcgcgattgttcccgttattttgcttacctttctgatggtcggatagttcctgctgatgagttaaatgcacaagaaacggagaacgcgcaatacactatcgatctactgaacctgaacagcggattccttcaaacggaacgtcgtaatcattgggaagagctggagtag

SEQ ID NO: 8875 - DNA, 711 bp, Escherichia coli
atggcggagaatcaatccaccgtagaaaatgcaaaagagaaactggatcggtggttgaaagatggcatcaccacgccgggtggaaaactcccttcagaaagagagctgggagaactgctgggcattaaacgtatgacgctgcgccaggcgttgttgaacctcgaggcagaatccaaaatcttccgtaaggatcgtaaagggtggttcgtgacccagccgcgatttaattacagtccagagctgtcggcgagctttcagcgggctgcaattgagcaagggcgggagccttcctgggggtttaccgagaaaagccgtaccagagatattcccgagacgctcgtgccactgattacagtgacaccatcaactgaactctatcgcatcaccggctggggagcgctggaaggacataaagttttctatcacgaaacatatattaatcctgaagttgccccgggttttattgaacaacttgaaaaccactcattttctgcagtctgggaaaagtgctaccaaaaagagacggtagtaaaaaaattgattttcaaacccgtcagaatgccgggcgatatcagcaagtatcttggcggttctgcgggtatgccagcgatcttaattgaaaagcatcgcgccgaccagcagggcaatattgtccagatagatattgaatattggcgatttgaggccgtagacctcatcattaatctgtag

SEQ ID NO: 8876 - DNA, 981 bp, Escherichia coli
atggtgacaataaataacgcaagaaagattctacaacgtgtcgacactcttcctctttatttacatgcttatgcctttcatttaaatatgcgactggaaagagtgttgcctgctgatttacttgatatcgcaagtgaaaataatctacgtggcgtcaaaatccatgttctggatggagagcgtttttctcttggtaatatggacgataaagaactctctgcctttggggataaagcccgccgtctgaaccttgatattcatattgaaaccagcgcctcagataaaaaatctattgacgaagccgtcgccatcgcgttgaaaactggggcatcctccgtacgtttttatccgcgttatgaaggtaatttgcgcgacgtattatcgattatcgctaacgacattgcctatgtacgagaaacgtatcaggacagcggcctgacttttacgatcgagcagcatgaagatttaaaaagtcatgagctggtgtcgctggtcaaagaaagtgagatggagtctctttccttactgtttgattttgcgaacatgatcaatgcaaatgagcatcccatcgacgctttaaaaacgatggcaccgcatattactcaggtccatatcaaagatgctttgatcgttaaagaacagggtggcctgggacataaagcctgtatttcaggtcagggggatatgcccttcaaagcgttattaacgcaccttatctgcctgggtgatgatgagccgcaggtgacggcatatggcctggaagaagaggttgattattatgcaccggcgttccgctttgaagacgaagatgataatccgtggatcccttatcgccagatgagtgaaacaccattgccagaaaatcatttactggatgcgcggttacgtaaagaaaaagaagatgcaattaatcagataaatcatgtgcgtaacgtactacaacaaatcaaacaagaggcaaaccatcttctgaacaactaa

SEQ ID NO: 8877 - DNA, 1266 bp, Escherichia coli
atgctcacgaaaaagaaatgggcgttatttagcctattaacactgtgtggcggtacaatttataaattaccgtcgctgaaagatgcgttttatatcccgatgcaggaatatttccatttgaccaatggtcaaattggtaatgctatgtcggtaaactcatttgtcaccacagtgggcttttttctgtctatttattttgccgataaactaccgcgcagatacaccatgtcattctcactcattgcgacaggattactgggtgtttatttgacgacaatgccggggtattggggcatcctctttgtctgggcgctatttggcgttacttgcgacatgatgaactggccggtcttgctcaagtcggtaagtcgattgggcaatagcgaacaacaaggtcggttgtttggcttcttcgaaacagggcgtggcattgtcgataccgtggtggcattttctgcgttggcagtatttacctggtttggcagtggcttattgggttttaaagcaggcatctggttctattcccttattgtgattgccgtaggcattatcattttctttgtcctgaatgacaaagaagaggcaccgtccgttgaggtgaaaaaagaagacggagcatcgcaaaacaccagtatgacctcggtgctgagagacaaaaccatctggcttatcgctttcaacgtcttcttcgtttacgcggtttactgtggcctaacattcttcattccattcctgaaaaacatctatctattgcccgttgctctggtgggggcttacggcatcattaaccaatactgtctgaaaatgattggaggaccgattggtggcatgatttcagataagatcctgaaatcgccgagtaaatatctatgctacacctttatcatcagtaccgctgcgctcgtactgttgattatgctgccgcacgaaagtatgccggtctatttagggatggcatgtacgctgggctttggcgctatagtcttcacacagcgagccgtattttttgcacctatcggcgaagcaaaaattgctgaaaataaaacaggcgcggcgatggcgttgggtagctttattggttacgccccggcgatgttctgcttcagtctgtatggctacattctggatttaaatccggggattattggctacaaaatcgtgtttggcattatggcctgcttcgcattctgtggtgcggtggtttccgtaatgctggttaagcgtattagccaacgtaagaaagagatgttggcggctgaagcttaa

SEQ ID NO: 8878 - DNA, 4131 bp, Escherichia coli
atgaataaaatatacgctctaaaatattgttatattactaacacagtaaaggttgtctctgaactagcccgaagggtatgtaaagggagtacccgcagaggaaaaagactttcagtacttacctctctggcactatctgcattactcccaaccgttgctggtgcatcaacggttggtggcaacaatccttaccagacataccgcgactttgcagaaaacaaagggcagtttcaggctggcgcaacaaacattcctatttttaataataaaggggaattagtaggacatcttgataaagcgcccatggttgattttagcagtgtgaatgtaagctcaaatcccggcgttgcaacattaattaacccgcaatatatagccagtgtaaaacataataaaggatatcagagcgtcagcttcggtgatggtcagaacagttaccatattgtggatcgtaatgaacacagttcatctgatctccacacaccaagacttgataagctcgtaactgaggttgctccggctaccgtaaccagctcatcaacagctgatatattgaacccttcaaaatactcggcattctacagggctggttcgggaagtcagtatattcaggatagtcagggtaagcgacattgggtaacaggtgggtatggttatctgacaggaggaatactcccgacatcattcttttatcacggctcagacggcattcagctgtatatggggggcaacatacatgatcatagcatcctgccctcttttggagaggccggcgacagtggttctccattatttggctggaatacggccaaagggcagtgggaactggtcggtgtttactcgggagtaggaggggggaccaatttgatatattctcttattcctcagagttttctctcacagatctattcagaggataatgacgctcccgtcttttttaatgcctcatccggcgcccccctgcaatggaaatttgacagcagcaccggcactggctctctgaaacagggttccgatgaatatgccatgcacgggcaaaaaggttctgacctgaacgcaggtaaaaatctgacattcctgggacataatggtcagattgacctggaaaactctgtcacgcagggtgccggttcactgacatttactgatgactacactgtcaccacttcaaacggaagtacctggaccggggccggtattattgtggacaaggatgcctccgtaaactggcaggttaatggtgtgaaaggtgacaacctgcataaaatcggcgaaggaaccctggttgtacagggaaccggtgttaatgagggcggcctgaaagtcggggatgggaccgttgtcctcaatcagcaggctgacagttcaggacacgttcaggcattcagtagcgtgaatattgccagcggccgcccgacagtcgtgctggcagacaaccagcaggttaatccggacaatatatcctggggctaccgggggggggttctggatgttaacgggaatgacctgacatttcataagctgaatgccgccgattatggcgcaactctcggtaacagcagtgataaaacggctaatatcactctggattatcagacgcgtccggcagacgtaaaagttaatgaatggtcatcatcaaacaggggaacagtaggttcattatatatttataataatccctatactcataccgtcgattattttatcctgaaaacaagtagttatggctggttccctaccggtcaggtcagtaacgagcactgggaatatgtcggacatgaccagaacagtgcacaggcactgcttgcaaacagaattaataataaagggtatctgtatcatggcaagttgctgggaaatattaatttctcaaataaagcaaccccgggtacaaccggcgcattggttatggacggctcagcgaatatgtccggtacatttactcaggaaaacggtcgtctgaccattcagggccacccggttatccatgcttcaacgtctcagagtattgcaaatacagtctcgtctctgggcgacaattccgttctgacacagcccacctcatttacacaggatgactgggagaacaggacgttcagctttggttcgctcgtgttaaaagatacagactttggtctgggccgcaatgccacactgaacacaaccatccaggcagataactccagcgtcacgctgggcgacagtcgggtatttatcgacaaaaaagatggccagggaacagcatttacccttgaagaaggcacatctgttgcaactaaagatgcagataaaagcgtcttcaacggcaccgtcaacctggataatcagtcagtgctgaatatcaatgagatattcaatggcggaatacaggcgaacaacagtaccgtgaatatctcctcagacagtgccgttctggagaactcaacgctgaccagtaccgccctgaatctgaacaagggagcaaatgttctggccagtcagagttttgtttctgacggtccggtgaatatttctgatgccaccctgagtctgaacagccgtcctgatgaggtatctcacacacttttacctgtatacgattatgccggttcatggaacctgaagggagacgatgcccgcctgaacgtggggccgtacagtatgttgtcaggtaatatcaatgttcaggataaagggactgtcaccctcggaggggaaggggaactgagtcctgacctgactcttcagaatcagatgttgtacagcctgtttaacgggtaccgcaatacctggagcgggagcctgaatgcaccggatgccaccgtcagcatgacagacacccagtggtcgatgaacggaaactccacggcaggaaatatgaaacttaaccggacaatagtcggttttaacgggggaacatcatcgttcacgacactgacaacagataatctggacgcggttcagtcagcatttgtcatgcgtacagaccttaacaaggcagacaaactggtgataaacaagtcggcaacaggtcatgacaacagcatctgggttaacttcctgaaaaaaccctctgacaaggacacgcttgatattccactggtcagcgcacctgaagcgacagctgataatctgttcagggcatcaacacgggttgtgggattcagtgatgtcacccccacccttagtgtcagaaaagaggacgggaaaaaagagtgggtcctcgatggttaccaggttgcacgtaacgacggccagggtaaggctgccgccacattcatgcacatcagctataacaacttcatcactgaagttaacaacctgaacaaacgcatgggcgatttgagggatattaacggcgaagccggtacgtgggtgcgtctgctgaacggttccggctctgctgatggcggtttcactgaccactataccctgctgcagatgggggctgaccgtaagcacgaactgggaagtatggacctgtttaccggcgtgatggccacctacactgacacagatgcgtcagcaggcctgtacagcggtaaaacaaaatcatggggtggtggtttctatgccagtggtctgttccggtccggcgcttactttgatttgattgccaaatatattcacaatgaaaacaaatatgacctgaactttgccggagctggtaaacagaacttccgcagccattcactgtatgcaggtgcagaagtcggataccgttatcatctgacagatacgacgtttgttgaacctcaggcggaactggtctggggaagactgcagggccaaacatttaactggaacgacagtggaatggatgtctcaatgcgtcgtaacagcgttaatcctctggtaggcagaaccggcgttgtttccggtaaaaccttcagtggtaaggactggagtctgacagcccgtgccggcctgcattatgagttcgatctgacggacagtgctgacgttcacctgaaggatgcagcgggagaacatcagattaatggcagaaaagacggtcgtatgctttacggtgtggggttaaatgcccggtttggcgacaatacgcgtctggggctggaagttgaacgctctgcattcggtaaatacaacacagatgatgcgataaacgctaatattcgttattcattctga

SEQ ID NO: 8879 - DNA, 339 bp, Escherichia coli; identical to SEQ ID NO: 5

SEQ ID NO: 8880 - DNA, 465 bp, Escherichia coli
atgaaaatcttcatctccgatctacaaaaagcagagctggaacgccttcacgataccagtcgtaacaagcgggtctgcgatcgtattaaagccattcttctggcttctgaaggctggagttcagtcatgattgctcaggctctgcgcctgcatcagaccaccgttgatcatcatatccatgagtttatgaataaagggaagttaaagcccgaaaacggtggttcagacagtaaactcagtgctgaacaaacatcactcttaatcaaacatttatctgataatttgtttcaccatactcatgaaattatcgcctttgttctccacacatggggaattttgttcagcgttgccggtatgaacaaatggttgcatcgtaacggcttctcttacaaaaaaccggctggaacgcctcataaattcagcgaagagaggcaggcgcaattcattgaatttatgaagacctga

SEQ ID NO: 8881 - DNA, 153 bp, Escherichia coli
atgtttttatatggtttaagtggaaaagatattgctaataacctcggcgtttcaataaaaactgtttcgagttataaaaagtctttaatgaatagactgtatgtcagtaatgatatacagttattttacaaaggtctattattatgtagataa

SEQ ID NO: 8882 - DNA, 198 bp, Escherichia coli
atggaaataaagacacggagagaaaccaggcagacgttggcgcagtggtttgaagagaagggaaggcaggcggttagacaggaggtaagtcaggaattcgcccaacgttttctgaataaagggatgtctcgggaagacgttgcagaggtgacagctttatctcttgcagagattgataagctaattaactctaactaa

SEQ ID NO: 8883 - DNA, 2442 bp, Escherichia coli
atgagcactgataaagaagaatttgcactatattgcgaagcaaaaaatgacaaagtaagaaaacgcctaggaattaaaggtggtttttactggactacagcaaaaaaattatctgttgcaatctcccgctgcattaccgcaatggatgacaacgattatgatgaagacgactttaaaaaacccgtccgcgtcaatttgcccgttgttgacgaccttccgccagaaggcgtgtttgatactgaattctgcaatcgctatgaaaaaggcgggaaagatggcatcacaatgacatttatcggcccttccccctctgttcaggacaaaccagccagcactgacaataccaacatcaacggcgaagccatgactgagattgaggagagcatgcttctgcctgtctccggtcaggaactgcccattcgttggcttgctcaacacggcagcgaaaaaccagtaacgcacgtttcacgcgacgaactccaggcattacacattgcacgggctgaagaactaccggctgttactgccctggctatttcgcataaaaccagtctgctcgactcgctggagattcgcgacctccacaaactggttcgtgacactgacaaagttttccctaatcctggtaattcagacctgggactaataactgcttttttcgaagcatacctagacgctgactacactgatcggggtttgctgacaaaagagtggatgaaaggaaatcgtgtttcacgcatcacccgcacggcttccggtgctaatgctggcggtgggaacaaaaccgatcgcaatccgaatttagtacacaccctcgacacactggatgtggagattgcagcagccacacttccgatggattttaatatttatgaaattccgggcagcgtttatcgtcgcgcaaaagaagtagtcctgaacaaagaaagtccgttcaaagaatggtccgcagcacttcgtgcaaccccgggtattctggactattcccgcgccgctatttttgcacttatccgaagcgcacaccctgaattttatcactacccgggacgccttcaggggtatatcaacgcctatttgacggaaactgatcacgagaaccccagcaaggaaactctcacagctgcccggcatacgccggaaaaagatatcctggaagaaattaaccgcgaggtggttactgagcgtgaaacagaagaagaaaaaccacaaccatctgacgcaatggcaggtgaacaggcaacaactgaaacaatggaaccggatacaactgaacatggccagaacgcgcagtcgctggatgctcagtcgcaggtgagttccgctaaccaagtaaaagtcaccgctgacgaagtaaacaaaattatgcaggcagccaatatcagccagcctgacgccgataagttacttgctgtatcgcgtggtgaatttgttgaggggattagcgaccctaatgatccgaaatgggtcaaagggatccagactcgcgattctgtgaaccagaaccagcatgaatcggaacggaacgaccaaaaagcggaacaaaacagcccaaatgcgttacaaaacgagccagaaacgaaacaatccgaaccagtggcgcaacaggaagtggaaaaagtctgcaccgcctgcggtcagaccggcggcggcaactgccctgattgtggcgcggtgatgggcgacgcaacataccaggaaacattcgatgaagagtatcaggttgaagttcaggaagatgatccggaggaaatggaaggcgctgaacatccacacaaggagaacactggcggcaatcagcatcacgatagcgataatgaaactggcgagacggcagatcactcaattaaggtgaacggtcatcaagaaatcacatccaccagcaggacgtgtgaccatctaatgatcgaccttgaaaccatgggaaaaaatcctgatgccccgatcatctcaataggtgcaatatttttcgatccgcaaaccggagatatgggaccggaatttagtaagactatcgatctggaaactgctggcggagtcattgatcgggacaccattaaatggtggcttaagcaatcacgcgaagcgcaatctgctattatgaccgatgaaatcccgttagatgatgcactgttacaattgcgggaatttatcgacgaaaactccggtgaattttttgttcaggtctggggaaatggagccaacttcgacaacacgattttgcgccgttcatacgaacggcaggggatcccctgcccgtggcgttactacaacgatcgcgatgtacgcacaatcgttgagctggggaaagccatagacttcgatgccagaacggctattccattcgaaggtgagcgccataatgcacttgatgacgcccgttaccaggcaaaatacgtttcagttatctggcaaaaactgatcccgagtcaggctgatttttaa

SEQ ID NO: 8884 - DNA, 1644 bp, Escherichia coli
atgtccagcttgatcaataacgccatgagcggactgaacgcggcccaggcggcgttaaatacggcaagtaataatatctccagctataacgttgccggatatacccgccaaaccactattatggcgcaggccaatagcacgttgggcgctggcggctgggttggcaatggcgtctacgtttctggtgtgcagcgtgagtatgatgcgtttattaccaaccagttacgtgcggcgcagacgcaaagtagcggcctgactgcccgctatgagcagatgtcgaaaatcgacaatatgctctccaccagtacctcttcgctggcaacacagatgcaggatttcttcaccagcctgcaaacgctggtaagtaacgcggaagacccggcagcgcgccaggcgctgattgggaaatcagaagggttggtgaatcagtttaaaaccaccgatcaatatctgcgcgaccaggacaaacaggtcaatatcgcgataggtgccagcgttgatcagatcaacaattacgctaaacaaatcgccagcctgaacgatcaaatctcgcgtctgacaggcgtgggggcaggggcgtcacctaacaatctgctggatcaacgcgatcaactggtgagtgaattaaaccagattgttggcgtagaagttagcgttcaggatggtggcacttataacatcacgatggccaatggctactcactggttcagggaagtacggcgcggcagctggcggcagttccttccaccgccgacccttcgcgtacgactgtcgcttatattgatgggacggctggcaatattgagatcccggagaaattactgaataccgggtcgctgggcggcattctgacattccgttctcaggatctggaccagacgcgtaatacgcttggacaactggcgctggcatttgccgaggctttcaacacccaacacaaagccggatttgatgctaacggcgatgctggtgaagatttctttgctatcggtaagcccgcggtactgcaaaacacgaaaaacaaaggtgacgttgcgatcggtgccacggtaactgatgcctccgcggtactggcgacagattacaaaatctcgttcgataataatcagtggcaggtcacccgccttgccagcaataccacttttacggtgacgccggatgccaacggtaaagtggcatttgatggtctggagttgacgtttacaggaacgcctgccgttaacgacagcttcacgctgaaaccggtaagtgacgccatcgtcaacatggatgtattaatcaccgacgaagcaaaaatcgccatggcgagcgaagaagatgcgggtgatagcgacaaccgcaacggtcaggccctgctggatctgcaaagcaacagtaaaacggtgggcggtgcgaaatcctttaacgacgcttatgcctcattagtgagtgatatcgggaataaaaccgcgacgttgaaaaccagtagcgccacgcaaggtaatgtggtgacgcagctttccaatcagcagcagtcgatttccggtgtcaatctcgatgaggagtacggaaatctgcaacgttttcagcagtattacctggcgaatgcgcaggttctgcagacggcaaacgcgatttttgatgcgctgattaacattcgctaa

SEQ ID NO: 8885 - DNA, 363 bp, Escherichia coli
atgatcagttcattatggatcgccaaaacgggccttgacgcccagcaaaccaatatggacgtcattgccaacaacctggcaaacgttagtaccaacggttttaagcgtcagcgcgcggtgtttgaagatctgctgtatcaaaccattcgccagccgggggcacagtcttccgaacaaaccaccttaccctccggattacaaatcggtacgggggtacgcccggtcgccacggaacgtttacacagccagggcaacctgtcgcaaaccaataacagtaaagacgtcgcgattaaagggcagggctttttccaggtgatgttgccagatggctcatcagcctatacccgtgacggctctttctag

SEQ ID NO: 8886 - DNA, 756 bp, Escherichia coli
atggatcacgcaatttataccgcgatgggagcagccagccagacgctgaatcaacaggcggtaaccgccagtaatctggccaatgcctctacgcccggttttcgcgcgcagttaaacgccttgcgcgcagtgccggtggaagggctttcactgcccacgcgcacgctggtaacggcgtcaacaccgggtgcagacatgacacccggcaagatggattacacctcgcgcccgctggacgttgcgttgcagcaggatggttggctggccgtgcagaccgctgacggcagtgaagggtatacgcgtaatggcagcattcaggttgatcccaccgggcaactgacaattcagggacatccggtggtaggcgaggcggggccaattgctgtgccggaaggggcggaaatcactattgctgccgatggcacaatctcggcgctgaatccgggcgatccggcaaatacggttgcgccagtggggcgtctgaagctggtgaaagccacgggcagcgaagtccagcgcggtgacgatggcatttttcgtttaagcgcagaaagccaggctacgcgtgggccggtactgcaggcagatccaaccttgcgtgtgatgtcgggggttctggaaggcagtaacgtcaatgccgttgcggcaatgagcgacatgattgccagcgcacggcgttttgaaatgcagatgaaggtgatcagcagcgtcgatgataacgcaggccgtgccaaccaactgctgtcgatgagttaa

SEQ ID NO: 8887 - DNA, 1221 bp, Escherichia coli; identical to SEQ ID NO: 5756

SEQ ID NO: 8888 - DNA, 798 bp, Escherichia coli
atgcatgagctggaagtcctgctgagtcgcctgaaaatggagcatctgagttatcacgttgaaagcctgctggaacaggcagctaaaaaagagctgaactaccgggagttcctgtgcatggcgctacagcaggaatggaacggcaggcatcagcgcggtatggagtccaggctgaagcaggctcgtctgccgtgggtcaaaacgctggagcagttcgactttaccttccagccgggcatcgaccgtaaggttgtccgggaactggctggtctggcgttcgtggagcgcagcgaaaacgtgatcctgctgggacctcctggtgtcggaaaaactcatctggccatagctcttggcgtgaaagcggtggatgcgggacatcgggtactgtttatgccactggacagactgatcgcgacactgatgaaagcgaaacaggaaaaccggctggagcgtcagctgcagcaactgagttatgcccgggtgttgatcctggatgaaataggctatctgccgatgaacagagaggaagccagcctgttcttccggctactgaaccgtcgatatgaaaaagcgagcatcatactgacgtcaaacaaagggttcgcagactggggagaaatgttcggagatcacgtgctggcaacagcgatactggatcggttgctacatcactcaaccacgctgaatatcaaaggagagagttaccggttaaaagagaaacgtaaagctggagtgctgaccaaaaacacaacgccaatcagtgatgatgaaatggtgaaaagcggacagcatcagtaa

SEQ ID NO: 8889 - DNA, 1173 bp, Escherichia coli
atgctgagcagagaggacttttacatgataaagcaaatgcgccagcagggcgcgtacattgtcgatattgcgactcagattggttgctctgaacggacggtcagacgctacctcaaataccctgaaccgccagccagaaagacccgccacaaaatggttaagctgaaaccgtttatggattacatcgacatgcgcctggcagagaatgtctggaatagtgaggttatctttgcggagattaaggcaatgggttatacgggcggacgttccatgctgcgttactacatccagcccaaacgtaaaatgcgtccgtcaaaaagaacagttcgcttcgaaactcagcctggataccagctccagcacgactggggcgaagttgaggtggaggttgccgggcaacggtgcaaagttaactttgcggttaatacgctggggttctcccgccgcttccatgtcttcgccgcaccaaaacaggatgctgagcatacctacgaatcactggttcgcgccttccgctacttcggtggttgtgtgaaaacggtgctggttgataaccagaaggctgcggtgctgaagaataacaacgggaaagtcgtgttcaactccggattcctgttgctggccgaccactataacttcctgccacgggcatgccgtccacgcagggccagaacaaaaggtaaggttgagcggatggtgaaatacctcaaggagaacttcttcgttcggtaccgcaggttcgacagcttcactcatgttaatcaacaactggagcaatggatagccgatgtggctgacaaacgggaacttcgccagttcaaagaaacgccggaacagcgcttcgcgctggagcaggaacatctgcagccgttaccggatacggacttcgataccagttacttcgacatccgccatgtgtcccgggacagctatatcgaggttggtggtaatcgttacagcgttcccgaagcgctgtgtggtcagccggtatcgatacgaatatcgctggatgacgagttgcggatctacagtaatgagaaactggtggcctcacatcgcctctgttcggcatcgtctggctggcagacagtgccggagcatcacgccccgctctggcagcaggtcagtcaggtggaacatcgaccactgagtgcctatgaggagctgttgtga

SEQ ID NO: 8890 - DNA, 204 bp, Escherichia coli
atgttgggtggagcggacaatccaaatggtgaattaccgtcttatatcactggcgctgacagctggcagttgtatgagcgcggagagcttgttgatgtgctgtggggggaactggaatggtcttccccgacagatgacgatgagctgccggaagtcaccggacctgcgtggatagtcgacaatgtggcgcattatggcggatga

SEQ ID NO: 8891 - DNA, 141 bp, Escherichia coli; identical to SEQ ID NO: 7044

SEQ ID NO: 8892 - DNA, 225 bp, Escherichia coli
atgaagaaattacgggtaaccgtagaaccttttcagggaacaattccgttccgtattttgcagcgtggtcgtgttcttgttgaaggttcgttcagtggtaaatgtacgcaattacactcccggacctttcaggtgaatgccacgaatgaagagctaaccgtggagtgtacgatgaatgccgctaaatgccgcatggtatccgctgcattacagccagtgtgttga

SEQ ID NO: 8893 - DNA, 495 bp, Escherichia coli
atgagcagagtaaccgcgattatctccgctctggttatctgcatcattgtctgcctgtcgtgggcggtcaatcattaccgtgataacgccatcgcctacaaagaacagcgtgataaaaaagtcagtgagctgaagcaggcgatcgccaccatcgctgacatgcagcagcgtcagcgtgatgttgctgcgctcgatgcaaaatacacgaaggagttagctgatgcgaaagctgaaaatgatgctctgcgtgatgatgttgccgctggtcgtaagcgcctgcgggtcaacgccacctgccccggtaccgtgcgtgaagccaccggcacctccagcgtggataatgcaaccggcccccgactggcagacaccgctgaacgggattatttcatcctcagagaacggttgatgacaatgcagaagcagctggaaggggcgcaggaatatatccgcactcagtgcactaagctggctttttattatccggaggatacatga

SEQ ID NO: 8894 - DNA, 378 bp, Escherichia coli
atgccttgtaaattcagattcagccgtcgaagcgagaaaaatctggagggcgtcaaaccacaactggttgccgttgttcgcagagccatggaattaacggagatcgatttcggtattacggaaggtctgcgcacgaaagaacgccagaaacaactggttgctgaaggtaaaagccagacaatgaacagtcgtcacctgacaggcgatgctgtggatgttgttgcctacgttggcagcctggtgtcatgggagtgggctttgtacgagaaaatcgcacaggcatttaagcaggctgctgtagagctgaatacacctgttgaatggggtggtgattgggataccctgaaagatggacctcatttccagttaaagcgctga

SEQ ID NO: 8895 - DNA, 276 bp, Escherichia coli
atgttaagtaaccttcccggattgctgaatgtggcgttatgcacggttatcgtgctgacgctctttttttatcgtcgtcgtgattccagacataaaccactgatgtcatggctggcctggctgctgatgctgctgtatgcctttgcacccctcagttatctgtgtggtcgcccgttagaagagaactggctggcggttgggcttaatatgctgttctgtgtgctggtgatacgcgcacgcggtaacgtcacaaaaattctttcattacggaggtaa

SEQ ID NO: 8896 - DNA, 393 bp, Escherichia coli
atgtctgaacctttatccggtactggtacagctgcggcactcggcggggcgacgatatttggactgtttaccggaacgaatttcgggattgtgtttggcgcattcgcgggggcgttgttcgtggcaacgatgccccaggcgctttcagcctggcgggtggtagcgcattttcttgtgtcgttcattgtcggtgtgctgggcgcagaggttctggcatcctggctggtaaagcatacagagtttgacggtgcacctgtcgacgcactgtgtgcagtgctggtgtctgtggtgtcggtgaagattctgtcgttcatccaccagcaggatatcgcatcgctgatgtccagcctgttctcccgtcttcggggcggaggaggcggtaatgttaagtaa

SEQ ID NO: 8897 - DNA, 426 bp, Escherichia coli
atgaagaaaaaattaaaagttttgactcttgttcttgcttcgttatccagcgtttgttatgcaggcatgggcgattacaataattatgtaagtgatgtgcggataaataatctgtcttatggtgtatatacgtcagggagtaaggaagttcagtttttttgtatcggactgatgcgcaatggggggactgttacacctgatattgtgtgtaaggtggatttgtttgggtatcataaacaggggtttgataatatgctggagacggcaaggtattattatgctacgggagaaggtgtaagggtgtattataaaggtgatgtctggactgatagtgatttctcaagtgcattctctagaaatgaactgattgcaatcacaacctgcagttcatcagattattgtatggggcctaagtcggcaaaataa

SEQ ID NO: 8898 - DNA, 729 bp, Escherichia coli
atgataaaaaaagttattttgtttttagtgtttttttctggttatgcaagtgctgttgattttgtatatcgagtagactccagaccacctgatgaaatttttcgtgatggattcagatctcatggcgctaatcgaaatttacagcaacatatccggggggattcatgtgcagcaggaagcagggatagtgcatttattgccaccacttccagtttaagtgaaacatacagtattgcccgacaatattattctggcagcagatttcgtgggacgctgtaccggtacagaattcgtgccaataatatattctattcaattcagccttcggttaattatcttacgagtcgtggagttactttttcgggatttgaggaggtaatgatgcgtgagcaaaatgagataattgctttggagcatatacctactgaaaatatagtagaggccgttgagctaacttatgacagagatagcagtcgggtatctgatggccctggaacctctaatgcaagatatgtgtcaatttcatcgtcttcaaatccaggagttattcctgaactggtcattccaacagtatctgtcagagaacgaattagcgcatttggtagcttaattagtgcatgcttctcactgaaaggagtgcgcaggggggatgaaaatatgaaatataattactatgaaatggagttttacgatgctcgtggggttttaaaagaattattaaacagatga

SEQ ID NO: 8899 - DNA, 858 bp, Escherichia coli
atgcgtactgataataacgaacataaagcactattcaccatcccgacggcagcgtacagctccaccctcgcaaacatcaagcccctgccagagcaacggagaatcaccgggcataagcagactgatgcttatctttgggtgctggaggttatccgtctgaacgaacccgcacatctggatgctgctgaggccgcgctggtgaaaattaaaatttccccaaaagaggctcaggaacgctattcgcgttatctgctggcgaatggtggcgatcctttccagattgctttcggtaccatcggcatggataacccggcacaggcaatcaggatcgcccgggaaaatataaaaaaagcagcatcagtcagggctacgtttggtagctatgaagcagcactcgaagatgtggaagccgagcgagtgatcaagtcttcccagaaatttatcgatgatcatctctgggggtggactgcagccgagaagaaagcgggcagcattgacggcatccgtatgaatgaaattgatgatcagcgtcgtgcatatgttgatggctatcgtgatgtgctgccagagcctcatacattgtcagacgtagttcgtgagtttgtttactgggactggctctacagtgttcgccacactgcaactaaagaacagggcgatgagtttggttactctgagcatcacgaatcggtatatgaccgcgagcgctaccttgaaaaattgctgatgaccatcaaaccggtcacacgggctgaagccgtggaggtgtgtcgttggtttttagcaagcggaaagggagaatatatgaaagacaatggctcggcggtcatcctcaatctggttggggagtgtgaataa

SEQ ID NO: 8900 - DNA, 969 bp, Escherichia coli
atgaaaacagcagatgcagcgaaaggccgctggcctgaaatattagagcacttcggtctgccgccgataaccggaaaaaatcacttcaagggtgaatgcccggtatgcggtgcacgtggcaagttccgaattgatgaccgcgacggtgcaggaacgtggatctgtgtatgtggtagtggcgatggtatgaaacttgtcaccctgacacaggcgaagccatttaacgagatttgtaccgaaatagaccgcctgatcggtaatgattaccaacgggttaaaatcccggtaaccagcagcgccaccagcttacgcaaacgggtattgagcaagttttcaaaactggaggcactgcgtggtacatccggcgcagcgtatcttaattctcgtggaatattcagtcttcctgctgaggcgatccggttcaatgccaggcagagacacaacgggagtgtgttccagtctctttattcacttgctacggacgataaaggggagttgtgctatctgcaccagactctgcttgatggtgataaaaaagcagatatcggtagcagtgcaaagcgcctcaaatccctgcaggaagataactatttggatcacgctcgttctgtagctatccgcatgtttcctgtcgccagcactctgggtatcgccgaaggcatcgaaacagcgctgtcagcgcaccagatttataacgtgaacacctgggcaaccattaacagcggctttatgaaaaagttccgtgtaccagctggtgttctgcatctgattatttttgctgaccgtgacgagaacagcgccaccgggctggctgcggcttgcgaatgtgctcatgccaatctgatggcaaagaatgacctgcagcgcgtgagcgtgtactggccggatcacgatgatttcaacaatatgctcatgaacggtgatcaggttcgagagctggttttccataagaaaaaggcggttgcgtaa

SEQ ID NO: 8901 - DNA, 1659 bp, Escherichia coli
atggagctgacgatcacgccgaattttgcacaggaacgagcgctaaacatgttgcgccgtgactggaaggcaaacgacaccttcatggtgtattcgccaacaggtagcggtaaaacgggtctggcagccttcatagttgctggttttgtcagccgtggtatgcgcgctctgttctgtgttccgtacaccatcctgattggtcagacggctaatcggttcgtgcagtatggtttacctggagatgaaatcggttatatctgggcggatcacccgaactacgatccggaccggaaaattcagattgccagcgctgatacgcttattcgtcgtgtttttcctgaaaatatcgatctgctgattatcgacgaagcgcacctgcgtaaaaaacgcatcctgaaggatatcgaacgtctgcgcggcaaaggcgtaaaggtgattggcctgtcgggtactccgttttccccgttcctgggcaaatactatgaccgactgattaaaccgaccaccatcggcgagttaatccagcgtggcgatctgagtaaatacgaattttacgcgccaactaagccggatctgaaaggtgttaaaaccacatcttcgcttgagtacggccgcgattacaacgaaacacagctggctgaaatcatgtgcggctctacgctggtgggcgacattgtacagaactggctggagaatggtcgggatctacctaccatcgctttctgcgtcaacgtagcccacgccaattacctgacaatccagtttaacctggcgggtgttaacgctgaggtaatgaccgcagacactccggtagatgagcgccagaccatcattcaccgctttgaaaccggtgcaacgaaaatcatcgttagtgtgggcgttctggtagccggattcgatagtgacgttcgttgcatcatctacgccaggccaacaaaaagcgaaattcgctggttgcaggcactcgggcgtgggctgcgcaccgcaccgggtaaagcgtcctgccttatcttcgatcacagcggcaccgtgcaccgtttgggttatccggattcaatcgagtacgacgagcttcccggtaagtctgacggcatggaggaaagcgtgcgccgggcagttgaggaacgggccgaaaaactgccacatgaatgccctcaatgccactacatgaagccagcaggcgtctatgtttgcccgaaatgtggacacaagccgctgcgaggtgaagacgttgatactgacactagccgcaaacttaataagctgggtaaaaatcagcatcagtcgacgaaggcagagaaacagtcctggtggagtcagatcaaattttatcagcgccagcgtgcttcgctggggcgtccagtcagtgacggatggtgtgctcacactttccgggaaaagttcggcgagtggcctgacggactgagtaactttccgatggaaattacccctgaggtaaataactacatcagacacaaactgatccggtttgccaaaggccaccagcgggttcagaaggtcactgaaaacgcacaaacaacgattgatttatctcaggaacgtgatgaacgacgtgagataccggcaggcagtgaggcctggcgcatcatgcaggcaaagcaccaactccagaaaaatataaacagtctgagtcagtaa

SEQ ID NO: 8902 - DNA, 375 bp, Escherichia coli
atgagtgaagacctgaagcaaaatttaatcgctcttctggaagagcaattcattcgctccgatgacaaagttgttttcgattatgtgatgcagaaaaaaatcaagtctcagggataccacctgcaacgcaatttcagcatcagcatcagcatcagcggtggtcgtaaagggtttattggttgcctggttacatcatcagacggccagcagtgtgccattgaggtcgataagaagtctctccgcaaccgttcattgatgaagctggctcagctacctgaggggatgtcaggttttgtcctgctcagggacggtaagcaccctcttcgatatagcgagaacggaattgacgttattcgtgcgacgaaatttaagtga

SEQ ID NO: 8903 - DNA, 192 bp, Escherichia coli
atgaaaatgttcaaaggcctcaccaacgaaccggaaacagcttttcatcacattgccgtactgcttgaagcggggttaatcatttcggcttccggtgatgaagaatgtgatgaactttcggatgatatctttttactggcacaacaatacgccagaagcgcatgcgatgcatttaaggagcaaagaacatga

SEQ ID NO: 8904 - DNA, 192 bp, Escherichia coli
atgataactccattaaatattcttgaggaagtggcagcacaaataaaagagaatacatccatgcttgaatttatatttaagaattcgcctgattcaggagagacagacgattatttatgttgcctcattcgctccatgaataaaacctgtgaaatggcttacgcgtatatcgacacactgcgcaacgaataa

SEQ ID NO: 8905 - DNA, 360 bp, Escherichia coli
atgacacatgaacccattaatacatatcgtcgccgtatagctgttgcggcactccatcgaataaaacgtaaaacaggtggtaatctgcttattgttgaccttccggatgggaacattacgaccatagaaataactgaacagtttataaaccagttgctgttacgcttcgaaggtattacccgtggtgaattgggccgggtggagggtgaaaccgaaatccacactgcataccagaatgctatcgggattaatcaacatactgaatacctgactgaaaccggaaagttaattatagacaacctttttcaagaggttattgattacgcgaaagaaaaatatatcagcggaggaattaactga

SEQ ID NO: 8906 - DNA, 216 bp, Escherichia coli
atggctaatttatcccctgtatctgttgtgcacgaaaaagtgcagatcgttatgacaattgaaaatggccaagtcacaggtgtctgcaaagtccgcgatggcgagctgattgccagcatggatacattcatacggctggcagaaagagcggggtatcagataacagcacctgctcaggaggaaaccggtggcattaacagcaacacgcattcctga

SEQ ID NO: 8907 - DNA, 393 bp, Escherichia coli
atgatcgacaaccgcaccgccagcgccattgaccaggcattacagaaacatgatacacccgtcggcccgttattttttgtaacacgccacggaagaacaaaaaaatgcctcacccgaaaaacggcaattcgttacctggcattctttatgaccacccgcgcttttgaacgttcaggattccgacaacgctatcctgacaagcgttttatcttcaacaggaatgagatatggaaacgtggagaatcaaccacagagtatacccgcgcacaccagcgaacaatcagacgactgcgcagactcatcgccaggaaacagtatacagaaaaatggttcagaaaatatgacacatggagcgccggatattacgaactgatggcaacaaaaccattctga

SEQ ID NO: 8908 - DNA, 189 bp, Escherichia coli
atgaacatttatttcagaatagttatatcactggcaattatcacatgtatttacggattaatcgttccggccctcatatcaatgaaggatacggtagcagtgatttctggctttgctctggcgtgtctgaccccgccctgcatttatgccatttataagggtctttctttttctaaggataaaagatga

SEQ ID NO: 8909 - DNA, 828 bp, Escherichia coli
atgaaaaaattactttttgctttagcccttgttctgccgaccattggccttgtcggttgcgatcgcgttgagcctggtaatgtgggcatcaaagtaaacaaactgggcgacgataaaggcgtcggtgaagtggtcggtgttgggcgctactggacgggatggaacactgaggtttacatcttcccgacctttaagcagatgaagacctacgatgatccattcagtttccagatgagtgacggtacaaccatcggctatcacatcggcgtggcctacaaagttgatccatccaaagttaccacagtctttcagacctaccgcaaaggcgtggacgacattaccgacaccgacctgcgccagaagatagccgacgcactcaaccgactggccagcaaaatgaccaccgacaaatttatcgacggcggcaagtctgagctgctggatgcagctcttaaagacattcaggaagaaatgacgcccatcggtattcaggtaatgagcctctcatatgtgggtaagccggagtacccgcctactgttatcgacagcattaatgccaaagtcacggccaaccagaaaaccctgcaacgcgagcaggaagtcaagcaacgcgaagcagaggcaaacatgctgcgcgcggaagctgccggacaggctgatgcgattcgcacaaaagcccaggccgaagccgacgctattcgtttacgcggtgaagctctgcgccagaacccaaacgttatggagctggaagccatcaacaagtggaacggtacactgccgcaatacatgaccagcggtgccaacacaccatttattcaggtcaagtaa

SEQ ID NO: 8910 - DNA, 750 bp, Escherichia coli
atgaatactgtaaccatcaacaacaaacagtttccggtaatcgaatatcgcagtcagcgtgttgtgacatttgcaataattgatgacgtccaccagcgcccggaaggtaccgcccgtgctgcgtttaaccgcaaccgttctcactttatcgaaggggtggattttcttgaaatgactgcggacgtaatacgtacggagtcactttctgatgcctttgccgcgcgaactgccaaagggatcattcttttcgagtctggttacctgatgttgacgaagccttttaacgatgctcttgcatggcaggttcagcgcgaactggttaacagttatttccgaactcacgcgccgctgacggaaatggagatgatcgctgcaatggccgccgatgccgttcgccagcagaagcgcctgagtcatgttgaagagaagatcgaaacggtcaccaaagctgtggagaacatcaaacgcggcacaatgcgcaccggatatgtcggttaccgccaggtggtagccaaaagcggaatgagtgacgccaagtgtcggaatctggtcaacgcctaccacatccctaccgacacgcacgaatttatgactccggacggtctgttgtctcgcagggctgtcgtcgagcttgagacatttatggtggtgttccaccaaatgatgtcagaggctgaaccacgcggcacacgctggtatcacccgaagatggggcttttccaggtaatcggatgggaggataaagcatga

SEQ ID NO: 8911 - DNA, 570 bp, Escherichia coli
atgatcatccagtcaaaacttattcgcgccgctctggtgtgcgctgctaaaaacgacgttcgttattacctgaacggtcttcacatcacgccaaaacatattgaggcaaccaatggtttcgtagcactgcgcatgactcacggcatccggacgaagaaaaacatcattgtccagttcgaaggtggcgtcccggccaaagccgaaacgacagagctgatttttagtaaagagccgatcgctgttcatcgcgaccagtttcagcgccgactgtccattaccggcattaaactggtggacggttgttttccggatttggaacgcatcattccgaaaaaatttgacctctgtacacacccggtgatccaggcgggttacctgagttatccagagaagatgtttggtcgtgagcgtaaatttattcccgtccagttacgtccctccggtgacgggcaagcggtcagaattcagtttgattccatcatcaactcaatgtatggcaatcctgaatttgttgtgatgccttgtcgtgatcatggcgatttcaacgtggctcaggagcatccggaatga

SEQ ID NO: 8912 - DNA, 234 bp, Escherichia coli
atgaaaatcgaataccaggactacggagccgtagcgaacatcgtgatcacctgcaccgtgttcgaatttcgtaaacataaccgggtggtggatgctgcattgctttgtacgccggacgttattgcaactcacagtggtgtgtttttcatgaagtcggttttatccggtaaaacccgcgatatgttgcgggcatataaaacagcgcagggagaggtcgggcgtgagcgggattga

SEQ ID NO: 8913 - DNA, 366 bp, Escherichia coli
gtgagcgggattgattatcaggcactgcgtgaggcagcagtagcaattgaaacagtggcaacgcctcaaaaattgcaggcgtttcggatgaaggtcacaccgtcggtggtactggcgctgctggatgaaattaagcgcctggaggacacaaatattgatgctatgtgccgaattgcagaactggaagcgagggaagtcgagttaccggatggctacgaaccccgtatgggccacccaataaatagcggtgagcgggtggtaatgatgccgcaccactttggtggatggctggaccgcttcgacgtcgagcacgcattgcaggcagcggggatcaaattcaaaacagcgggggttgagtacgaatga

SEQ ID NO: 8914 - DNA, 234 bp, Escherichia coli
atgattgagggtattagcaataaatcgttgaacacagcatgtgtcgacggtgggttgttgtacaaagtgacgtttacgcaaatcgacaacgaagataacgcattcactgtgatttacacgtcgccagcgatggcgcagaagtgggtggatctgcacaggctatgtggttttcgtgttgagtgggggtgctatgagatgcgatgcagatggcatcatcggggggatgaaaaatga

SEQ ID NO: 8915 - DNA, 243 bp, Escherichia coli
atgttcgctttgattcaacgcgggcagatatacaccgatagtgctggctacccgataaaaattgttcgctgcataaacaacactgtgttgtacagaagaatggatgggcgaacacagtcggtaaaaataaacgattttaatgaactgtttgaacggatcgatcaccaggaataccgacaaattctggcagaaacagagcaggaagctcatctgaaaaaattacgagccatgaaaaggaagtaa

SEQ ID NO: 8916 - DNA, 330 bp, Escherichia coli
atgatgacgggtatatataaagataaagaacttaataagcgtaaattagcgcttgaattattacgtgattggataagacaatttaatccagcaagttataatgatttaataaatggattaagtgaagactttaaaaaacgtacggttatgcttgtcgatcagataccagagaagcaaaagagtcgctatcatatcaatgaagatgcattgattacacttccttctggtgaaattgttgctatttctaatcaatggggtattgctaatattgaactcttgattgagtttgtacggcaaaatggttttgttgttgaaaaagctgaacaataa

SEQ ID NO: 8917 - DNA, 510 bp, Escherichia coli
gtgtcaaaaaaaaatattatagcgatagttaatgtttataatgctcatgatggctatttgtatatttataaaaagaatataccttataatggtaaggatttatgtgataaacgttttttaattacatcatatgatgtaattctcgattatctgggaggatggtgtaattatggactggatatgtcatcttctgcgtggcttgagataccacctaaaagcaattatacatatcaagttaatttaaatgactactacgtttttttaccaggcaagcatcgctataacgttggtacttttgagcatcttattgtaagaagtaattggttcaggaatgaaaatataaacacggcaatgtttaatattttaaaccaaagtcatcctaagaaaaaaattgatgatttattatataatcttgatctctatggggcaagactaggtgtctttttgagaagcaatgaagtttcgttattaatcgatggggatgaacttgactctctttatagcaagtaa

SEQ ID NO: 8918 - DNA, 345 bp, Escherichia coli
atggatataacattgaacgttacttcgaataagattattcattgcctttatatcacaacctttacgctaatgtttttcagcacaaatttgaaaggtgaaaattatttaatacccaaaaaaaatgcttatggatcgttagtgttcgcagaaaagaagcatgaacatccgggtgtttatgatttatttcaatcaaacaaattcattacaaaagatacgacatactttgatctaactcctgattatgcaatgagtaaaaatgaaaatattatattgcaacaagaaaatcaagttttcttgactctttcagttgaaagtgtcaaaaaaaaatattatagcgatagttaa

SEQ ID NO: 8919 - DNA, 603 bp, Escherichia coli
atgagcaccagtaataacatgggtagaaccacacaggctcaaccaaagcccggtgtaaatgtctgcatagtaaaaaaagaaataactaataaattcaatgagattattaccaatgctttggctgaacaactagttgttttaaataaaagaaaaaaagacttatatagatgggaggagacagaaaaaaaagaatttcttgatatttttgggagaaatgagattgaggctaataaatggctgctgagaggcgttgaggcaatgatattagtcaatcagagagtgaaaagcaattgttttaaatatcaaggtgatgaatgtatttttgccaaagtgcagggagggattagtagtgagaatcctgttattgtaggccctaaattttttcatgccgcggttaaaggatacgattcccaggtatccactttatgtcatgagttttcacatttaagcgaagttctgtatactgacgatttaagccctccgggtaaaaatgcggaaacaacatctgctgaagaatacagagagcatgcggaaaatcttgtaaaagctaaaagtcgagatgtaatgataaatggatataacattgaacgttacttcgaataa

SEQ ID NO: 8920 - DNA, 2406 bp, Escherichia coli
atgtccttaaaaggtcttcgctttacgctggaggttgacggccaggagccggacacctttgcagtggtgaatttcaggttaatccagaaccagtcttatccgtttgtgatgagtgtggatgtcgccagcgattcttttatgcagacggcggagatgctgctggagaagaacgcaacgctgactatctggcagggcgtcattccgcagcgttatgtcaccggcgtggtggcggggtttggtatgcaggagaacaacggctggcagatgcgttatcacctgcgtattgagccgccgttatggcggtgcgggctgcggcggaacttccgtatcttccagcagcaggatatccggacgatatcggccatgctgctgaacgagaacggcgtcacagagtggacgccgctgttttatgaggaccatccggcgcgggagttctgtgtccagtacggggaaagcgacctggcgtttctggcgcggctgtgggcggaggaggggattttcttctttgagcggtttgcggcggacagtccggagcagaagctgacgctgtgcgacgatgtggcggggctgtcacaggcgggggagcttccgtttaacccggacacatcggcaggagcggagacggagtgtgtcagtatgttccgttatgaggcgcatgtccgcccgtcatcggtgcagagccaggattacacgtttaaggtgccggactggccggggatgtatgagcagcagggtgagagcctgaacggacagcttgaacagtatgaaatatttgattatccgggaaggtacaaggatgaacagcacggcaaggatttcacgctgtaccggatggagagcctgcgcagtgatgcggaaaaggccacagggcagagtaattcgccgaagctgtggccgggaacgcggtttacgctgacggggcatccgcagaagatgctgaaccgtgaatggcaggtggtacagagcattctgtcaggagaccagccgcaggcgcttcacggcagccaggggagaggaaccacgctgggcaatcagttagaggtgataccggcggaccggacgtggcgtccacggcagcaaagcaaaccgaaggtggacgggccacagagcgccattgtcaccggtcccgcaggagaggaaatcttctgcgacgaacatggtcgggtacgggtgaagtttcactgggaccgttatcacgggatgacggaggagagttcgtgctgggtgcgtgtgtcgcaggcgtgggcggggccgggatttggtaatctggcgataccgcgggtgggccaggaggtgattgttgattttctgaacggggacccggaccagccgctggtcatgggccggacgtaccatgaggacaaccgttcgccgggggacctgccgggaacgaagacgcagatgacgatacggtcgaagacctataaaggaagcggttttaatgagttgcgctttgaggatgcgacggataaggaacaggtctatatccacgcgcagaagaacatggacacggaggtacttaacgaccggacgacggatgtgaaacatgaccatacggagaccatcgggaacgaccagaagataacggtggtgaaggggcagacggttcaggtcgggaccagaaaagaagggggccacgaccagagtatcacggtggcgaatgaccggcgcataacggtacgcaacgaccagacgctgaaggtgacgaacgaccggacggtgagcgtgagtcatgatgacggcctgtacgtcagaaatgaccgtagggtgacggtgaaagggaagcaggagcataagacgacggggaaccatgtcagcctggtggagggaaagcacagcctggtggtgaagggggacctggcgaggaaggtgagtggcgcgctggggataaaggtggacggggaaatcgtgctggagagcagcagccggataagcctgaaagtgggtggttcgtttgtggtcatccattcagggggcgtggacatcgtcgggccgaaaatcaatctcaatagcggcggtagtccgggaacgccggtgccgacgctgcaaccgacggtgctgaagacaccggggggtgagaagagtggtgatggcagtgactccggagaagaaaatgaagaccctggagggagcggcttggccggaagtggtggtggtgatcgaggtgacgatgaggatgaacctgaaaaatatactctccagttccattttacagacgatgacgggataccgtattcagaaatacgctacattgccttctttgaggacggtgcgcagattcgcggtgaaacggacaaggacgggtatacagaagttttctctagaaccaatgatgcaaatgtagaaattaaactgttaactaatgattattatatatttgaggtgaattgtaatgagcaccagtaa

SEQ ID NO: 8921 - DNA, 285 bp, Escherichia coli
atgcctttagctgccagattaaacgacaaaggtacccagcatgatggctaccgtgagacagtcatcattgcggcttcatcgacggtatttattgatggattacctgccgcccgccagggagatccgctgacgccgcatgataaaccgaagcatccccctcatccccgaaaaatcgccagaggctcgtcaaccgtctttattgacggcctgcccgccgccagaaccggtgatgctattgactgcggcggcgtggttattggtggcggtacggtaaatataggctga

SEQ ID NO: 8922 - DNA, 966 bp, Escherichia coli
atggggactggattgtactcgagcgataaccatcaaaaaatccgcagcaggtttaatatacaggaatcatattgtgccattaagactaatggtgtccttggattcagcaaccgaaaggatgtattgcgagaaaatggtgattcaaccggaaccaccagttccagcactaatgccatgatgctgatggaaaatggtgaaaatgaaatcagtctggagattggggcgttaaggtggttttctgataaacctgccagtaccgaagaacgagggcatttctcccaaaaagcagggtgcagtctggatttggttcgttttgttaagcaggaagaaaccatactttcttcgataaaggtgaccatcaaccagcagggaatacctgaagcgcagccagacagcatgcatcctgttatccgaaaagagattctggctgagcaggcagaacccggatttattgatccagactattttaatgaaacttatttcccgaaagggatgaaggtgtatcaatttacacaaaaggtctcggtggcggggcttcctgaatgggcctggacgcgagctacgccctttaccggaagcgatgaacagttacagaagctaaaagcagcctatatcgaaatggctgcaattattagcagcggggacagggcacgtctgaaagcttctcacaaagaggcactgaaagcctggtcagtcacaaccggtgacagtgaggatgaaatattgctctcgctctatccaaaagaagaaatagaaggcaggaaagccagaatgcagcccatcagatggggcgattacgctatccgggttatgaataatggacgtatggtgcagctatataataaatcgaaaccaacatattctccgctgacttatcgtttcatagatgaagatggtgatgaagttatggggtattacgctccggtattttcgctgattgatggtcagtttatccctgtcacttga

SEQ ID NO: 8923 - DNA, 1551 bp, Escherichia coli
atgacatctccatcttcgacagccggaaagccttgtgtggaatgcggcatacctgatccatgtatttttgatgttattagtgattttccagaggccggcgagaaacatttctggtcaaaagaaggaatggcgcgttttaagctactggacgatggttttggatgtgatggtataattaccattacctaccagtgcgacaacagtgggacacatgaggcatggttagaggaagaatcagaaaacagtcgtaagatactgcaaccttttggaaaacccaataatgttacattatattatgaaggtttcaagggtggaatgaatatcattgatgcgtttcattctccgtgggagtatctgagttcaattaccatgccacatgatgttctttatgaaccagcacattacacagtcagaattgatagctgttacgagcacaactcctatgtcgagattaaggtttatccttcattagaaattcggtttaccacagggcttagttatgagatttcgtcatcacaacagacacgagcggtaaaagatcgacgtgatgaacggagaaaagctcgggaggcgatggaagatacaaaacctaaagataaaaataaactacgaagcggatggacaaatacaaccgctgagtttgagttgtttcacaagacatctcttaccgttgaactgggattaaaagtcgctaatgttgaatatacacacaagtatgtagaggaaataaaaaaactcagacaaataaaacaactggagcagatgagtagaatagatgcgctgattaaaagcattaacaaatactttgcgccagatcctgacaacaaagatggtacgcgtaaatatgcgttattcagtgcaaaaatagaacctgtcacactggggatttcttatgcttatcaatacactgatattaaagatggtccgtgccatttttatggtctatatggtgctccatttttcaaagcatcattccgatttgatatcatctcatttatatgtgcatactgcaaaatggaagatctggtaaaccgatgccgtgaatatctccgcaagcatggaaccagtgttgaatgctatatcgaaatttcaccggaagttaatctcgatcttggggctgtatattctcaaaaagataaagcatgggaatttaacactaaagaaagcaatattaaacttggtttgaaaggtgaggttagtgcaacatttgagacgaatgtttttgtcgtgaaattgaaatctgaggttggtgcttctatagaagcaaaagctgggtttggatttgataaacgagatgatggaatggatcttgttctatttcatgatggagtgacgggcgcgtttaaagttaaggttgacatatctcgcggtgataaagatagaaaagagaatagtgagaaacccgaaaaagaaaatgaacttaagtggcaactatgtaaacctttggaagtagatgactcaccattacggattaatttgtatggtaaggaaaatactgtggaaaaaaaagtaacgccagtgacgcagtggcagataggcactgattattga

SEQ ID NO: 8924 - DNA, 840 bp, Escherichia coli
atggaaacggcacccgtaaagtacgctattgtggatggtgctgtggaggaaggattgctggattttctgaacgaagtgaatcccccacactgctgtctgtatgcagaacccatacagccggatctggtcgcgctggccccctatctcgtggaagttgttccggaggttgaagcatggctgagagataaggcgtcgccatggggaatatatctgacttctgagtcatccatgcgtgagctacagcaacacttcagacgttatctgtgggttaggatccccgaacaggagaaacctgttctcatgcgattttatgatccccggaatatatgggtattagcggaagttcttaccccccgccagcttcttttttttatcaaccccgtcagacagctaagtacccgctatggtgaagaatatcgtgaggataatttttcttccgtccgtcccgcagaaactatgaatataagggcagaacggccatcacaactgatgctgagttacagacaatatagccaactggaacgaaaggcacgggataattatcttgatacattatctgtatttatcgaagaaaatgcagaaaaagaagggtgggatgattcatcaaaagctgaatcatcccgaattctggcagaagattatttctctttttgccagtcattaaatatagcagatgatcgttccgtcagaacaatgacgcttatcttactgaaaaaaaacataatcgatctccgatatattccggatgactggtatgaactactcagcaatcagtcatatccgggacatattcgggtacatgaacttgcacaacaggaactgggatttatcccgcaataa

SEQ ID NO: 8925 - DNA, 1959 bp, Escherichia coli
atgtccttaaaaggtcttcgctttacgctggaggttgacggccaggagccggacacctttgcagtggtgaatttccggttaatccagaaccagtcttatccgtttgtgatgagtgtggatgtcgccagcgattcttttatgcagacggcggagatgctgctggagaagaaggcaacgctgaccatctggcagggcgtcatcccgcagcgttatgtcaccggcgtggtggcggggtttggtatgcaggagaacaacggctggcagatgcgttatcacctgcgtattgagccgccgttatggcggtgcgggctgcggcggaacttccgtatcttccagcagcaggatatccggacgatatcggccatgctgctgaacgagaacggcgtcacagagtggacgccgctgttttatgaggaccatccggcgcgggagttctgtgtccagtacggggaaagcgacctggcgtttctggcgcggctgtgggcggaggaggggattttcttctttgagcggtttgcggcggacagtccggagcagaagctgacgctgtgcgacgatgtggcggggctgtcacaggcgggggagcttccgtttaacccggacacatcggcaggagcggagacggagtgtgtcagtatgttccgttatgaggcgcatgtccgcccgtcatcggtgcagagccaggattacacgtttaaggtgccggactggccggggatgtatgagcagcagggtgagagcctgaacggacagcttgaacagtatgaaatatttgattatccgggaaggtacaaggatgaacagcacggcaaggatttcacgctgtaccggatggagagcctgcgcagtgatgcggaaaaggccacagggcagagtaattcgccgaagctgtggccgggaacgcggtttacgctgacggggcatccgcagaagatgctgaaccgtgaatggcaggtggtacagagcattctgtcaggagaccagccgcaggcgcttcacggcagccaggggagaggaaccacgctgggcaatcagttagaggtgataccggcggaccggacctggcgtccacgggtgcagagcaaaccgaaggtggacgggccgcagagtgcgatagtgacggggccagcgggagaggagattttctgcgacgaacatggtcgggtacgggtgaagtttcactgggaccgttatcacgggatgacggaggagagttcgtgctgggtgagggtgtcacaggcgtgggcggggccggggttcggtaacctggcgataccgcgtgtgggtcaggaagtgatagtggacttcctgaacggggacccggaccagccgataatcatggggcggacgtaccatgaggacaaccgttcgccggggagtctgccggggacgaagacgcagatgacgatacggtcgaagacctataaaggaagcgggtttaacgagctgcgctttgaggacgccacggacaaggaagaaatctacctgcacgcccagaaaaatatgcaggtcgtggtgctgaacagcaaggataagcgggtcaactatgaccgggcggtcagcatcgggcatgatgaattcctggtggtggcaaatgaccggaaagtgacggttgaaggtaaacaggaccataaaaccaccaaagaccacgtcagcctgacagagggtaatcagggactggaggtgaaaggcgatctggcacagaaaataagcggcgcgctgggtatcagcgtacagggcgatattgttttacagagcgacagcaaaatcagtctgcgggtgggaggttcatttgtggtgatccattccggcggcgtggatattaagggcgcgaaaatcaatcttaacggcggaggcagtccgggagacgtgatcctgccgatgcgcccggtgatcctgaaagccgcagccgggagtggttcgatgtttgtggcgcattgcccgaaggaggataagtga

SEQ ID NO: 8926 - DNA, 285 bp, Escherichia coli
atgcctttagcagccaaacttaccgacaaaggcacccagcacgacggttattacgagaccgtcatcaccgccgggtcatccaccgtttttattgatggcctccccgcagctcgtcaggaggatccgctgacgccgcatgataaaccgaagcatccccctcatccccgtaaaatcgccagaggctcgtcaaccgtctttattgacggcctgcccgccgccagaaccggtgatgctattgactgcggcggcgtggttattggtggcggtacggtaaatataggctga

SEQ ID NO: 8927 - DNA, 273 bp, Escherichia coli
atgctagatagcactcgcgaaaaaattaggcagaaatacactcaagctgaaataggtcgttatatgggggtcgctcaacagactgtttggcaatggtttagctttgacgttcccccaaagcaggtaattccgttatgtcagctaatgaagtgggaagttaccccgcatgaaattcgccctgatatttatcctaacccaaccgacggtttacctgttggattcaaggttaacacatcaaatgcaccggagctgattcatgaaaatcaagcatga

SEQ ID NO: 8928 - DNA, 402 bp, Escherichia coli
atgatgaacgccctagaagtatctatgtacagaatcagcaagcttcttcaggaaactggatggagccaggctgagcttgcccgtagaattggtgtgacacaacaaactgttcaacaatgggtcagcggtaaggctacacctaaagcctcaagtttggataaactggttgaggttacagggcatccattgcattggtttttattgcctcctgaagagggggagcaaattttcacccctgacacgatgaaaattggtcctcgtcaacgcgaactgctccaggcttttagtgcgtttccagaggaagaccaagaaaaaatgcttcaagaaatcaaagacaagaaaaaatcaatggaagaaaccattgcccggtggttggcggcacaaaaaagccgccgggcgtga

SEQ ID NO: 8929 - DNA, 192 bp, Escherichia coli
atgagtacagccctttctccgatagtttcagaattcgaaactaccgaacaagaaaacagttacaacgaatggttacgcgctaaagtggcgtcaagccttgcagaccctcgtccctcaattccacatgatgaggtaatggctgaaatggagaatcttattgctcaaattgctgtaactaacaggagcgagtaa

SEQ ID NO: 8930 - DNA, 288 bp, Escherichia coli
atgttacccattttgtggctaccatctgctcgcgatgatttgcgtcagatcgtagcctatattgctaaggaaaatattcctgcagcacgcagactaaaaatacggattgaaacgtctgttttagccctctctgagcatccatatctatatccgccaagtgatcgagtatccggtttgcgggaaattgtggttcaccctaattatatcgttttgtaccgagtagcaacttcaagcattgaaattgcaaatattgtgcatgcccgccgacaatttcccttccctatctga

SEQ ID NO: 8931 - DNA, 231 bp, Escherichia coli
atgacggcagggttcaactttaactatgcagcaggtttttgttccgctcccccggcgttaaggggaaatgaggtcagcatggatactatcgagcttggcaacaacgaatctctggtatgtggagtattccccaacctggacggaacgtttaccgcgatgacgtataccagaagcaaaacgtttaaaacggaagctggcgcgcgtcgctggttaaccagaaacactgactga

SEQ ID NO: 8932 - DNA, 375 bp, Escherichia coli
atggaatttaaagatttaccaatgcaattccaggaaatggcagcgaatatagttcgttcccaactggcgactcttgacctgagtatcgtagaaaaagaaaccatcgataatatatccggtaacgtgcgtcgtgcctttatcggactgtacgaagagaagcaactctctgataaccaggatttacataaaaaatacttcttggaattaatggacatcattgataagggatttggcttgttaatgaaacagaaagggattcgaatgaacccccttgaaaattacttcgcaacaagaagcattaattcctgtgatttaaagcatcccgccacagacgggagtgttacagttagccatgagatttcgattaatcattaa

SEQ ID NO: 8933 - DNA, 222 bp, Escherichia coli
atgactagtaaaaatgtaaatatccagtttaaccacgatgtttctcctgctggacttgcggatgaactcactgctataaaaacggcaattatgctacttgctgctaagttgccagcagcatcacaaccatcagatatttgtgactcattacgtaagatgaattcaacaaaatgcaacgagatggcatcacttattgaaatagctattgattttaatgattaa

SEQ ID NO: 8934 - DNA, 849 bp, Escherichia coli
atgttgaatgtagctattgaaaaccagtacgggtggaattatagtgcacctgcacctcataaaccgggtgccgggcgtggaaacccgaaagttactcgagcgcataaccgcgccgaagcggtttttttatgcgttaagcacagccacattcagataatggtggggcgtgcagggcagctgcaaggctggccgggttctcgagtgaccggtatttccacccctgtacgtctcgccacccttatggtcgtggaaagcctcggtggtgagttaattaacttaacacttgaggatgccatcatggctactacccttaccctttctcaccctgacgtaaccattgaaaatggtcgcgcagtcactacgtctattgcgatcgcagaattcttcggcaagcagcatcaccatgttgttcaaaaaatagaggccctcgaatgttctgaacgctttttaaccagcaacttttcgcgggttaaattcgagcaccgtggcaatacctacaatgcctaccaaatcaccaaaaacggcttcgttttcctggtgatgggcttcaccggcaaaaaggccgctgcattcaaggaagcctacattgccgagttcgaccgcatggaggaagaactgcgccggaataacaccacacccgctgacaaaataatcccgggtgatgaccgaaccctggttatccgcttcgacgaacacggctacatcaaattcaccgaaaccgttcctgatggcgcactggtctgtactctggatactttccgtttttatctggaaaagcagggatggactctcataaaccggggcgcaattaaaaatatgaccgtcgagcagttgctgagtattaaatag

SEQ ID NO: 8935 - DNA, 222 bp, Escherichia coli
atgattgctcatcacttcggaaccgatgaaataccacgccagtgcgtcactcccggcgattacgttatgtatcagggaagaacatatgttgcatctgtcaatgaaattaaaaaacaccgactttatatccgggggctttgcactcagcattgcattaaggacaccatgattaaggtcttcctcggtcgtgacggattgcccgcaaaagcggaatcatggtga

SEQ ID NO: 8936 - DNA, 2481 bp, Escherichia coli
atgagtaaagtctttatttgcgccgccattccggacgaacaggtaataaaggaagaaggtgcagtcgctgtagccactgccattgaagccggtgatgaacgtcgcgcccgcgcaaaatttcactggcaattcctggaacattatccggctgctcaggactgcgcttataaatttcttgtttgcgaggataaacctggtataccccgccctgccctcgattcctgggatgctgaatatatgcaggaaaaccgctgggatgaggagtctgcttcctttgtcccggttgagactgaatcagatccgatgaacgtcacttttgacaagctggcccctgaagtacagaacgctgtcatggttaagttcgacacatgtgaaaacatcaccgttgatatggtgattagcgcgcaggaactattgcaggaagacatggcaacattcgacggacatatcgttgaagcgttgatgaaaatgccagaagttaacgccatgtatccggagcttaagctgcatgccatcgggtgggttaagcataaatgtaagcctggtgccaaatggcccgaaattcaggcagagatgcgcatctggaaaaaacgtcgcgaaggtgaacgcaaggaaaccggaaaatacacgtctgttgttgatctcgcccgcgccagagccaatcaacagcacactgaaaattcaacaggaaaaatcagcccggtcattgctgccattcatcgcgaatacaagcagacatggaaaacactggatgacgaactggcctacgctctctggcctggtgatgtggatgccggaaacattgacggcagcatccatcgctgggcaaaaaatgaagttatcgacaacgaccgcgaagactggaagcgtatctcggcatcaatgcgcaaacagcctgatgcccttcgctacgaccgccagactatttttggccttgtccgtgaacgcccgatcgacattcacaaagaccctgtggcactgaacaaatacattactgaatacctgactacaaagggcgtgtttgaagatgaaggaacaaatcagagcgcaactgatactctctcatcgccagtaccagaaactgatgcagtggaaacggcaattccggacaacgaaaaaaccgaatgcaaagtggaaatcgaaccatctgtagagcgtgaggggccgttctacttcctcttcaccgacaaggatggcgaaaaatacggtcgcgcaaacaaactttctggtctggataaggcgctggctgccggggctactgaaatcacgaaagaagaatatttcgcccgcaaaaacggtacatactcaggttcacaacaaaatactggtgcatctgacacgaccgcacaaccagagccggtaaaagttacagctgacgaagtaagcaaaattatgcaggcagccaatatcagccagcctgacgccgataagttgcttgcggcctctcgcggtgaatttgttgcagggattagcgatccgaatgatccgaaatgggtgaaggggattgaaacccgcgattctgtgaaccagaaccagcaagaaacggaacagaacgaccagaaagcggaacaaaacagcccaaatacgcaacaaaacgagccagaaacgaaacaacctgagccagtagcgcaacaggaaccagaaaaagtctgcaccgcctgcggtcagaccagcggcggcaactgccctgattgtggctcagtaatgggtgacgcaacataccaggaaacattcaatggagaaaatcaggctgaatctcaggaaaaaaatccggaggaaacggaaggcactgagcatccgcacaaggagaacactggcggcgctcaggaccacgccagcgataataaaactggcgaaacagaaaattccttaattaagatgaacggtcatcgtgaaatcacatccaccagcagagtatggaatcacctgtcagtcgaccttgaaacaatgggagccaacaccaatgcacccatagtagttattggtgcggttttcttcgacccggaaacaggggaaatcgggccggtattttatatcgttatcagcctgactgacgcaatgaatacaggggctgttcctgatggtggcaccatcgaatggtggctgaagcagtccagcgaagccagagctgccattttaactgaccaggtaaaaatgaaagatgcccttttgcgttttcgggaattcgtcaatgaacactctgatgaaaaattcgttcaggtgtggggtaatggcgcaacgttcgataacgcaattttgcgcacctcatacgaacgtctggacatcccctgtccgtggcattacagcaacgatcgtgatgtacgcacaatcgttgagatggggaaaatcacagacttcaatgccagaagcgtaattccattcgaaggcgtgcgccataatgctctggatgacgctcttcaccaggcaaaatacgtaacagccactatacaaaaactgatcccgaatcaggctgatttttaa

SEQ ID NO: 8937 - DNA, 570 bp, Escherichia coli
atgcgcaaatttattactcatagtgaatggttgttattttttgaagccatcaacggttcaaaaaatgaaattagagataaagccatgttacaaatggcatatgtacatggtcttagggtaagcgagcttattgcactaaagattagcgacattgacttttcagagtcagcaatatatatcaagcgtttaaaaaatggattatccacagtacatcccctgcaaaaagaaactgttctgttattaaaaaaatggctagcactacgtgataacatagtaaaaaaaccttttgaagactctttgtttctttcttgtcaaggaaataaaatctcgagacaatatgtgtataagatgtgtaagaaatatagtcacaatatgaatattaatattcatcctcacatgcttaggcatggttgtgggtatgctttagctaatcaagggttagacaccagactaatacaagattatttagggcacagaaatatacatcatacggtattatatacagccagtaatgcagcaagatttaaacgagtatgggagggtgatgtgttagatataaagaagatataa

SEQ ID NO: 8938 - DNA, 765 bp, Escherichia coli; identical to SEQ ID NO: 7080

SEQ ID NO: 8939 - DNA, 534 bp, Escherichia coli; identical to SEQ ID NO: 7078

SEQ ID NO: 8940 - DNA, 252 bp, Escherichia coli
atgcctgccacgctgccatgcttcagggaaaaagagagtgatatggctattgccgcaagttacaccatgcatctctattgtgattgtcgccagtgtacggaaggtgtatatccagtgccagacttcggtgagtatatcggtacgtcatggtctggttgtgcaaaagaggcccgtaaagacgggtggcgaataagcaaagacaaaacacgtacttttgcgcccgggcataaagttttgaggattaacacatga

SEQ ID NO: 8941 - DNA, 282 bp, Escherichia coli
atgacagaagccgaaatactgcgattaatccgccgcgttgccggaatcagccagcaggccgacgaacagaccacgcagccggacagcgtgaccgccgaaaattatgttcgtgtggttgctgaggtgattcgccgtaatggtatccagcttaatgatgtggatatgcgcaacatacggatccgcgttcttgaaatgctggcctacaatcgccgcgtggcactgtatcgggaaacggagaaaattacgtaccactggaagaagccggagcggttgcggcggtaa

SEQ ID NO: 8942 - DNA, 435 bp, Escherichia coli
atgattgataaagcttgttttgtaagtcagcaggaaatagctgaacatttcaaggttaacagaaccactattcgcgcatggaccaaacaggggatgccgtatcttaatgcggatcgcggaaagtctggcggttatcacatcgggcatacattgctttggtcttcaggtaaaagccgtcttgaggccatcagatatcacgtagaaaccagtgcgctggaaaaaattatgtttgccaggctgctttcatctgagcgtgacgagtactccagtgaagaaacagaacatcgatttgatgaaggtttgcagatttacggctattcaccggaagatgtgagcaaggcacgaaataaaatggctggctttctggctgggtggcgtcatgccgtaagcgttcgccgtgccagcatggagcaatcagccgatacagaacagtaa

SEQ ID NO: 8943 - DNA, 414 bp, Escherichia coli
atggcaacgaatgaaagcatcatgacgctaccgctggcgagtaaatttaaagccgaagcgcgggcaatggctgacagaggtttatcaacctatgaggccgtatatcaactaaacaaactggaagagcaggacaagccgcgcgctgatgcgattatggcgcttcatgagcataaagactatcagccgctgttacgtgcaatggcaaacgtgccatgtattagcgtcgataatgctcgtgaaatcctgaacatgaccatagagcaggagcgcccaaaggttgcaccagagcttaccgcagcctttgaaaactttatggacatgcacagcccgcaagccgtatcagctggcatggcatacgatggcagaaaccagggcgatgacggcgacatcgatcgcatactgaaaaccatctga

SEQ ID NO: 8944 - DNA, 336 bp, Escherichia coli
atggacactccatacattgagttatttgcaggcagtcagcaggtcgccacgacgctggtacattttgccgctgatgctggcgttattcaggaatttaccccgctgatgctggcggacaatggcgagtttaagccgtgggatggtaaggaatctggcaaggctgtttatctgacctcgtaccctgtggacacgtcaaagcagaaatcagcacagtgttacaagacggggatattcaatattgccgccgttaactggcctgagagcgtcgacaccgatgcgaaaaaatgcgccgcctttgcgggttccggcgtatccgttcagccgctggcccgataa

SEQ ID NO: 8945 - DNA, 279 bp, Escherichia coli
atgcacacttcagggaaatttaataaatcactcaaaaaacgcagagacagaacagaaccgaaatatcgcgcgttagacatgacagagcacgctttaaaggtggcaatcagaacgatagaccgccacgcgggggaaggatacgcgaaagcacatcccgaactgataagcgcattcatgaccacgacggcggcaaattttgccacgctgacagagcgggagattgccgaagcggaacaggtaacaaccatcaacgttaaaaccggagaggtggaatcatga

SEQ ID NO: 8946 - DNA, 1755 bp, Escherichia coli
atgaaactggcaccgaacgtaaaacagcagtcacgcggcataaaacacaaaggaacagaagtcattatttttgcgggtagtgatgcctgggcacacgcgaaacaatggcaggaacatgatgcgcgtatggccggagataatgagcctcctgtgtggcttggggagcagcagttatcagaactggataagctgcaaattgtgccggaaggcagaaaatccgtgcgcatattcagggccggatatcttgcgccagtaatgataaaggcgattggccagaagctggcggcggcaggcgtacaggatgcaaatttttaccctgatggtatgcacggtcagaaggtggagaactggcgcgaatatctggcccgtgagcgccagaatctttctgatggtctggtcattgagcttccggtaaagcaaaaggcgcaactttcgcagatggcggacagtgagcgcgcgcagctgcttgccgatcgctttgatggcgtttgcgtacatcctgaaagtgaaatcgttcacgtatggcgcggcggggtatggtgtccggtcagcacaatggaacttagccgcgaaatggtggcgatctattcagagcacagggccactttcagcaagcgcgtaatcaataacgccgtggaagcgttaaaagttattgccgaaccaatgggcgagccgtccggcgatttgctgccgttcgccaatggtgcgcttgacctgaaaacggggggattttccccgcacacgccggagaactggatcaccacgcacaacggcattgagtacacgccaccagcaccaggggagaacatccgcgataacgcgccaaactttcataaatggcttgagcacgcagccggaaaagacccgcgcaagatgatgcgtatatgtgccgcgctgtacatgattatggcgaaccggtacgactggcagatgtttattgaggccaccggagacggcgggagcggtaaaagtacattcacgcacatagccagccttctggcagggaaacagaacacggtaagcgctgaaatgacatcgcttgatgatgctggtggacgtgcgcaggttgtcgggagtcgtcttatcgtcctggctgaccagccgaaatatacaggcgaaggaacgggcatcaagaaaatcacgggcggtgaccccgtggaaattaacccgaaatacgaaaagcgtttcacggctgtaatcagggcggtggtgctggcgaccaacaataacccgatgatattcaccgaacgggccggaggtgtggcacgtcgtcgcgtgattttccgtttcgacaatatcgtcagtgaggccgaaaaagacagggagctaccggaaaagatcgcggctgaaatccctgtcattatccgccgattgctggcgaactttaccgaccctgagaaggcacgggctttactactggaacagcgtgacggtgatgaagcactggcaataaagcaacagacggatccggttattgagttttgccagttcctgaattttctggaggaagcgcgcggcctgatgatggggggcggtggcgattcagtgaagtacacgaccaggaacagcctttaccgcgtctatctggcgtttatggcatacgcaggcaggagcaaaccgctaaacgtaaatgactttggaaaggctatgaagcctgccgcaaaagtttacggacatgaatatattacgcggaaagttaagggggtaacgcagactaacgcaataacaacagacgagtgcgacgcgtttttataa

SEQ ID NO: 8947 - DNA, 300 bp, Escherichia coli
atgaaacttaaatattctggcttaactgccagtggcaaaactcgcactaaattcatgcgcggtgatatttaccgcgataagtacggcggcacggtaatgattaagggcgtggaggaacggcgcgtaacctaccgtcgtgaaggctacgaatatgattgcgtgatgcctgtttatcagttcgaccgtgatttttctcttgtgcaggccgtaccgcgtaacgtgcccaccagcagggagaaagcacgcgccaatattcagaagatgaaaaccatgattaaaggattcaggggtaaaaaatga

SEQ ID NO: 8948 - DNA, 234 bp, Escherichia coli
atgcgtgatatttaccacgaaacaatagaccgcgcatttcttgcactttctcacagtgaaaatatgttggaaatattgcgcatatgtcttgaaacgcttggagataatgaacgtgataaacagaaatcaaggattgtcacggcattaataacgcttcttgagcctgtaataaatgagttgcaggaaatagagacattacacgaccagtataaagcgccccacaccggagaataa

SEQ ID NO: 8949 - DNA, 435 bp, Escherichia coli
atgtgcaataaaaccacaccggacgcagccgccgccgcactcactacgctgatgcacgcgcttattgatattgaatgcacggcagagcttgcgcagggagaagaacagaaagaccggacacagttcgccctggaatgtatccgatacatcgcaacgcggtcgctgaatgacgctaaaaatattcttgttgctgattgtgaaaatgggggggttatgcgtgatgatcgttttaattccctgaaacaggaattttccggcgttcctgatgatgcggctgatgcgctttcgtcaatgccagagcttattagagcggattttttcttactttccacgagagaatataaatcaacggggcttgatgtactgaatatcgccgccgattatgctgatttcgtgacagaggttattttaagaaaaacgacggacggggattaa

SEQ ID NO: 8950 - DNA, 231 bp, Escherichia coli
atgagccaggaaatcacactacaacaggcagcagaacgcgcccaccaaatcgaagttatttgcgcactggcagaggattaccctggcatgatgaccgacagcgaatcaggggcaatcatcggcttacttaaacgccttagcggtgaggtctgcgtattcctgagcgatgaacaggaaagaagaacgcttatttctaacgaaaaaaaatgcggaggggtacatgtgcaataa

SEQ ID NO: 8951 - DNA, 1287 bp, Escherichia coli
atgaatactggatattctcccgaacaagggcggggcttcgttcgtcctgaaaaacagaatctgcaaaattttgccgaaattattccggttatttccggccttactggcgggagtgaaaccaatattgttaacgccagagcgttgcagatgtttgatgataaaaagggagtaaatttaacttacacccctgacggcaatcagaatatgagcattatctctgagtcaggtttctacaaactaataaaaacaaaaagcgccccgttgccggagcgcctttgtgaacaattaacctactgcgcaaaaaatgaatctgagcagtgggattatatcaaccatgtggagaagcgccacaattgccgaataacgggcaaaacaaaggccacccgctacggtggcccctcgacacaagctacacgttatccccaacgcatgagcattgccaacaatgccacatttgcggctggtgggcaatgcaatcagtcaggttcagttcgttgccatacctgcaatgagcgcttttccctgtactctttaaggaattgctcaagggcaaaagcacatggcgcgaatctttctgattcatgctctatctttctgcgccgtcttttccgtgccggtgataatgttttggtcaattctttatcggtcattgtgttgtcctgcatagcaatgcgccgtagttactcacaccacggcgctggtgatggttactcctgctctttggccttgcggcgctggcggcgtttgatctcgccttgcattgacgcaatgatgaattgtgatgtgctttcgcctgattctttcactgattccatggcgtttactatttcgtgtggtacacgagcctttagagcttgtgattttgcgtttgttgtacccgttgccatttctattcctctgttggattggtgggggacagtatacacagaaaaagcacaaataaaacccttgacgtgggccacacctaaagcatatagtgggccacaccttgagattatcaaggtgcataaatgcaaagccccgcaagtgtcgttaccactcgcagggcttctaaccaccaacgatagcgaaagtatcgaggtagctatgttaaatcataccacacacccgcaagggcgggactcgcacaacctgaataaatacatctggcgttttatcgccctgagcacggcacaaccgcgcgtgattaccattgaggccaccagcgaacaggaagcacgccagcaatctccggctggctgcgtgatggtatttgctgcccgtattcgtcagggggtaggcttatga

SEQ ID NO: 8952 - DNA, 1230 bp, Escherichia coli
atgagcagagcacttaacaaactgagcgatacacagctgaggaaaatcaacggcacacccgcccaaaaaacagcctttcttaatgacggtggaaacctgagcgtcaggcattcaaccagtggccttttaacctggtatttcacttacagggccggaacgggaaggggggcaccaccggaacgcattaagctgggaaattatcctgatctgagcctgaaatcagccagggaaaaagccgcccagtgtcgcgcatggctggcagaggggaaaaatccacgtcatgaaatgaattacaccgtacaggaagcgttaaagccggtaacggttggcgatgcgctcacctactggcttgagtcgtacgcaaaggaaaaccgcgtggattatgccgccctgaaaaagcgccttaataatcacgtaatacagcacattggtgctatgccgctggataaatgcgagctacggcactggctggcctgttttgaccaggtggcaaagcgaacgcctgttactgccggattcttgctacagacgtgcaaacaggcgcttaagttctgccggaggcggcgctatgcaatcagcaacgttcttgatgatatgagtgtggcggacgttgggaaaaaaccggatataagcgagcgcgtcttaagcaccaaagaacttggcgaattattgcaggcactggacaaaaaaatattttccccttactacgtcgcactaatccgcctcctgattgttttcggatgccggacggtagaactgaggttatcggagatcagcgagtgggattttaccgaaatgctctggaccgtgccgaaagaacacagcaaaacgaaggtggcaatattccggcccataccggaagcaatactgccgttcgtcacgcagctggtggagcagaacaggcacacgggcttattgctgggggaagtgaaacaggaaacaagcgtgtcgcagtacggcagattagcgcacaggaggctaaaacaccctcactggtcactgcatgacatccggcgcacctttacaacgatgctgaacgatttaggcgtggatcctcacgtcgtggagcagcttacaggtcatcagatgccagggatgcaacgagtctataaccattcccgttatctggatgcgaaacgtgacgcgctggatatgtggacggagcggttagggatactggcgggaacacatgaaaacgtaaccacattgccaatagccagagaaatataa

SEQ ID NO: 8953 - DNA, 1326 bp, Escherichia coli
atgacgcacgataatatcgatattctggtggtggatgatgacattagccactgcactattttgcaggctttgctgcgcggctggggttataacgtcgcgctggcgaacagcgggcgacaggcgctggagcaggtgcgggaacaggtttttgatcttgtgctttgcgatgtacgaatggcagagatggatggtatcgccacgctaaaagagatcaaaacattaaaccccgcgattccggtgctgattatgaccgcgtactccagcgtcgagacggcggtagaggcgttgaaaaccggggcgctggattatctcatcaagccgctggatttcgataacctgcaggcgacgctggaaaaggcgctcgcgcatacacacagtgttgacgctgaaacgcctgcggtgtctgccagccagttcggtatggtcggtaaaagcccggcgatgcaacacctgctcagtgaaatcgccctcgtcgcgccatcggaagccacggtgctgatccacggcgattccggcaccggtaaagagctggtcgccagggcgattcacgccagtagcgcacgtagcgaaaaaccgctggtaacgctcaactgcgcggcgctcaacgaatccttgctggagtctgaattgttcggtcacgaaaaaggggcgtttaccggggccgacaaacgccgggaagggcgctttgttgaggcggacggcggcacgctgtttctcgatgaaattggcgatatctcgccgatgatgcaggttcgtctgctgcgtgcgattcaggagcgcgaagttcagcgtgtcggcagcaaccagaccatctcggttgatgtccggctgattgcggcgactcatcgcgatcttgccgcagaggtgaatgccgggcgttttcgccaggatctctactatcgcctgaacgtggtggcgattgaagtaccatcgctgcgtcagcggcgggaagatattcctctgctggcaaaccattttcttcagcgctttgccgaacgtaatcgcaaggcggtaaaaggctttacgccccaggcgatggatctgctgattcattacgactggccgggaaatattcgtgaactggaaaacgcggtggaacgggcggtggtgctgctgaccggggaatatatttccgaacgcgagctgccgctggcgattgccagtacgccgatcccgctggtacaaagtcaggatattcagccgctggtggaagtcgaaaaagaggtgattctggcggcgctggagaaaacgggcggcaacaaaaccgaagccgcccgccagttagggatcacgcgcaaaacgctattggcaaaactgtcgcgttag

SEQ ID NO: 8954 - DNA, 2400 bp, Escherichia coli
atgaagctaaccgatgcggataatgccgccgatggcatttttttccccgcccttgagcaaaacatgatgggcgcggtgttaattaacgaaaatgatgaagtgatgtttttcaaccccgcagcagagaagctctgggggtacaaacgtgaagaagtcattggcaataacattgatatgctgattccgcgggatttgcgtcctgcgcatcctcaatacattcgtcacaaccgtgaaggtggtaaagcgcgcgtcgaggggatgagtcgggagctgcagctggagaaaaaagacggcagtaaaatctggacccgttttgcgctatcgaaagtgagcgccgaggggaaagtttattacctggcgctggtacgggatgccagcgtagaaatggcgcaaaaagaacagacccgacaattgattattgccgttgaccatctcgaccgaccggtgattgtcctcgatccggaacgccatattgtgcagtgcaatcgcgcatttaccgaaatgtttggttactgcattaacgaagccagcggtatgcagcccgatacactcctgaacattccagaattccctgctgataaccgtattcgtttacaacagttgctatggaaaaccgcccgcgatcaggacgaatttctgctgttgacgcgcaccggtgaaaaaatctggattaaagcctctatcagcccggtttatgacgtgctcgcgcatctgcagaacctggtaatgacattctcggatatcaccgaagaaaggcaaatccgccagcttgaaggcaatattctcgccgccatgtgcagcagccccccatttcatgaaatgggggaaatcatttgtcgtaacatcgaatgtgttctcaacgaatcgcatgtttcgctgttcgcgctgcgcaacgggatgccgatacactgggcgtcatcttcgcacggtgcagaagttcaaaatgcgcaaagctggtcagcgaccattcgtcagcgcgatggcgcgcctgcggggatcctgcaaattaaaacctcgtcaggagcagaaaccagcgcctttatcgaacgcgtggcagatatcagccagcatatggccgcgctggcgctggaacaggaaaaaagccgtcagcatattgaacaactcatccaatttgatccgatgaccggtttgccaaatcgcaataacctgcacaattacctcgatgacctggtcgacaaagccgtctctccggtggtgtatctcatcggtgttgaccatattcaggatgtgattgatagccttggctatgcgtgggccgatcaggcattgctggaagtggtcaatcgctttcgtgaaaaactcaaaccggatcagtatctctgtcgtattgaaggtgcgtcttttgtcctcgtgagcctggaaaacgatgtcagtaacattacccagatcgctgatgagctacggaatgtggtcagcaagccgataatgattgacgataaaccattcccgctcaccttgagcattggcatcagctacgacgagggtaaaaaccgcgattacctgctctccactgctcacaatgcaatggattttattcgcaaaaatggcggtaacggctggcagttcttcagcccggcgatgaacgaaatggtaaaagagcgtttggttttaggcgcagcgctaaaagaagcgattagcaataaccaacttaaactggtttatcagccgcaaatcttcgcagaaacgggtgaactgtacggcatcgaagcccttgctcgctggtacgatcccctgcatggtcatgtgcccccttcacggtttattcctctcgcagaagagattggtgaaatcgaaaatattgggcgctgggtcatcgcggaagcttgccgtcagttagcagaatggcgtagccagaatattcatatcccggcgttatccgttaacttgtctgcgctgcactttcgcagtaatcagctgcctaatcaggtatctgatgcaatgcacgcctggggtattgacggccaccagctgacggtggaaatcacggaaagcatgatgatggaacacgataccgaaatctttaagcgcattcagatcctgcgcgatatgggcatcggtttatcggtagatgattttggtacaggcttttccggattatcccgcttagtcagtcttccggtaacggaaatcaaaattgataaaagttttgtcgatcgttgtctgaccgaaaaacgcatccttgccttactcgaagccattaccagcattgggcaaagcctcaatttaaccgtcgtggcggaaggcatcgaaaccaaagagcaatttgagatgctacacaagatccactgtcgcgttattcagggatatttcttttcccgccccctgcccgccgaagaaattccaggctggatgagcagcgtgttaccgctgaaaatctga

SEQ ID NO: 8955 - DNA, 228 bp, Escherichia coli
atgacggatggctggccgctgtatgaatcacgcctgaagggaaagctgcacgttatcagcaagcgttacactcagcgcattgagcgacataatctgaatctgagacaacatctggcaaggctgggacggaagttactgtcgttctcaaaatcggtggagttgcatgacaaggtcatcgggcattatctgaacataaaacactatcagtacataaaacactatcagtaa

SEQ ID NO: 8956 - DNA, 306 bp, Escherichia coli
gtgactcacaagacaaaacagtttcaaccagtaaaaaaacgtaaacagcattcgcctgaatttctcagtgaagccctgaaacttgctgaacgcatcggtgttgctgccgcagcccgtgaactcagcctgtatgaatcacagctctatgcgtggcgcagcaaactgcagcaacaaatgagttcgtcagagcgtgaaagtgaactggccgctgaaaatgcccgcctgaagcggcaactggcggagcaggcagaggaactggctatcctccaaaaggccgcgacatactttgcgaatcgtctgaaatga

SEQ ID NO: 8957 - DNA, 867 bp, Escherichia coli
atgaagtatgtctttattgaaaaacatcaggctgagttcagcatcaaagcaatgtgccgcgtgctccgggtggcccgcagcggctggtatacgtggtgtcagcggcggacaaggataagcacgcgtcagcagttccgccaacactgcgacagcgttgtcctcgcggcttttacccggtcaaaacagcgttacggtgccccacgcctgacggatgaactgcgtgctcagggttacccctttaacgtaaaaaccgtggcggcaagcctgcgccgtcagggactgagggcaaaggcctcccggaagttcagcccggtcagctaccgcgcacacggcctgcctgtgtcagaaaatctgttggagcaggatttttacgccagtggcccgaaccagaagtgggcaggagacatcacgtacttacgtacagatgaaggctggctgtatctggcagtggtcattgacctgtggtcacgtgccgttattggctggtcaatgtcgccacgcatgacggcgcaactggcctgcgatgccctgcagatggcgctgtggcggcgtaagaggccccggaacgttatcgttcacacggaccgtggaggccagtactgttcagcagattatcaggcgcaactgaagcggcataatctgcgtggaagtatgagcgcaaaaggttgctgctacgataatgcctgcgtggaaagcttctttcattcgctgaaagtggaatgtatccatggagaacactttatcagccgggaaataatgcgggcaacggtgtttaattatatcgaatgtgattacaatcggtggcggcggcacagttggtgtggcggcctcagtccggaacaatttgaaaaccagaacctcgcttag

SEQ ID NO: 8958 - DNA, 1233 bp, Escherichia coli
atgtactgcaatgaattaaaagaatttgcgcaagagcaggaacaaaaacttatcagtgcgcttgctgataccagagagcacccgtcccccgatggtgaaacaagaagccgggataattatcaacgggattacgcgcgtattctgtattcatcatcatttcgcaggctgcagggaaagatgcaactttttgaaattgatcctgaaaaattcaacagaaacagattaacgcacagtcttgaggttgctcagatcgcccgaagtatcgcgtcagacctcaaactgattaacccggtggtggttgaactggcagcgctggcgcatgacatcggaaatcctcctttcggtcattccggtgaaaaactgcttaatgaactgtctgaagaaatcggcggctatgaaggtaatgcacaggcgctacgtatcctgagaaaactggagaagaaattttcatactgcaacggattaaatctgactcaccgtagtttactttcggttgttaagtatcccatcccccgcgctgcagctactgccggcaagttcatttatgatgatgattactatttttacattaacctgcttgctgaaaatcagctcgatctgaatcccggagagaaaacgattgatgcgcagataatggatctcgcggatgagattgcctatgccgcgcatgacctggaagatgcccttagcaggaacatggtcacgattgaagatattgaatatgagtttcagatttctgacgaattccggggagcgagggaacagttcagggaaatcgttactcagtcgagaaacaccgcttttcaggctaacttactgaaaacctcagaagaatttgccatcatattccgcaaggagttaacttcaaatattgtcaatcgcctcgttgcagatatttctgtagtaacgaacctgaatggttttcaggaactgggattcgggaaactgaatgcgttatccgaagggctcaaaaaacttctctttaaagtcatcatgcgaaaacgtaatatcctcacctatgagttcaggggaaataaaataatcagggatttatatgacttttacaatgaaggagagaattataaatttctgcctcctgaacttaaattcaccttaccccaaccagattcctgtatatttaaaatcagcaaaaaacgagcagtggttgactatatttcaggtatgatggatacatttgcagtcaaggaatgggaaactcactgtctgaagtaa

SEQ ID NO: 8959 - DNA, 570 bp, Escherichia coli
atgggcaagaacaatcaccctgaaaataaatacagaaaatggttttccacagcaataacatatcttattgcaggtggtttgtgctggtatatgttgtgggcatccgccatatctcattatactgttttacaaaatacggtacctgaatggacaacatatttttgcaccggtataaccaccggttctctttcttttatttatgcattttatatccgcacctttaacagaacattaaagtatttattaaatgcattcacggggggattttgtcttggatttatactgagtctgaactgttacgatgtctgtgtttatctttttccggataaggttattagctatgaatctgaatatgatgttgtttttccgggaccatcaagaggaaagtatggacattgtgaagcgggactctggttgaaagttcaaaacacttccagatggatacaactttgtacaaataaagagttcctgcgcagtcaccataaacaggggatgacaggtgtatgggtaacagctcgtgttaataaaattgggtcgtatatcgtgaaatatgaatttatctatatgtag

SEQ ID NO: 8960 - DNA, 435 bp, Escherichia coli
atgagtaagaagaaaatttctgttgaaaatgaagagttcattacttaccgggcattacttctgagtattgactttgttaaaaaactggtcacagaaatgtctgatgaagatttaaataaggttaaggaaaactttgacatagctattcagcaacgtgatgagcgaaaggaaaatatgaaagctatcaaatcactcatggatgaacatggtatatctctggaagatttttatcgtgaatttggcaaaaaatcacaggcaggcagaaaaagtgtgtcaggagggcataaatacgagtatgacgataacggtaaaagaatgtactggaatgggcaaggacgtcggcctaaggccatagcagaggctataaaagccggaggttctcttgatgattttcttatatctcaggaagtatcatctggtcctgattatgaataa

SEQ ID NO: 8961 - DNA, 174 bp, Escherichia coli
atggtaacgctgaccattaaccgtaaaccacagggcattttcagtaaatcaccggcaacgccgctgcaggataaaacgaacactgcacacaacgtgaaggccagggaacggataccacagttgaacgataaacagagccctgctctgctgaaaaaacaccgtggcggcatatga

SEQ ID NO: 8962 - DNA, 207 bp, Escherichia coli
atgacaaaacgccagcgtaaaaaccgtaagcgtattaatcgtcttgtggaactctggcctgagttattcaaccgggaaaaaccccaaccgcttaaagttgagatacctgacgacctgatacaggatatcgccatcagagaactggcgtttggcgctggtacattacacgcggcagtggcgtcttatgtgcagtctccgcactattaa

SEQ ID NO: 8963 - DNA, 549 bp, Escherichia coli
gtgcaaataaccgaagcattaatttcagagccgggagacatccggcgttttattcagcaggcggtggaccactggccgcatttgctggcattttacttcacactccattcggcagaaggaaatatcaacgggcaacagattcatgcattctgtacttccttttaccgacaggtgcacgaacgtattactgagcgtaatcacacggccagtccatcctcgccggtggtattacgctggttgcgggaacaacatggaggagcaacaatacgatgcctgttgctgttcagccaggagcttttctgccatccgcgagccagtgtgacagttgatgaagaatgttcgcaagtggtggatttactgcaacagagctggcaggtgataagtgctggcggacaatgccgggtggaaaagcgttttcaggtcgcccggggtgatacatctggccagtatgttgcgttaaaaacagtcgcattgtctctggggttaccggttgtgaccgccattatctatcgtccggtacagcgctgtacattgattacagctcagtga

SEQ ID NO: 8964 - DNA, 159 bp, Escherichia coli
atgaaacgtgttgcaatgccagcgctggtattgcggaaatcagccctgtccctggtgctggcgacattaccgttcatcttcctgctgaccctctccggtcagccagcagattgtagctctttcctgactgattcgtcattccattcacattgtttataa

SEQ ID NO: 8965 - DNA, 237 bp, Escherichia coli
atgttgacctcaatgacaggccacgactgcgtgttgctgcgtgccgacgatcccctgatcgacatgtactacatcaccagtttcaccggtatgacagataaatggttttacaagctgatcagtgaaggccatttcccgaaacccatcaagctgggccgcagcagccgctggtacaaaagtgaagtggagcagtggatgcagcagcgaattgaggaatcacgaggagcagcagcatga

SEQ ID NO: 8966 - DNA, 576 bp, Escherichia coli
atgaatggtatccctcatttcgactatagcctggcccccttctggccgtcttatcagaacaaaatcatcggtgttctcaaccgtgcgctgcgtgaacagtcctgctcccgggtacggcggatcctgcttcgtctgccgtgggaacatgacaacacctttagttgcagcagaacctggttagggatggactttattgaaacggtcagcgcgctgatgaatgcaacacccgggcgtgacctctgctggctcctgacccgccatccggaaaagccggaatatcatgtggtgctgtgcgtcagacaggagtatttcgacggccccgaactggaccggctgattctggatgcctggagcaacgtactgggcttcgcgtcaccgggggaagcggcaccgtaccagaaacagataacccgggatgtggtgctggacagtcgttcaccggactgcgaagacatcctcaaagatttgatctgggcgttcagtgatttcgcccgcgatcgtcgtggtgtgtgcgatccggaagcccgttgcctcgccggtaatcccggctatcccggatctgcaggaccgttctga

SEQ ID NO: 8967 - DNA, 732 bp, Escherichia coli
atgaatcaaccaatacacaatgcttactggttatcccgttttgaaagtattctcaacagtgccctggcgcaacaccgtgccgtctcgttaatccgggtggatttacgtttccctgagtatatgcctgccaccatcatggataccgatttagattcagcggtgatttctcgtttttttgcatccctgaaagcaaaaattcaggcttaccagcgacataaacgacgtgccaacaagcgtgtgcgtgcaaccaccctgcattatttctggtgtcgggagtttggcaaggaaaaaggcaggaaacattatcacgtgatattactgctcaacaaagatacctggtgctcgccaggggatttcaccgttccttcttcgctggcgacgctgatccaactggcatggtgcagtgctctgcatctcgagccctggcagggtaatggactggttcatttttccaggcggacgcctttccgtaaaccgacatcatctgatgctcgcccttcttccgatgatacgcctttgtcgggtggatgttctgaaaccaggaaggcttcagacaaaaagtctggtggatccgctgtgctctgggtcaagcgaggtgatgtggaagcgatgcagaaagccatggagagagccctttatctcgtgaagtatgagacgaagcagcatgacggttctggtcaacgtaattatggttgcagtcgtggagcggggcgtctactggatggcaggtga

SEQ ID NO: 8968 - DNA, 1020 bp, Escherichia coli
atgccccttaatgtacgctttgatatagagaattatttaaaaggaattaatgatattcgcgtttgcaatttctttttgagatgtctatacatgaaaaatatggctatcaaaaatattgactattataacgacatcagaagttgtaagagggtaataattcaggcctttgatagtacaaatatcagtgggcaggacaaggataacctgtgcaaggaaatagaaactgcaatagaaaaagaaatcctgccattagatgaatttgactgggttaaaaatgatgaacgcgcagctttttggatatgtgcttatttactacatactccaatcatctccaaccagatgatcactggctctgacaatatctattgtccttctatgtcgtcaggaaatctccaacaatatcataatgaatatatctatcttggttttcatgatattccagacacacataataaaagatttgaacgtattatccgtttttttgatcacttaagtgacattttccatacaccagataaaaattatatagttctttgtccactactcaagaaacagataattatcaacttcaaaaacaagtggaggctaatatatcaaaaacctctccctgtcaaatggctaccagatcaggaggatgttgtatcatgggcgtgggattttataaaaaaatactttagcaatcatcacctcacgatgtgggggcctaataccacatacaattttgttcaaaatacaacgcctcttaatcatgcagaaaagctactggctgtacgtgcaacatttgatctttgggaaggtgacgataacagcaaaaaactacttttgatgaatcttaataaagcgtggaatcagaaaaagcttcgtgaaacacgtgttgataaaaaagcattaaatacttatttgaaaataaagacaaaaatacaactggatgagttagctgaacattacgatatgcgtataagtgatatactggaaaaattaatcagccagcattacagagaattgtttcaggagaaatga

SEQ ID NO: 8969 - DNA, 192 bp, Escherichia coli
atgagcctgacgggtgcagccgttcaggggatgcgtggcgcagatacgggactgaaaaatagcattacacaggctgcttttgccggtgccggatttacccataatgccaatcacgggttcgtaatgaataacgctgcggagatgttcaaggattttctggcgaatttcttcaggaagaaacgtcagatgtga

SEQ ID NO: 8970 - DNA, 198 bp, Escherichia coli
atgtctgaggcaaacattattcacagcagatatggactgcgctgtgaaaaactcgacaagcccctgaatcttggctggggactggacaatagcgcggtgttgcactgtcccggggagctgccgacagggtggctgtgcgatgcgctggatcagatatttatcgccgctccacaactgtcagcagtggctctcccctag

SEQ ID NO: 8971 - DNA, 246 bp, Escherichia coli
atgaattgtgataataatcacagaaatgaagaattcattgttacctttgataaaggcaacaagcaagacaattcaagacgaaaacacgataattttcctatagaggtagaatcctccgtagagcaggagacacactgtatcacaaataataagtcggcttccggtatagtaacacatgactatgatgccgattatatttgtggttgtggtgaaattatgtgtcctggttgcggtcatgacctataa

SEQ ID NO: 8972 - DNA, 162 bp, Escherichia coli
atgatcaaagataacagcaaagttgatgacagtgctgaccgactgtcatttacagaaactctgtttgtagcaaattccatcttacctgacctcacccagacaaagacaaaagagaatgattgttatttacttttcaaaaaaagtgtcatattgtccatataa

SEQ ID NO: 8973 - DNA, 210 bp, Escherichia coli
atgagttataaaaaactgtcccaattgacggctatattcagtttacctattactatcttattggtttcactttcatcccttcggattgttggcgaagggaattcttatgttgacgtttttctaagctttataatatttcttggttttattgagctgattcatgggattcgaaggattctggtctggtcaggctggaaaaacggaagttaa

SEQ ID NO: 8974 - DNA, 294 bp, Escherichia coli
atgggattcgaaggattctggtctggtcaggctggaaaaacggaagttaaatatgatggagtttatatgcgagaaataacagaatcacagttaagatatatttccggggcgggaggtgcgccagcgacttcagctaatgctgcaggtgctgcagctattgttggagctctcgccggaatacctggtggtccacttggggttgtagttggagccgtatctgccggtttgacaacagcaattggctcgaccgtgggaagtggtagtgccagttcttctgctggtggcggtagctaa

SEQ ID NO: 8975 - DNA, 1551 bp, Escherichia coli
atgagtcatcagtgttcactttctgaactgaatgaaaacctggtgcctttcactgccaggcagatcaagtcctcattaatctggtgtgcagaggatgtcagaaatccagacgagctgcaaaatgcctgcagttatattatcgatcctggcagtacagcttctgccaaagtgttccatgcagagcgctatggtggcagtggtattcagcgtaatggaggtggtgcacgttgtgggtttgatggtaactaccaggttaaaggaataggaagtaatccgttggttggcgaaggtactgacgaacgtcattctaatggtgcactcggcgctgttcatgcaatatatgaggctttgtggggagaagtactggctcaaatattaccttatagtgctgtgcgggttcgggcggttttacttacagatctctatactgaaaaggcatttgagcgctccggtaggaaatcacgaagagccctgttggtacgtgagcctgttgttcgcccggcgcattttgaacgggcaccttacttccaagtaaaaccggagtattccagtctgttaattcacgatgcctgtcgggttagatctgtgatccacaagctgccaggatatctacctgtaccaccggaagaaattgatgctgaagcacgaactgatccccggatttattgcattgaggggttatgtgaactggcacgtcgtgaggcctggcaaatggcattttgtcgaacacgtttcctgagattgacaacttctccttctaatattgcaatggatggcagattaatggattttaacggactcagttgtctgtttccgggagattccccagctgattttgggtataaactaagattagctgaactggcaaaagaaccgatggtacttatgcaagggctgtctgatctctgcttgtatatcggaaaatatatgtttgaccctgacttcactcttgcagcccgtttgaaggttgaggagatatttcagaaaacttttcatgaagcatgttattactgttatctagaactgttgggtattcctggagaatttataacacaaaaagagatacctgatatattgaaagaactggttaacagttttgttgcattactcaataaatactacgagaaatcacatgcccaagatattgtcaatcaggatggttcaccattgcaaaagttggttgtgacgctaatccatcataggcataatcaaaagcaggcactgaatagtagcatcaagaatgatgtttatttcaccgttgcacaacagtgtttttcccaggccatccactggctgacgcaaggcagtaccagacgtcagataaatgcctcattactcctgaaagaaattgaacatcataccatgaaaaggctgcaacccagggaagagctgaggaaagagaatatgtgcgaaaaaattgccatcctgctggataatcatggcgatgatcccctttttttacaagaagcaatttctgatatgaaaaattttatgcttaagttttccagagatgcatttggatatcttgaaccgataagaaacacagtgtaa

SEQ ID NO: 8976 - DNA, 453 bp, Escherichia coli
atgtcttatataagggaaaccatcagaggaaaagatgaatggactgtttatgaacagatcggttttgcggtcagttgtatgctctacaatcgtaattacagtctgtatccggtgttaaccattcaatactggactgaatatgcgatacagcataatcagattaaattcctgtttgattcacgaggttttccactggcgtatattacctgggcatatcttgaggctgatacagaagcacgcctgctcagggatccagaattcaggttgcatccgtctgaatggaatgaagatggaaggatctggattctggatttctgttgtaaaccaggctttggtcgaaaagttattgactatctcatacagcttcagccatggggagaaggagaagtacgatggttaagcaggcgaaagaaaattgtgacatacatccctgagcggctgcataaaacgtag

SEQ ID NO: 8977 - DNA, 1275 bp, Escherichia coli
ttgtttcgtcaggatgctttagaaaacagaaaaatgaagtggcagggacgggcaatattacttcccggaataccactatggttaatcatgctgggaagcatagtgtttattacggcatttctgatgttcattattgttggtacctatagccgccgtgttaatgtcagtggtgaggtcacaacctggccaagagctgtcaatatatattcaggtgtacagggatttgttgtcaggcagtttgttcatgaaggacagttgataaaaaaaggggatcctgtttatctgattgacatcagtaaaagtacacgtagtggtattgtcactgataatcatcgtcgggatatagaaaaccagctggttcgtgtggacaagattatttcccgtctggaagaaagtaaaaaaataacgctggataccctggaaaaacaacgcctgcaatacacagatgcgtttcgtcgctcatcagatattatacagcgtgcagaggaagggataaaaataatgaaaaacaacatggagaattacagaaactatcagacaaaagggctgattaataaagatcagttaactaaccaggtggcattatattatcagcaacaaaacaatcttcttagcctgagcggacagaacgaacagaatgccctgcagataaccactctggagagtcagattcagactcaggcagcagattttgataaccgtatctaccagatggaactgcaacggtacgagttacagaaagaactggttaacactgatgtggagggcgaaatcattatccgggcgttgactgacgggaaagttgactccctgagtgtcactgtcgggcaaatggtcaatcccggagacaaccttctgcaggttattcctgagaacattgaaaattattatcttattctctgggtcccgaatgatgctgttccttatatttcggctggtgacaaagtgaatattcgttatgaagcctttccggcagaaaaatttgggcagttttctgctacggttaaaactatatccaggactcctgcatcaacacaggaaatgttgacctataagggagcaccacagaatacgccgggcgcctctgttccctggtataaagtcattgcgatgcctgaaaagcagattatcagatatgacgaaaaaaacctccctctggaaaatggaatgaaagccgaaagtacactatttctggaaaaaaggcgtatttaccagtggatgctttctcctttctatgacatgaaacacagtgcaacaggaccgctcaatgactaa

SEQ ID NO: 8978 - DNA, 2097 bp, Escherichia coli
atgactaacgggaatttcagacaaattataaatcagcttgatatgcgctggcgacgtcgtgttccggttattcatcagacggagaccgctgaatgtggactggcctgcctggcaatgatatgcggtcattttggtaagaatattgacctgatatctcttcgtcgtaagtttaatctctcggcccgtggagcaaaccttgcaggaatcaatggaatagcggagcagctggggatgatcacccgggctctttcactggagctggatgaacttggtgccctcaaaatgccgtgtattctccactgggatttcagtcacttcgtcgtgctggtcagcgtaaagcgtaaccgttatgtactgcatgatccggccagaggaagaagatatctcggtcgggaggaaatgagccggtattttacgggcattgcacttgaggtctggcccggaggtgaattccggacggaaacccagcaaacccgcataagtctccgttcactgattaacagtatttacggtattaaaagaacactggcgaaaattttctgtctgtcagctgtaattgaagcaatcaatctggtaatgccggtgggaactcagctggttatggatcatgcgattccggcgggggaccgagggctgctgacgcttatttctgctggcctgatgttctttatattgctcagggccgcggtgagtatgctgcgtgcatggtcctcactggttatgagcacgctcatcaatatacagtggcagtcgggtctgtttaaccaccttctcagactgccgctggcattttttgaacgccgtaaattaggtgatatccagtcgcgttttggctcccttgacactttgagggccacctttaccacctgtgtggttggggcaatcatggacagtattatggttgtgggtgtttttgtgatgatgctgttatatggaggatatcttacctggatagttctcggttttaccatggtttacgttcttattcgtctggtgacatacggctattaccggcaaatatcggaagaaactcttgtcaggggggcccgggccagctcctattttatggaaagcctgtatggtattgccacggtaaaaatccagggtatggtcgggatccggggaacacactggcttaacctgaaaatagatgcgatcaattcaggtattaagttaaccaggatggatttgctcttcgggggaataaatacttttgttgccgcctgtgatcaggtggcgattttatggctgggtgcaagccttgtgatcgataatcagatgacaatagggatgtttgtggcatttggttcttttcgtgggcagttttcggatcgggttgcttcgctgaccagttttcttcttcaactgagaataatgagtctgcataatgagcgcattgcagatattgcactacatgaaaaggaagaaaagaaaccggaaattgaaatcgttgctgacatgagcccggtttcactggaaaccactgatttaagctaccggtatgacagccagtcagcacaggtattcagtggtctgaatttgtctgtggctccgggagaaagtgtggctataactggtgcctccggtgccggaaaaaccacattaatgaaagtattatgtggactgtttgaaccagatagtggaaaagtactggttaatggcacggatatacgtcaacttggaataaataattatcaccgtatgatagcctgtgttatgcaggacgaccggctattttcaggatcaattcgtgaaaatatctgtgggtttgcagaagaaacagacgacgaatggatgacagaatgtgccagagcaagtcatattcatgatgtgataatgaaaatgccaatggggtatgaaacgttaataggtgaactgggggaaggtctttccggcggtcaaaaacagcgtatattcattgcccgagctttataccggaaacctggaatattatttatggatgaggctacaagttctcttgatacagaaagtgaacgtttcgttaatgctgccataaaaaaaatgaatatcacccgggtgattattgcacacagagaaactacgttgagaactgttgacaggattatttctatttaa

SEQ ID NO: 8979 - DNA, 222 bp, Escherichia coli
atgggggaggtcaagaaggatataaaaataacagtgattgcttttgttatcaattatctgttcttttatattccggtgtcattatatcttagttattactatggatataatttttttaatctatatatgttttttttatcacttgtagttacatttttatcgttgtggttaaacgtgaatttttacttcttcacaaatcttatagcgaaggtgttgaaatga

SEQ ID NO: 8980 - DNA, 687 bp, Escherichia coli
atggaaatgacaaaaaataaaaatgcaactataaaaaaacagtcatcagccggctgcttttcaatgtttactttatcattttctattacctttattcctgcatttcttacaaacaggcaggaacttatatccaggggacttcttgttccagcattatttcttgctgaatttctaattcttgttccactgtattttattttcttccgaaaaagagaaggattaggaagaggttcttttcgactggatgttttttttactcttttctctttaataatgattattcagttatttgtcccttatctgctggcagtgaggaaaacggaagaatggatgatctcgcaaatgtctttttccggagccattttatggattaatatattttcttctgtacttcttgttcctgtatatgaagagattgtatttcgagggtgtctttttaactcttttaaattctggtttaatgacaatatttacacctctgctattgtaacatcagtcatattttctgcattacatctacaatatactgactttcatacatttttgatgctctttctggtatcgttagttcttattagtgcaaaaataaagtcgaatggcctgttaatgcccatattacttcacatgtcgatgaatgcagtcatagcaggaatacaatatctggcttctatcagttatactcattaa

SEQ ID NO: 8981 - DNA, 459 bp, Escherichia coli
atgaaaatatactggacaagaaaaagcattcctgaacattcagcacttccaccttcattaagaaagaaaaattttactgacgcatataatgctgcatcttcccatatcgaatactggataggtgctggcgtctcatttatctcgatgatgattttattcagagtatatgattttcttttacccgcccaagatactttcccgggtgatatcatcagaagtttatgtgttgtgtgtccatccatattaatctggtttcagttttcggtatatgtcatgaggaaatattacagacatattctggaacgaggtaaggaaaccgaaaccatttcagaaaggttgatacgtgaggctgatacacgagaatatgaactatggcgtccggtccatcgttttttctccattgtttttctcattattctattagtttgcattcattcactgataacaactataaaataa

SEQ ID NO: 8982 - DNA, 192 bp, Escherichia coli
atgactacttctcctttcattctcgaatatcacgataatgatagagataatcattatcaattgattgtgtcagtaattttgacttacatcacactttcatggtttaatcaggtgatttatttaatgaaaagagtgtgtttgtggatgtattgtgtatatgtcttaccgggcatctgttcttacattaattaa

SEQ ID NO: 8983 - DNA, 543 bp, Escherichia coli
atgaagttaaaattcatctccatggctgtattttcagctctgaccctgggtgttgcgacaaatgcgtctgctgtcaccacggttaatggtggtacagttcattttaagggtgaagtggttaatgctgcatgtgctgtaaacactaactcattcgatcagacggttaatcttggacaggttcgttccgaaagattgaaagtagatggagctaaaagcaatccagttggatttacaattgaattaaatgattgtgactcgcaggtgtctgctggtgcaggaattgtcttttcaggcccagcagttactggtaaaacagatgttcttgctttacaaagttctgcagcgggttctgcaacaaacgtcggcgttcagattactgaccataccggcaaggttgtacctttagatggaactgcaagctcaacgtttacattaactgacggaaccaacaaaattccatttcaggcggtttactacgcaactggacaggccactgctggtattgccaacgccgacgccacctttaaagttcagtaccagtaa

SEQ ID NO: 8984 - DNA, 447 bp, Escherichia coli
atgcgcttccagggaaaaataattgctgaagcatgcagtcttgccctgtcagacaggcagatgactgtggatatggggcaacttagcagcaatcgatttcacgccgccggtgagtatggggactctgtgggctttgatattcaccttcagggctgcagcactgtcgtcagtcagcgggtggggatttccttttatggcgtgtcagatattcacgagccggagttgctgtcggtggatgaggagaatgatgcctcagacggaatcgctatcgctttatttaatgaaagcggagagctggtaaaacttaatcagcctccggagaactgggtgcatcttacccgcggagatatgaaactgcatatgcaggcgaggtataaggccacacattatcccgtcaccgggggaaaggcaaatggacaggtatggttttctctgacctatctgtaa

SEQ ID NO: 8985 - DNA, 696 bp, Escherichia coli
atgatgaagcacatgcgtatatgggccgttctggcatcatttttagtctttttttatattccgcagagctatgccggggttgctctgggggccacccgtgtgatttaccctgaagggcaaaaacaggtacaactggcggtaacaaataatgatgataaaagtagttaccttattcagtcatggattgaaaatgctgagggaaaaaaggatgcccggtttgtaattactcctccgttattttccatgcagggaaagaaagagaataccctgagaattattgatgccacaaacggacagatgccggaagacagggaaagtttgttctgggtgaatgtcaaggccatcccggccatggataaggcgaaaaccggcgagaattatctgcagtttgcaattgtcagcagaattaaactgctctaccgtccacagggactggttattccgccagaacaggcaccgggtaaattagagttcacccgtgaaaacggagggctgactctgtttaatccgacgccgtattatctgacagtgactgacttaaaggccggaaataaaagtcttgaaaacaccatggtacccccacagggaaaggtcactgtgaatatccctggaggatacaccggaggagatattacttataaaacaattaacgattatggtgctctgactgaacaggtgaagggtgttgtgaagtaa

SEQ ID NO: 8986 - DNA, 504 bp, Escherichia coli
atgaaactgaaagctattatattggccaccggtcttattaactgtattgcattttcagcacaggcagtggatacgacgattactgttacagggagggtattgccacgtacctgtaccattggtaatggaggaaacccaaacgccaccgttgttttggataacgcttacacttctgacctgatagcagccaacagcacctctcagtggaaaaatttttcgttgacattgacgaattgtcagaatgtaaacaatgttactgccacctttggtggaaccgcagaaaatacaaattattacagaaatacaggggatgctactaatatcatggttgagctacaggaacaaggtaatggtaatacccccttgaaagttggttcaacaaaagttgttacagtgagcaatgggcaggcgacattcaatcttaaagtccgtgccgtaagcaaaggtaatgctggtgcgggaagtattaattcacaaattactgtcacctatacctatgcgtaa

SEQ ID NO: 8987 - DNA, 282 bp, Escherichia coli; identical to SEQ ID NO: 979

SEQ ID NO: 8988 - DNA, 342 bp, Escherichia coli; identical to SEQ ID NO: 982

SEQ ID NO: 8989 - DNA, 426 bp, Escherichia coli
gtgcaaataaccgaagcgttattttcagagcagggagacatccggcgttttgttcagcaggcggtggaccactggacgcatctgctggcagtccacttcacactccattcggcagaaggaaatatcaacgggcaacagattcatgcattctgtacttccttttatgaacgtattactgagcgtaatcacacgaccagtccatcatcgccgctggtattacgctggttgcgggaacaactacatggaggagcaacaatacgatgcctgttgctgctcagccagacgagcatttgccatccgcgagccagtgtgacaggtgatgaagcatgttcacaactggtggatttactgcaacagacctggcgggtgataagtgctggcggacaatgtcgggtggaaagttttttttcgggttgcccggcctga

SEQ ID NO: 8990 - DNA, 465 bp, Escherichia coli
gtgagccactatttatcccccggcgcttatctgccccacgacgcgcccatgttactgctggaagacgtggtgagcgtcagcgatgacagcgcggtgtgccgcgtgacggtttcgcccagtggcgtactggcaccgtttctcgacccggacggcaatctccctggctggtttgcccttgaactgatggcgcaaaccgtcggcgtctggtctggctggcatcgccaccagcagggcaaaaacagtattgagttagggatgatactgggcgcgcgtgaattgctttgcaccgctggcattctgcccgcaggccagacgctgactattaccgtcaagctgctgatgcaggacgatcgcttcggcagttttgagtgcagcatcaacgacggcgaggcgacgggccgcattaacaccttccagccgaccgcggaagaacttaccaccctgtttcaacaaggagcgtcctga

SEQ ID NO: 8991 - DNA, 2598 bp, Escherichia coli
gtggccggtaccctgctgaacagtgcgctgatttatgcggggaataacctgaagctgtttacagaccgtctgcataaccagcatggtgatatcctggccgacaacagtctgtgggtacagaaggacagcagcgggacggcaaacagcgaaatcattaaccgttccggtaatattgaaaccatgcgtggcgatatcaccatgaatacggcgcatctgctgaattcatgggatgccatttcggccagccatgaggtcattccgggcagcagccgcggggtgatttcaccggttccggaaaataaccggtggtggggtgttgtccggcatgatggtgtggaatatctggccgtgtactggggtaagggtgccacggtacctgatgaataccgtatccgtacgggagatacggatacggtgacagtcagtgccaccggccatgctgccaggatatccggcggcgctgatatgcatatccgtgcaggacgactggataatgaggcatcgtttattctcgccggtggcagtatgaccctgagtggcgacacactgaacaatcagggctggcaggaggggaccaccggaaaggaaacggtctggcggcttgcctccgactcactccccaaagcgtggtttactgagccatggtacagggtctatcgccaggtctcgccggatgcgacagaagccagtggcacctctccggtaggtcagtaccgtgcggttatcagcgctgccggtgatgtgtctgccagctttgccactgacaccggtaataccactgtcatgccccgggcaggtggttcaggtaacacgataacggtgccttcgctgaactccctgacaccaccgacggtcagtcagggggtgagcggtgaagccctgctgaatgaaagcggtaccgggataaccggccctgtatggaatgacgcgctgccggatacgctgaaggatatcccgggtgcgctgtcgctgtacggggcaagtgtaagcagctatcccctgccatccggtaacaatggttattttgtcccgtccacggacccggacagtccgtatctgattacggtgaacccgaaactggatggtctcggaaaggtggacagcagtctgtttgccggactttatgacctgctcaggatgcaacccggagaggcaccacgtgaaacagacccggtgtatatcgatgaaaaacagtttctgggctcatcgtacattcttgaccgtcttggcctgaaaccggaaaaagattaccgctttctgggggatgcggcttttgatacccggtatgtcagtaacgtcatactgaaccagacgggctcacgttatatcaacggcacaggctctgacctgacgcagatgaaatacctgatggacagcgcggcagcacaacagaaagcgctcggactgacctttggtgtgtcgctgaccgccgggcaggttgcacaactgaccagaagcatactgtggtgggagtccgtcaccatcaacggacagacagtcatggttccgaaactgtatctgtctccggaagatatcacccttcataatggcagcgttatcagcgggaacaacgtgcagcttgcgggtggcaatattaccaacagcggcggcagcatcaacgcacagaatgacctcctgctcgacagcacaggtagtatcgacaacctgaatgccggactgataaacgccggtggtgcactgaacctgaaggccatcggggatatcagcaatatcagctcagtcatcagcggtaaaaccgtatccctggaaagcgccaccggaaacatcagtaacctaacccggacagaacagtgggcgatgaacaacggatataaccatttcagcggaacggataccggtccgctggctgctgtcagggcaacggactcactgtttatgggcgcagccggggatatcagtatcaccggtgccgccgtttctgccggtgacagcgtgttactgtccgccggtaatgacctgaacatgaacgcgatacaggccggagaacgtcgtcgctatggcgggtccggggggtatgaaactcatgccgtggcccccacggtcactgccgggaacagtctgatgctttccgccggtcgtgatgtgaacagccaggctgccggtattacggctgaaaacagtatggatatccgcgccggacgggatgtgaacatggctgcggagtccacaggcgcaggtgaccacgacagcactttcagcatgaagacggttcatgattcggtccggcagcagggaacagacatgaccagtggcggtgacatcacggttactgccggacgggatatcacctcagttgcgactgctgtaacggcaaagggcgatatccgtgtgaatgccggtcatgacatcgtactgggtactgccacggaaagtgattatcactacagtgaatcaggggaaacccgcaaccgtctcctcagccatcagaccacccggaccatcacggaagacagcgtcacccgtgagaagggctctctgctgtcggggaatcgcgtgaccgttaacgccggcgataacctgacggtagagggttcggatgtggtggctgagccgggatgtgtcactggcggcgggtaa

SEQ ID NO: 8992 - DNA, 837 bp, Escherichia coli
gtgattcgtgctgctggcggcgctggtgcactgtctgactggctgttgcgtcatgtcaaatcctgccagtggcctcatggtgactatcatcacagtgaaaccgtcatacatcgttacggcaccggcgcgatggtgttgtgctggcactgcgataaccagctgcgtgaccagacatccgaatcacttgagcaacttgctcaacaaaacctggcagcatggatgattgacgtcatacgccatgcaatgaatggcacgcaggagcgggagttatcgctggctgaattatcctggtgggcggtctgcaatcaagtggcggacgcgcttccggaggcagtattacgtcgttctctggggttacgtgcggaaaaaatccgcgcggtgtaccgcgaaagcgacatcgtaccgggagagcagaccgccaccagcatactaaagcagcgcacaaaaaatcttgcgccgttgcctcacttccaccagcaacagaacccaccactggaaaaggcggtggtcagcattgccgttgatccggactctccggaatctttcatgaggcgacctaaacgtcgccgttgggtaaatgagaaatatacgcgctgggtgaagacacagccgtgtgcgtgttgtggtcagccagccgacgatccccatcacctgattggtcacggtcagggagggatgggaacaaaggcccacgatattttcacgctaccgttgtgccgggaacatcacaacgaacttcatgcggatccgctggcgttcgaagaaaagcatggttcccaggttgatttaatttttcgttttcttgatcacgcctttgcaaccggcgtgcttgggtaa

SEQ ID NO: 8993 - DNA, 375 bp, Escherichia coli
atgcgtattgagtttgttttgccttatccgccgacggtgaatacttactggcgacgtcgtggcaacacatattttgtatcaaaagtcggtgagcgttatcgccgtgatgtggcgctaattgttcgccggcagcggttaaaatcaaacctgtccggaaggctggcgataaaggtgattgcagagccaccggataagcgccgtcgtgacctggacaatatcctgaaagcaccactggatgcgctgacgcatgccggactacttatagacgacgagcagtttgatgaaatcaatattgtgcgcggtcagctcgttcctggtggtcggttgggcgtgaagatttacgaaataatgcatgacgggcaggtccaaaaatga

SEQ ID NO: 8994 - DNA, 822 bp, Escherichia coli
atgagactggaagatttaccgaaatactattccccaaaatcgccaggcctgactgatgcatccgtctcgacgtcaaaagatgcgctgagcatcactgatgtgatggctgcgcagggtatgacacaaaaccgggctgagatgggattttctgcgttcctggggaaaatgggtattagtatgaatgacagggcgcgggcaacagaattactggcagattatgcattaagtcagtgcgatcgcgtggcggcgttaagaaaacttccggcagaaataaaaccggcagtgatgcgcattatggcttcgtatgcttttgaggattatgcccgcagcgcagcgagtaaaaagcagtgcccctgttgccgaggggaaaaatttattgaaagcgaagtttttacaaacaaggttcagtatccggatggcaagccgccagtatgggcaaagtgtacgaaaggtgtgtatccgtcttactgggaagaatggaaaaaaatccgggaggtggtgaaagtttcttgtcctgaatgtaaagggaagggggagatttccactgcctgtaaagactgccgtgggcgtggtgttgccattcatcgtgaagagtcggaaaaacggggtatgcctgtaatcaggaactgccagcgttgtggcggtcggggctatgaaagactaccatcaacggaggcatttaatgccatacgcaaagtgacgagtgctatcacgcttgatacgtggaaaaaatcagtgaaacgcttttacgatacgttggtggttcggtttgacattgaagaggcatgggcggagcggcagttaaagagggtaacgcgatag

SEQ ID NO: 8995 - DNA, 714 bp, Escherichia coli
atggatgacagcactctgctgaggaactcttcactttttattgcttatatgggctgtcttggatggggaagcgcttatttctatggatgggggacttccttttactatggctttccatggtggatcgtcggggttggcgttgatgatgtggcccgaagtttgttttatgctgtgagcgttatcgttatattccttactggatggggagtaggtattgttttctttttaggcataaaacaaaaaaacaatatacagaatttgagttttatcagactttttctggcaatattgctgctttttattccgcctgttctggagttttcggtaattcatcagcacgttgagccagatgtgctgtttttttgtgttattgctgcctttacaattacgctttttgtcaggtcaggaagaagacttatttcagtcaaatgtttttcggaagtgtcttttattcgccatcaccgaattgagtttattatggctggattcatgatttatttctggacattctctcttattgccggttggtataaaccccagtttaagagggaatatcagacgatccactatgagaatacttggtattacgttcttgcacgctatgatgatcgtctggttttatcgaaatcgtacagtaatgggagttctgcattcgttatacttaatagcgggcagattgatgactttgaaattaatgtagtcagagttcgttaa

SEQ ID NO: 8996 - DNA, 216 bp, Escherichia coli
atgaaatccatggacaaaatttcaacgggcattgcctacggcacctccgcaggcagtgctggctactggtttttacagtggcttgatcaggtcagtccgtcacagtgggctgcgattggtgttctggggagtctggttctgggcttcctgacttatctgacaaatctgtacttcaaaatcagagaagacaagcgtaaggctgcacggggagagtaa

SEQ ID NO: 8997 - DNA, 315 bp, Escherichia coli
atgactcaaaactatgaactgattgtgaaagggatccgcaattttgagaataaagttacggtaactttagcgttacgggacaaaaaacgctttgacggtgaaatttttgacctggacatctcgctggaccgtgttgaaggtgcagcgctggagttttatgaggcagcagccagaaggagcatcagacaggtcttcctggatgttgctgccgggttatgtgaaggggacgagctgttgccagaaacgcgcccctgttcagaggcgcggtataccataaaaattaacagttctgataactcgattacaggttgttag

SEQ ID NO: 8998 - DNA, 465 bp, Escherichia coli
gtgagcagagtcgccgcgattatttatgctctggttatttgcatcatcgtctgcctgtcgtgggcggtcaatcattaccgtgataacgccatcgcctacaaagaacagcgtgataaaaaagtcagtgagctgaagcaggcgatcgccaccatcgctgacatgcagcagcgtcagcgtgatgttgctgcgctcgatgcaaagtactcgagagaattagccaatgcgaaagctgaaaatgaaactctgcgcgctgatgttgccgctggtcgtcgtcggttgcacatcaaagcagtctgtcagtcagtgcgtgaagccaccaccgcctccggcgtggataatgcaaccagcccccgactggcagacaccgctgaacgggattatttcaccctcagagagcggctgatgacgatgcagatgcaactggaaggggcacaggagtatatccgcactcagtgcattaagtag

SEQ ID NO: 8999 - DNA, 429 bp, Escherichia coli
gtgacgccaccagtcatcctcgcgatgaaaatccggcatctcaatccccgccagatggtaagcatcccggaacagcgtgtaacagtccgtcaccccgtgctcaaagcgccgcccggaaagatgtggcacacagcggaacttgtgaatcgccccccggcaaaccagccaccacggcaaattactctgcacctgcagccgccggtcagcctcactcagccagggcagaccaccgggatgactgtggaccagcgccacaatctcaccctgcatctctgcccgcagccagtcctccggtgcgatacgaaaatacgcctccggctctgcggaaatattcacacaagggatataccgctccccctccggcgtgcttatcacgaagccgcacgactccgcaggcgcacaccgccgggcatgcgccagaatcgctga

SEQ ID NO: 9000 - DNA, 621 bp, Escherichia coli
atggttttgattacgactacaaaaaatacttttataattcaagcaattaagagtatgcgttggcggggtttttcgtacgtgaaagtcatcgctgtggacgactattcttctctgattcgtgattttggcacatcttgctttcgggatgagcaatcgttgttgttacctgtattccctgataatgattctactacctgtatacgctcactgtatttcattcaccaatggctaaaaagccagcctgtcaatattccgtgcctggcatggggggataatggtgtagttagtaataaaggcatacctttcataccgtggaaattaacagcagagcaattttgtttctatatagataaatttatcaatggctggaggtgcaaaaaaaatattcgcgcgaatcataaagtttcttttttagaacgacaattatccccgagggagaaaagtatctttatatataccaaggaaggaaaagatattgcatggatctcgaacaccttgggtatatccagtaagactgtgtggacgcatcgtcgtagagctatggataaactcggggtaaaacgtttacatcaatttataaatattccgtgttcccttattagtgaaaatattcaattataa

SEQ ID NO: 9001 - DNA, 7944 bp, Escherichia coli
atgaataaagtatataaagtcatttggaaccatacaacccaaaaatgggatgttgtttcagaattgacgagttgtagaaaaaaatgtaaatcaactcgcttaggaattgctttatcagcaatggttctggggggcgctattgcaattaattgcaataacgcaatggcagatgtcatattgtcaccagactggcgtccgggtacgaataactcgggtgttggggctgcaacagtaagtggtaaaaccgaatacatcactggtccaaatgtcgtccagtctggtgggtcaggtcttatctggatgactgtagaacaggcaattttaaatggctacaccactggagataatttatccggattgatttacgtcaataccggagaaaaaacaaaaaccattacagtgaaggatgaggttactggcgcttctcaaacacttcaagtgtttgatactgactctttctcacaacgcgatgcggggactgggggaaatgaaaccattcctggttttagtggcactgcggattttttcaatgcgacacgttttgtaacagccaataatggcggtacagctattttggatgtgggttcaccagcaatcggtaatttttttaaaaatacacagcttgctgtagctgatggagaaggttcctctgttgtatggaactcggtcaatgatttttattttcagcctggtgcaaccatgcaggggggcggcgttactcaaaaaatcattgactcaatgaaatatgctggaacaattactgattgggcgggaaaagtacaccatattaactctcttgatgatttaaagcaatataatcaatatttgataaagtcactagaggacaaaacgctttcttataagcagtatgatgctgaatttaataaggcccttattgtcaccaagcataattacaatgtggatatgaccgctgggggacgtatagactcaactccttacaaagaaaatgtagggctgcttgctgttctccatgcaaccaataacgcacgagcaatattaggtaaaacgggtaaattaactggagttcttcctgcctatgggaatggaggagggatcgttgcaactaatggtgggaccggtgttaatgaaggggtcattgatgccattggtactgaaatgattgcctatcaagacagtaccattgttaacgatggtacactttttgtttgggataataatgataaatatgctctccaggcagaggggatggttgccggtagtaatggttcttcagccattaataatggtgttattaatattcgcccatttaaaaatgctttcgctccagaggggattaacaccgcaattgttgttagtaatgggggcatggcaacaaataaaggcacaataaatattactgccgatgcatcaactaatgataataatggcaaaacacgaggtgtaaatgttggagctggaggctcttttattaactcggccttcgggagcatcaatgtaggtattgcggaggataaaactgcgactcattcggctgtgggttctgttgcgattgaagtacaaaatggtgcaaacaaagtcgttaatgaaggtactatttttttgggcaggggggctcaggggaactacggaatcctggcaaaggatgccgggactgttgatgtggtaaataaagggactatcactattgacggtcatgacagtgatgcacctgcactgaatgttggcatgctggcaaataatagctccgggatgaaaaactccgggattatcaatgttaatggtctgaacagcaccgggctacaggtaatcaatgcaggacagttgaattctgacggtacgataaatgttggcggcaagggtatcagtagtggtttccgtaactatggtgcctgggtggaaggtgccggaagcaatgttaatgtatccggaaaaatcagtcttgccggtacgggggctgtgggggtttttgctaaagatggcggcagtctgaccctgtcaggcaatggtgcagtgctatttggcagcagcgatcagataggcttttatgtctatggaaaggactctgccattcataataccggaagcggtgttatggatgtgtccactgaaaactcaacattattccgtattgccagtggtgcgacattccagggaactgcagatgcttcttctgcacttacggcgtctggtaagaactcttatgcacttattgccacggggaaatcggatggcggtgtggcctcgacagtaacgtctggaggaatgaccatcaacctgacgggtgagggggctacagcgactttaattgaagggggagcgcagggcacaattgaaagtaatgccattatcaatatggataatgccagtgcgatagccggtattgcggatggcaatggctatgatatttccggcaaactcattaatccgaaggacaagaccacactattaacggcgggggctcagttaagttccacccaggataaagtgaccgggtatatcgcccgtaatggggccactctaaataataccggtaatatcatctttactggaaagaatacagtgggcgtccgggttgaggagggggctgttggtaccaacagcggaaatattacagttcaggatggtggtgtgggactaattgctaatgccacacaagatgttacaacgattaataactcgggaaatctcgttctcaagggaggagataatgctaaccgtacaacgggtataaaagcatctggtacaacaacaacggttaatatgaccgcgggtactatatctttgcagggacagggggcgattggcgttgaggccagcaataaagggactgttaaccttgatggttcggcagtaccgaactttgctgctgacggctctggtattaccgatcagattgcttttcgtattatcggagatggtgcaaccattaagacgaatattgcaccgggaactctgctggatgccagtggggaacgttctgtacttttccgtattgaagatggggcaaaacaggccggctctctgctgatgaaaacctccgggacaggcagccgtggtatctgggccacagggaaagggagcaatgtcctggctgatgctggcagtgatttccagatcctgggcgctcaggctcagggattatatgtaactggtggtgcgacagcgacgctgaaacagggggcatcagttaaccttgtaggggatggcgctgttgtcgcggaagttgacggaaatgaatacgctctggatggcagtattacacaaacgaatactggctcggttattaccaatgaggcagatatctcttcgccgctgaataatgccaagggctttattacgcgtaatcagggactgttgattaacaacggcaacattgatttcactaccggtacagataatatcggcgtctgggttgataacggccgctttgaaaatacaggaagccgtattgcggtcaatggcgttgcattatttgttgaaggtgcacagtctcagattaccagcacaggaggggatatcgtcgctgtggatggtgaggctgccattaagctgggggcgggcgcgtcactgaacctggcagggagtggcttgggtacgatcgaaggtcagaaaaatgcgcatggcatcctgctggatacaggggctgtggggctggttattgatggtgcgaaaatcaatgttaatgctgcaggtgcggtcggtcacgggattgagaaccgcgcagaaattgaaggcattcagttaaccaatacgactgaaattaatgtggctgatggcattggtgtacgtacttctgcctccctggccaagaccaacagcggcactattaatgtagacggcagtggaattgcactggcgttccagaaagctgacggaagtgaaaccgataataacctggatatgtctgactccgctggattggtcattaacctgaagggtacggacggcacgggtattttcgccaacactaaagatggtgctgtcgtgaagagtggtgcaagtgtcaatgttatacaggccgatggcggttccgctctggtggttaacaatgcagccagtgaagtggttcagagcggtaatctcatctctgcttctctgagtcatgccgtagtggatgcttcaaaagcacaatcctttaccaataaaggtcagattaaagctgcgtccaccaccgggactgcaatggcgtttgatgacgccgtgaataccaccgtactgaatgacagcggtgctgaaattcagggggttgtggctctgaacggcggtgataacacattcaccaataaaggcagtattaccggaaccgtcagtgcgaaagagggtaacaatacatttttatttgatgatggcagcacactgacaggagaagtgactgcaggaaatggcaataataatgtaacactcaatggtaagactcatgttgatcaggttactgccggtaccgggaagaacaccttcaccattaaaggtgaaggggcaacctggaacctgctggatggcgggcagggagattctgattccctgatttttgataacgccattcatacgctggattctgttgtaaaactacagaatttcgaacatgtcgggctgaagaacagttcacttgtcactctgaaggaagctcttgtgctgaccgatggggggaacggtccgggttccgtcgatattgaatcgggcagcgaactggccattattcccgcagttgcaggcaactttacctttgatccactgttaacaggcaaaggaacactgtctgcccgtcttgatgccgacacatctgcttttgaattcagccataacgtcggggatcaatttgccggaactctgaagctgggtactagtagctttgctctggaagggctgaatacgagcgggttaacccatgcaatgctgatgtctgaaaccgggaatatcacaacggttggctccggtgttcagcagattggcggtcttgggttcaatggcggaacgctgatttttggttccgttatgccgggcgataccattgccagcaacagtattgaaacctctgctgcaggtacgctggatatccgggggaaaggcacaattcaggtcaccatgccagatgaagtgattaatgatattccggctgttgatacccgtaagaatttgctggagcaggatgatgcgcagaccctggtcacgctggtgaatgcagcgggtaccgtcaccggtactggcgggcaactgcaactggtggatgaaaacgggcaggctatttctcacagtcagacgtttgatgtcactcagggcggtgaagttgtagctcagggaaattatgactataagctgctgggaagctccgacggtattaaaggtgacggactgtacataggctatgggctgaagtcgctggatttacagggaaccggtgataaagcgctggtgctgacaccgagagcgaatgcccagggactgcagacagatcttggcgcacagttaacgggggcaggggatctggccatcgaagctgcggggcaggttgtcacactgtctaacggcggtaataactacaccggggatacgctggtgcgcagcggcacattacagatggcaaatgataatgtacttggcgcaacaggtaatctgaacgtcgccagcaatgccgtcttcagaacaaacggatacagccagactgtcggtgcactgcagacagaaacgggagcgcacattcagcttgatagcggtagtgtactaacggtcagcggcacgcagcgtcagccgggggatgataatggtggcatcattgaaaacaacgtgctgtccggtgagggaacgctggctgtcacgggcagcaatctgacggtacatggcaccaatatcgggtttaccggtaatgccagccttacccagggggcgctggttgaaatgaacggcgcacaggggctgggaagccagggctccatcagctttgaaagccttaatgatcgcctggcgattgatatcgccgacggtagcggagtcagcagtaacctgagtaaatcgctttccggagaaggttcagtgggtatactgaacaccactgatctgacgctttccggggataacagtaatttcagcggtgaattccgtgtgcagaaagatgctgctctgcgggcttcagatgaaaaacacctgggcaccgggctgattgacagtgatggtgtcacctggcttaccgccagtggaaactggttactgaagaatgatattactggctccggcgctctggtgaaacagggggcgggtaatctgatcattaatcatgagctgacttataccggtgataccacggttgagagtggcgttctgattgtcggtgatgattcagtcacccgtgccgctggcgcgacgttgtcaggatccaaaaacattcatgttcttaatggcggcacactgagtgggctggggaccgtttcgggtcaggttaataaccagggaacactggcatcactgaatgctctctcaggttatgaaacggcagaggtgggcaattttaccgttggctcactgaccaataccggcgtcattcgtctggccggtggtaagacaggaaataccctgaccgtaaatggcgattacaccggtggcggtacgttaattatcaataccgtgctgggggatgatacttctaccactgacaaactgattgtcacgggtaacacctccggtgataccggcgtggtggtgaataatgtccggggccagggggctcagaccgctgacggcattgagattgtgcatgtcggtgggcagtctgacggtaacttcagactgcagaaccgtgcggtggcaggggcgtgggaatatttcctgcataaaggtaatgcgggtggtactgacggtaactggtatctgcgttctgaattgccgccagaaccacaaccgcagccgcagccacaaccgcagccacaaccgcagccgcagccacaaccgcagccacagccacaccccacgccggataaacctgtacagaaggtctatcgtccggaagcgggctcttatattgcgaacatagcggcagccaacacgctgttcaacatcagaatgcacgatcgtgagggggaaacttactataccgatgtgtttactggtgagaagaaagcaacaagtatgtggatgcgtcatatcggcggtcataatcgctggaaggacagcagttcacagctgaatacgcaaagtaaccgttatgttgtgcaactgggtggcagcattgcgcaatggactgacggtcaggaccgtctgcaacaggggattatggccggttatggaaatgagaagagttccacgacatcctcgctttcgggatataaatctaaaggtgcgatcaatggatacagcaccggtttatacggaacgtggcagcagaatgacggtaatgacaacggggcttatgtcgatacctggatccagtacggatggtttaataataccgttaatggtgaaaaactggctgcggagtcctggaaatcccgtggatttaccggttcagtggaagcgggttatacctttaaagccggcgaatttaccggtagccagggtagtcactatgactggtatattcagccgcagtcccagatcacgtggatgaatgtaagagccagtgagcatacggagaagaatggcacgaaagttcagctcagcggagacggtaatatccagagtcgtctgggcgtcagaacttacctgaaaggtaagagtgcgtctgatgataataaggcgcatcagtttgagccatttgtggaagttaactggatccataatacacggagctggggtgtcaaaatggataatacggcactcagtcaggacggagctacaaatattgctgaagtcaaaacgggtgttcagggtaaattgtcagataacctgaatgtctggggcaatgttggtgttcaggctggcgataaagggtacagtgatgcccaggcaatgctgggtattaaatatatattctaa

SEQ ID NO: 9002 - DNA, 519 bp, Escherichia coli
atgaaattttctgttgttaatgcagtagtgctgctgttgctgattgtacttactggtgttttttatatgaaaaagtcaaaagaaattgcagttgttaatatcgatgctatttataatcagtctgccgccggagacatggtcagaaagcatctgaatgaggttaagagtattcttgaaaaaggctatgaggatgcgcaaaaagcattcgcagataacgcgaataaagaggcgctgcttcttgatgccagacaaaaactggagcgacaatgtgttattgaggaaaatagcgcaaaaatggtgttatcccgtgcgatagataatgccataggtacatggagaaaagacaatcctaaaaatattgctgtattgtcttcaggtgttgtgcttgcgcataacgagtcagctgatatcaccaaagaagtcatggctctggttgaaaaagaaaatctggtttttaatcagttacccaaagtggaagtgcacaataagaatgaagagaaaccagaacaaagtaagtaa

SEQ ID NO: 9003 - DNA, 624 bp, Escherichia coli
atgcatatacgaattgactatctggcggataaaaactgctttacagaactgaatgaatctccacgccttcgccggcagtggcaggatgttctggaggagtgccggcagacagaggccgggccagaagaacggctgcgtattgctctgctgaatgtggattacgtcaccagttttgaactgccttttcgcttgttgcttactcgtacaccacaactgattgccgcgctgcgtgaagaatgggacatcagccagaaaaatgtggtgttcaacgataaacgctttggctgcgtgtacaacctgaaggccagcctttcgggtgggccggatacattccggtatcatctgtctcaccgtattcggcgggtggttgcgaatgaaaacacatcatcgccataccaactgattgcccgggaagtgaaagcgccccgtcaacggctgaagtatgcgctggagacaggattgcaggtgagcgcactggacggcctgttctggttcggcagccagcgcattgcggcagatatcctgaggctgagaaagtacgggatgcggattgcgacggcttctgtggacgtgtatgacaacataaccggaacaactcgtcatatccctgtatattactcctga

SEQ ID NO: 9004 - DNA, 1107 bp, Escherichia coli
atgctgtctccgggtgaccgcagtgcaattcagcagcaacagcagcagttgctggatgaaaaccagcgtcagcgtgatgcgctggagcgcagtgcgccgctgaccatcacgccgtctccggaaacgtctgccggtactgaaggtccctgctttacggtgtcaagcattgttgtcagtggggccacccgactgacgtctgcagaaaccgacagactggtggcaccgtgggtgaatcagtgtctgaatatcacggggctgaccgcggtcacggatgccgtgacggacggctatatacgccggggatatatcaccagccgggcctttctgacagagcaggacctttcagggggcgtactgcacataacggtcatggaaggcaggctgcagcaaatccgggcggaaggcgctgaccttcctgcccgcaccctgaagatggttttcccgggaatggaggggaaggttctgaacctgcgggatattgagcaggggatggagcagattaatcgtctgcgtacggagccggtacagattgaaatatcgcccggtgaccgtgagggatggtcggtggtgacactgacggcattgccggaatggcctgtcacagggagcgtgggcatcgacaacagcgggcagaagagtaccggtacggggcagttaaatggtgtcctttcctttaataatcctctggggctggctgacaactggtttgtcagcgggggacggagcagtgacttttcggtgtcacatgatgcgaggaattttgccgccggtgtcagtctgccgtatggctataccctggtggattacacgtattcatggagtgactacctcagcaccattgataaccggggctggcggtggcgttccacgggagacctgcagactcaccggctgggactgtcgcatgtcctgttccgtaacggggacatgaagacagcactgaccggaggtctgcagcaccgcattattcacaattatctggatgatgttctgcttcagggcagcagccgtaaactcacttcattttctgtcgggctgaatcacacccacaagtttctggggggggtcggaacactgaatccggtattcacacgggggatgccctag

SEQ ID NO: 9005 - DNA, 435 bp, Escherichia coli
gtgagtgccagttttcagcgccccgtcacggacagggtgtggtggctgaccagcgcttatgcccagtggtcaccggaccgtcttcatggtgtggaacaactgagcctcgggggtgagagttcagtgcgtggctttaaggatcagtatatctccggtaataacggcggttatctgcggaatgagctgtcctggtctctgttctccctgccatatgtgggaactgtccgtgcagtggctgcactggacggcggctggctgcactctgacagcgatgacccgtactcgtccggcacgctgtggggtgctgctgccgggctcagcaccaccagtggccatgtttccggttcgttcactgccggactgcctctggtttacccggactggcttgcccctgaccatctcacggtttactggcgcgttgccgtcgcgttttaa

SEQ ID NO: 9006 - DNA, 2784 bp, Escherichia coli
atgcatcagcctcccgttcgcttcacttaccgcctgctgagttacctggtcagtgcgattatcgccgggcagccgttgttaccggctgtgggggccgtcatcaccccacaaaacggggccggaatggataaagcggcaaatggtgtgccggtcgtgaacattgccacgccgaacggggccgggatttcgcataaccggtttacggattacaacgtcgggaaggaagggctgattctcaataatgccaccggtaagcttaatccgacgcagcttggtggactgatacagaataacccgaacctgaaagcgggcggggaagcgaagggtatcatcaacgaagtgaccggcggtaagcgttcactgctgcagggctatacggaagtggccggcaaagcggcgaatgtgatggttgccaacccgtatggtatcacctgtgacggctgtggctttatcaacacgccgcacgcgacgctcaccacgggcaaacctgtgatgaatgccgacggcagcctgcaggcgctggaggtgactgaaggcagtatcaccatcaatggcgcgggcctggacggcacccggagcgatgccgtatccattattgcccgtgcaacggaagtgaatgccgcgcttcatgcgaaggatttaactgtcactgcaggcgctaaccgtgtaactgcagatggtcgtgtcagagccctgaagggcgaaggtgatgtgccgaaagttgccgttgataccggcgctctcggtggaatgtacgccaggcgtattcatctgacctccactgaaagtggtgtcggggttaatcttggtaacctttatgcccgcgatggcgatatcaccctggatgccagcggcagactgactgtcaacaacagtctcgccacgggggccgtcactgcaaaaggtcagggcgtcaccttaaccggcgaccataaagcgggaggtaacctgagcgtcagcagccggagagatatcgttctcagcaatggaacgcttaacagcgacaaggacctcagcctgaccgccggcggcagaatcactcaacagaatgaaaaactgactgccggccgggatgtaacgcttgccgcgaaaaacatcacacaggataccgccagccagattaacgcggcccgcgatatcgtgactgtcgccagtgacacgctgacaacacagggacagataaccgccgggcagaatctcacggccagcgccaccacgctgacgcaggacggaatattgctggcgaaaagtcatgcgggactcaatgccggtacgctgaataacagtggcgccgttcagggagctaccctgacgctcggcagtacaacgctcagcaacagtggctccctgctcagtggcggtcccctgaccatgaatacccgcgactttacccagagcggccgcactggcgcgaagggcaaagtggatatcatggccagtgggaaactgaccagtacaggtttgctggtgagcgatgatgcactggtgctgaaggcgcaggatgtgacacagaacggtgtgctgtccggcggcaaagggctgacggtcagtgcgcagacgctgagctccggtaaaaaatcggtcacccacagcgatgctgcgatgacgctgaatgtgacaacagtggcgctggacggggaaaccagtgccggtgacaccctccgggttcaggcagacaaactgagtaccgcagcgggcgcacaacttcagagcggcaaaaatctcagcatcaacgccagagatgcacgtcttgcaggtacgcaggcagcacaacagaccatggtggtgaacgccagtgaaaagctcacccacagcgggaaaagcagtgccccgtcgctcagcctcagtgcgccggaactgaccagcagcggcgtacttgttggttccgccctgaatacacagtcacagaccctgaccaacagcggtctgttgcagggggaggcctcactcaccgttaacacacagaggcttgataatcagcagaacggcacgctgtacagtgctgcagacctgacgctggatataccggacatccgcaacagcgggcttatcaccggtgataatggtttaatgttaaatgctgtctccctcagcaatccgggaaaaatcatcgctgacacgctgagcgtcagggcgaccacgctggatggtgacggcctgttgcagggcgccggtgcactggcgcttgctggcgacaccctctcacagggtagtcacggacgctggctgacggcggacgacctctccctccggggcaaaacactgaataccgcagggaccacgcagggacagaatatcaccgtgcaggcggacagatgggcgaacagtggttccgtgctggcaaccggtaaccttactgcttcggcaaccggtcagttgaccagtaccggcgatatcatgagccagggtgacaccacgctgaaagcagccaccacggacaaccggggcagtctgctttcggccggcacgctctcccttgatggaaattcactggataaccgcggcactgtccagggtaaccatgtcacgattcgccagaacagtgtcaccaacagtggcacgctcaccgggatcgccgcactgacgcttgccgcccgtatggcatcccctcaacctgcgctgatgaataacggaggttcattgctgaccagcggcgatctgacaatcaccgcaggcagtattaccagttccggacactggcagggcaaacgggtgctgatcaccgcagacagtctggcaaacagcggggcgatccaggcggctgacagcctgactgacgtctga

SEQ ID NO: 9007 - DNA, 441 bp, Escherichia coli
gtggtaattcaccagcaggtccgcaccctgaagcgtaccggtattattcagcgtggttcctttaacgtcggcactgccggtggcaagtacgcgtccgccgttgacagtattcaccacatccagcagcagggtggcagcctgtaccagtccgctgccggtgttcgccagcacctgcgccgtcagcgtgaggttactgccggagaggattttgccgtcgttctgcagacggtctgtggcgttcagggaaaccccgcctccaccctgtatcgtgctctggttactcagggtcgcagtactgacattcagtgcattccggctcatcagaacaccaccggaacggttgttcacgccaccggaggctgtcagcgtcagcgtttcgccctgcagatgcccgccgtttgtgagttgtcctgccgtgatggtggtgacatttccctgtaa

SEQ ID NO: 9008 - DNA, 138 bp, Escherichia coli
atgattcgtgagggcagcaatcagtttcagtgtgacatcaccggtggccaccacctgcccctgaccactgaagtcctgagcgtcaagcagcaggttgcctgcactgtacagccgccctgtaccattttgcagcagtga

SEQ ID NO: 9009 - DNA, 318 bp, Escherichia coli
atgcaactgagcaggctgacgctgagaagtaaaaagccggagcttgtggagcaagagctgtggggtgtcttactggcttataatctggtgagatatcagatgattaaaatggcggaacatctgaaaggttactggccgaatcaactgagtttctcagaatcatgcggaatggtgatgagaatgctgatgacattgcagggcgcttcaccgggacgtataccggagctgatgcgcgatcttgcaagtatgggacaacttgtgaaattaccgacaagaagggaaacggccttcccgagagtggtaaaggagaggccctag

SEQ ID NO: 9010 - DNA, 1116 bp, Escherichia coli
atgcgtattttgtttgtaggcccgcctctctatgggctgttgtatcctgtgctgtccctggcgcaggcatttcgcgttaacggtcatgaagtactgatcgccagcggaggacaattcgcacaaaaagcggcagaggccgggttggtggtgtttgacgctgcccccggtctggattccgaagctggttaccgccaccatgaggcacagcggaaaaaaagtaacatcggaacccaaatgggcaacttctcattcttcagcgaagaaatggcagaccatctggtggagtttgccggacactggcggcctgacctcatcatctaccctccactcggagtcatcgggccgctgattgccgccaaatatgatataccggtcgtgatgcaaaccgtaggcttcggccataccccctggcatatcaggggtgtaacgcgttcgctcacggacgcctatcgtcgccacaatgtcggggccacaccacgcgatatggcctggatcgacgtaacaccgccgagtatgagcattctggaaaacgacggtgaacccattattccgatgcagtacgtcccatataacggtggtgcggtgtgggaaccatggtgggagagaaggcccgatcgtaaacgtcttctggtgagtctcggcactgtcaaaccgatggttgacggccttgatctaatcgcctgggttatggattctgccagtgaggtcgatgccgagatcatcctgcatatttcagccaatgcgcggtccgatttgcgctcgctgccatcaaatgttcgcctggttgactggatacccatgggtgtcttcctcaacggcgcagatggtttcattcatcatggcggagcaggcaataccctgacagcgctacacgctggtattccacaaatagtcttcggccagggagccgatcgcccggtaaatgcccgcgttgttgccgaacgcggctgcgggattatccccggcgacgtcggcctgtcgagtaacatgatcaatgctttcctcaacaatcgctcacttcgcaaagcctctgaagaggtagcagcggaaatggcggcgcaaccctgccctggtgaagtggcgaaaagcctgatcacaatggtacagaaagggtag

SEQ ID NO: 9011 - DNA, 2178 bp, Escherichia coli
atgagaattaacaaaatcctctggtcgctaactgtgctcctagttgggttgaatagccaggtatcagtagccaaatactccgacgatgataatgacgagactctggtggtggaagccaccgctgagcaggtattaaaacagcagccgggcgtgtcggttattaccagcgaggatattaaaaagacccctccggtaaacgacctttcagatattattcgtaaaatgcctggtgttaatcttaccggcaatagcgcctcgggcacacgcggtaataaccgccagatcgatattcgtggtatggggccggaaaacaccttaattttaattgatggtgtaccggtgacgtcacgtaactccgtgcgttatagctggcgtggggagcgtgatacccgcggtgacaccaactgggtgccaccggaacaggttgagcgtattgaagtgatccgcggccctgcggcggcgcgctacggttcgggggccgccgggggggtggtgaacatcattaccaaacgtcccaccaacgactggcacggttcgctgtcgttatacaccaaccagccggaaagtagcgaagagggcgctacgcgtcgcgccaatttcagccttagtgggcctctggctggtgatgctcttaccacgcgtttgtatggtaacctgaataaaacggatgctgacagttgggatattaattctccggtcggtacgaaaaacgcagccgggcatgaaggggtacgtaacaaagatattaacggcgttgtctcgtggaaattaaatccgcagcagattctcgatttcgaagtcggatatagccgccaggggaatatctatgcgggcgatacgcagaacagttcttccagtgcagttaccgaaagcctggcaaaatccggcaaagagacgaaccgcctgtaccgacagaattatggcattacgcataatggtatctgggactggggacaaagtcgctttggtgtttattacgagaaaaccaataatacccgcatgaatgaaggattatccggcggtggtgaaggacgtattttagcgggtgaaaagtttacgaccaatcgcctgagttcctggcgaaccagcggtgagcttaatattcctttgaatgtgatggttgatcaaacgctgaccgttggtgcagagtggaaccgcgataagctcgatgatccttcctctaccagcctgacggtgaatgacagagatatcagcggtatttctggctctgctgcggatcgcagcagtaaaaatcattctcaaatcagtgcgctgtatattgaagataacattgagccggttcctggcacgaatatcattcccggcctgcgctttgattatctcagcgactccggcgggaacttcagccccagtctgaatctttcgcaggaattgggcgattatttcaaagtcaaagcaggggttgcccgaacctttaaagccccaaacctgtatcaatccagtgaaggctatctgctctactcgaaaggcaatggctgtccaaaagatattacatcaggcgggtgctacctgatcggtaataaagatctcgatccggaaatcagcgtcaataaagaaattggactggagttcacctgggaagattaccacgcaagtgtgacctacttccgcaatgattaccagaataagatcgtggccggggataacgttatcgggcaaaccgcttcaggcgcatatatcctcaagtggcagaatggcgggaaagctctggtggacggtatcgaagccagtatgtctttcccactggtgaaagagcgtctgaactggaataccaatgccacatggatgatcacttcggagcaaaaagacaccggtaatcctctgtcggtcatcccgaaatatactatcaataactcgcttaactggaccatcacccaggcgttttctgccagcttcaactggacgttatatggcagacaaaaaccgcgtactcatgcggaaacccgcagtgaagatactggcggtctgtcaggtaaagagctgggcgcttattcactggtggggacgaacttcaattacgatattaataaaaatctgcgtcttaatgtcggcgtcagtaatatcctcaataaacagatcttccgatcttctgaaggggcgaatacctataacgagccaggccgggcttattatgccggagttaccgcatcattctga

SEQ ID NO: 9012 - DNA, 222 bp, Escherichia coli
atgaagaatgaaatactggaatttctgaacaggcataatggagggaaaacggcagaaattgcagaggcgctggcggtaacggattaccaggcccgctattacctgttattactggaaaaagcaggtatggttcagcgctcaccattaagacggggcatggcaacatactggtttctgaaaggagagaagcaggcggggcagagctgttcttccacaacttaa

SEQ ID NO: 9013 - DNA, 573 bp, Escherichia coli
atgaatgctattccttatttcgactatagcctggcacccttctggccgtcttatcagaacaaaatcatcggtatccttgagcgtgcgctgcgtgagcagtccggctcccggatacgacggatcctgcttcgtctgccatgtgaatatgaccgtaccttcagcagcagaaagatctggttcggtatggactttatcgaaaccgtcagtgcgctgatgaatgtaacctccggacgtgatctctgctggctcctgactcgtcatcctgaaaagccggaataccacgtggtgctgtgcgtcagacaggagtatttcgatggctctgaactggatcggctgattcttgatgcctggagcaacgtactgggcttcatgtcaccgggtgaagcggcaccgtaccagaagcagatcacccgggatgtggtgctggacagtcgttcaccggactgcgaagagatatttcaagcgctgatctgggcgttcagtgatttcgcccgcgatcgtcgtggtgtacgcgatccggaagcccgttaccttgccggtaatccctggtatccggtagcaggccagctctga

SEQ ID NO: 9014 - DNA, 198 bp, Escherichia coli
atgaaatcattaaccacggaaaccgcactggatattctgattgcgtggctacaggacaatatcgactgcgaatcgggaattatctttgacaacgatgagtatagaacggattcggcagcactgttgccctgtatcgaacaggccagagaggatgtccgtaccctgcgtcatctgcagcttctgcaccagaaccggtga

SEQ ID NO: 9015 - DNA, 1074 bp, Escherichia coli
atggccctaacggatactaaagttcgctctgcgaaacctgaggagaaagagtattcacttgttgacggcgacggcatgtccttacttgtaaaacctggcggttcaaagtattggcgatttcgtttccgttttggcggtaaacaacatttgatggcgttcggcgtttacccggatgtttcgctggcagatgccaggaagaaaagggaagaggccagaaagctggtaactgctggtatcgatcctcgagagcataagcgggctgtgaaagaagagcaggcgaaagagattattactttcgagaaggttgccagagagtggctcgtaaccaaccaaaaatggtcggaagatcatgctaatcgtgtaaaaaagagcctggaggacaatatcttcccaacaattggtgctcgcaatattgctgaactgggcacccgcgatctgttaattcccattaaagccgtggagaaatccggacgtcttgaagtggcttcccgccttcaacagcgcaccacggccatcatgcgttatgcagtgcaaagcgggttaattgattacaatccggcgcaagagatggcgggggcggttgcttccagtaatcgacagcatcgtccggcgctggagttaaagcgtatcccggaattactccagaaaatcgatgactacaccggcaggccgctaacccgctgggcaaccgaacttactctgcttatttttattcgatccagtgagctgcgttttgctcgctggtcagaaatcgattttgaaacgtcaatgtggaccatcccgcctgagcgagagcctattcccggcgtgaaacattctcagcgaggatcaaagatgcgtacaccgcatctggtgccattttcaaagcaggcgctggcgatcctgaagcagataaaacagttctgtggcgaacatgagctgatttttattggcgatcacgatccgcgtaagcccatgagcgaaaacacggtaaacagtgcactacgggtgatgggttatgacactaaggttgaagtttgcggccacggcttccgtacaatggcctgtagttcgttaattgagtcagggctatga

SEQ ID NO: 9016 - DNA, 678 bp, Escherichia coli
atgctgacccaaaacggcgtcccgatgagccgttaccgtgccgggcggctgatgaaacatctgaatctgagcagttgtcagcccggaaaacatcagtacaaaaatgcccgtcaggagcatacctgcttgccgaatctgctcgggcgccagttcgctgtccccgagccagaccaggtatggtgtggagatattacctatatctgggccggaaattgctggtgctatctggcggttgtgatggatctttttgcccgcagggttatcggctggagtctgtccgcacatgccgatactgcactgataagcgatgccctgcggatggcctatgagacgcgtggtcaaccacatgatgttatgttccatagcgaccagggaagccagtatacaggcctgaaatatcaacaaattctctggcgttacagaataaagcaaagtgtcagtcggcggggaaactgctgggataatagcccaatggaacgcttcttccgcagtctgaaaacagaatgggtgccagcgaatggttacgtcgacaaggacgaggcccggcagcaaattaatgattacatattgaactactacaacagtgtcagacctcaccattataacggtgggttgacaccggaagagtccgggaacaggtaccatttttactgtaaaaccgtggccagtattacttga

SEQ ID NO: 9017 - DNA, 312 bp, Escherichia coli
atgaacaagaaaaccaaacgtactttcacccccgagttcagactggaatgtgcgcaactgattgttgataagggctactcatatcgacaagccagtgaatcgatgaatgtcggctctaccactcttgagagatgggtacgtcagctcagacgagagcgccaggggattgccccctctgccacaccgattactccagaccagcaacgtatccgcgagctggaaaagcaggttcgccgcctggaggaacaaaatacgatattaaaaaaggctactgcactcttgatgtccgactcgctgaacggttcacgatag

SEQ ID NO: 9018 - DNA, 552 bp, Escherichia coli
atgaaaataaaagttatagcattggctacatttgtttctgctgtgtttgctggttcaactatggcctatgacggaacaattacgtttacaggtaaagttgtagctcagacctgcaatgtgaccacagggaatgatggtaattttactgtaacattacccactgtatcgaataaggcccttgctagccctggagaaacaaccggattaacaccattttcaattaacttaacaggttgtacatctactgtagatggagcaggtcacgttaaagccttttttgagcctggttccagtactgattttgtgacgaataatcttaaaaatattgcttctgataatgccgctggtgatgtacagatccaactattgaacagtgatggtacttctactattttcttggggaaagattttgctggtcaagatgtccattctgaaactattggtggggatggtaatgccacattacgttatatggctcaatattatgcgaccgggacatcaactccaggcaatgtaaaaacaacagtcaattataccatcgcctacgaataa

SEQ ID NO: 9019 - DNA, 603 bp, Escherichia coli
atgaaaccacagtatcagacccgttacgagctgctccacgaaagctaccagaaatggctgaccggcttcacccggcacgccgtatcctggggcgtgtgtcatccgaatatccactacttccagaatctgacgcccgggtgggtgtcattcaatggtgaaaaaccgaagattgccatcgtaccccggagtctgcaccggctgatttatggctctgacaaacgggccacgccgcccctggatgatgatctggtggtgaacttatgcaccagcgaacatctgctggttcatcatccgatgctggaagggattctgctgtctgaatgtgaacgtctgaggcagcgttctctggcaaataaactgatcagcctcttccgtcagtttggtggcacggagttgcgcctcaaactggtctggctttgctggcttgatttaatgaccggaaacagccttgacgactggacggagaacctgaaacggaaatcagaaaaagagctgggggaatggatcatcgaccgtcagaagcagaacgcagcactgacggatctgatggatcagtacgtgctcctggcataccgcacaacggttgacggtaaccgtaactga

SEQ ID NO: 9020 - DNA, 207 bp, Escherichia coli
atgaccaccccagtttcgctgatggatgaccagatggtcgatatgacgtttatcactcagctgaccggcctgaccgataagtggttttacaagctcatcaaggatggggcctttccggcacccatcaaactcggccgcagctcccgctggctgaaaagtgaagtggaagcctggctgcaggcgcgtattgcacagtcccgtccgtaa

SEQ ID NO: 9021 - DNA, 792 bp, Escherichia coli
atgacaacacgtataactttcaatatgaccagtgatgagacgctgcgaattgtggatgagtactgtcatacccacaaactttcgcgctctaaggtaatcgacgcattactcagcgccacagcacctgtccttaacgatattaactgttattatcaacttgcaggcaaactgcagtcacgcttattaaatggagtgtatcaacgggatcttcctcacaaacgcaatgtcgtcagtgcagagaagtattgtctggagatctgggaaaacaaacttttcaccaaaagaatcctggagtttgacagttcaaatggtgttctgtacgcgctgaaacataaaagacactatcgccgggataagatgattggacgggttgaaagccggcgtatcaaagacatttgcgaataccagatgcaactgtccggggagaaggcaaaatatgcctgttttatttatattgaaagaacaatatacaatcacgataatccatccggtgggacacctgtaaaagcggctgttggtaatgcagtcatcctgctggcaaaagacgtgatatatgacgagtacttttttgatctgcggcagtcatttttcgtgagcgttaaagatctgatggcctctggcgcaaaaggtattccggagacacagaaatatccggacgtttattgctggatcccgcttttctccataaattccggcgtggtcattaccccggtctataaaattgatccccggaaacccgtaacggtaaaaaaaccggatcagatcactgttgtttgtaattacagagaataa

SEQ ID NO: 9022 - DNA, 600 bp, Escherichia coli
atgaagacttacaacaccaatcccggttacgaaatggatccccagctcctgacacactttaaccagcatctggattcattattcggggtatattcgaaactgttaccgttcagaatggattttgcttaccgaaaaaacaccctcagctacaggtgtgcctgcaggtacgccatgtgtgcggagatactgcgactgattaacgaagtgggagagaaactggtcgggtatgcctgggtaatggaatatacggaacgtaaagggcttcacattcattttgtgggctatctgaacggtcagagccacaggagttcgtatctggtatccagattgatgggagatatctggaggcgggttaccgggggggatggttactaccactggtgccggtttaataaaaattatccggtaaacattaaccacgtcattcactattcagatcacaaagcggtgaatgccttacgctatgccctcagctacctggccaaacgagaacagaaagaatgtggcatcatcctgaaatgcagcgggcttcctgaaaaaagtaaccggggtcgaccgcgactgggcagcaccctgccggagacttattctctggtgtaa

SEQ ID NO: 9023 - DNA, 384 bp, Escherichia coli
atgtacgcaaaatcctttattgcatttgatggcaatgggcgtctgacgggtgcccgtaccgcacagactgcaccttacgatcgctacacttgccacctttgcggcagtgcgctcagataccacccgcaatacgacactgagcgtccctggtttgaacacactgacgacgggctgacggagcacggtcagcagtgcccttatgtcagaccggaacgcagggagatacaactgattaagcgtctgcagcaattcgtaccggatgccttacccgtggtgcgtaaagccagccggcactgcagacaatgtcatcacgattattatggggagcggtactgcacgcactgccataccgggcacttcagtgaggagggggtggcagaatga

SEQ ID NO: 9024 - DNA, 426 bp, Escherichia coli
atgaacggtataaaaacggggctggggatcacgccgggtgaacacataatcagtgctgattctgcactcagcagaaatatccggcagtgtttctgcctttcctgtcatggccggttgattttgcagacagatgctcagggggcatggtttgagcatgatttatatgccctgagcgagcaacagaaggcagcctgcgtggtgctgaatccggaaaagtcccacccttacattgaggatatggagatgtttttatcgccattaccggtcgtgctggagtggcattgtatgatgtgtgagcagttttttcatgggaagaaattctgtgaggcctgtggtacggggatttattgcagagcggtatgtacgaagtctgtttacagctaccagccagacttgtttcaggactgcggaggtgcgagtacttaa

SEQ ID NO: 9025 - DNA, 567 bp, Escherichia coli
atgtatacagaatcaaatgttaagctttcctgtaacgccctctggcaaaagtgtgtccttgcaactctgtatcgggctgcagccacacatcctgaaattaaattattacaatttaaattaataccagggcagggtattaataaggccattccctctctgatggctgattttactggtgaactgcatagactcatttctgaatatttgcagtgtaagcgacgtaaagatcaatctgttgagcccacccctttatattatctctggagtagggaagctgtggctaacgataccactccttatcttatggtgctgctacttaataacgatgtctggtgtaagagtcgtgaggtggtggttctcagaaatctgattgagcaggcgtggggaaaagtattgggtgaagataactccattacacatctggttgtgtatcctgaagtgctgtcgttggtatttgatgcagctaacacatacaacgctgagcctggtgtactggaacagacggcccgggcttacattgaatcacatggtaccattgaacgtcatcttgggtgtagtgacttttaa

SEQ ID NO: 9026 - DNA, 198 bp, Escherichia coli
gtgttgactacaacaagccacgacagcgtatttctgcgtgccgataattccctgatcgacatgaactatatcaccagtttcaccggtatgactgacaaatggttttacaagttgatcagtgaaggccatttccctaaacccatcaaactggggcgcagcagccgctggtacaaaagagaagtggagcagtggaagtga

SEQ ID NO: 9027 - DNA, 639 bp, Escherichia coli
atgaaaatcgcattgatgaatgaatttagccaggcatctaaaaacgcaataatttttaatgagttagttgcagcaagcgcacatcaaggccatactattttcaatgtaggaatgtgtgatgacaatgatcatcgtctgacttacgttcatctcggcattatttcggctatcttgttaaacagcagatctgttgatttcgttattactggctgtggtacaggacagggggcattgatggcactgaacacattcccgggagttacttgtggttattgcatcgaaccaacagatgcctacctgtttgcacaggtaaataatgggaatgcactgtccttgccatttgcaaagggttttggctggggggcagaattaaacatgcgctatatttttgaaaaagcatttgatggcgaaaagggattaggctatccggcagaacgtcgtgaatcacaaaatgcgaatgccattatactgagtaatatgaaagaagcagttagtaagccactcatggatgctctccaggccatcgatccggagttacttaaacaagctcttggtggcgaaaaattccagaaatgcttctttaataatagtaaagataaagaattggttaattacgttaaaaatttattagatagatga

SEQ ID NO: 9028 - DNA, 1173 bp, Escherichia coli
atggctaagggtgatattaaaaagttgaagtttgaatctttctacgatagtgaatcgaataacgaagttattcgattaacgccaacagatattctttgccatcgcaattatttttatcaaaaatgttttacaaatgatggtaaaaaattgattttcgctgctgagtttgattgtaaccggaattattatcttatggatttggtaactcagacagcgaaacaactcactgaaggagctggagataacacctttggtggcttcctgtcccctgatgataattatcttttttatgtgaagaatgaaaaacatttgcagcgtgttgatttgaccacattagaagaagttaccatatacacagtaccggataattgggtggggtacggaacatgggttgctaatactgattgtacggaaatcgtcggaatcgaaatcagtaaaactgactggaccccgcttagcgactggaaaatatttctggaattttatcataagaatccacgatgccgtttaattacgattgatctggaaaccggaaacgctgaagtgatattggatcgtaatacttggttagggcatccaatttttcgtccgaataataacgatactatcgccttttgccacgaagggccccatgacctggtggatgcaagaatgtggatgattaaccgtgatgggacaaatgagcgtaaagtgcatgagcaccaacttggtgaaagttgtacacacgagttctggatccctgatggatctgcactggcttatgtttcctatatgaaaggacagcaacagcgttatattcgcaaatataatcctgatactgatgaagattcattagtgatggaaatgccggcatgttcccatttaatgagtaaccataatggtattctctatgttggtgatggttcaggtagtccggttgatgttaaagatacctgcagttataaaattgaaaatgatccctggatttacattcttagcagtaaaaataaaaaaatacataaattggtgaaacataatagttcctggagggtacagaaaggagaccggcaggtaacgcacccgcatccatcattttctccagataataagtacgttttatattcttgcgatgccgaaggtgaaccagcactatatatggctaaaattcctgaggaaatcttaacccagcaataa

SEQ ID NO: 9029 - DNA, 801 bp, Escherichia coli
atggatttcatcaatatgttctctcttaaaggtaaaaatgctttagtcactggagcatcatatggtattggttttgagatcgctaaagcactaagtaacgctggtgcaacgatcatttttaatgatgtaatagaagaaaacattaaaaaaggcctggcagcatataaagagaacaacatcaacgcacatggttatttatttgatattacagatgaacagtctgtgaaggaaaatatcaaaaaaatagagagtgacgtaggcattattgatattctggtaaataatgcagggattattcagcgtaaacctatgctagaaactacagcagctgattatcgcaaaataatagatattgatctgacaggtcagtttattatggctaaggcggtattgccttcaatgattaaaaaaggacatggcaagatcattaatatctgttccatgatgagcgaattgggtcgcgaaaccgttgtaggctacgcttcggcaaaaggcggcttaaaaatgctgactaaaaatatctgttctgagtttggtgaaaaaaatattcagtgtaatggtattggtccaggctacattgctacacctcaaacagcaccgttacgtgaaattcaaccagatggcagccgccatccatttgatcagtttattatatcaaaaacgccagctggacgctggggtaaaccagatgatcttgctggtgcagctatatttttagcatcggatgcttcaaactttatcaatggtcatattttatatgtcgatggtggcattctggcctacattggcaaacagccttag

SEQ ID NO: 9030 - DNA, 324 bp, Escherichia coli
atgtttgtatttaatgaagatacagcaatagaagatttaggcaacggggtcaaaagaaaagttttggctcatggtggcaatatgatggcagtagaggtccatttctctaagggggctatcggctctttacatcaccaccaacatgaacagttgacgtatgtcttatcaggtatttttgaatttaccatcggcgatgaagtgcgtacagtaaaaactggtgatactttatataagcagcccaacattgtgcacgggtgcaaatgtctagaaaaaggagttttgcttgatatatttacacctcaacgtcaggattttttaaagtaa

SEQ ID NO: 9031 - DNA, 234 bp, Escherichia coli
atgaggggctgtacattactcttattttccgaagcccctttcttacgcgaacaggaggttgctgtcataacagcttaccgcaatgtgtttatccaggatgacccgggaatgcatttccgttgggttatccgcaacgcggaaggtcagcgacgctggcgctgccggaattctgaacccgatgccggaaaggtgcttaatacgcggctcgccagtgacggtcctctaagacaataa

SEQ ID NO: 9032 - DNA, 453 bp, Escherichia coli
atgaaacaccgacacattttaacgttctttgttgctttcctgttcatgactatcgtacctgatagcgacgccgcattagtaaagcgtcctgagaaaggtcgtgcaccgttcccggaatatgtggagttcgcgcaaaaccgtaaccagttcccatgtaatgcacgtttacgctttaaaggtctctgctttgttgaacaaactgacccctggggtgcagcaagcgttgtccgaatccctttcaattcccccaatggtaaaggcagacttaacgcttatggcgtggttgttcatgcaataatggttggtgatgttgtcgttggtggcagctattcaactggcaagaatgttacctggaatttcgatacgttttatagggagggtaaacgtcgcggtaaggtgaccttttatgttgatggtaaatactggcactatcgcgactatccactcgaataa

SEQ ID NO: 9033 - DNA, 249 bp, Escherichia coli
atgaaaatcaaaactatactttatactatcattcttttctgtgaaattggcatcaccgacacttatgcactcggtggttcggatatccgtcactgcgaaccaactgaagaatctgtaattattaacccggacgagtcaccggtgttaatatatagcttcagtaaacacgaagtgtataaactgatgcagggggatacctgcactgggctagttattagcgataaaaagccaaagcctgtccacgtttaa

SEQ ID NO: 9034 - DNA, 630 bp, Escherichia coli
atgaaacattttttaattctggttatcggtttactcatttccatcaccgcgactgccgaatcgctgggtcagtttgaagaggatatcaccggttttccgcagggagtatggttttacaaagaaaaagcaggctggaaaaacgaaaccgggtataaaaaagaatatttaaacagtctcctctataaggccgaagaaattgcgaattatccgggtaacagatacacgatttaccgtagtaaaaacagcagcataattttcgtcgctgacaacgaaaccaggactttctacttgctaaacaacaaggacgccttatggtctgatattcagatcgggtattgggctgagaacaaaaactcgtgtcactacgtctttgtcgatactcaataccttgcgcaaagtaacgaacttgacgagttctttcgaaccggggtgctcgatactcatggtgttggtgaatcggatcgtaaagtaaaagagatcagacaaaaacataagactcatgtcttactccgcctgcctgcgcaatgtgtgaatgatgcgatcctcagcagaatgaataagtccgaacgtcgtgatctaatgaaagcgcaagaagatttcaaacaatatcttgccagaatggagctgtaa

SEQ ID NO: 9035 - DNA, 468 bp, Escherichia coli
atgagactgtcaaatattttcctggctgtagttttaactgtgaccgtatctgtagcacacgctattccaaatatgtggggcagtggcttcacgatgggcgttactgagttcagtattgataacggtaagtggggtatcaatatcagttgcacaggtaaccccaacgaaaacaatgtgctggcgcacacaatctatatttacaaaggagataaggtggtcgcaaactcggaagaaaaaaatattagtttcgttattgacggtgaagaattctggggtgtggttcctgacggtacccgtatgaacgataacgcctgggttagctttgtaaaagcaataagcactgcaaccgggtttgaactgtacataaacgagaagaaagttgcgacgtttaacccgtctgccaaaaacgttaagaaagtgatggataataactttatccagtcgtgctggaatacctggtacgaataa

SEQ ID NO: 9036 - DNA, 1071 bp, Escherichia coli
atgagtacagaaatgaaaacggggctggtgctgtccggtggcggggcggtgggcgcttatcaggcgggagtggttaaggcactggcagagtgtggtacacagatcagcatggtttcaggggccagcattggcgcattcaatggtgccattatcgcggcctctcccgatctgtcagaagctgccgtacgcctggaggcgctctgggatcatctggggaataatcaggtgctgtcggtaaacagattggtttacttttcattgctgaaaaaactgctcccggccatgaacctctgccagctccccggacgtgcgggcgcactgcttacgacgcttcttcaccatatatcgacaatcaacaggtttgacaatctgatgactcagccgttgttgtcagatgggcccctgacagtgctgatggatcattatcttgatactgatgatctggctgacgggctaccgttgtatgtgtcgctgtaccccacggaagggggaatgcaggatattatcgactgcattcgtgctgaactgggtaccggaactacaaaaaactccgtttttcagcatatccagagcctgccccacgggcagcagaaagaagccttactggcgtcagcagcactgcccctgctgttccgtccccgtgaggtacagggaaaaatgtacggtgatggtggtatgggcggatggcaaaatatgcaggggaatacccctgtgacgccactggtggatgccggatgcaatatggtgattgtgtcgcatctgagtgacggttctttatgggatcgccgggcttttccggacaccacaatccttgaaatccgtccccggaaaaagctgaaacaaacaggggaagaaggcaaaagtggcggtctgctcagttttacatcggcacatatcgacacctggcgtcagcagggctatgaagacacgatgctggcgatggagcatatccggaaaccactggaggcgcgtcaggcactgacccggtcagaggcggtgttgcagaaaagtctggagaaaacggaagaggcagatttggcactgagaaacgcgatggcccggattaaataa

SEQ ID NO: 9037 - DNA, 906 bp, Escherichia coli
gtgacttcaccatttattcaacaaattgctgataaccgggtatgtcaggtactcacctgtcttcctgaaaaatttgtggttgatttcgcaaacggaatcgatgttgcacaggagcatatccgcacggccagagagcgcacgttcttccggcgtttaaaagagggactgaccggcgaaggcgctgcacggcagaatgccatcaatgcttcgcttgcacagggcgttgaggcgtccctgcgctggctgacggagctgacaacgtcacttgccaccacaaactacgcgattacccgggtaaacgacagggtcagttcactggtcagtgatactgccaggctggcgcattattccgcagatacacgggagcagttactcatcctggccgatcaggttcaccataaactgaatcatcttgaagaaaaactccaccgtgttgaccaggttcagcgggcgcagttacatcttgagcagatattctcatggtggagcgccgggcgatacgcgtcattttcccctgccggacgttgttatgtggcacttgaagagcttcgctggggcgcgtttggtgatgtgatacgtcagggcgaaacaggccaggttaaccagctactggatattctcagacataaagcattaacgcagatggcacaggagagtggcggtagtgcaaccgtgcgtctgaacactctggactggcttggtggtcagggccgggagcaggcagataacgagtggcatgacgcgattaactggctgggagactggtgcagtgaagagcagcatccggtgatctggtcaaccacgcaggctgcagaacacttaccggttcgcatgcctcgcctctgctctgcagaacgcctctctgaaagtatggtcgatgaaatatttcagaagggggctgcatga

SEQ ID NO: 9038 - DNA, 663 bp, Escherichia coli
gtgaccagcctgcaccgtgaggctgaagcacagttccggcctgagctggagaaaatcgtcagcgggattgaaacaggttttcgtggcacggccctgtacgccacagaaaacattgccggtcgcatcaatgcccgcctggaggatgagggctttaccgtaaaaatcagttttccggcagtcagtcagttacaaacccggctcgcggtaaaaacaaatctgagtgcgcttatggaggaaagaacggagaccgtcacccgtcgccgtcggcagagtggtttatggggaaagatttgtggagcgtttggcaccagtgactggggctgggaaacctataaagaggatgtgagccgcagtgttatcaatatcaacaccgtcaggaaggaagttatgtcactgacccgggcatatttcggggagctgcaggcatccattgagcaggatattaaccagcccgtccgccaggaaatcgatgcctttttctgcgcattcagggagaaagttgaacaactgcgtaacacgctgattcagagctctgaagatcataaacgcgatcagcaggcacaggaacggcttaccaggcgacttcaggcattaaatgaaagggttcctgagctcattactgacagtaaggcgctgagggaagagctggagacaatgctgtga

SEQ ID NO: 9039 - DNA, 435 bp, Escherichia coli
atgaatccgtctgatgccattgaggcaattgaaaaaccgctctcctccctgccttactcactttcccgtcacatcctggaacatctgcgcaaactcacccgtcacgaacccgtgcctggcattatgggtaaaagcggggccggtaaatcctcactctgtaatgcactgtttcagggggaggtcaccccggtcagtgcactcatgacagcgcttcccggacatgccgccatccctctgatgacacgcctgcaggacgaactgcgcacggagtctgtccgcactcagacccgtgaacagtttaccggtgcggtggaccggatatttgacacggcggagagtgtctgcattgcctctgttgcacgcacggttctgcgcgccgtccgtgactcggtggtctctgttgcccgcgcggtatggaactggattttcttctga

SEQ ID NO: 9040 - DNA, 1101 bp, Escherichia coli
atgttcgatgttgacgatactgcacccgatactcccgccccccgtgaactcagtcaggatgtgcaggcgctgatcaacaatggtctggattttctggataaagcccgtgaagagttggaggcctcgaagccgaagttctccgtcgtcagtttctggactgcggtcgagattttactgaaagttccgctggcgcacgaacactggtcgttggtctgcagcccgaaaaagccaataaaaaagcaggcttacctagccggtgattttcagtcggtgacctacgaagaaacccgtgaaaggcttaaggacgtacttgaaagacccctagacagagaaacggacagtgcttttgataaggtcagaaagcaccgcaaccgcgtagttcatttctaccaccccactttcaccgaggctgaacaacgtcaaatactcaaagaacaagctgacgcctggtttgccctgaaccggttattaagggatgaatggaaagttatcttcggtgtcaaacataattggaagctggctttcggtgaaactcgtctgattaggggaaacaaattttatgccgaggtgcggtttaaacaggttaagcctgaactcgagcagctctctgaaaagaatattcaaatcggtaactgcaatgagtgccatcagcatgcgacggtaacagggactgaaacgaccggtaatgaaaaccgtaagcttgaagttacgcggtgtaaggtttgcaccagtgctgtaaggcaaattaccctagtttgtccagactgcgaaatacctcaattgctacctgagggagatagtgattttgaatgcgaacactgcgactacacttcggataggtataaactgctggatgaggagttgttccacagtgtggatgaacagctactctccgtatttcctgctggatgtaccaattgcatgactcctgaaagcgtatgtaaatttggagacggctatctttgcactcagtgtttcatctattacaccgagcttcatgtatgtggttgttgcggtcacctgagcgatagcgttcctgaactgagccatatccgaggatgtgaattttgtgatggtgaccaacgttattttgatgactga

SEQ ID NO: 9041 - DNA, 603 bp, Escherichia coli
atgaacacgtcaccgtggaacaaagaccgtatcataggccaaaaaagaccacttcagatatctcatatctggggtatccgaatccgacttgaactggaaggtaaaacacgcgatttagctctgttcaacatggccttggacagtaagcttcgaggctgtgatctagtcaaactcaaagtatctgatgttgcatatggtagctctgtttcaagcagagctacggttctacaacagaaaaccggcagccctgtccaatttgagataaccaaagggacaagagaagctgtttctgcattgataaagcttggcaatttacgcagtaaagactatttgttccgatctcgggtcggtactaaccaacacatatcaacccggcaatacaaccgaatttttcatgggtgggtagcaaaacttggtctcgaagattcgctttacagtacacattccttgagaagaacaaaaccttacctgatttacaagaaaactaagaatctcagggtgatccaacttctgttaggccataagaaactggaaagcacagtccgttatctgggcattgaagtcgatgatgcgttagagatctctgaatcgattgaagtctaa

SEQ ID NO: 9042 - DNA, 738 bp, Escherichia coli
atgtcacatccccctaaaaaacttaaaaaatcattaattactgtttttttgagtggtattcttgctgttcttggatattttgttgcattgaacggagtgtttgatttatatcaacatatcgcagataattttttgcaaaaaaaagcagaggataatcttcatgtgatttacaccggagcgtcaataaagtacatcgagtcaatttttggccctcccgtgaaggaagaacattctgaggatgggagggttcatgagtatatttactctttcaaaaagttctatctgcaagtggtttatgataataataacacagtgatactctattccgtaaccagcaaggatgagaattttcatcctgaagtaccatatctgagaaaaacccttggacataagttcaaagattttggaagtgatattgattatttacagtcgagctattcttcgaagttctatcaatatgaagaagggcattatttaggaaatcctggcaactatagaaatttttaccttgcctataaccctgctggagttgattattttgagttagatccacttccagatctctctaatgacgacaaatcgcctccaaataaaaatgatcttgaaaaattcagaaataataatgctccaaatacatttggggttggcgatatccacggaggtcctgaggggcttgagttaagctttggacttgggattgattattacgatgcgagagatattccagataaagattag

SEQ ID NO: 9043 - DNA, 561 bp, Escherichia coli
ttgccagttgccaaaacgctaagcgaatacgacttcagtcaggtgccggaactgaatggagctcagttccggcaactctgtgaaacgacagactgggttgatgcaggagaaaacgttctgctgttcggagccagcgggttggggaaaagccatctggcggcagcgatcgtggatggcgtagtaggccagggctaccgggcccggttctacagcgcaggagagttgttgcaggaactacgtaaagccagagcgcagttgaaactgaatgagctgctactgaaactggatcgctaccgggtgatagtggtggatgatcttggctatgtcaaacgcgacagcgccgaaacgggagtactgttcgagttaatagcgcatcgctatgaacgtgggagcctggtgataaccagtaaccatccgttcagcatgtggggcagcatcttcgtggatgagactatggcggtggcggcggcagaccggctgatccatcacggatatatgttcgaactgaaaggtgaaagctacaggaaaaagacagcgaaggcagtaacaagcgcgacttga

SEQ ID NO: 9044 - DNA, 675 bp, Escherichia coli
atgcctggccgcattataaaaacggccatgagtcagaaatacctcattcgcattgcagaactggaaagccagctccgtcagaaagaccagcaactgagtctggttgaagagacgaagaccttcctgcgctctgcactggcacgtgccgaagaaaagatcgaagaagatgaacgggaaatagaacatctgcgggctcagatagaaaaactgcgccggatgctgttcggtacctgttctgaaaaactgcgtcgtgaagttgaacaggctgaggccctgctgaaacaacgcgaacaggacagcgatcgttacagtgggcgggaagacgatccacaggttccccgccagttgcggcagtcgcgccatcgtcgtccgttcccggcacaccttccccgtgaaatacaccgtctggagtctgaagaaagctgttgcccggagtgtggcggtgagctggattatctgggggaagtcagtgcagaacaactggaactggtgagcagcgctctgaaagtgatccgcacagaacgggtaaaaaaagcctgtacaaaatgtgactgcatcgttgaagcaccggcgccgtcccgccgcgatagagcgtggtatcgcgggccccggattacttgcccgcgtgtttacgggaaaatactgcgaacacctgccactgtatcgtcagagtga

SEQ ID NO: 9045 - DNA, 351 bp, Escherichia coli
atgatctcactcccatcaggtacccgcatctggctcgtggccggcgttaccgatatgcgtaaatccttcaacggtctgggagaacaggtacaacatgtgctggatgagacccccttctcaggtcacctgtttatctttcgtggccgacggggtgacactgttaaaatactctgggccgatgctgatggtctgtgcctgttcaccaaacgcctggaggaaggccagtttatctggcctgcggtgcgtgacggtaaggtatccattacccgctcgcaactggcaatgctcctcgataagctggactggcgtcagccaaaaacattccgccttaactcactgacaatgttgtaa

SEQ ID NO: 9046 - DNA, 219 bp, Escherichia coli
atggataaacctacagactggcgctctgggacgcgccggatattttctaatgaatttaagcttcatatggttgaactggcttcgaaaccaaatgccaatgttgcacaactggcccgggaacatggcgttgataacaacctgatttttaaatggctacgtctctggcaaagagaaggacgtatttctcgtagaatgcctccaactattccattacggtaa

SEQ ID NO: 9047 - DNA, 447 bp, Escherichia coli
atgtcagaacctactctcaccaaccccgaagtattaaccgatcataccgatgtgatttgctccaccagtattgaacgcatcgtcaccggacgtaatgcggcgctgacacagattgaagcattgctccaccagattaacgatatttcgacacaaaccctcagtatcggcggaaaaaccgccctggactgggtcatgaaacaggattttcgctgtggttgctggcttatggagaagcctgaaacagcgatgaaagccattacccgcaatctcgatcgcggtaaatggcgggatttaatgaaacgctcagggatgctgtcgattatggacgctcaggcccgtaaccagtggtacaacagcctagaaaaggatgatattccggtggtcagcgaagcgaatattctgagcacctttaagcaactgcatttgaacaagggtgaggtgttttag

SEQ ID NO: 9048 - DNA, 240 bp, Escherichia coli
atgatccttgacgggaagcctgttcccgacaaccgcgctgacgttacccgtcggctgggagaccatattcatgaaaaccggcacagcaaccactatgaggatgagatgtttgtgattaagtattttcagaagggaactgcacaaatcgtattcaagcgacctgagctgattgataagctgaacaacatcatcgcccgacaccaatccgggagcactgccagcgagatgagaggtgagtga

SEQ ID NO: 9049 - DNA, 1221 bp, Escherichia coli
atgccaaagaaggccaaggaactctcaggactcgtcgtatcacgattaaaatccgaaggcatgtatgccgttggtggtgtggatggtttataccttcgcatccgaaatcagtcccgtgcatgggttctttgcgtggctatgggaacccgaatcaacaatctcggtagaacagttccaagacgtttgaatatgggtcttggcccttacccggaagtctccttagccgaagcgcgtgacaaagcgcgtgagctacgtaaacaaatccgtaatggtattaatccccttcaggaaaaacacgagcaaaaagcccggcaggaaatactggcccggaagaaaaagacctttgccgaatgttgtgaagaagtgctggaagtcaaagacagtgagatgaagaacaaaaagcatctcgcgcaatggcgttccacactggagacctatgcctaccctttcattggcaaaaaggccgttagtgaaatcaccaaagtcgatcttctggcaatactggaacctatctggttaaccaagaatgaaaccgccagtcgtctacgtggacgtattgaaacggtgatcgattacgccaaggccaaagaatactttgaaggtgataatcctgctgcatggaaaggtatgctgaaacctctcctgcctcagccaagtaaagttcagatcaccaaacaccatgcggctcttccctataaccagatcggctcctttatgaaagaactgcgtgaacgaagcggcgtttcgcctcgtgcgcttgagtttgccatactgaccgcagcacgctcaggtgaaattcgtggtgccgagtggtcagagatcgatcttgaaggtaaaacatggaccatccccgccagtcgaatgaaagcaacgaaggagcatcgagttccgttgtctgatgctgctgttgccctgttaaaggctttaccacgctttaaaggtatcaattttgtattccctgccactcggaagggacaactctcggatactgctttactggcagtcctaaagcgaatgggatataccgacttaacgcagcatgggtttagatcgacattccgtgattgggctggtgaaacgaccaactacccgcgtgaggtaattgaacatgcgttagctcatcagttggcaaataaggcagaagctgcgtatcaacgtgggacgttatggcctaagcgggtggcgttaatggatgattgggcggggtattgtatttcttag

SEQ ID NO: 9050 - DNA, 1443 bp, Escherichia coli
atgtgcttacttgcaccagaaaatccttatccgatatatgcactaccaccgctggtgagaaatgcaataattgaaactcaaaaaaatacacaggcacctttggctatggtggcaacatccgcattaacagcgacctcaattgcctgtcagaatcaggttgacgtgtgcagacctggaaatttacgtgggcctgttaatctttactctctgattctggctgattccggtgaaaggaaaacgaccgtggataaagtgtttatgaaagcattttatctcagggatgaagccctggcggaagaatacgcgaaactggttgagaattacagtacagaaaaggaaatatgggagcaaaaacaaaaagcgctggaatcaaaatttcataaagagattcgtgccggtaaagattacaaggcaacagaatcagagcttgaaacgcatctgaataagtctcctgttccgccgcagatacgtcgaacaatttttaatgagacaacgatagagggaatgttaaaatattactccgatagcaatcgttcttttgctcttgtatccagtgaagggggggtaatttttgacagccgggccatgagtaaactgggaattattaacactttgtgggatggaggttctcttttcatcgacaggaaatcatctcccggaattaatttgaaggagccaagactgacgatgtcggcgatgattcagcctgatgtttaccacaaaggtttttgtacgcgaaaaaaagaacttgtgaaaacgtcaggacatcatgcaaggtttttgatgtgtcaaccaacatcaacgcaggggacaaggataataaccggagataattattcatcacagtatcaggagttatttgataagaggatcaatgaacttattgatgaaagtctggctatgagtggtgaacgacgttgccttcacttttctcctcaggctgccagaatctggacggattattacaacgatgtggaatcgaagctggggggattggggcctttaagacattgtcgggaatatgctgccaaaaatgcagagtatatggcaagactggcaggacttcttcaccatttgagcagtgaggagggggacatttccccttacactgcagaaatggggagagaattagcaatatggtacggtaatgagtatatgcggttgtctaatccgttaacttttgacaacactgctcaaaacgagactatgcgactcattccagaggagcttgaacttttcaactggataaaaagctattgcattgagaaggggatcccctgtatgaaaaaaaatgacattttacagcgtggtccgaaccgtttccggaaaaaggataaaatcaactggttactggatttactgtatgaacaaaacagagttgtaccggttattgagggaaaaacgttgtgtgtcgcacctaactttgacctcttaatgacttaa

SEQ ID NO: 9051 - DNA, 675 bp, Escherichia coli
atgattaaaattgaaaatcttacaaagtcatatcgtacaccacatggaaggcattatgtattcaaagatttaaacgttgaatttcccgagggaaaaagtgttgctctgcttggccgaaatggggcaggaaaatcgacattgcttcggataattggtggtatcgacaaacctgattatggagcagtaatcacgaacagaagtatctcttggcccgttggactctcaggtggttttcagggaagcttaacaggccgagagaatgtaaaatttgttgctaggctatatgccaaacaaggtgatttaaaaaataaggttgcttttgtagaagaattttctgaattaggaatgtattttgatatgcctattaaatcttattcctctgggatgaagtctaggcttggatttggattaagtatggcatttgaatttgattactatcttgtcgatgagattacgtcagttggtgatgcaaggtttagggaaaaatgtgcagaaatttttaagtcccgtcattcagaatccaactttcttatggtttcacataatctaaattctatcagagaattttgtgatgttgcgatttttttaggcagaaataatgaagtttattattatgatgatatctcatgtgcgataaaggattatctgaaagaggaaaaaatagccaccatataa

SEQ ID NO: 9052 - DNA, 459 bp, Escherichia coli; identical to SEQ ID NO: 6020

SEQ ID NO: 9053 - DNA, 132 bp, Escherichia coli; identical to SEQ ID NO: 6019

SEQ ID NO: 9054 - DNA, 246 bp, Escherichia coli
atgtcagaaatcacatccctggtcactgctgaggcagtgaaggaagtcctgcgctctgaagaagtcctgagcgcactgaaacagaaactccgccagaaccttgagtcgcgtcttgatgcagaagtggatgccattctggatgagctgctgggcgtaccagcggttccggagccggaaggtatcgcgggtgacgggagtgcttcagatggcggtgaacccacacctgacagcgacatgatgatgtaa

SEQ ID NO: 9055 - DNA, 1962 bp, Escherichia coli
atggcatttaaacactatgatgttgtcagggcggcatcgccgtcagaccttgcgaaacgactgacacaaaaactgaaggaggggtggcagccatttggcagtccggtggccatcacgccttataccctgatgcaggccattgcggcggaaggtgatgtcaccacacctgtggtggtgaagccgtcggatggagaaggcgcagttatcagcaccaccagcaacccggagtattactttgttgttgccctggccgggcagtcaaacggtatggcgtatggtgaagggcttccgctgccggagacatatgaccgtccggacccgcgtattaaacagctggcgcgtcgcagcactgtcacgccgggtggtgcgttctgtaactacaatgacattattcctgcggaccactgcctgcatgatgttcaggatttgagtaagttttcacacccgaaagccagtgcagctcagtatggatgcgtggggcagggattacatatcgcgaagaaattgttgccgtttattccggcgaatgccggtattcttctggttccgtgctgccgtggtggttctgcatttttggcgggcgatgaaggtaccttcagcgaatccaccggcgcaagcgagacctcggcacgctggggtgtagataagccactgtacaaggacctgcttacccgtactcaggccgcactgaaggccaaccctaaaaatattctgcttgcagtggtctggatgcagggcgagtttgatttgaaacagggtgcatacgccacccagccggggctgtttgattccatggtggaaaaatatcgttctgacctgtcggaattcggaggtcagtgtctcgggggctctccgtcatcggttccctggatttgtggcgacacgacctactactggaagcagacttattcttcgcaatacgatgcggtgtatggtgcatacaagacgaaatccgcaaaaaaaatcttctttgtgccgtttatgacggatgaaaacgggcgaaatgtgggtaccaacgagccgtcagaagatccggatgttgcggatattgggtattacggagccggtggtcgaacggacgccaaaacctggacgacggctgaccgtaaaacgcattttggatcatgggcacgtcgtgggattatttccgaccgtctggcaacggcgattcttgtgcatgccgggagaaacgctgaattcattaccggaaaacagcctgatacggtgaagcccaccggaccttccggtgaaggtacggagagagagccggaagccccggtcagtaaccgaaccctgatgagtctgctggcgtccggcgaagacctggcatcacagggctggcgctattatcacaaaccggcgagcggagacaatgttaacaaaaacattgctgaagcggtggtcagtgatgcgggggctacgggaggtaaggccctgcaactgaataaaccggaaaaccacatctggtttctggagcatgatgcagccggacagggagtggagttactgaagaaggggggacgtgtgagcgtacggtttaagttgccgggttcactggtgccgaatcagtttgccctgggcatttactggcagttgtcgtccctgccggagggagtgacgctggcagaggaaggcaacgacatgctgatgtccttctttctgcagacggatgcgacgaacctgaacgcgatgcaccacaagaagccgaatgcgaagctggaaacgttcggggtctttgataacggatggcacacactggcttttgagtttgccggaaacaacagcattcaggtgacgccggtactggatgagaaacgggggacgccgttcacactggtgaaatctccggcatcaggggcggcggacaaactgcaactgacaggcatatcaaaggcggcgacatatacgctgctgattgacagtgtgaaggtggaagtgaacaacgcggacatcgcggcatga

SEQ ID NO: 9056 - DNA, 627 bp, Escherichia coli
atgacaaatacagcaaaaatactcaacttctgcagaggtaactttgccaaacaggagcgtaatgtggcagatctcgatgatggttacgccagactatcaaatatgctgcttgaggcttattcaggcgcagatctgaccaagcgacagtttaaagtgctgcttgccattctgcgtaaaacctatggatggaataaaccaatggacagaatcaccgattctcaacttagcgagattacaaagttacccgtcaaacggtgcaatgaagccaagttagaactcgtcagaatgaatattatcaagcagcaaggcggcatgtttggaccaaataaaaacatctcagaatggtgtatccctcaaaacgagggaaaatcccctaaaacgagggataaaacatccctcaaattgggggattgctatccctcaaaacagggggacacaaaagacactattacaaaagaaaaaagaaaagattattcgtcagagaattctggcgaatcctctgaccagccagaaaacgacctttctgtggtgaaaccggatgctgcaattcagagcggcagcaagtgggggacagcagaagacctgactgaaccgccccgggtttcctggagagtgttttatctgtga

SEQ ID NO: 9057 - DNA, 654 bp, Escherichia coli; identical to SEQ ID NO: 7090

SEQ ID NO: 9058 - DNA, 297 bp, Escherichia coli
atgaacgcttattacattcaggatcgtcttgaggctcagagctgggcgcgtcactaccagcagatcgcccgtgaagagaaagaggcagaactggcagacgacatggaaaaaggcctgccccagcacctgtttgaatcgctatgcatcgatcatttacaacgccacggggccagcaaaaaagccattacccgtgcgtttgatgacgatgttgagtttcaggagcgcatggcagaacacatccggtacatagttgaaaccattgctcaccatcaggctgatattgattcagaggtataa

SEQ ID NO: 9059 - DNA, 681 bp, Escherichia coli
atgacaccggacattatcctgcagcgtaccgggatcgacgtgagagctgtcgaacagggggatgatgcatggcacaaattacggctcggcgtcatcaccgcttcagaagttcacaacgtgatagcaaaaccccgctccggaaagaaatggcctgacatgaaaatgtcctacttccacaccctgcttgctgaggtttgcaccggtgtggctccggaagttaacgctaaggcgctggcttggggaaaacagtacgagaacgacgccagagccctgtttgagtttacttccggcgtgaatgttactgaatccccgatcatctatcgcgacgaaagtatgcgcaccgcctgctctcccgatggtttatgcagtgacggcaacggccttgagctgaaatgcccgtttacctcccgggatttcatgaagttccggctcggtggtttcgaggccataaaatcggcttacatggcccaggtgcagtacagcatgtgggtgacgcgaaaagatgcctggtactttgccaactatgacccgcgtatgaagcgtgaaggactgcattatgtcgtggttgagcgggatgaaaagtacatggcgagttttgacgagatggtgccggagttcatcgaaaaaatggacgaggcactggctgaaattagttttgtatttggggagcaatggcgatga

SEQ ID NO: 9060 - DNA, 183 bp, Escherichia coli; identical to SEQ ID NO: 4130

SEQ ID NO: 9061 - DNA, 783 bp, Escherichia coli
gtgaagaagcaccagaccacgttgtctgatgagctcgagcgcaagatcattcgcctgttcgcgctggggatgagctaccaggatatcagccgggagatcgaagatttatatgccttcagtgtttccacgactaccatcagtgcggttaccgataaagtcattcctgagttaaaacagtggcagcagcgcccgctggaaaaggtttatcccttcgtctggctggacgccattcactataaaatccgcgaagatgggtgttatcagagcaaggcagtttataccgtactggcgctgaatctggaaggcaaaaaagaagtcctgggcctgtatttgtcggaaagcgaaggcgctaacttctggctgtcagtattaagtgatctgcaaaaccgtggcgttgaagacattctgattgcctgcgtggatgggctgaccggcttccctgaagcgataaacagcatttatccgcagacagaggtacagttgtgcgtcattcaccagatacgtaactcgattaaatatgtggcgtcaaaacaccataaagcgttcatggccgacctgaagccagtgtatcgtgcggtgtcaaaagaagcagcggaaacggcgctggatgagctggaagcgaaacgggggcagcaatatccggtggtgctccagtcctggcgccgcaagagggaaaatctgtcagcgtacttccgctatccggcgaatatccgcaaggtgatctacacaaccaacgcgatagaatcagtccaccgccagttcaggaaactgaccaaaacctaa

SEQ ID NO: 9062 - DNA, 816 bp, Escherichia coli
atggcgttcaaattcaaaacctttgcggcagtgggagccctgattggatcactggcactggtaggctgcggtcaggatgaaaaagatccaaaccacattaaagtcggcgtgattgttggtgccgaacagcaggttgcagaagtcgcgcagaaagttgcgaaagacaaatatggcctggacgttgagctggtaaccttcaacgactatgttctgccaaacgaagcattgagcaaaggcgatatcgacgccaacgccttccagcataaaccgtaccttgatcagcaactgaaagatcgtggctacaaactggtcgcagtaggcaacacatttgtttatccgattgctggttactccaagaaaatcaaatcactggatgaactgcaggatggttcgcaggttgccgtgccaaacgacccaactaaccttggtcgttcactgctgctgctgcaaaaagtgggcttgatcaaactgaaagatggcgttggcctgctgccgaccgttcttgatgttgttgagaacccaaaaaatctgaaaattgttgaactggaagcaccgcagctaccgcgctctctggacgacgcgcaaatcgctctggcagttatcaataccacctatgccagccagattggcctgactccagcgaaagacggtatctttgtcgaagataaagagtccccgtacgtaaacctgatcgtaacgcgtgaagacaacaaagacgccgaaaacgtgaagaaattcgttcaggcttatcagtctgacgaagtttacgaagcagcaaacaaagtgtttaacggcggcgctgttaaaggctggtaa

SEQ ID NO: 9063 - DNA, 372 bp, Escherichia coli
atgtatgaggtgtgtgtgacattttacatgagagtaaaacaggtgataacctcctttagtaaggggtattcacaggtattattacagaacaatgttgtttctggcttgttcttttttttggcgactggaatagccttttttaatatggggcaccccgaaatactgtatttctcagccatcagtgcagcactttctccgttctttgcctggtatttgcggtatcctgatgaggagattaatgaaggtatatggggatataatgctgttctgtatggcatagcctgtggcatgcttgtccctgtgtcagtctccggaattgctgtacttattgtcggaacactggagatgctccttttaatggggttcagataa

SEQ ID NO: 9064 - DNA, 2124 bp, Escherichia coli
atggattcttgtcataaaattgattatgggttatacgccctggagattttagcccaataccataacgtctctgttaacccggaagaaattaaacatagatttgacacagacgggactggtctgggattaacgtcatggttgcttgctgcgaaatctttagaactaaaggtaaaacaggtaaaaaaaacaattgaccgattaaactttattcctttgcccgcattagtctggagagaggatggacgtcattttattctgactaaagtcagtaaagaagcaaacagatatcttatttttgatctggagcagcgaaatccccgtgttctcgaacagtctgagtttgaggcgttatatcaggggcatattattcttattgcttcccgttcttctgttaccgggaaactggcaaaatttgactttacctggtttatccctgccattataaaatacagaaaaatatttattgaaacccttgttgtatctgtttttttacaattatttgcattaataaccccccttttttttcaggtggttatggacaaagtattagtacacagggggttttcaacccttaatgttattactgtcgcattatctgttgtggtggtgtttgagattatactcagcggtttaagaacttacatttttgcacatagtacaagtcggattgatgttgagttgggtgccaaactcttccggcatttactggcgctaccgatctcttattttgagagtcgtcgtgttggtgatactgttgccagggtaagagaattagaccagatccgtaattttctgacaggacaggcattaacatctgttctggacttattattttcattcatattttttgcggtaatgtggtattacagcccaaagcttactctggtgatcttattttcgctgccctgttatgctgcatggtctgtttttattagccccattttgcgacgtcgccttgatgataagttttcacggaatgcggataatcaatctttcctggtggaatcagtcacggcgattaacactataaaagctatggcagtctcacctcagatgacgaacatatgggacaaacaattggcaggatatgttgctgcaggctttaaagtgacagtattagccaccattggtcaacaaggaatacagttaatacaaaagactgttatgatcatcaacctgtggttgggagcacacctggttatttccggggatttaagtattggtcagttaattgcttttaatatgcttgcaggtcagattgttgcaccggttattcgccttgcacaaatctggcaggatttccagcaggttggtatatcagttacccgccttggtgatgtgcttaactctccaactgaaagttatcatgggaaactggcattaccggaaattaatggtgatatcacttttcgtaatatccggtttcgctataagcctgactctccggttattttagataatatcaatctcagtattaagcagggggaggttattggtattgtcggacgttctggttcaggaaaaagcacattaactaaattaattcaacgtttttatattcctgaaaatggccaggtcttaattgatggacatgatcttgcgttggccgatcctaactggttacgtcgtcaggtgggggttgtgttgcaggacaatgtgctgcttaatcgcagtattattgataatatttcactggctaatcctggcatgtccgtcgaaaaagttatttatgcagcgaaattagcaggtgctcatgattttatttctgaattgcgtgaggggtataacaccattgtcggggaacagggggcaggattatccggaggtcaacgtcaacgcatcgcaattgcaagggcgctggtgaacaaccctaaaatactcatttttgatgaagcaaccagtgctctggattatgagtcggagcatgtcatcatgcgcaatatgcacaaaatatgtaagggcagaacggttataatcattgctcatcgtctgtctacagtaaaaaatgcagaccgcattattgtcatggaaaaagggaaaattgttgaacagggtaaacataaggaactgctttctgaaccagaaagtttatacagttacttatatcagttacagtcagactaa

SEQ ID NO: 9065 - DNA, 3075 bp, Escherichia coli
atgccaacaataaccactgcacaaattaaaagcacactacagtctgcaaagcaatccgctgcaaataaattgcactcagcaggacaaagcacgaaagatgcattaaaaaaagcagcagagcaaacccgcaatgcgggaaacagactcattttacttatccctaaagattataaaggacagggttcaagccttaatgaccttgtcaggacggcagatgaactgggaattgaagtccagtatgatgaaaagaatggcacggcgattactaaacaggtattcggcacagcagagaaactcattggcctcaccgaacggggagtgactatctttgcaccacaattagacaaattactgcaaaagtatcaaaaagcgggtaataaattaggcggcagtgctgaaaatataggtgataacttaggaaaggcaggcagtgtactgtcaacgtttcaaaattttctgggtactgcactttcctcaatgaaaatagacgaactgataaagaaacaaaaatctggtagcaatgtcagctcttctgaactggcaaaagcgagtattgagctaatcaaccaactcgtggacacagctgccagcattaataataatgttaactcattttctcaacaactcaataagctgggaagtgtattatccaatacaaagcacctgaacggtgttggtaataagttacagaatttacctaaccttgataatatcggtgcagggttagatactgtatcgggtattttatctgcgatttcagcaagcttcattctgagcaatgcagatgcagataccggaactaaagctgcagcaggtgttgaattaacaacgaaagtactgggtaatgttggaaaaggtatttctcaatatattatcgcacagcgtgcagcacaggggttatctacatctgctgctgctgccggtttaattgcttctgttgtgacactggcaattagtccactctcattcctgtccattgccgataagtttaaacgtgccaataaaatagaggagtattcacaacgattcaaaaaacttggatacgatggtgacagtttacttgctgctttccacaaagaaacaggagctattgatgcatcgttaacaacgataagcactgttctggcttcagtatcttcaggtattagtgctgctgcaacgacatctctggttggtgcaccggtaagcgcgctggtaggggctgttacggggataatttcaggcatccttgaggcttcaaaacaggcaatgtttgaacatgtcgccagtaaaatggccgatgttattgctgaatgggagaaaaaacacggcaaaaattactttgaaaatggatatgatgcccgccatgctgcatttttagaagataactttaaaatattatctcagtataataaagagtattctgttgaaagatcagtcctcattacccagcaacattgggatacgctgataggtgagttagctggtgtcaccagaaatggagacaaaacactcagtggtaaaagttatattgactattatgaagaaggaaaacgtctggagaaaaaaccggatgaattccagaagcaagtctttgacccattgaaaggaaatattgacctttctgacagcaaatcttctacgttattgaaatttgttacgccattgttaactcccggtgaggaaattcgtgaaaggaggcagtccggaaaatatgaatatattaccgagttattagtcaagggtgttgataaatggacggtgaagggggttcaggacaaggggtctgtatatgattactctaacctgattcagcatgcatcagtcggtaataaccagtatcgggaaattcgtattgagtcacacctgggagacggggatgataaggtctttttatctgccggctcagccaatatctacgcaggtaaaggacatgatgttgtttattatgataaaacagacaccggttatctgaccattgatggcacaaaagcaaccgaagcgggtaattacacggtaacacgtgtacttggtggtgatgttaaggttttacaggaagttgtgaaggagcaggaggtttcagttggaaaaagaactgaaaaaacgcaatatcggagttatgaattcactcatatcaatggtaaaaatttaacagagactgataacttatattccgtggaagaacttattgggaccacgcgtgccgacaagttttttggcagtaaatttactgatatcttccatggcgcggatggtgatgaccatatagaaggaaatgatgggaatgaccgcttatatggtgataaaggtaatgacacactgagtggtggaaacggagatgaccagctctatggcggtgatggcaacgataagttaattgggggagcaggtaataattacctgaacggcggagatggcgatgatgagcttcaggttcagggaaattctcttgcaaaaaatgtattatccggtggaaaaggtaatgacaagctgtacggcagtgagggagcagatctgcttgatggcggagaagggaatgatcttctgaaaggtggatatggtaatgatatttatcgttatctttcaggatatggccatcatattattgacgatgatggggggaaagacgataaactcagtttggctgatattgatttccgggatgtggccttcaggcgagaaggtaatgacctcatcatgtataaagctgaaggtaatgttctttccattggtcataaaaatggtattacattcaggaactggtttgaaaaagagtcaggtgatatctctaatcaccagatagagcagatttttgataaagacggcagggtaatcacaccagattcccttaaaaaggcacttgagtatcaacagagtaataataaggcaagttatgtgtatgggaatgatgcattagcctatggaagtcaggataatcttaatccattaattaatgaaatcagcaaaatcatttcagctgcaggtaattttgatgttaaagaggaaagagctgcagcttctttattgcagttgtccggtaatgccagtgatttttcatatggacggaactcaataactttgacagcatcagcataa

SEQ ID NO: 9066 - DNA, 834 bp, Escherichia coli
atgcagcgcttatttcttttggttgccgtcatgttactgagcggatgcttaaccgccccgcctaaagaagccgccagaccgacattaatgcctcgtgctcagagctacaaagatttgacccatctgccagcgccgacgggtaagatctttgtttcggtatacaacattcaggacgaaaccgggcaatttaaaccctacccggcaagtaacttctccactgctgttccgcaaagcgccacggcaatgctggtcacggcattgaaagattctcgctggtttataccgctggagcgccagggcttacaaaatctgcttaacgagcgcaagattattcgtgcggcacaagaaaacggcacggttgccattaataaccgaatcccgctgcaatctttaacggcggcaaatatcatggttgaaggttcaattatcggttatgaaagcaacgttaaatcgggcggtgttggggcaagatattttgggatcggtgcagacacgcaataccagcttgatcagattgccgtgaacctgcgtgtcgtcaatgtgagtaccggtgagatcctctcctcggtgaacaccagtaagacgatactttcctatgaagttcaggccggggttttccgctttattgactaccagcgcttgctggaaggggaagtgggttacacctcgaacgaacccgttatgctgtgcctgatgtcggctatcgaaacaggggtcattttcctgattaatgatggtattgaccgtggtctgtgggatttgcagaacaaagcagaacggcagaatgacattctggtgaaataccgccatatgtcggttccaccggaatcctga

SEQ ID NO: 9067 - DNA, 828 bp, Escherichia coli
atgtctgcaatcacagtctcccgtccggaagtggtcaacgggcatacggacgttatctgctcaaccagtatccgccacattctggctgtacgaaagagtacactgctgcaaatcgacacacttatccggcaactggctgaaatctcatcaatgacagaaagtattggcggtaaaaccgcactggactgggccatgaaacaggattttcgctgtggttgctggctgactgagaaaccggaaaccgcaatgaaagccattacccgcaaccttgaccgtgaaatctggcgtgacctgatgcaacgctccgggatgctgtcattaatggatgcgcagacccgtgatacatggtaccgatcactggagtacgataattttccggaaatcagtgaagagaatattctgagtacgtttgagcagctacaccagaataaggatgaagtgtttgagcgaggagtgatcaacctcttcagagggttgagctggaattacaaaaccaattgcccctgtaaatttggcaataaaattatcgtcaacaatctggtgaggtgggaccggtggggattgcatcttatcaccgggcaacaggcagatagacttgccgacctggaaagaatgctgcatctgttcagcggcaaaccgatccccgacaacagggaaaacataactattcatctggacgatcacatccggtctcttcagggaaaagaatgctatgaagatgagatgttcattattaaatactttaagaagggctctgcgcacatcacgttcaggaagccagaactggttgacagactgaatgatattatcgcaagaacactatcctga

SEQ ID NO: 9068 - DNA, 1125 bp, Escherichia coli
atgttgacaaagcttaccgtcgaaacggcgctcaatgcagaactgactgaccatctcggtcatgagaaaaatgctcctaaatcaggctctaatacccgtaatggctactcgtcaaaaacggtattgtgcgatgatggcgagatcgaacttaacacgccgcgtgaccgtgaaaataccttcgaaccgcaactaattaagaagcatcagacacgcatcacccagatggacagccagattttgtccctgtatgccaaaggcatgactacgcgggaaatcgttgccacgttcaaagaaatgtacgacgccgatgtctcgcccacgctgatatccaaagtgaccgatgcggttaaagagcaggtctctgaatggcaaaatcgaccgttggatgcactgtatcccattgtttatcttgactgtattgtggttaaggttcgtcacggcgggagtgtcattaacaaagcggtgttcctcgcgctgggcatcaataccgacggtcagaaagagctgctgggtatgtggctggcagaaaatgaaggtgcaaagttctggctgggtgtactgactgagctgaaaaatcgtggccttcaggacatcctgattgcctgcgtggacggcctgaaaggcttcccggaagcgataaatagcgtgtacccgcagacgcatattcagctctgcatcatccatatggtgcgcaacagcctgaaattcgtgtcgtggaaggattacaaagccgtcaccagcgggctgaaagcggtatatcaggccccgacagaggaagcggcgttgatggcgttggataagtttgcaggcgtctgggatgaaaaatacccgcaaatcagcaagagctggcgcacacactgggaaaatctcaacaccttcttcggttacccaccggatatccgcaaggccatctacacgacgaatgccatcgaatcgctgaacagcgtcattcggcaggcgataaagaagcgcaaggtgttcccaacggacgactcggtgcgaaaagtgatttatctggcgatacagtcggcgtcaaaaaaatggagtatgccaatccagaactggcggctggcaatgagccgttttattatcgagtttggtgaccgccttagcgagcacctttaa

SEQ ID NO: 9069 - DNA, 333 bp, Escherichia coli
atggcagggctccgttttgtcggcctgtgtcaccacaaacagcacctgctgatgtccgcactgcaggatgtgtcgccagaaatactcatccacagacagggcccggtcatcggctttaatcagccacagcaccaggtccagttcaggcagaatgtcacggtacagggcttcatactctgcatccctgtcccggctctcgcccaccccgggcaggtcagtgataaccatgctgtgaccgtggccactcagacggaagcgccgcacttcccgggtgccggcgtgaacatcactgaccggggtgacctccccctgaaacagtgcattacagagtga

SEQ ID NO: 9070 - DNA, 573 bp, Escherichia coli; identical to SEQ ID NO: 7694

SEQ ID NO: 9071 - DNA, 2346 bp, Escherichia coli
gtgcacaagtatggacttgcactgaacacggtaattaacgaggggggctggcaggttgttaaggccggtggtactgccggtaacaccaccataaatcagaacggcgagctgagggttcatgccggcggtgaagcgtctgatgtcacccagaacacgggaggtgcactggttaccagcactgctgcaactgtcaccggtacaaaccgcctgggagcattctctgttgtggagggtaaagctgataatgtcgtactggaaaatggcggacgtctggatgtgctgagcggacacacagccaccagaacccttgtggatgatggcggaacgctggatgtccgcaacggtggtaccgccactgccgtatccatgggaaatggcggggtactgctggccgattccggggccgctgtcagtggtacccggagcgacggaacggcattccgtatcggaggcggtcaggcggatgccctgatgctggaaaaaggcagttcattcacgctgaacgccggtgatacggccacggataccacggtaaatggcggactgttcactgccagagggggctcgctggcgggcaccaccacgctgaataacggtgccacgtttaccctttccgggaagacggtgaacaacgataccctgaccatccgtgaaggtgatgcactcctgcagggaggcgctctcaccggtaacggcagggtggaaaaatcaggaagtggcacactcactgtcagcaacaccacactcacccagaaagccgtcaacctgaatgaaggcacgctgacgctgaacgacagtaccgtcaccacggatatcatcgctcatcgcggcacggccctgaagctgaccggcagcacagtgctgaacggtgccattgaccccacgaatgtcaccctgacatccggtgccacctggaatatccccgataacgccacggttcagtcggtggtggatgacctcagccatgccggacagattcatttcacctccgcccgcacagggaagttcgttccgacaactctgcaggtgaaaaacctgaacgggcagaatggcaccatcagcctgcgtgtacgcccggatatggcgcagaacaatgctgacagactggtcattgacggtggcagagcaaccggaaaaaccatcctgaatctggtgaacgccggcaacagtggtacgggtctggcgaccaccggtaagggtattcaggtggttgaggccattaacggtgccaccacggaggaaggggcttttgtccaggggaatatgctgcaggccggggcctttaactacaccctcaaccgggacagtgatgagagctggtatctgcgcagtgaagaacgttatcgtgctgaagtccccctgtacgcctccatgctgacacaggcaatggactatgaccggattctggcaggctcccgcagccatcagaccggtgtaaacggtgaaaataacagcgtccgtctcagcattcagggcggccatctcggtcacgataacaacggcggtattgcccgtggggccacgccggaaagcagcggcagctatggcttcgtccgtctggagggtgacctgctcagaacagaggtcgccggtatgtcactgacgacaggagtgtatggtgctgcaggccattcttccgttgatgttaaggatgatgacggctcccgcgccggcacggtccgggatgatgccggcagcctgggcggatatatgaacctgacacacacctcctccggcctgtgggctgacattgtggcacagggaacccgccacagtatgaaagcgtcatcggacaataacgacttccgcgcacggggccggggctggctgggctcactggaaaccggtctgcccttcagtatcactgacaacctgatgctggagccacggctgcagtacacctggcaggggctttcgctggatgacggtaaggacaacgccggttatgtgaagttcgggcatggcagtgcacagcatgtgcgtgccggtttccgtctgggcagccacaacgatatgacctttggtgaaggcacctcatcccgtgcccccctgcgtgacagtgcaaaacacagtgtgcgtgaactgccggtgaactggtgggtacagccttccgttatccgcaccttcagctcccggggtgatatgcgtgtggggacctccaccgcaggcagcgggatgacgttctctccctcacagaatggcacttcactggatctgcaggccggactggaagcccgtgtccgggaaaatatcaccctgggcgttcaggccggttatgcccacagcatcaacggcagcagcgctgaaggttataacagtcaggccacactgaatgtgaccttctga

SEQ ID NO: 9072 - DNA, 333 bp, Escherichia coli
atggcagggctccgttttatcggcctgcgtcaccacaaacagtacccgctgatgtccccggtgcaggatgtgtcgccagaaatactcatccacagacagggcacggtcatcggctttaatcagccacagtaccaggtccagttctggcagaatgtcacggtacagggcttcatactctgcatccctgtcccggctctcgcccaccccgggcaggtcagtgataaccatgctgtgaccgtggccactcagacggaagcgccgcacttcccgggtgccagcgtgaacatcactgaccggggtgacctccccctgaaacagtgcattacagagtga

SEQ ID NO: 9073 - DNA, 297 bp, Escherichia coli
atggtcaatgatgtcagagggtctgtcgacggatgggattttaaacagtacattttgggcgcacttttcaaccgttttatcagcgaaaatttttccagctatatggaatattgtcgatcaagatgttgtaaaaagatccagaaaaaatatttcaaaggcatgaaagaacttgctgacaagaagtttattgcagagaccatgatacagaactattactttattaacccaggctatatgtttaatggtcatcgcttgacctatatgaagacctattacctgaaggataaaaacgaataa

SEQ ID NO: 9074 - DNA, 990 bp, Escherichia coli
atgaaactctcccgtttatttccgctgctggcgctgctgctggcggccagcctgcacgcagaaaatacgcacaaggaggtgcgtatcgcgtcaccgtggccggcgcaaaataccattattgccatgctggggtacggcgataacattgtcggaacctcgatgattgcaaaaaggatccccctgtttcgccagagcctgccgcgcatagagaaagtcgcagcagttagcgtaaacagcgggcatgaaatcaatcccgaacagattatcgcgctgggggtcgatatgctttttgtaccgcagaatatggtagtgcctcaacaggcgttgctgaaacaggctggggtgcaggtgctggcgtttgaggcgaattcactgcgggcgttaacgcagcgcgtacagcaaacggcagcggtgctggggcccgatgcgcagcaaaaagcgctcgcctatcaacgctacttcgatcgcaacgtggccctggtcaccgggcgcctgaaagatcttcctgcgtcacagcgcgtgtcgctctatcacagtatgggcaatccgctgaccaccaccggtagaccctcgctaaaccaggactggattgacctggccggcggcaaaaatatcgctgaaaattggtttggcgagcatcaacaaaatcgttcgggtgaagtcgcgctggagaaaattgtcactgccaatccggcggttatcatcgcgatgaacaagcgcgacgcggatgccattctgagttctccgcagtgggcaagcgtggacgcggtcattcatcatcgcgtttacgttaatccgaaaggaatgttctggtggtgccgtgaaaccagcgaagaggcgctgcaatttttgtggctggcgaaaacgctttatcctgcgcgatttgctgatgtggatatacgcaaagagacgcgtgagttttatcggcagttctttggcctgacgttaagcgatgcgcagatgagcgatgtgctcaatccgccgcgctaa

SEQ ID NO: 9075 - DNA, 1140 bp, Escherichia coli
atgatacagcaaaaaatacttataatatttggtactagaccagaggctataaaaatggcccctattgttaaggcatttgaaaataataatctaatagacgcgcgagtatgtgtaactggacagcatcgtgagatgttggatcaagtgttaaaattatttgagattaagcctgactatgatctcaatattatgaagcctggtcaagatttaaccgatgtgacaacagctatcttacaagggttaaaaacggtattttctaaatttacaccaaatcgtatccttgtccatggagatacagcaacttcattcgcagcaacattagctgcttattatcatcatattgctgtaggccatgttgaagccggtctacgcacaggaaatatttattctccatggcctgaagaaggtatgcgtcgactaacgggaggaattgctgaccaacactatgctccgactgctggtgcattgaaaaatcttataatggaaaatattccaccagaaaatatttttttaacagggaattcagttattgatgctttggtgtctgtatcaaacaaaattgaacaaagctccatattaagaaaacagttggagtctcaatttgattttatcgataaaaataaaaaaatgatccttgtcaccttacaccgcagagaaaatcatggagaaggaattgaacgaatttgcaatgctttagctaaattgtctcaacgagatgacgttcaaatcatttacccagtacatttgaatccaaatgtgcaacaaccagtgaaaagaaatttgcaaaaattagaaaatatttatctaattgaacctcaggattatttaccatttgtatatctaatgaagcaatgttatctgatattaacagattctggcgggattcaagaagaagctccgtcattaggaaagccagttctatgtatgcgtgatacaactgaacggcctgccgcggttaaagcaggaacagtgcgtttagtaggcacttgtgataaggcaatcgtgagtgaaactattcgtctattagatgatgatgtcgcatatcagtcaatgagtcatgcaaataatccttatggtgatggcaaaacaagtcagcgaattgtagatgctgttttaggttttagatatcaactggaataa

SEQ ID NO: 9076 - DNA, 1254 bp, Escherichia coli
atgtttaaacgtatttctgttattggtttagggtatattggtttacctactgcagcagtgattgctagcaacaatattcacgttgttggtgtagatatcaacaagtacgctgtagatacaattaatcaagggaatattcatattgttgagccaggactgcaggagttagtgaagtctgctgttagccaaggatatttgaaagcctttacagaaccgcaaaaagctgatgcattcctcatggctgtaccgacaccgtttaaaggaaagaactttgaggctgatttaaaatatattgaatcagcttcacgtgcattagcgccactacttgaaaagggtaatctggttgttttagagtccacttcgcctgttggtgctactgagcaaatggctaaatggttagcagaagagcgcccagatttaacatttcctcatcagatgaaaaatggattgaaggctgatatttgcattgcgcattgccccgagcgagtgttaccaggacaagttatacgtgaattagttgaaaatgaccggatcattgggggactggatgagcacagtacaacttcagcaattgaattatacaaacttttcgttaaaaaaggtgaatgtattgccactaatgcgcgtaccgctgagatgagtaagttaacggaaaatgcttttcgggatgtgaacattgcttttgcaaatgaactgtcactaatctgcgataaacaaggtataaatgtatgggagttaatttcattggctaatcggcatccgcgagttaatattcttcagcctggctgtggtgttggcggtcattgcatagcagttgacccttggtttatagttaaccaaaatccagaacttgcaaagttaattcaccaggctcgcttagtcaacgattataaacctcaatatgtgattgaaaaaattagccaagttgttgtcggcctaagaaacccaaagatcgcttgtttgggattggcatttaaaccggatattgatgacctacgagaaagccctgcattagaaattaccaaaagattagcagataaccctgctaatcggcttttagtagttgaacctaatattgatgatttgccatcagctttaaaaggacgtaataacgttaaattggtttctctctatgaggcactggaacaagcagatattgttctagttttagttaagcataaagaatttaaaggtcttattaataaaaagtatacaagcgctacaatactagattttgtaaatgctgccaattaa

SEQ ID NO: 9077 - DNA, 189 bp, Escherichia coli
gtgattctctatgtttggttgcatgcagcattcggtcgtatatatgcaattcacgatgtgctgttccatcaaggacaatttctgtttgtgctcgacgagtatcatgtccattattataccaactaccggcaaaacatacttcgtaaactggaagttttttattcttatcacgaattgggttgtggatag

SEQ ID NO: 9078 - DNA, 861 bp, Escherichia coli
gtgaacaccacgctgggcgagacctgggaagaggccgtgggcgaaaaactcgatcaccaggtactgatggataaggtcgtgcattacacggcggcggtgcctgcccgggtggtttatctgacggcgggcattgactcgcagcgaaaccgttttgagatgtatgtctggggatgggctccgggagaggaagcctttctggtggataaaatcatcattatggggcgtcccgatgaggaagagacgctgttacgtgtggatgcggcgatcaacaaaaaataccgccatgcggatggcaccgaaatgaccatttcccgtgtctgctgggacaccggggggatcgatggtgaaatcgtctaccagaggtcaaaaaaacacggtgttttccgtgtgctgccggtaaaaggcgcgtctgtctatggcaagccggtgatcaccatgccgaaaacccgcaatcagcggggcgtttatctgtgtgaagtggggacggacaccgcaaaagaaattctctatgcccgtatgaaagccgagcccacgcctgcggatgaagccacgtcgtatgccatccgttttcctgatgatccggagattttttcgcagacagaggcgcagcaactggtcgcggaagagcttgtggagaagtgggaaaaaggaaagatgcgtctgctgtgggataacaaaaagcggcgtaacgaagcgctggactgcctggtgtatgcctacgcggcattacgtgtgtccgtgcaacgctggcagcttgatctggctgtactggcaaaatcccgggaagaagagacgacccggccaacccttaaagaactggcagcgaagctgtccggaggagtgaatggttacagtcgctga

SEQ ID NO: 9079 - DNA, 207 bp, Escherichia coli
atggttacagtcgctgaactgcaggcgctgcgtcaggcgcgccttgatttattaaccggtaaacgggtggtgtctgtccagaaagatggtcgcagaattgaatatacggcggcctctctggatgagcttaaccgggcgatcaatgatgcggagtcggtactggggacaacccgccgtcgccgtcgtccgctgggagtgaggttatga

SEQ ID NO: 9080 - DNA, 1593 bp, Escherichia coli
atgaaacgaacgcctgtcctgattgatgtgaacggcgttccgcttcgtgagagtctcagctacaacgggggcggcgcaggatttggcgggcaaatggcggagtggttgccaccggcgcagagtgccgatgcagccctgctgcctgcgttgcgtctggggaatgcccgggcagatgatctggtgcgcaataacggaatagcggctaatgcggtggctctgcataaggatcatattgtcgggcatatgtttctgatcagctaccgtccgaactggcgctggctggggatgcgggagactgcagcaaaaagctttgtcgatgaggtggaggcggcctggtcggaatacgccgaagggatgtttggcgagatcgacgtggaaggaaaacgcacgttcacggaatttatccgtgaaggtgtgggcgttcatgcgtttaacggcgaaatctttgtgcagccggtctgggatacggaaaccacgcagttattccgtacgcgttttaaagccgtgagtccgaaacgggtggacacgcctggacacggtatggggaaccgttttctgcgggccggtgtggaggtcgatcgatatggccgtgccgtcgcgtaccatatctgtgaggatgattttccgttctctggtagtggacgatgggaacggatcccgcgtgaacttcccaccgggcgtccggccatgctgcatattttcgagccggtggaggacgggcagacccgtggggctaatcagttttacagcgtcatggaacggctgaagatgctcgattccctgcaggcaacacagcttcagtcggccatagtgaaggcgatgtatgcagcgacgattgaaagtgaacttgataccgaaaaggcctttgaatatatcgccggcgcgccacaggagcagaaggataatccgcttattaatattctggagaagttttccagctggtatgacacgaataacgtgacactgggcggtgtcaaaattccgcaccttttccctggtgatgatctgaaactacagacagcgcaggattcagacaatggattttctgcgcttgaacaggcgctgctgcggtatatcgccgccggtcttggcgtttcctacgaacagttgtcccgtgattactcgaaggtcagttactcaagtgcccgcgcctccgccaatgagtcgtggcgctattttatgggacgacgaaaatttattgcggcccggctggccacgcagatgttttcctgctggctggaagaggcacttcttcgggggattattcgtccgccacgggcacgttttgatttttatcaggcgcgttcagcctggtcacgggcagagtggattggtgccggaagaatggccattgacgggctcaaggaagtccaggaatcggtgatgcgtattgattccggactgagcacgtatgagaaagagctggcgctgatgggcgaggattatcaggacattttccgccagcaggtcagggaatctgcagagcgggaaaaagccggactctcacgtccggtgtggatagcgcaggcgtatcagcagcagatagcggagagtcgcaggccggaagaggagacaacaccacgtgagacgtaa

SEQ ID NO: 9081 - DNA, 1506 bp, Escherichia coli
gtgagacgtaatctttcacacattattgcagcagcattcaatgaaccgctgcttctggagcccgcctatgcgcgggttttcttttgcgcgctcgggcgcgagatgggggcagcaagtctttcggtaccacaacagcaggtacagtttgatgctcccggaatgctggctgaaacggacgagtacatggccggaggtaaacgaccggcccgtgtttaccgggtggtgaacggtattgcggtactgccggtgacaggcacgctggtgcaccggctgggggggatgcggccattttccggaatgactggctatgacggcattgtcgcctgtcttcagcaggcaatggcagatagccaggtgcggggtatactgctggacattgacagtccgggcgggcaggccgccggtgcgtttgactgtgctgacatgatttaccgactccggcagcagaagccggtctgggcactgtgtaatgacacggcctgttctgcagccatgctgctggcgtcggcctgctcccgacggctggttacccagacatcccgtatcggctccattggcgtgatgatgagccatgtcagctatgccggtcatctggcgcaggccggtgtggatatcacgctgatttactcaggggcgcacaaggtggatggcaatcagtttgaagcgttgccggaagaggttcgccaggacatgcagcagcggattgatgcggcgcgccggatgtttgccgaaaaagtggcgatgtataccggtctgtctgttgatgcagtcacgggaacagaggccgccgtttttgaaggtcagtccggcattgaggccgggctggcggatgaattaatcaatgcgtcggatgccatcagcgtgatggctgcggcgctgaacacacatgatacaggaggcactatgccgcaattaactgcaacggaagctgccgcgcaggagaaccagcgagtgatggggatcctgacgtgtcaggaagcgaaaggacgtgaacaccttgccacgatgctggcagggcaacagggcatgagcgttgaacaggcccgggcgattctgaccgcggcagcaccacagcagccggtggcatccgcacagagtgaagccgatcgcattatggcgtgtgaagaagcgaacggtcgtgaacaactggcagcaacgctggcggcgatgccggagatgacggtggaaaaagcccgcccgatcctggcggctgcaccactggcgaatgccgggccctcacttcgtgatcagatcatggctctggatgaggcaaaaggggctgaggcgcaggctgaacagctggctgcctgcccgggaatgactgtggagagcgcccgggctgtgctggctgcgggatcaggtaaggcagaaccggtctctgcatccacaaccgccctgtttgaacatttcatggcgaatcattcaccggctgcggtccgggggggcgtgtcacaggcgtcagaagacggtgatgcggacgtgaaaatgctcatggccatgccatga

SEQ ID NO: 9082 - DNA, 348 bp, Escherichia coli
atggtaacgaaaaccatcactgaacaacgtgcagaagtacgtatttttgccggtaatgatccggctcacaccgccacaggcagcagcgggatttctcaggcaacaccggcactgacacccctgatgctggatggggccagcgggaaactggttgtctgggatggacagaaagccggtagtgcggttggcatactggtactgccgcttgaaggcacagaggcggtgctgacgtattacaagtcggggacctttgcgacggaggcaatccgctggcctgacagtgtggatgaacacaaaaaggcaaatgcctttaccggtacagccctgagtcacgcggcgctgccgtaa

SEQ ID NO: 9083 - DNA, 537 bp, Escherichia coli
atggcagtggtgtcttttggtgtaaatgctgctccaactattccacagggccagggagaagtaactttcaaaggaactgttgttgacgctccatgtggtattgaaacgcagtctgcaagacaggaaattgattttggccagatctctaaatccttcctgcaggagggcggggaaagccagccgaaagatctgaatattaagcttgtaaattgcgatatcacaaattttaaaaaagcacctgttggtggtggggcaaccaaagcaggaacggtggctctgactttttccggcgtatccagtgggaacaataaagatatgctgcaaacagttggcgcaactaatacagctatcgttgttgtcgatccgcatggcaaacgtgtgaagtttgatggggcgaccactaccggtccttcaaatctggttgatggtgataacacgattcattttactgctgcggtcagaaaggatgatagtggcaaccctgtaacagaaggtgctttctcagcagttgcgaatttcaaccttacttatcagtaa

SEQ ID NO: 9084 - DNA, 219 bp, Escherichia coli
atgaaagaaaatattgaaaccagcgtaaaacgatttatccgcgttcctgatgttttaaatcgagtgggatttagtcgcacgactttatatgagcgtattaaggaaggaaactttcctgacagagtaaaaataggtccgaggtgtgtcgcttttgttgaaagtgagattgatgaatggattgaagtgactattcgacactcacgccagaacgctgcataa

SEQ ID NO: 9085 - DNA, 837 bp, Escherichia coli
atgaaaagaagtgaaatcaggaaagcactggaagcatggtttgatgttgaacgctatgaggcgatagagaaactcaccttacagcatttttatgttgaggttgagcggcgcatcttggcttacagaatgttgttgagccggaacaccatacctacctttaaccgattaatgctggatgattaccgcaacaagatcctcagcggtgaaatctttttcagtggtgataccgctactcttggacatgagcttgccagaacctacgcagtaaatcctacgacacgaagccacgcgcaattttatgcgaaaacgctggcattaaccgaagccacgcctgaactctctgggttaagccagtctgaatttctgtccgagtatctgaaagagacatcccttaataatctttcacgtattactgtcgatattcatctggaagaagcatcaaccgaagagatcattgaacatctgaaagtgttgatcccccgatggaagagacagcttaagatgaagtctccagcgccaagagagtatcgttttgggaaaagcacattcagaaaaattattgaatatcgtcttatcccgatgatggacctgatcttctggggagaagataacggcattaaaatcccgctttcactgatttcctcgctgcttcacgaggacagcgacaacgatcgtgatgaaggaatgctaaaggcaacggactacccgttagcaatggcttttctgacggatgcgagctatcggaaatcgcttgaagattacatgatggaaaacaatcacttgaaagactcccctgttgaaaagcatgtagaagacgacaggaataagaaaaaataa

SEQ ID NO: 9086 - DNA, 573 bp, Escherichia coli
atgaaaacagttatagtactttttgttttactgctgacaggttgtgctgctgaacctgcaaatcagcgtaatcttcttactcagtttgtcggcaacaatgcccctgtagaccctgaacccagtccagtattggttaatatcagaaacgttcttacaggggggataatccgaaatcctgttggcagtgactttaatgtaaataattgggttatatctgaagtaaagactaatgatttggatttgatatcggcaccgggagggcatgttcagattaaaaatcctgatggcaatgaatgctttgctattctaaacgggcaattggcagtggctaagcagtgctctgaaagtgaccgtaacgcattgtttacatttataaccagtgatactggggctgtgcaaatcaagtcaataggaagcggtcaatgcctagggaatggagagagcattacagatttcagattaaaaaaatgtgttgatgatcttgggcgtccttttgatacggtgccgccggggttactctggatgctgaatccaccattatctccggcaataatgtctccattaacgagctga

SEQ ID NO: 9087 - DNA, 822 bp, Escherichia coli
atgaaaaaattattattcctgttaatgattttgccgggtatttcttttgcagatttaagcgattttaaagttgcaacctggaatttgcaggggtcaaatgcaccgacagaaaataaatggaacacacatgtccgacaacttgttacgggaagtggtgctgttgatatcctgatggttcaggaggcaggggcagtaccagcttctgcaacgttgactgagcgagaatttagcactcccggtattccgatgaatgagtatatctggaataccggaaccaatagtcgtccacaggagttgtttatatatttctcacgtgttgatgcattcgctaacagagtaaatcttgcgattgtttcaaacagaagagctgatgaggtgattgtattacctcctccaactgttgtatcacgaccgatcatcggcattagaattggtaatgatgttttcttctcaacccatgcattggcgaatcgaggcgtggattcaggagcaattgtaaatagtgtttttgagttcttcaacagacaaacggatcctataagacaggccgctaactggatgattgcaggagattttaaccgttcaccggctacactattttcaactcttgaaccagggattcgtaatcatgtaaatattattgctccaccagatccaacgcaagccagtggtggtgttcttgattatgcggtagttggaaattcagtgagctttgtacttcctctgttgagggcctcgttgttattcggattattaagagggcaaattgcctctgatcactttccagttggctttattcctggaagaggagcaagaagatga

SEQ ID NO: 9088 - DNA, 714 bp, Escherichia coli
gtggataaaaaactaattgcatttttgtgcacacttataattactggttgctcgaatgggatcggggattcaccttcccctccgggaaaaaatgtagaattggttggaatccctggacaaggtattgcagtgacttcaaacggtgcaactccaacacttggagccaacaacactgagtttcctgaagtttcaataatgagcactggtggggcgctgcttactatttgggccagacctgttcgtaactggctttgggggtatactccttttgattcagtaaattttggtgagaatcggaactggaaggttgtggatggaaaagatgccggcacagtgaaatttgttaatgttgcccaggggacttgcatggaggcctttaaaaacggggtgatacataatacctgtgatgataactcgttatctcaggagtttcagttactgccttctactaatggtaatgtgcttataagaagtagtgccttgcagacgtgtataagagcagactatttaagcagaactatactgtcaccgtttgcttttacaatcacccttgagaaatgccctggtgcaaaagaagaaacgcaagaaatgctatgggcaataagtccacctgtcagagcggcaaaaccaaatctgattaagccagagttaagaccattcagaccattgccaattccacctcatgacaaacctgatggaatggagggagtatga

SEQ ID NO: 9089 - DNA, 291 bp, Escherichia coli
atggatatcacgtcgatacttcatgcgctttgtgccgtagcggtgcaggtactggctggtctttttaccggaaactgggcttacggggcgatagccggttgtacgttcttcattgcgcgtgaacacacccaggcagaatatcgctggattgaaatgttcgggcatggcaagcgtatgaatatgccgtggtggggtggttttgacccgcgcgtgtgggatatggcaagtctgatggattttgctgtgccggtggtggcgtgtctgctgatctggctgttggttaatcggtaa

SEQ ID NO: 9090 - DNA, 2529 bp, Escherichia coli
gtgattgcgaaccgggatatcagcattaccggtgacagtgtggtggttgacccggggcatgaccgtcgtactgtggacgaaaaatttgagcagaagaaaagcgggctgacggttgccctttccggcacggtgggcagtgccatcaataatgcggttaccagtgcacaggagacgaaggagagcagtgacagccgtctgaaagccctgcaggccacaaagacagcgctgtctggtgtgcaggccggacaggctgcgacaatggcctccgcaaccggtgacccgaatgcgacgggagtcagcctgtcgctcaccacccagaaatcgaaatcacaacaacattctgaaagtgacacagtatccggcagtacgctgaatgccgggaataatctgtctgttgtcgcaaccggcaaaaacaggggcgataaccgcggagatattgtgattgccggaagccagcttaaggccggtggtaacacaagcctggatgccgcgaatgatattctgttgagtggcgccgcaaacacacaaaaaacaacgggcaggaacagcagcagtggcggtggcgtgggtgtcagtatcggtgctggtaacggtgccggtatcagcgtctttgccggcgttaatgcggcaaaaggcagcgagaaaggtaacggtactgagtggactgaaaccacaacagacagcggtaaaaccgtcaccatcaacagtggtcgggatacggtactgaacggtgctcaggtcaacggcaacaggattatcgccgatgtgggccacgacctgctgataagcagccagcaggacaccagtaagtacgacagtaaacagaccagcgtggctgccggcggcagttttacctttggctccatgaccggctcaggttacatcgctgcctcccgggataagatgaagagccgctttgactccgttgctgaacaaaccggaatgtttgccggtgatggtggcttcgacatcacagtgggcagacatacccaactggatggtgcggtgattgcctccactgccacaccggataaaaaccacctggataccggaacgctggggttcagtgaccttcacaacgaagcggattataaagtcagtcacagtggaatcagtctgagcggtggtggcagcttcggggataaatttcagggtaacatgccgggtggcatgatatccgccggaggtcacagcggacatgcggaaggaacgactcaggccgcagtggcagaaggcactatcaccatccgggacagggacaatcagaagcagaatctggcgaacctgagccgtgaccctgcgcacgctaatgacagtatcagcccgatatttgacaaggagaaagagcagaggcgtctgcagacagtggggcttatcagtgacataggcagtcaggtggcggatattgcgcgtacacagggagaactgaatgcgttgaaggccgcgaaggaagcaaccggcgaaacacttcctgctaatgcaacagagaaacaacgtcaggaatatcttgcgaaactgcgtgacacgcaggcttacaggaatgaaatggcgaagtatggtaccggcagtgaaattcagcggggtatccaggccgcgacagcggcgcttcaggggctggcggggggtaatttagcaggtgctctggccggagcttcagcaccggaactggcacatctgctgaaatcaacagaaaaagacccggcagtaaacgccattgctcacgccattctgggcggcgcagtggcggcaatgcagggtaataatgccgctgccggtgcagcaggcgcagcaacgggagagctggcagccagagcgattgccggaatgctgtatcctggcgtgaagcagtcagacctcagtgaagagcagaagcagacgataagtacgctggcaaccgtgtcagcagggctggccggcggtctaaccggaaacagcaccgcatcagcagcagtgggagcacagagcgggaagaatgctgttgagaataactcactcagtgctggctggaacaatatcctgccatcaggaacacaggattacggacaggccgtagcctcgtggaatcagtatgctcaggacaataatctgacaccggagcaggttcaagaagggatgaatcgtatagctattggtgaagggccttcttgggggacaacatataaagtacacccggtagttcaggctggcggtgatgttagctttatccggggttatactttaagcggaactatagatgacaatcatatttcagttaatcaaggggatatttatagtataggtgctcatggcggagcctcgatcggattatcctttggcccgtatttcccgggattaataaattcaaatgataacgattattcgataaatggtggttttggcgttggtgcagtggggctttctacgggtaaagatggtgttagtttcacttttggttttggcccaagttggggttggagtgcaactgaaattaaaggcgttgacgttaatggcacttcaacaagtgaggtttatcgatatgattttaaataa

SEQ ID NO: 9091 - DNA, 459 bp, Escherichia coli
atgattttaaataatttctatagtttactatttttattgatgcttgcgctgtcaatattttccttcacagtgctatttgctttgtttatatataaagatctcggtggtgtaaaatttgcccgggactcttttttgttttttgattatatattttttagttctgacatgagagcaaatgcctctgcactatcggttatctgtgtttttatatttggattggcttttgatcataatcgtaatccacttgttaagaattacttggtcgatatagtatggtttttaggtgttgttttattttttatacactgtcgttttttttctaatctggaatatggtaagacaaaaattatttttgtaagagagctttttttcaacctaaaaataaaactaaggttaatatttttatggttgtcacgattattattcatcatattgatattaaatcgtttttatcgttga

SEQ ID NO: 9092 - DNA, 378 bp, Escherichia coli
atggcgacatgtacagaaaactcttccggtgccgcctgccagaaagcaatgaatgagagggatgctgtagggctggctttggcaacaggtactgtggcactactccccggtagtgctcaggtaatgtggggacttggagcaagtgcgaatgctggtatcagttatctggctgatggtactgtagatccggcaaacgcagccattgcaggctgggggaatgtgttcagcatgggtaatggcctggcggggactgtgggctggaatgctgcaggtggtgcgctgggtaactggatcggcaacaaagatcctctgtctggtgcaatttcaaatggtatcggttctgctgctgggtatggtatcggtaaaggtattacttag

SEQ ID NO: 9093 - DNA, 240 bp, Escherichia coli
atgaaatattcttttcgagtggtaataggtaagtttattatatgcagttcaattctcttattgtgttttattggcatgatcttagcggccataataactaaactaacgtttgtagcgttagcatggtttcaaagcgggatttttgaagttttgtggagcgatattgtttatgctgctcagttgggtggtctggggggggggcatattaggtttttgttgggttttgttatatctttttag

SEQ ID NO: 9094 - DNA, 744 bp, Escherichia coli
atgacacagacagaatcagcgattctggcgcatgcccggcggtgtgtgcctgcggagtcgtgcggcttagtggtgagaacgccggagggggagcggtatatcccttgtgtgaatatctctgcagagccggaggcgtattttcgtattgcaccggaagactggctgcgggcagagatgcagggggagattgtggcgctggtccacagtcatcccggtggtctgccctggctgagcgaggcggaccggcggctgcagataaagagcgcactgccctggtggctggtctgccggggtgacattcacaaattccgctgcgtgccgcacctgacgggacggcgctttgagcacggggtgacggactgttacaccctgttccgggatgcataccatctggcggggactgaaatgccggattttcatcgcgaggatgactggtggcgcaacggtcagaacctttacctggacaatatggcggtcaccggcttttaccgggtgcccctgtcctctgcacaggcgggcgatattctgctgtgctgctttggtgcttcggtaccgaaccatgccgccatttactgcggcaacggtgagctgcttcaccatctgcctgaacaactgagtaaacgggagaggtattccgaaaaatggcaacgacgaacgcattctgtctggcgtcaccgccactggcacgcatctgccttcacggggatttgcaacgatttggccgccgcctcagcctgtatgtga

SEQ ID NO: 9095 - DNA, 582 bp, Escherichia coli
gtgaacacggcagcggaagccatccgtgccctgtcgttacaggtgccgggctttcgccgtcagatgaacgaaggctggtaccagatacgtattgccggtgatgacacggcaccggaggcggtgtacgcccgtcttcacgaacagctgggtgagggaacggtcatccacattgtgccgcgactggccggagccggaaagggcggactgcagattgtgctgggggcggcagccatcgtgggctctttcttcacggccggtgcctcgatggcgttatggggttcagccctggcagccggtggtttttctgccaccacgatgctgttttcactgggggccagcatgatactgggcggtgtggcacagatgctggccccgaaggcaaaaacaccggattaccgcgtaacggataacggcagacagaacacgtacttttcctcgctggataacatgattgcccaggggaacccgatgccggtgccttacggggaaatgctggttggctcccgccgtatatcccaggacatcagcacccgtgatgaaggcgggggcggaaaggtcgtggttatcgggcggcaggggtaa

SEQ ID NO: 9096 - DNA, 2862 bp, Escherichia coli
atgaaaatgatttttaccggtaaggtcagcggagaaaaaaccgtgctgactgtcggaggtcgtcatacagttaaagcacagcccggggagcagtatggactgatcgatgaggtgaccggcctagtgcctgacggtgttgaggcggatcgctccggtgatgatttaattctgcgtaaaaaggaagaagatactgaggtccggatagagggattctgggaagaatgccagcccggggaaacacagtgtacggcggtatttaatattgttggggaagatggacaggtcaccgaagccgtactgactcaggatggcccggtgctggatgatattactgccggacaatcgggaaccttgtcagatgatgatcgtggcggttttatatggttgggcggtctggcatttggtgggggactggctgctatggctttagctgcaggtggcggtggaagcaaacatagacatgaaaatgatgactctgatactacagccccatcgtcaccagcactgaaggcagaggatgacggttctgtttctgttgagctgccgggtgatgccaataaaggcgataccgtggatgtcacctttgaagatgaaaaaggtggtaagcacaccgtgacgctggagaaaggggataacggctggacatccagtgatccgacgctgatcccggacagcactggcgataaagcgaccattccggcagataacgtgaaggataacagtgaagttaccggggttgccaaagatccgagcggtaatgaaagtgacccgtcaaccgtgacgtcaaaaactgatggtgtggcagatgccccggttctgagcattcctgaagtgactgacggttatgccaatgctgatgagctgaaagacggtttgcaggcagaggtcacgttgccggcaggcacggcagaaggtgcagttattacacttaccgtgacccgtccggacaaaaccacggagaacgtgacacataccgtgactaaagatgaagtggctgccggtaaagtatccatggatattccgaaggatgcggtgattgacgggcagaacagcgtcagtgtcactctgactcagggcagtaacccggcgaaacccgggaatgtggttgattttgctgccgatacccagatcccgggggataccgatggtgatggtgcaacagatgcaacaccggtagttgccattccggaagcggcagatggtgtgaatgccgaagagctgaaggatggtgtacagaccgaagtcacggtaccgaaaggcagcgctgccggtgataccctgacgctgacggtcaccaaaccggacggcacgacggacacggtggagcacacgctgaccgcagatgaagtggctgcaggtaaagctgatgtgaccattccggcggataaagtgacggcagatggtcagtattctgtaaccgcggaaatcacagacccggcaggtaacaccagtggccagggccagccggctgacttcgcagtggatacagtggcgccgtcggcaccggtattaaaagcagaggatgatggttctgtttctgttgagctgccgggtgatgccaataaaggcgataccgtggatgtcacctttgaagatgaaaaaggtggtaagcacaccgtgacgctggagaaaggggataacggctggacatccagtgatccgacgctgatcccggacagcactggcgataaagcgaccattccggcagataacgtgaaggataacagtgaagttaccggggttgccaaagatccgagcggtaatgaaagtgacccgtcaaccgtaacctcaaaaactgatgtgttaccaacagtgagtattagcgttgagacaacatcaacagatgtcaatggtgatggttttactggtatagctagtgtcaatgggaccgtaatggatgttcccgcaactattgaagataaggatgattccactggactggtttatacggtttctctgaatcatgtcactacaacagatgtaacagttacagttacattgggtagcggagctgggcattctgatgctgctgactattctgatattggtggagcacagcataacgggaaaattggccttcatggtgatactggaaaagtaacctatgatggtgcaacaaccgtaacaattgttattcctgccggttcaaaaagtgtttcatttatagttgatccaacgcttgaggctaaccaagatgcctttaatgccgagggtatggaaaaagttgttgcgaccattacgggaacatctgataacgttacggcagctactgacatcgttgataatgcgggagcatccgcaacaggtgttatttatgatggtaatgccatttcattacgtaatctggacggtgattttacactgaaatattcactatcatcttctatcgccgaaaaaggggactttgggtataccattggcgcgaatagtggtgaaaatgatccaatggtaacaacagattacaatgatacggtttatgttggttattaccagagtggtaaagaaacaacatcgtatagtaatgttgctaactcacaggataatgggccagacggaacaaaaaccgatggcaatcaaagcattacgactgttgatttaggtgctggtgatgatctaatggtcattcgtggtaacatgctggctaatacaagagtatatactggtgagggtaacgatacttttactatggatggtatgaatactgcattacgtgttatgtatgcgggtagttatatctttactgagtctggcgatgatattgttacgatcaaacgtactggtgtaacaaatgccggacagatttatcttggttcaggtagtgatacatttatccagggggatgctactagactggccccctga

SEQ ID NO: 9097 - DNA, 396 bp, Escherichia coli
atggaaattattccgctggaagaccagttgctgattgaggcttatataaatccacgggatgttgcctatgtcagaacagggatgccggcacttgtaaaactgacggcttatgactatgccatttatggtggtcttgacggagtggtgacactggtaagtccggatactttacgtgaccagaaacggccgggagatttaaaactggatccaaatgaagcatattatcgagtactggttactaccagtaataattatctgacagacaggaacggaaaaatattgccagttattcctggcatgatagccagcgtggatataaaaacaggtcagaaaagtgtatttcagtacctgattaaaccaatcaccagaatgaaacaagctcttcaggaacgatga

SEQ ID NO: 9098 - DNA, 846 bp, Escherichia coli
atgtcagatatcacaatctcccgcccggaactggtcaacggacatacggacgttatctgctcaactagtatccgccacattctggctgtacgaaagagtgcgctgctgcaaatcgacacacttatccggcaactggctgaaatctcggtactgacggaaagcattggcggtaaaaccgcccgggactgggccatgaaacaggattttcgctgcggctgctggctcatggagaaaccggaaaccgcaatgaaagccatcacccgcaatctcgatcgcgaaatctggcgtgacctgatgcaacgttccgggatgctgtcattaatggatgcgcaggcccatgatacatggtaccgctcactggagtacgataactttccggaaatcagcgaggcgaatatcctgagtacgtttgaacaactgcaccagaataaggatgacgtgtttgagcgaggtgtgatcaacctcttcagaggtctgagctggaattacaaaaccaattgcccctgtaaatttggcaataaaattatcgtcaacaatctggtgagatgggaccgatggggattgcatcttatcaccgggcaacaggcagatcgactcgctgacctggaaagaatgctgcatctgttcagcggcaaaccgatccccgacagccgggaaaatatcatcattcggctggatgatcacatccgctccgttcagggcaaagcgtgctatgaagatgagatgttcagcatcagatactttaagaagggctccgcacacatcacgttcaggaaaccagaactggttgacaggctaaatgacataattgccaggcactatccaaatgtattagcagacaggtaa

SEQ ID NO: 9099 - DNA, 3234 bp, Escherichia coli
gtgacgccagccttgctaagccgtgagggttttttatatccgacgccagcgacctccattcccagagacctgcttgaacctttgccaaaaggagcattttcgattggtgagattgggcagtatgacaaatacaagacgacccataccacgttctctatcaactttgatgacagcgttgataagactgccgaaacggatgaagaacgggaagcacgatatgccgccttgcagctggagtggcgtcaatatctgtatgactcagagaggctactgaagagcgttgccggcgactggattgaaaaacctgagcaatatgaactcgctgagcacggttatattgttaaaacggcgcaatctggtggtgccagtttccatatcctttcgctttatgatcacctgcttgtttgcaagaaggatgtgccgctcttcaatcgcttcgcctcgcgagaggttcatgctgcagagtctttgctggcccctggagcaaaattcagcgacaggcttggacactccggagataagtttccgctggcaaaggctcagcgcgatgccttaagccattttctggatgctagacatggcgatatccttgctgttaatggccctccgggaaccggaaaaaccacgctggtgctttctatcatcgccacgcagtgggccagagcggctctcgaaaaatctgagcctccggttattatcgcgacttcaacgaataaccaggctgtaacgaacattattgaggcattcgggaaagacttttcgcaaggttcaggtgcgatggccgggcgatggttgccagagctgaaaagcttcggcgcttattttccctcaagcagccgtaaagctgaagcagccaaaaaatatcaaactgaagatttcttcaaccaggttgagtcaaaagagtatgtagaagatgcactgctgttttatctggaaaaggctaaggcagcctttcctgaaaaagagtgttcatcccctgaaaaggtcattgaactcctgcatggtcagttggcagcaaaatccgagcaactgataagactgaacgcaacatggcaaacgttaagccagattcgggctgcgcgtgagcttattgctaatgatattgagcaatatctcaataatttaaataaattactttccggacaagaacaaaaaatcactctactgaagagtgctaaaacggaatggaaaaaatatcgcgccggtgaatcactgatctattcattattttcctggctcccggcggttcgcagtaagcgacagtaccaaatacaactgtttctcgaagataaattaggtgcgctgattgcaggaaatcagtggtctgatcctgaaactatcgaacgtaatattgatgggctgctcaattccgctgagcgcgagcaaacaacataccggcagcagattgactccgcccatgaaatcattcttaaagaacagcaggcggttcaggagtggcagagactggctcttgatttagggtatgagggcgacgaggaactgagcttctcacaggccgatgaactggctgatacgcagattcgcttccctgcatttttactgacgactcactactgggaaggtcgttggctgatggatatggccagcattgatgatctgcaggaagagaagaagaaaaaaggcgctaaaggggtaaccgcccgttggcaacgtcgaatgaaactcactccatgtgtggtgatgacatgctatatgctgcccggcaatatgcagataagtgagcacaaaggacagcgtaaattcgagaaaagttatttgtatgattttgccgatttactcattgtcgatgaagccgggcaggtgcttcctgaagtggctgctgcctcgtttgcattagctaagaaggcattagtgattggcgatacggagcagctcccgccaatatggagtattgctcctgcgattgatgtcggtaacatgctggcggaaaaaattctgtctggcagtacgcaagaagagattaccgcgaaatatacggcaatcgcagaccttggtaaaagtgccgcatctggcagcgttatgaaaatagcgcagtttgcttcacgctatcaatatgatcccgaactggctcgtggtatgtacctatatgaacaccgccggtgctacgacaatattattggatactgtaatacgctctgctatcacggtaagttgttgcctaaaagagggcgtgaagagagcaatttaatgcccgaaatggggtatctccatattgatggtaaaggtgagctggcaagtagtggaagtcgatataatttgcttgaggctgaaacgatagcggtctggttggcagagaaccagcaaaatattgaagcgcattacggtaaatcgcttcatgaagttgtcggtatcgtgacgccttttagcgctcaggtatccactatcaaacaggtgctgggcaaacaaggtatcagtacaggcgcgaatgaaaaatcgctcacagtgggcaccgtgcactctcttcagggagcggaaagagcgattgtgatattctcgccagtctattcaaaacatgaagacggcgggtttattgatagcgataacagcatgctgaatgttgcagtctcccgtgcgaaggacagttttctggtcttcggcgatatggatctgtttgaggtccagccagcctcatctccacggggattactggcaaaatacctctttgagtcagagaagaatgcgctctcttttgattataaagagcgtaaggatttaaaaaccgccgggaccaaaatctacacacttcatggtgtggagcaacatgataatttcctgaatcagacatttgaaaataccagtaaacacatcacgatagtttctccatggctgacctggcaaaggctggagcaaaccggttttcttgattccatgattgcggcgtgttcacgtggaattaacgtcacgatagtcactgacagaagctacaacactgaacataatgattttgagaagcgaaaagagaagcagcagaactttaaagcggcgctggagaaactgaatgcgctgggtattgctacaaagctagtaaaacgtgttcatagcaaaattgttattggtgatgatggtttgctgtgcgtgggatcgttcaactggtttagtgcgacacgggaagcgcgatatgaacgatacgatacatcaatggtttattgcggtgataacctgaagggtgagattgaggctatttataatagtcttgagaggcgtcaggtttag

SEQ ID NO: 9100 - DNA, 315 bp, Escherichia coli
atgtgtgaaaaagaaccggagctgaaaatagcgcagcaactggcactcgagttctaccgtattctgaaaacccaaaataaatcacagctaagtagctggttcactcgagtccacgaaagcggttcagcagaatttcggcgcgtggcggcggggatggaagctgatgctgcagctatatgtgaggcaatcagtagccgctggagtaatggtgttgtcgaaggtcatgtaaatcgcctgaagatgctaaaacgccagatgtatggtagagccggatttgaactactcaggcagagggtcatgagtccactggcatga

SEQ ID NO: 9101 - DNA, 309 bp, Escherichia coli
atggatttgtggttgctcgcgaatgacgaaagctgtctgcgccatcaggccttctggcatagctggcaggggccgcttgttgaaaggcaacaaagtaacaacatcactctgactgatgtgttggaaggcgtacatgcatatctgcaagggcatcttgatgactttgaaatacaggaagcctttgtcaccaaagaattaccgctaaagctcgcacagttgcgtgaacgctgggagcgttacgtggtactcaatgctgaattggcagcaagagggcgcgggggatttgaacgtaatcgccgtgatgattag

SEQ ID NO: 9102 - DNA, 288 bp, Escherichia coli
atgagtcgttccggtagcacactgtatcttatcgccctgctgacagcggcaacggtcctgacagcctgcacgccaaagggcagtatggaacaacatacccggcattacgtttatgcatcagatgacggttttgatcctaacttttccacccagaaggccgacacaacacgaatgatggtgctttttttcggcagttctgggatatgggagctaaagataaagcgacaggaaaatcatggagtgatgtgcaacaacgccttcagcagtttcacagccaggaatttttaa

SEQ ID NO: 9103 - DNA, 240 bp, Escherichia coli
atggaaacagctgtagcgtactataaagatggtgttccttatgatgataaggggcaggtaatcattactcttttgaatgataatccagacgggagtggctctggcagcggtggtggaactggaggtagcaacagtgaaagttctgcagccattcatgccacagctaaatggtctactgctcaattgaagaaaacgcaggcagaacaagctgcccggccgtgcttgctggaactacattag

SEQ ID NO: 9104 - DNA, 564 bp, Escherichia coli
gtgtgcgccagtgccgaacactgttgttttcccactctcctttttcgatccgacgaccagaatggactgagataccagccttcatggccgagatatgcggtcggtcaggtggtatttgaaaccagactgaagcccacggtcgtcatcgggacgcaggccgccgccgtgcatggtatcagtgagcaggcactctgcggagcaccatcatggactgatgtggtgcggcaactgcgtcatgcaatcggggaccgaccagtaattatctttaatgcccggttcgacatccgcattctgaaaaagactgctgccgcacatagcgatccggctgactggctggaagaactgacggtatattgtgtgatggagctggctgcaggatattatggagcctccaaccgctatggcactatttcactggcctgtgctgccagccagaccggactgaactgggaagggcaggcacactcagcgatcgctgacgcacggatgacggcaggggtggtaaacgctattgctgcatatcatctggaactgctgcaggaacaggcacggctgaaaacctga

SEQ ID NO: 9105 - DNA, 987 bp, Escherichia coli
atgaacaacagcgcttttactttccagacactacacccggataccatcatggacgctctgtttgagcatgggattcgggtggattccggtcttaccccgcttaacagctatgaaaaccgtgtctatcaatttcaggacgaagatcgtcgacgttttgtcgtcaaattttatcgccctgaacgttggacagccgatcaaatcctcgaagaacatcaatttgcgttgcagctggttaacgatgaagttccggtcgcagcacctgtggcctttaatggtcagactttattgaaccatcagggattttatttcgctgtttttccaagcgtcggtggtcgccagttcgaagctgataatatcgatcagatggaagcggttgggcgttatttagggcgtatgcaccagacggggcgcaaacagctttttatccatcgcccgaccatcggtttgaatgaatatctcattgagccacgcaagctgtttgaggacgctacactgataccttccgggttgaaagcggcattcctgaaagcgacagatgagctgattgccgccgttacagcacactggcgggaagatttcaccgttctgcggctacatggagactgccacgccgggaatattctctggcgcgatggtccaatgtttgttgatctggatgatgcacgtaatggtccagccgttcaggatttgtggatgttgctcaatggtgataaagccgagcagcggatgcaactggaaactattattgaggcttatgaagaatttagcgagttcgacaccgctgaaatcggactgattgaacctttacgcgccatgcgtttggtttattatcttgcctggctaatgcggcgttgggctgatcccgcgttcccgaaaaatttcccgtggttaaccggggaagattactggctacgacagacggcgacttttatagaacaggcaaaagttctacaagaaccccctttgcaattaacacctatgtattaa

SEQ ID NO: 9106 - DNA, 480 bp, Escherichia coli
atgagaatctccacccaggttgcagaagagccacttttccagttctgcatcagtaagtggaggtgttttttgagattttgtcatgtctttgctccggcctggttttatgttcagaagaccttcttcacccagtgccggataacggattcatttgagatattaaaccgtgcagcggcctcgcgcgtggtaagttcttcactcagagacttcaggacaaccgtcagtcgaaactcaggagtgtggaggtcatttttccatgtgatacgatcaatatcgtggagttaccagtctcttaccttacccagcagatgttttttcaacaccaaaacgtttagcgatacgacgtgcgccatcgtgtctggaaagataatgattaactacaaccaatctggtttcgagagaatattttggctttgccataaaaattgcacattaatcagttgggtctccaagttttggggtgcagtccacgtacaataa

SEQ ID NO: 9107 - DNA, 315 bp, Escherichia coli
atgtgtgaaaaagaaccggagctgaaaatagcgcagcaactggtactcgagttctaccgtattctgaaaacccaaaataaatcacagctaagcagcttgttcactcgagtccacgaaagcggctcagcagaacttcggtgcgtggctgcggggatggaagctgatgctgcggctatatgtgaggcaatcagcagtcgctggagtaatggtgttgtcgaaggtcatgtaaatcgcctgaagatgttgaaacgccagatgtatggtcgagccggatttgaactactcaaacagagggtaatgagtccactggcatga

SEQ ID NO: 9108 - DNA, 486 bp, Escherichia coli
atgacaaccttttcgcatagctccaccacaccttctgtttccgcaactactgtatcagggaataaccagtctcaactggttgccactcccgtccctgatgaacagcgcatcagcttctggccgcagcactttggcctcattccacagtgggtgaccctggagccccgtgtcttcggctggatggaccgtctgtgcgaagactactgcggtggtatctggaatctgtacaccctgaacaacggcggcgcatttatggcacccgaaccggatgacgatgatgacgaaacatgggtactgttcaatgccatgaacggtaaccgcgctgaaatgagcccggaagccgccggcattgctgcctgtctgatgacgtacagtcatcatgcctgtcgcacggagtgttatgccatgacggtccactattaccggctgcgggattacgccctgcaacatccggaatgcagcgccattatgcgcatcatcgactga

SEQ ID NO: 9109 - DNA, 477 bp, Escherichia coli
atgcaacaactttcctttctgcccggagagatgacgcccggcgagcgcagcctcattcaacgggccctgaaaaccctggaccgccatcttcatgaacccggcgtggccttcacctccacccgtgcagcacgggaatggctgattctgaacatggcgggactggagcgtgaagagttccgggtgctgtatctgaacaaccagaatcagctgattgccggtgaaaccctcttcaccggtaccatcaaccgcacggaagtccatccccgggaagtgattaaacgcgccctgtatcacaatgccgctgccgtggtgctggcacacaatcacccgtccggtgaagtcacacccagcaaggcagaccgccttatcacggaacgtctggtacaggcactgggcctggtggatatccgggtgccggaccatctgatagtcggtggcagccaggttttctcctttgcggaacacggtctgctttaa

SEQ ID NO: 9110 - DNA, 222 bp, Escherichia coli
atgaaaatcatcacccgtggtgaagccatgcgtattcaccgtcagcatcctgcatcccgtctttttccgttctgtaccggtaaataccgctggcacggtagcacggatacatataccggccgtgaagtacaggatattcccggtgtgctggctgtgtttgcagaacgccgtaaggacagttttggtccgtatgtccggctgatgagcgtcaccctgaactga

SEQ ID NO: 9111 - DNA, 156 bp, Escherichia coli; identical to SEQ ID NO: 7036

SEQ ID NO: 9112 - DNA, 414 bp, Escherichia coli
atggggagacccgactggcgcgccatgcttgccgggatgacatccaccgaatatgccgactggcaccgtttttaccgcacgcattattttcaggatacccagctggatatgcatttttccgggctgacgtacgctgtactcagcctgtttttttgcgatccggatatgcatccctctgatttcagtctgcttgtcccccggcatgaggaagaacaggtggagaggccggatgaggacaaaatgctgatgcagaaagcggcaggacttgccggaggcgtccggttcggtggggacggagggcgcgatattttatcgtctgcggatgtggcggatgtcatggtggatgatgccgcattaatgatggcttcagcggggattccgggaggtgtgagatatgtcccagccggttggtga

SEQ ID NO: 9113 - DNA, 189 bp, Escherichia coli
atgaagatagagcaggaagtgctcaccacctggcctgccgatgccattgcccgggcggaagacgtggtgttgtgcctgtccgggatgatcgaagctgttcgtccggatactgatattactgaagtggcgaaaaataacacgctgactgatgatgatttttctgcgggaaagtcttcgacggcgagctga

SEQ ID NO: 9114 - DNA, 396 bp, Escherichia coli; identical to SEQ ID NO: 5305

SEQ ID NO: 9115 - DNA, 174 bp, Escherichia coli
atgcagcgtgtggccgggaaaaaccgttaccccattgatgtggtgaaaatcccgatggcggccccactgaaacaggcgtttgatgagaatgttgaccgtatccggcgtgaacgcctgcctaaagaactggcatccgcgctgaaacaacaactgaggattgcaataaaacgatga

SEQ ID NO: 9116 - DNA, 333 bp, Escherichia coli
atggcgttgtggcggagaagacgcccggaaagcgtcattgttcatacggaccgtggtggtcaatactgttcaggggattatcaggcgctgctgaagcgacacaacctgcgtggcagtatgagtgcgaaaggctactgttatgacaatgcctgtgtggaaagcttctttcattcgctgaaggtggaatatatccacggggaacgctttagcagccgggaaataatgcgggcaacggtgtttaattatatcgagtgtgattacaatcgctggcgtcgtcacagtgcctgtggcggtctcagcccggaacaatttgaaaaccataatctcgcttag

SEQ ID NO: 9117 - DNA, 1485 bp, Escherichia coli
atgcgaaaaataattactcatttcaaagttgttttaacgttacttctaccagtaaccgtatctgcccagcagatacagtggcaatcctgtatggccagtcaattcaaccactggtttggtgaggaaaaaccgtctcctgacttactatgtggttatttgtctgttccattaaaatatacagacacaggcggagatgcttcttatgaaaaaaaatcacaagtcaaactagcgttgacaaaattgccggcaaaaagcaagcataaaggaagtatcctgataataagtggtggtcccgggttaccaggcataaatccttatattaactttgactggccagtcacaaatcttcgtgagtcatgggatattattggatttgatcctcgaggcgtcggacagtccactccgacaataaactgccggcaatcagatacagagactcaggaaaacataaccgaaaagcaacaagtattaaataaaattaatgcctgtatccataataccggagccgaagtcattcgccatatcggctctaacgaggctgtatacgatattgatcgtattaggcaagccttgggggataaacaactgacagccgtggcgtattcgtatggaactcaaattgcagccttatatgcagaacgttttccctacaacgtaagatctatcgttcttgatggagtcgtcgatatcgatgacctggaggacaacttcacatggcaactcaaacaggcacagagttatcaggaaacgtttgatcgctttgcatcctggtgtgcgcgtacaaaaagttgcccgctttcttcagacagagataaggcaataactcagttccatgagctattatcaaaattacatcacaaacctttattagacagtaagggagaaaatatatcttcagatgaactcatatcattaacaacagaccttctgctatggcgttcatcatggccaacccttgcaactgccatacgccagttctctcaggggattgtcagtaatgaaattgaaactgcgctcagtgctccgatagcctcagaagagtcaagcgatgcttcgggggtaatcctttgtgtagatcagggggatgagcaattaacaccagaagagcgaaaatcccgaaaagacgctcttgcgaatgccttcccggctattaactttgacaatggacgttccgattcacctgatttttgtgaattatggccaatacatagcgacctgaacaaaactcgcctgaaaaatactgttctgccctctggtttactgtttgtagcacacaaatacgacccaacaacgccctggattaatgcccgtaagatggcagagaaattttccagcccgttactaacaataaatggtgatgggcatacattagctctcaccggagttaatttatgtgtagataaagcagttgtacatcacctgatcactccacaaaaaatagaaaatatatactgcccaggaaattctgaagcagaaatacaataa

SEQ ID NO: 9118 - DNA, 477 bp, Escherichia coli; identical to SEQ ID NO: 9109

SEQ ID NO: 9119 - DNA, 213 bp, Escherichia coli
atgctgaacacatgtaggttagcctcttacgtgccgaaaggcaaggagaagcaggctatgaagcagcaaaaggcgatgttaatcgccctgatcgtcatctgtttaaccgtcatagtgacggcactggtaacgaggaaagacctctgcgaggtacgaatccgaaccggccagacggaggtcgctgtcttcacagcttacgaacctgaggagtaa

SEQ ID NO: 9120 - DNA, 1245 bp, Escherichia coli
atgataaagaaaaaaggatttaccttactggaagtgacgattgtgttaggtattggaacgcttatcgcttttatgaagtttcaggatatgagaaacgatcaggaagcggtattggctgataatgtcggaacacagattaaacagcttggtgaagcggttaaccgctatatcagtattcgttatgacaagatttccacactgtcatcatccaacaatcaaagtagcgatccggggccaagaacctgttcggctgctggttgtgaaatcacttaccagacattaattaatgaaggtctgttacctgtaggctatacaggaacgaacgcgcaaaaagcatcctacaagattgtgttaaagcgttcaggaacagcgcctgattatgtcattaatggccttataacaaccgccagcccgtgggaggaaggtggtcgtattcgttatgacctgttaggaaaagcggttcaggcggcaggtgttgatggtgggatgagcagaaacaccaagatagcgtccggctatggtggtcagtggagtgagaactctaatagctacagcaatatcacggggggtgggttactggcttaccgcgtggggtataactcttcaatgtattctgtttatctgcgtcgtgatgggacgttgccgatgacgggcgatctgaatcttggtgggaagagcatcaaaaacatcaaagatatgacggcatcagggacaacaacaaccggagcacttaagacaacgggtaatgcgtctgttgcatcagatctgagtgtgggtggaacatctacccttaatggtcctgtaaatatcaacaacaacctgaaagtaaaatccgacacctatctgaacacgctatcaacaacaggtctggcgaagtttggtagtcgtatcgcgacgaatggacttaatccaaacgatctgcctgctgggtgggctggtggtgttcgcacctatgatttgtatgcgtcagggactgttggtgtaggaacaggtaaaacagttaaagcttacatgaacaatgcgggtaatatttatgcgtcaggtaatcttactgctggaacgataaaatccaatggaacaattgaatcaacaggcagaatcaaagcaggtgaatatctccatttgaatggtcaggcaacattaaatgcgaaatgtacgcctaatggtctggtggggcgagacagtacaggtcgagtgttatcgtgtgtcagtggtaaatggcagacagcagacagcaagcggtga

SEQ ID NO: 9121 - DNA, 369 bp, Escherichia coli
atggccggtaagttaatgagagccactgtagtattttgtctgggggttgtcctcagtctgtttggttttgagtcaggcattcatcatcaatcagccagtgcagtaaatgcaattaatggcgtcatgatatttggtgtggctggtatggcgttaataggtatctatttctctgtaaaaatgaaattagataaagcatctcacgccgaaataactaaagaattagagcgtctgaaaaaaggtggcagaaaagaagatgctacaccggaaattcgtaagcttgttaagcaactgactggttatgaatatgaccagtgcttcggtaataacaatgttggctttaaatttgaaaacaaagcaggggcattctag

SEQ ID NO: 9122 - DNA, 1491 bp, Escherichia coli
gtgtatgacccgacggtacagtttgaattctggttctcagaaaaacgcatcacgaacacggcacaggtggaaaaatctgcccgttatctggggaccggcagtcagtggactgtccaggggagccggattaagccggggacggatttctggttttacgtgcgaagcgtcaacctggtgggaaaatctgcttttgtggaagccagcgggcagcccagcaatgatggtgaagggtatctggaaattttccgggggctgatagatgagacgcttctgggccaggcactgaaagagcgcattgatgcttcagcgctgcgtacggaggtcacgcaactggaagaagacatccgtcagcggatggacacggatatcgcagaagtgacccggaaaatcggggaggcggaaaacagcctcacgcagctggttgcgaaaaagaatgaggaccagacactggccatcgcgcaggtgagccagaaagtggaccgggtgagcagtgaaatctcacagactgtcagccaggggcagtcagaaaatgcccgacagatagcacaggtccgccagtacgtggataaaaaagggagtgaaattacctcgaccacggataaaaaactgggtgaccaggccgtgaccatacagcaaatccagcgggttcagtcagacacgcgcaatgagctgaatgccatgtatatgctgaaggtgcagaaaacaaaaaacggtattccctatgtggccgggattggtgcggggattgaggatgttgatggtcagacgctgagcagtattctgctgcaggctgaccgtatcgcgatgattaccccggagaatggcaacaccacgccgctgtttgtggcgcaggggaatcagctgttcatgaacgacgtgttcctgaagcgactgtttgcggtgagcatcacgtcatccggcaatcctccgacgttttccctgacgccggatggcaggctgacagcccgcaatgcggatatcagtggagccatcacggcgaataccggcacgctcaataatgtcaccattaacgagaactgtgtcatcagagggaaactgtctgcaaaccagattgaaggcgatctcgttaaaacagtgggtaaggctttccctcgtgactcccgtgcaccgaagcgttggccatcaggaaccattaccgtcagggtttatgacgatcagccgtttaaccggcagattgttattccggcggtggctttcagcggtgccagacatgagcgggagaacagcgatacttattcgtcatgccgcctgatagtgaagaaaaacggtgctgaaatttataaccgtaccgcgatggataatacgctggtttacagtggtgttattgatatgcctgctggtcgcggccacatgacgctggagttttctgtatcagcatggtgggtaaatggctggtatcccacagcaagtatcagcgatttgctggttgttgtgatgaagaaagccactgcaggcatcacgattagctga

SEQ ID NO: 9123 - DNA, 519 bp, Escherichia coli
gtggcagaacgacctgaccagctgtgggtggctgattttacttacgtcagcacatggcggggcttcgtctatgtggcgttcatcattgatgtgtttgccggatacatcgtggggtggcgggtctcatcgtccatggaaacgacattcgtgctggatgcactggagcaggcgttatgggcccgtcgaccgtccggcacggtccatcacagtgataaaggttctcagtatgtatcgctggcctacacacagcggcttaaggaagccggattactggcatcaacaggaagtacaggcgactcgtatgacaacgcgatggcggagagcatcaatggtctttacaaagcggaggtaatacaccgtaagagctggaaaaaccgtgcagaagtggaactggccacactcacgtgggtggactggtataacaatcgacgattgctggaaaggctgggccatactcctccggcagaagcagaaaaagcttattatgcttccatcggaaacgatgatctggcagcctga

SEQ ID NO: 9124 - DNA, 1011 bp, Escherichia coli
atgaaaaaatggttcccagctttgttattttccttgtgtgtgtctggtgagtcctctgcatggaataatattgtcttttactcccttggagacgttaactcttatcagggagggaatgtggtgattactcaaaggccacaatttataacttcgtggcgcccgggcattgctacggtaacctggaatcagtgtaatggtcctgggtttgctgatggttcctgggcttactacagggagtatattgcgtgggtagtattccccaaaaaggttatgacccaaaatggatatcccttatttattgaggttcataataaaggtagctggagtgaggagaatactggtgacaatgacagctatttttttctcaaggggtataagtgggatgagcgggcctttgatgcaggtaatttgtgtcagaaaccaggagaaacaactcgtctgactgagaaatttgacgatattatttttaaagtcgccttacctgcagatcttcctttaggggattattctgttaaaattccatacacttccggcatgcagcgtcatttcgcgagttacttgggggcccgttttaaaatcccatacaatgtggccaaaaccctcccaagagagaatgaaatgttattcttatttaagaatatcggcggatgccgtccttctgcacagtctctggaaataaagcatggtgatctgtctattaatagcgctaataatcattatgcggctcagactctttctgtgtcttgcgatgtgcctgcaaatattcgttttatgctgttaagaaatacaactccgacatacagccatggtaagaaattttcggttggtctggggcatggctgggactccattgtttcagttaacggggtggacacaggagagacaacgatgagatggtacaaagcaggtacacaaaacctgaccatcggcagtcgcctctatggtgaatcttcaaagatacaaccaggagtactatctggttcagcaacgctgctcatgatattgccataa

SEQ ID NO: 9125 - DNA, 1506 bp, Escherichia coli
  misc_feature (457)..(466): n is a, c, g, or t
atggcgatttttcatctggattttaaaattgtgaaacgaagcgaaggcatgacttccgttgcgaaagctgcctaccatgcccgtacacgtattacagatgatcgcattggcgaaacatttgatttcagccacagaacagatcttcatggtcatattttattagcccctgtttcagcacctgctcacattgttgaaagttcctcagcactctggaatgaagttgaaagagtggaacgccagaacaacggtcaaacagcccgttattttgatgttgctatacctgtagaactcaacaacgatgataagaaaaaattggttgccgaatactgtcagaagaactttgttgataaaggaatgattgctgatatcgcatttcatgacttggatagtaagaatccccatgctcacgtcatgttaaccctgaaaaccattggtccagacggcttcggtaaaaaannnnnnnnnngctggaatgataagaagataatgatccaatggcgtgaatcatgggccaccatgtcaaacagctaccttgaagccgcaggcagtgaagaacgtatcgatcaccgttctctcaggacacaatgtgctgatgcccttgctcaagcagaggaagcattcagcgctgaagagaaagcattctggcttgccaaagcaacagaaacaaaccgcccggcaatgcaacgtgttcatcgtgctaaatggaatgacaccgagtcacaggaacaacgagctgccgaacaagctcaacgtgatcagcaaatagaggaagcgaagaaggtctatacgacattcagtgagctaccactggagatcgtggttgatgtcagaagctttacgattacacatcttgctgaacccgaagagatcattatccctgactacccagcaacagtagaaccgcaaccggctatggcgacacctaccacaagcagaagaccagcagcaaaatcttaccgtaatcccaataaggtcagtaaagtaaatgtttcagggaagaaatcccctgttctggttgttcctgaaccaaaagcatccactaaattgaaaaccccatctcttcaaaacaccagagcggtgaaccgtgctcccctacatatcagaaagcagaccaagccacgacaaaatggtttgtttaaacgtttcacactactcatcgtagacttcctgaaagagagatttgtatgggcgagaaggaaaactgataccactgatgctgaccatgataagcgtatcgctgaaaattatgtgtttgatgaagtgctgggtgtcaatgttccacgctcggagtttgaaagacgcgctaagtttaacaataaccaaacatcacaagaagcaggagtctatggtaacgaatcaaatattaacaagactgttcgtttcccaaatcgttttgagcaagaacaaacggaggtcaataaacacatggaatttatactgtctattggtggaaaaccttctatgccaaagttaaaacaaactaacagaaaatctaacatcaaatag

SEQ ID NO: 9126 - DNA, 141 bp, Escherichia coli
atgctgaaaggcgggatttccggtcgcagcgctaaaggaaaacgtatccacacccgtgccattcacagcatcgacaccgatattaagctcaatcgcgcattgtgggtaatgacagaaacgctgctggagaacatgcgctga

SEQ ID NO: 9127 - DNA, 486 bp, Escherichia coli
atgaaaactgtttctcagaacacctgtacactttctgcttccgtagtcacagcttcagagaatgaccagcctcaactggttgccactctcgttcctcatgaacagcgcatcagcttctggccgcagcattttggcctcattccacagtgggtgaccctggaaccccgtgtcttcggctggatggaccatctttgcgaagactactgcggtggtatctggaatctgtacaccctgaacaacggcggggcatttatggcacccgaaccggatgacgatgatgacgagacatgggtactgttcaatgccatgaacggtaaccgtgctgaaatgagcccggaagccgccggcattgctgcctgtctgatgacgtacagtcatcatgcctgtcgcacggagtgttatgccatgacggttcattattaccgtctgcgggactacgccctgcggcatccggaatgcaacgccattatgcgcatcattgactga

SEQ ID NO: 9128 - DNA, 477 bp, Escherichia coli
atgcaacagctttcctttctgccaggagagatgacgcccggcgagcgcagcctcattcagcgggccctgaaaaccctggaccgccatcttcatgaacccggcgtggccttcacctccacccgtgcggcacgggaatggctgattctgaacatggcgggactggagcgtgaagaattccgggtgctgtatctgaacaaccagaataagctgattgccggtgaaaccctcttcaccggcaccatcaaccgcacggaagtccatccccgggaagtgattaaacgcgccctgtaccacaatgccgctgccgtggtactggcgcacaatcacccgtccggtgaagtcacacccagcaaggcagaccgccttatcacggaacgtctggtacaggcactgggcctggtggatatccgggtgccggaccatctgatagtcggtggcagccaggttttctcctttgcggaacacggtctgctttaa

SEQ ID NO: 9129 - DNA, 222 bp, Escherichia coli
atgaaaatcatcacccgtggtgaagccatgcgtattcaccaacaacatccggcatcccgtctttttccgttctgtaccggcaaataccgctggcacggcagcactgaagcgtataccggtcgtgaagtgcaggatattcccggtgtgctggctgtgtttgcagaacgccgtaaagacagttttggcccgtatgtccggctgatgagcgtcaccctgaactga

SEQ ID NO: 9130 - DNA, 693 bp, Escherichia coli
atggacttattgccttttttactggacgcgaacctcagcgcgacaaacccacccgctattccgcactggtggaagcgtcaaccgcttattcccacccttctgtcacaggaactgaaaaactttctgaagcttaatgttaaagagaaaaatattcagattgcagaccaggtgattattgatgaaagtgccggtgaggttgttatcggcgcgaatacccgtatttgccacggtgccgttattcagggtccggtagtgattggcgcaaactgcctgataggtaattatgcgtttattcgtcctggcacaataatcagcaatggcgtaaaaattggttttgccaccgaaattaaaaatgcggttattgaagcggaagcaacgattggtccgcaatgctttattgccgactcggtagttgcaaaccaggcatatttgggcgcacaagtacgaaccagtaatcatcgtctggatgaacagcccgtgtctgttcgaactccagatggaattatcgctaccggatgcgataaattaggttgttatatcgggcagcgttcacgccttggcgtacaagttattattttgcctgggcgaattatttctccgaacacgcaacttggcccgcgcgtgattgtagaacgtaatttacctaccggaacttattcactccgacaagaacttatccgtacaggagattaa

SEQ ID NO: 9131 - DNA, 1014 bp, Escherichia coli
atgtctggaaatataggggcaaatccagctactgacaataacgatacaacattatctggtttattggatcttggtagtggtacaaaagatatatctaatatgcctaaggaatatctttctgtttatcaggatggcagtaatttaagcttgggtaacgacaacaatattgacactgccacagatgttaataccgtcactatttatggctctgtgtctggtgaaattttaggcggatacggcagtgataatattacggtaactaaaaatctgaccggtaatatttctgtcggtgacaatgcggataccttaacggccggatggatttatggtggcagtactgtctctatgggggacggcaatgatactgttaccatcacagatggtgcatataacacgactatttcactgggggcgggagatgatgtatttgatgcaacttctggtgtaatgggggattctgcttatgccactgtcgttaatggtgaagacggcaatgatacctttaaattaggcacaattgccaaaaacctgaccattgatgccggtgccggtgatgatattgttgttctgacaaaagactatgactccacctcctccggtaatcagggctatattaacggcggggaaggcagtgataccctggttctgacaggtaccatttctgtcaatctagcggccggtaaaaatgaaggtattgccggcttcgagaaagtggatatgactgttggtagcgatctgaaagctgacaatgcagctcagttagtcaagttaacggcatcggatgtattgggtataaatgacaattcaacgatttatatttccggtgatgccaatgacaaagttgatttgggggctgacggagcgggaagtctgggtacatttacggcaacggcaacaactgttaaagcaactgcgttagatggtattgagcatacttatacgttatacagcagtgtaagtggcgcaaatgtgtatattgataacaatattattgatgcgaatggtgtaatttaa

SEQ ID NO: 9132 - DNA, 483 bp, Escherichia coli
atgaatataatgattgttacgcacaataaatatcttgagttaggtttgaaaaaattattgagcaggcattctattactattggtgctgatttttttataccagataatcgtgagcatataataaacaataatatttttgtcattctctgtgataaaaaaaacagtatgttaatgaattatatttttaacggttatagattttacttattaccagtagaatcaataagtagcctgtcatcgatttatgaatgtatgtttagtggcaggttgttgtttgggaactctccacataaattaaccatgaatgagatgattatactattctattatgttttccatgggtggaatgtagcaagtattgcttatcagtttggtatgagttcaaagactgtgtatactcatatatataaagcaaagaaaaaaaatggaatatcaggaaaaaatctcaaatataaatgtgcttatgaaaggcttgtctgttaa

SEQ ID NO: 9133 - DNA, 186 bp, Escherichia coli
gtgttcttcggtagcgatcacggcggcgagcgtggagcactgctgtacgggctgatcggcacctgccgtctgaacggtatcgatccggaagcgtatctgcgccatattctgagcgtactgccggaatggccctccaaccgtgttgacgaactcctgccatggaacgtagttctcaccaataaataa

SEQ ID NO: 9134 - DNA, 687 bp, Escherichia coli
atgccgatcatagcaccaatttcccgtgacgaacgacgcctgatgcagaaagccatccataaaacacacgataaaaattatgcccgcagactgactgccatgctgatgctgcaccggggcgaccgtgtcagcgacgttgccagaacgctctgctgcgcccgttcctctgttggacgctggattaactggttcacgcagtcgggtgttgagggactgaaatcattacctgccgggcgtgcccgtcgctggccgtttgagcatatctgcacactgttacgtgagctggtaaaacattctcccggcgactttggctaccagcgttcacgctggagtacagaactgctggcaataaaaatcaatgagataaccggttgccagttaaatgccggaaccgttcgccgctggttgccgtctgcggggattgtgtggcgaagggctgcgccaactctgcgtatccgtgacccgcataaagatgaaaagatggcagcaatccataaagcactggacgaatgctgcgcagagcatccggtcttttatgaagatgaagtggatatccatcttaatcccaaaatcggtgcggactggcaactgcgcggacagcaaaaacgggtggtcacgccgggacaggtaaagccagctatgtgggcggcaacagcaaaagttcggcgctgttcatcagcctgctga

SEQ ID NO: 9135 - DNA, 318 bp, Escherichia coli
atgacgttcccggaactgtatgacgacagccatccgaaagccctggctcgcaatacccagaaaattttccgctgggtagagaaagacacccctgatgcagttgaaaaaattcaggcgttgttaccagcgatcgaaaaggcaatgccacctttgctggtggccagaatgcgcagccacagttcagcttattttcgggagctggtggagacgcgggagcgactggtgagagacgctgatgattttgtcgcagtggcaatcgccggtttcaatcagatgaaccgtggtggcccggcaggaaatgctgtggcagtacattga

SEQ ID NO: 9136 - DNA, 1071 bp, Escherichia coli
atggctaacgcctggctcagattatggcatgacatgccaaatgaccctaagtggcgaacaattgccagggtgtcagggcagccaattgcaacagtgatggcagtgtatatccacctcctggtgagcgcgtcacgaaatgtcacgcgaggtcacattgatgtcacgacagaagatttggcaagtgcgctcgacgtgacagaagaggtaattgattcaattttgcagacgatgcaggggcgggtacttgatggtgatttaatcactggatgggaaaaacgccaggtgctgaaagaggacaacggcaatatttcgcaaaccgcaaaatctccggcagagcgcaagagggcgcagcgagagagggaaagaaagcgggaacaaaatggcgattgtcacggcgagtcacgaaatgtcacgcacatgtcacgacgagtcacgacagataaagatacagataaagatacagatcaagaagatcaaaacactatggtccatggcgtaaaaaacgccacgaaccaggcaggggatgttcagaccgtcactcctggccagcccgcaggcacgacaccggaagccgattcagcgtatgcgctgaaagccgattcgggcgctgtgcagcaggtgatgaccgcaaggccggagcaatcacaccaactgcagcagcctgaagccgattccgccattcagcgggaagccgatcgggtagtcccggaaaacaccgggcagcctgtgggacgagtggattatccggatgtgttcgaacaggtctggcgggaatacccgttgcgtgctggggcaaacccgaagaaatccgctttcagtgcctggaaggccagattacgcgagggggtgccaccagaggccatgctggatggtgtgaggcgttacgcaagatacctggcggctaccgggaaaacgggaacggaatttgttcagcgagcgacgacgttttttggaccggaccggaattttgaaaacccctggttgctcccggtaagcggcacgaacaaccagcgttgtgtgaatcatatttctgaaccggataacgaaattccgccgggcttcagggggtaa

SEQ ID NO: 9137 - DNA, 861 bp, Escherichia coli; identical to SEQ ID NO: 9078

SEQ ID NO: 9138 - DNA, 207 bp, Escherichia coli
atggttacagtcgctgaactgcaggcgctgcgtcaggcgcgccttgatttattaaccggtaaacgggtggtgtctgtccagaaagatggacgaagaattgaatatacggcggcctctctggatgagcttaaccgtgcgatcaatgatgctgagtcggtactggggacaacccgccgtcgccgtcgtccgctgggagtgaggttatga

SEQ ID NO: 9139 - DNA, 411 bp, Escherichia coli; identical to SEQ ID NO: 5075

SEQ ID NO: 9140 - DNA, 324 bp, Escherichia coli
atgactgtacgtcatcagacaggcagcaatgccggcggcttccgggctcatttcagcacggttaccgttcatggcattgaacagtacccatgtctcgtcatcatcgtcatccggttcgggtgccataaatgccccgccgttgttcagggtgtacagattccagataccaccgcagtagtcttcgcaaagatggtccatccagccgaagacacggggttccagggtcacccactgtggaatgaggccaaaatgctgcggccagaagctgatgcgctgttcatgaggaacgagagtggcaaccagttgaggctggtcattctctga

SEQ ID NO: 9141 - DNA, 819 bp, Escherichia coli
atgcaattagccagtcgttttggtcatgtaaatcagatacgccgtgatcgtcccttaactcgtgaagaactgatgcaggtcgtccccagcgtattcggggaagataagcacacatccagaagcgagaactatacctggatccccaccatcacagtgctggaaagcctgcagcgggaaggttttcagccattcttcgcctgccagacccgtgtgcgcgacccgggccgccggggatacaccaaacacatgctgcgtctgcgccgtgacggggagataaacggacaacatgtccctgaaatcatcctgctgaactcccatgacggtacctccagctaccagatgctgccgggttacttcaggttcgtctgccagaacggatgcgtctgtggtcagtctctgggggaagtgcgtgttccacaccggggaaatgtagtggagaaagttatcgaaggggcttacgaggtggtgggggtttttgaccggattgaagaaaagcgtgacgccatgcagtcgctggtcctgccgccactggcacgccaggcgctggcacaggcggcactgacttaccgttatggtgacgaacatcagcccgtcaccaccgccgacattctgacgccgcgacgccgggaggattacggtaaggacctgtggagcgcatatcagaccatccaggagaatatgctgaaaggcgggatttccggtcgcagcgctaaaggaaaacgtatccacacccgtgccattcacagcatcgacacggacattaagctcaatcgcgcattgtgggtaatgacagaaacgctgctggagaacatgcgctga

SEQ ID NO: 9142 - DNA, 324 bp, Escherichia coli
atgactgtacgtcatcagacaggcagcaatgccggcggcttccgggctcatttcagcgcggttaccgttcatggcattgaacagtacccatgtctcgtcatcatcgtcatccggttcgggtgccataaatgccccgccgttgttcagggtgtacagattccagataccaccgcagtagtcttcgcaaagatggtccatccagccgaagacacggggttccagggtcacccactgtggaatgaggccaaaatgctgcggccagaagctgatgcgctgttcatgaggaacgagagtggcaaccagttgaggctggtcattctctga

SEQ ID NO: 9143 - DNA, 354 bp, Escherichia coli
atgcgtgattttcagaatgcctttgatgctgcccttgccggggtggacagcacgattgttgaagtgatggggctctgtgcgcagttcacctccggagcacaacgtggcggcgaagttcagggggtttttgacgatccggagtcgctgggttttgccggtggcggggtccgtattgaaggaagcagcccgtcattatttgtgcggacggatacggtgcgtgccgtgcggcgtggtgacacgctgaccattaacggcgagatgttctgggtggatcgtgtttctccggatgacgggggcagctgttatctctggctcaaccgtgggcaaccacccgctgttaaccggcgacgataa

SEQ ID NO: 9144 - DNA, 336 bp, Escherichia coli
gtgaaagacctgggcgcagtggtgtccttcaaggggtattacggcgatctggccattgtggtggcgaaaacgtcttatgtggcagaggacggtaccgaaaaacgttatctgccggagggcacactggtcctggggaatacggcagcagagggcattcgttgctatggtgccattcaggatgcgcaggcgttgtccgaaggtgtggtggcctcttcccgttatccgaaacactggctgactgtgggcgatccggcccgtgaattcaccatgacgcagtccgcaccgctgatggtgctgctggatccggatgagtttgtggtggtacaggtgaaataa

SEQ ID NO: 9145 - DNA, 603 bp, Escherichia coli
atgcaacagctcggcctgaagtctcctgtgcgcctgaagaaataccggtcttaccggggaaatatgggactcgctgcagaaaatatccttcagcgacagttcaaagcggaagctccctgtgagaaatgggtgacagatatcaccgaattcagggctggcggacaaaaactgtacctgtccccgatacttgatttgttttacggggaaatcgtggcgtgggaaacggcctgcaggcctacagaggagctggtgaagcggatgttaaataagggtctggaaagccttgctgaaggggagaaaccgctgctccacagtgatcaaggatggcattaccggataaaaagttatcagtccgccctggcggacagagggttagtgcagagcatgtcgcgcaagggcaacagccttgataatgcggtaatggagaacttctttggtcacctgaaagaagaaatgtactatcgccgggactacagaaatgtagaagagctggaaaatgccgttaacgaatacataacttactggaatcaaaaaagaataaaactcagtcttgggggactcagcccggtagaataccggactgagtatcaaaaagccggttaa

SEQ ID NO: 9146 - DNA, 747 bp, Escherichia coli
atgaaaaaggttattgttgtttcagcgcttgctatggcgggcgtattttcagcccaggctctggctgataggggtaaaacaggcttttatgtgaccggtaaagctggtgcttcggttgtgactcagactgaccagcgcttccgtcaggactttggggatgatgtttataagtataagggcggtgataaaaacgatactgtatttggtgcaggccttgcggtgggctatgatttttatcaacattacaatgttcctgtgcgcacggaagtggaattctatggccgcggagctgcagactcccattatacactggatacatggcattctccgatgggggatggtggtcgggaagacacacagaacaggctcagtgtgaataccctgatggtgaatacgtattatgacttcagaaacagcagtgcattcactccatgggtgtctgttggactgggttatgcacggatacatcataaggcaacatatactgatacctcctggaataaatctggtgaggtgagcgatatttctgcgttgcattactcgggatatgataacaatttcgcatggagcattggggccggtgttcgctatgacataaccccggatatcgctcttgacctcagctatcgctatctggatgctggtaaatcctccctgtcttacaaggatgcagaaggggataaatataaatcagaggctgacgttaaaagtcatgacatcatgtttggtgtgacttataacttctga

SEQ ID NO: 9147 - DNA, 201 bp, Escherichia coli
atgctgcaaggacatatcagcgaaattacgttaagttatgtttatccggatacacaccagcgaatgcgcatttcaaatatatctttgatggcgtatatgaattcattcgtaatattcgcaaaaacagtacaccaggaaaaacaaaacttaccgcaactatcaacacatgcaaagaaacctgtaaacatctgctttatttaa

SEQ ID NO: 9148 - DNA, 165 bp, Escherichia coli
atgtatttgttcagtgtattcattacatctattgggttggttaaatataataactggcattcatattctgaaacttctctttcgcttatcagcattttatataaagttgccagggcgcttgttaatgaagttcgtctttcgaaagccagtaatatagtgagataa

SEQ ID NO: 9149 - DNA, 1005 bp, Escherichia coli
atgaaaaaatggttccctgcttttttatttttatccctgtcaggctgtaatgatgctttggctatccagagtacaatgttttactcgtttaatgataacatttatcgtcctcgacttagtgttaaagtaaccgatgttattcaaattatagtggatataaactctgcatcaagtacggcaactttaagctatgtggactgcaatggatttacatggtctcatggtatttactggtctgagtattttgcatggctggttgttcctaaacgtgtttcctataatggatatgatatatatcttgaacttcagtccagaggaagtttttcacttgatgcagaagataatgataattactatcttaccaagggatttgcatgggatgaagcaaacacatctggacggacatgtttcaatatcggagaaaaaagaagtctggcatggtcatttggtggtgttaccctgaacgccagatttcctgttgaccttcctaagggggattatacgtttccagtcaagttcttacgtggcattcagcgtaataattatgattatattggtggacgctacaaaattccttcctcgttaatgaaaacatttccttttaatggtacattgaatttctcaattaagaataccggaggatgccgtccttctgcacagtctctggaaataaatcatggtgatctgtcgattaatagcgctaataatcattatgcggctcagactctttctgtgtcttgcgatgtgcctacaaatattcgttttttcctgttaagcaatacagctccggcatacagccatggtcagcaattttcggttggtctgggtcatggctgggactccattgtttcggttaatggcgtggacaaaggagagacaacgatgagatggtacagagcaggtacacaaaacctgaccatcggcagtcgcctctatggtgaatcttcaaagatacaaccaggagtactatctggttcagcaacgctgctcatgatattgccataa

SEQ ID NO: 9150 - DNA, 489 bp, Escherichia coli
atggcgaagcccttctgcacccacgctgaaatccacggtctgcgtttccagcagttctgttttaatcagccacagcccggcgcggtgtgcctgcccccgactggtacagccaaaggcatccatcttcgtgacgttacgaccgtaacgggcaatggcctgcgtgtcctccacaagctctgtcgtcgtctcccagccgttatccgggtcaatccagttcacctcaacggcattatggcggtccttcagggcgctgaagctgtagcggaacggcgcgccatcatccggcatcaccacattactgcggttataggtccacaccttatccgacggtcggtcctgcacgaacgtcagcgtctgcccgttccataccggcatacagcgcatcgccgagcagaaatcgctgagaacatcccacgccttacgctgtgtggtcagccaggcattacaggtgatgcgcggctccgtgccgccaaagccgtccggcactga

SEQ ID NO: 9151 - DNA, 405 bp, Escherichia coli
atgagtgaagctcttaaggcactgaacaatattcgtacacttcgcgcacaggctcgtgaaacagatctggcaactctggaagagatgctggaaaaactcaccacaatcgttgaagatcgccgtgaggaagaaaattcagcccgtaaagaacaagaagaacgtcaggctaaactggaagccttccgccagaaattgttagaagacggtatcgatcctacagaactactcgcttcagttggttcatcccagcctaaaaccaaatcaactcgtgctcctcgtcctgctaaatacaaatatacagatgaaaacggtaatgagcagacttggacgggtcagggccgtactcctaaagcaatcgccgctgctatcgaagctggtaagacactggaagactttgctatctaa

SEQ ID NO: 9152 - DNA, 351 bp, Escherichia coli
atgggctttgaagctaaaaagaaacacgctattgccatcatggaaagcaagaggatgtggcgaagtaattatgcccctcctttgctacacctcgcatggaaagctggactcaagataccaccgctaccttttgcctcattctggcaaatcactttgttgatgggtggatggtttggtccggcatgggggatctgtatgtggttttttacttggaaggatacagggatacaaccgggcactgcatttgtctcaagcgtcgtcgcaggtatttgttttggtgttcttatggctgcgtatcattggtggcgaaaggtcgttaacaacctgccagactgggatagtcttggatga

SEQ ID NO: 9153 - DNA, 744 bp, Escherichia coli
atgcgggatctaatcagagcccgtgcagcagctaaacgagacagcagagttgcccgacagcgaattctgagcatgctattgcgaacagacaaacattatgcaggaaagcactggacaggaaaacatcgaacctggttagctaatcaatcatttagtcagccatctcaacagattgcttttcaacactattgtcaaagtctggagcagattgaagatcgcatacttcaactcgaccaggaaatatctcgcctgttacctgagtggtctctgtgcaatctggtctgccagttgcaggctcttaaaggtgttggtcagctaattgcaataactctggttgctgaactgggtgatttttcgcgattttccaatcccaaacagctcatggcttttctgggactggtgccaggtgaatattccagtggaaacagtattcgtcccagaggaataacaaaagttggaaacagcgaactgagacgtctgctttacgaagccgcctggtcttatcgtacacctgcaaaagttggggcatggcttatatattaccgaccggactctgtaacacaatattccaaagatattgcatggaaagctcaacaacgattgtgttctcgttaccgaagtctgacagcaaaagggaaaaaatcacaagtagccattacggcggtggctcgtgagttgactggatttatgtgggatattgcacttgctgcccaatcatcattcagtcagcagaagcaaaattaa

SEQ ID NO: 9154 - DNA, 885 bp, Escherichia coli
ttgctatccatccagaacacgatagccaataccgatcccttctttcttcttcgcttcttccaccatactgttctgattgaagaaggaacatcgctggcaagtatctttctggcaatagaactgtggaaggcactgttagcagcttatctggacagagatgttggtgcttatatagatgaggtaagaaaaccgtccgggccaacgacatgggatattgaatggattgggattgaccgtcgtagctcggtttatcgcgcttacaagcgtcaggatatggaagaaggggaagatttttcgacctattttaatcgtgagcggttcccgactgatgagtttgacatagaaagtagctgcgatgcttcaggtttcattaaaggtgataaagaacgctggagtatcagcggtgatgttcacgaaattaaaaatcttcctgtaatcctctatagcaaacaggcgttgatgacgtcggcaaaggacggcctgttgaagaagaatgtatcaggggtgaagagttccaagcatggctgctttgtttatggcgatacctcgttttctttcagtgaggtaatggaagctatcttcatcagtgggctgttcttctatgcgccaatagacgccgccagtagtcttgatgaactgaaagtgagtttggctgggctggaagaagaactggccgaagtaccaaaagtggattcgaatggcaatgaaacagataaagaacctactatagtcgtagccgaaggtgcttttgattcggtcgctgctcacatggaaacagaagctgaggagtggcaatctattaagaacctgtgccaacgagaaggtgagctgcccatacgtattggtggtattaaaatggctgagccaccagagtttcatttttag

SEQ ID NO: 9155 - DNA, 177 bp, Escherichia coli; identical to SEQ ID NO: 4925

SEQ ID NO: 9156 - DNA, 201 bp, Escherichia coli
atgctgatggcggggattcagttcaccgatggtgagcatgagttccagttgtttcatcagcagtggaaaagcctggtccagatggtatgcatccgcattgctgaactgccccctgataccggcgcggtcggcaaggtaatgcaactgattgccctcctgcaccagacgggcgccgaaacagggcgtcacggtgcagggtag

SEQ ID NO: 9157 - DNA, 444 bp, Escherichia coli
atggaagagccgtgcatctggttcagcggattctgcagccagggggacggagcctgttttgaagggcactggcactggcagccagcgacaccccggaaaatcagggaatatgcccctcaggaccgtgagcttcatcgtatcgcggataccctgcatgcggtgcagaaacgtaacttctggcagcttcaggctgaaatcagtcaccggggacgttactgccatccgtacagcatggatatcaccgtcacccggaacagtccgactggtcaggcaatgacaaccgatgcggaagccgctgtcagcgaagccctgcgcgacctggccttctggctgtaccgccagctggaaaacaagtacgactggctgacctcagacaccgctgtggatgaggcccttctcatcaacgaatataccttcaccgaagccgatctgcgcgccggctga

SEQ ID NO: 9158 - DNA, 144 bp, Escherichia coli
atgagcagaattatcaccaccaccgtgtatacactgcatgagctatcctccaccgcacaggaaaaagcccgcgactggtaccgtcagcatcatgctgacagcaactggtatgaaaacgtgtatgaggacttcagggaggtctga

SEQ ID NO: 9159 - DNA, 756 bp, Escherichia coli
atggggtttattacggataatttttatcagacaaaactcggtcgtcgctttggtcgtcgtcgcttcttcatattaattgccattccatgtatgattatctatccattgctttgggtaaatggtatgagtttttggtattatctttctacttatatcatttttgaagtggtatatactatgattatgataccgtataataccttacctgttgaaatgacaaaggatttcaatcaaaggacctatttgacaggttctaaagctatgtttggtaaagtagctaatttcttagcagccgctattcctggtatctatttttacttcttcaataaagattcagccaccccatttttcctgaccggtttaacttatgctattattatgatcacttcattaataatgctctatttcaacagttgggaacgtccaactgatgatgtagttgatgaatcaacgcatggttttatggagggctttaataaactttttaccgatcttttctcaacctttaagctaaaaaccttcagaacccatcttggtatgtatctatttggtttcggcgctgaatggctatttacagcgacatttacctatttcattgttttcaaccttgaacaaccgagaacatttgtttctgagatgaactcattaagcagtatttgtcagttcttctctacagcattctttatgatgtggtgtgccaaacgaggatttaaacgagtatgggagggtgatgtgttagatataaagaagatataa

SEQ ID NO: 9160 - DNA, 336 bp, Escherichia coli
gtgaaagatctgggcgcagtggtgtccttcaaggggtattacggcgatctggccattgtggtggcgaaaacgtcttatgtggcagaggacggtaccgaaaaacgttatctgccggagggcacactggtcctggggaatacggcagcagagggcattcgttgctatggtgccattcaggatgcgcaggcgttgtccgaaggtgtggtggcctcttcccgttatccgaaacactggctgactgtgggcgatccggcccgtgaattcaccatgacgcagtccgcaccgctgatggtgttgccggacccggatgagtttgtggtggtacaggtgaaataa

SEQ ID NO: 9161 - DNA, 309 bp, Escherichia coli
gtgatcagccgctggcgcatcgagcagtgcagcgaactgagtgcggtcagtgcctcctttgtactgtccacaccgacggaaacggatggtgccgtttttccggggcgcatcatgctggctaatacctgcacctggacctatcgcggtgatgagtgcggttatcacggtccggcggtcgcggatgaatatgatcagccgacttccgatatcacgaaggataaatgcagcaaatgcctgagcggctgtaagtttcgcaataacgtcggcaactttggcggcttcctttccattaacaaactttcgcagtaa

SEQ ID NO: 9162 - DNA, 816 bp, Escherichia coli
atgcagggcgtacacaataatgccggtcggggccacgaaaatggctcggttgaaagtgcccacggacatctgaaaaggcgtatctgtcaggcgctgatactgcggggcagtaacgacttcagcaccatagaagaatatcaggccttcatcactcagcaggttatgcggcacaaccgtaacaatcaggatctggtcaaggaagaacgtcttcatctgaaaccgctgccgcttcgtcgcagtgctgactatgatgagctgactgtgagggttagccgcagcagtaccatcaatgtgaagcacgtcgtctacagcgtaccttcccggcttgtaggtcaactgttacgggtccggttatgggacgatcgtctgagctgttacgttggcagcagcgaggtcatgagctgcccacgtgtcagaccagaaaaagggaagacgcgggcccgtcgtatcgacttccgacatgtgatcgacagtctggcaaaaaagcccggtgcgttctgccatgcaacgctgagaaatgacatcctgccagacgatgaatggcggaggctgtggcgtcgcttatgtaatcatctggaacccgacatggcaggcaggctgatggtacatgctctgaaactggctgcaggatacgacgatatctcagtcgtggcaaaaggtatggagcagatgctgaataccccgggaaacgtggatctgcaccggctgatgcgcttcctgggtataaaggaaaaggcgttgccggtagtcaatgtgaaacagcataacctgagcagttatgagcaactactgcgtggcaagggaggttcgcagtga

SEQ ID NO: 9163 - DNA, 654 bp, Escherichia coli
atgtacagggatgatgtacatttttaccgcaagggtaaacccaattactgggttcctaaccttaatctgaaaccagaaaataacatcacccgtgagattggcgcaggtattcaactggatggcctgcttacagacaatgaccggctgcagttaaaaggcggatatttcggaacggatgccagaaactatattgccacgcgcgtggatatgaaacggatgcgttcttattcttataatgtatcccgggcccgtatctggggatgggatatgcagggtaattaccagtctgattattttgactggatgctttcttataaccgcacggaaagtatggatgccagcagcagggaatggctgggctccggcaatcctgacacacttatcagtgacatcagcatacctgttggtcatagaggcgtttatgccggatggcgtgctgaactttcagcatcagccacgcatgtgaaaaaaggcgatccccatcaggctggttataccatacattccttttcactgtcttataagcctgtaagtgttaaaggctttgaggcgtcagtaactctggataatgccttcaacaagcttgccatgaatggcaaaggtgtgccgctttcaggcagaactgtcagtctttatacccgttatcagtggtaa

SEQ ID NO: 9164 - DNA, 537 bp, Escherichia coli
atgataaaaagcacaggcgctcttttactgtttgccgcactgtctgccgggcaggcaatggcctcagatgtggcattcaggggtaatctgcttgacagaccctgccatgtgtccggtgacagtctgaataaacatgtcgtcttcaaaacccgggcgtccagggatttctggtatccgcccggacgttcgccgacagagtcgtttgtcatcaggctggaaaactgccatgcaacagcagttggcaaaattgtgaccctgacctttaagggaacggaagaggcggccctcccgggccatctgaaggtaaccggagtgaatgccggccggttaggcattgcactgctggacaccgatggcagcagtctgctgaaacccggcgcttcccataataaaggccagggggaaaaggttaccggaaacagtcttgagcttcctttcggcgcgtatgttgtggcaacgccggaagccctgcggacgaagagtgtggtacccggtgattatgaagcaacagccacgtttgaattaacatatcgttag

SEQ ID NO: 9165 - DNA, 300 bp, Escherichia coli
atgacaaaaccagtatcaatcagcaagaagccccgtaaacaacatacgcctgaatttcgtaacgaagccctgaaactcgctgaacgcatcggtgtggccgccgcagcccgtgaactcagcctgtatgaatctcagctttatgcctggcgcagtaaacagcagcaacaaatgagttcgtcagagcgcgaaagcgaactggccgctgaaaatgtccgccttaaacgacaactggcggagcaggctgaggaactggccatcctccaaaaggccgcgacatccttcgcgaagcgcctgaaatga

SEQ ID NO: 9166 - DNA, 330 bp, Escherichia coli
atgaaaacctttcgctggaaagtgaagccggatatggaggtgaactcgcagccatcggtgcgtgaagtgcgttttggtgacgggtactcacagcgtatggcggcagggctgaatgctgacctgaaaacatacagggtgacgctttccgtgacccgggaggaggcccggcatctggaagcgttcctggcagagcacgggggctggaaggcatttttgtggaagccaccctatgcataccggcagataaaggtgacctgtgccgggtggtctgcgcgggtcgggatgttgcgcgttgagttcagcgcggagtttaagcaggtggtgaactga

SEQ ID NO: 9167 - DNA, 273 bp, Escherichia coli
ttgctgaatatacgcgagagcgtactgttgcccggctctatgtctgaaatgcatttttttttactgataggtatttcttctattcacagtgacagggtcattctggctatgaaggactatctggtaggtgggcactcccgtaaggaggtctgcgagaaataccagatgaataatgggtatttcagtacaacgctggggagacttatacggctgaatgctcttgcagcaaggcttgcaccttattatacagatgagtcgtcggcatttgactaa

SEQ ID NO: 9168 - DNA, 294 bp, Escherichia coli
atggatatcacgtcgatacttcatgcgctttgtgccgtggcggtgcaggtactggctggtctttttaccggaaactgggcttacggggcgatagccggttgtacgttcttcattgcgcgtgaacacacccaggcagaatatcgctggattgaaatgttcgggcatggcaagcggattaacatgccgtggtggggcggttttgatccacgtgcatgggatgtggcaagcctgatggattttgctgtgccggtggtggcgtgtctgctggtctggctgttggttaatcgtgggtga

SEQ ID NO: 9169 - DNA, 222 bp, Escherichia coli; identical to SEQ ID NO: 9129

SEQ ID NO: 9170 - DNA, 297 bp, Escherichia coli
gtgctgtatctgaacaaccagaatcagctgattgccggtgaaaccctcttcaccggcaccatcaaccgcacggaagtccatccccgggaagtgattaaacgcgccctgtatcacaatgccgcagctgtggtgctggcacacaatcacccgtccggtgaagtcacacccagtaaggcagacctccttatcacggaacgtctggtacaggcactgggcctggtggatatccgggtgccggaccatctgatagtcggtggcagccaggttttctcctttgcggaacacggtctgctttaa

SEQ ID NO: 9171 - DNA, 759 bp, Escherichia coli; identical to SEQ ID NO: 6176

SEQ ID NO: 9172 - DNA, 264 bp, Escherichia coli
atgggagttgagcagaatgatttcagggacatgttgtccgtttatctccccgtcacggcgcagacgcagcatgtgtttggtgtatccccggcggcccgggtcgcgcacacgggtctggcaggcgaagaatggctgaaaaccttcccgctgcaggctttccagcactgtgatggtggggatccaggtatagttctcgcttctggatgtgtgcttatcttccccgaatacgctggggacgacctgcatcagttcttcacgagttaa

SEQ ID NO: 9173 - DNA, 291 bp, Escherichia coli
atgaagatagaacttattacgataaaagagtttattgaacaagccgaatgttatttcaggaactatatggacggattacggcggaatgcaccagatgatttttattattttctcaacaataaatacaatatgaatgacattatggaaagtatcattaaaaaaacgcgatatcatttttacgatgacacagaagaaggcaaaaggaatcggatttatggagaagtaaaccactgtaaggtaaagcaacaccttcgtcagctttggattgtctataagtgtgtataccgctaa

SEQ ID NO: 9174 - DNA, 297 bp, Escherichia coli
atgaatacatttaaaaataaaaacactgaaatcttttatgttgtgtccttgcatatctatgcggagctttttaactcaaaggataaaacgaccagcaatatgattataacgcatgtaatggatcatgagtttgtttgtaagctaatcgatctggcgatgaggaatgctgagaaacatcttctgaaaaaagcatggaaaaagaacgctgctggaaaactgtctgaagtggattttaaaggggttaagcaggcattagccaaaatgcattatacggttctggcggaatcaatatgttga

SEQ ID NO: 9175 - DNA, 510 bp, Escherichia coli
atgagttatcgtaataagacatatgtggcttttgcaagtgaagatataaagttttatcgtcttatggaggcatggaaagcaaatgaaaaaatagactttaacttttttgatgctcatgatctctttatttcaagggatacaagtaaacctgaaaccataaagcgaaacctccgcgaaaggatgaaaaatgctaaacaagtagtactgttgggaagcggtaatactaagagaaaaggtagcgatggagtatcgtttcttgcccatgaaatagatcttatcgtagaatttaatcttcctgttgtaatagctaatttagacggagatagaacagtcgataagaacttcattcctaaaccacttttagattcagaacattatacagtatctgtctctttccaacctaaaattattaaatatgcattagataattactgtgttaactattactcaagttcaaatagtggtagttatctataccctacatctgtttatactaagctaggtctgtaa

SEQ ID NO: 9176 - DNA, 438 bp, Escherichia coli
atgcgttcttattcttataatgtatcccgggcccgtatctggggatgggatatgcagggaaattaccagtctgattattttgactggatgctttcttataaccgcacggaaagtatggatgccagcagcagggaatggctgggctccggcaatcctgacacacttatcagtgacatcagcatacctgttggtcatagaggcgtttatgccggatggcgtgctgaactttcagcatcagccacgcatgtgaaaaaaggcgatccccatcaggctggttataccatacattccttttcactgtcttataagcctgtaagtgttaaaggctttgaggcgtcagtaactctggataatgccttcaacaagcttgccatgaatggcaaaggtgtgccgctttcaggcagaactgtcagtctttatacccgttatcagtggtaa

SEQ ID NO: 9177 - DNA, 519 bp, Escherichia coli
gtggcagaacgacctgaccagctgtgggtggctgattttacttacgtcagcacatggcagggcttcgtctatgtggcgtttatcattgatgtgtttgctggatacatcgtggggtggcgggtctcatcgtctatggaaacgacattcgtgctggatgcgctggagcaggcgttgtgggcccgtcgaccgtccggcacggtccatcacagtgataaaggttctcagtatgtatcgctggcctacacacagcggcttaaggaagccggattactggcatcaacaggaagtacaggcgactcgtatgacaacgcgatggctgagagcatcaatggtctttacaaagcggaggtaatacaccgtaagagctggaaaaaccgtgcagaagtggaactggccacactaacgtgggtggactggtataacaatcgacgattgctgggaaggctgggccatactcctccggcagaagcagaaaaagcttattatgcttccatcggaaacaatgatctggcagcctga

SEQ ID NO: 9178 - DNA, 237 bp, Escherichia coli
gtgattgagcagcatattgaggcaggcatttcactgtgtgacgcggtgaactttctcgttgaaaaatacgcactggtacgtaccgaccagccgggattcagcgcctgtacccgttctcagttaataaacagtattgatatcctccgggcacgccgggcaaccggcctgatgacccgcgacaactacagaacggtaaatgacattaccctgggtaagcatccggaggcgaaacaatga

SEQ ID NO: 9179 - DNA, 594 bp, Escherichia coli
gtggaaaataagtacaagaaaaaaagtgtagttatagcttatggcggagatcatgccactaatcttagtacaccgatagacaatgatcaaaaaaaagaaggttattatttggggctttgtaggatagagcctgagaataatatagaaatgattctgaatgccttcattaatacagataaaaaaattaaatttatgggtaattgggataacagcgagtatggacgccagctaaaaaaatattattcaaactatccaaatatcaccctactagaacctaactataatattgaagagctttataaactaagaaaaaattgtcttgcatacattcatggacactcggctggtggaacaaacccttctttagttgaagcgatgcattttaatattcctatttttgctttcgattgtgactttaatcgttacacaactaacaatttagctcattactttaatgattctgaacaacttagcttattagcagaaagtttgtcttttggaaatcttaaatgtcgagtattagatttaaaaaattatgctgaagatatgtataactggaggcatatagctgctatgtatgaatctatttattaa

SEQ ID NO: 9180 - DNA, 336 bp, Escherichia coli
gtgaaagatctgggcgcagtggtgtccttcaaggggtattacggcgatctggccattgtggtggcgaaaacgtcttatgtggcagaggacggtaccgaaaaacgttatctgccggagggcacactggtcctggggaatacggcagcagagggcattcgttgctatggtgccattcaggatgcgcaggcgttgtccgaaggtgtggtggcctcttcccgttatccgaaacactggctgactgtgggcgatccggcccgtgaattcaccatgacgcagtccgcaccgctgatggtgctgccggatccggatgagtttgtggtggtacaggtgaaataa

SEQ ID NO: 9181 - DNA, 375 bp, Escherichia coli
gtggccttcacctccacccgtgcggcacgggaatggctgattctgaacatggcgggactggagcgtgaagagttccgggtgctgtatctgaataaccagaatcagctgattgccggtgaaaccctcttcaccggcaccatcaaccgcacggaagtccatccccgggaagtgattaaacgcgccctgtatcacaatgccgcagctgtggtgctggcacacaatcacccgtccggtgaagtcacccccagtaaggcagacctccttatcacggaacgtctggtacaggcactgggcctggtggatatccgggtgccggaccatctgatagtcggtggcagccaggttttctcctttgccgaacatggtctgctttaa

SEQ ID NO: 9182 - DNA, 153 bp, Escherichia coli
atggtttatctatcaaaaaatcagattttagttttgacaaaaagtgatggttatataaacgtatcaaaaaatcaaaatcttcatacccatgaccttgaaagctttcatcaaacccatgtatttttttatagctttctgacttcaaaattgtaa

SEQ ID NO: 9183 - DNA, 270 bp, Escherichia coli; identical to SEQ ID NO: 8342

SEQ ID NO: 9184 - DNA, 246 bp, Escherichia coli; identical to SEQ ID NO: 4533

SEQ ID NO: 9185 - DNA, 324 bp, Escherichia coli
atggatgccagcagcagggaatggctgggctccggcaatcctgacacactcatcagtgacataagtatacctgttggtcatggaggagtttctgccggatggcgtgctgaactttcggcagcagccacgcatgtgaaaaaaggcgatccccatcaggctggctatgccgtacattccttttcactgtcttataagcctgtaagtgttaaaggctttgaggcatcagtgactctggataatgccttcaacaagcttgccatgaatggcaaaggagtgccgctttcaggcagaactgtcagtctttatacccgttatcagtggtaa

SEQ ID NO: 9186 - DNA, 270 bp, Escherichia coli
atgaccggcattctgttttctctcggtgccagtatggtgctcggcggtgtggctcagatgctggcaccgaaagccaggacgcccacggcagccagtacagataacggcaaacagaacacgtatttctcgtcactggataacatggttgcccagggtaatgttctgcctgttctgtacggggaaatgcgcgtggggtcacgtgtggtttctcaggagatcagcacggcagacgaaggggatggtggtcaggttgtggtgattggtcgctga

SEQ ID NO: 9187 - DNA, 237 bp, Escherichia coli
atgccacagggacatcgccaccagaaacgcgccggttctgacgagatcttccacacttacctgcaggttgccgctggattctgcctgttctgcacgccgtttcaggagggcaagatgctcgatacgctgcagcgcagacaattcggaaagcgtgacagacacaccgttatattcaaattgttctgttttcagaaacatgtattacctccgtttaccctgcagcgcccgcttcagtaa

SEQ ID NO: 9188 - DNA, 318 bp, Escherichia coli
gtgggtaaaccttctgtagcggaagaacgcagcaaaattacgccggtcagtgcgattaaggtgacgccgacatccggtacggtggcaaaagggaaaacaaccaccctgacggtttcttttgagccggaaagtgcaaccgacaagacgttcagagcggtttccgccgatccgtcgaaagccaccattagtgtgaaagatatgacaattacggtaaacggcgtggcgacaggtaaggtgcagatccctgtggtgagcggaaatggtcagttcgccgcagtggctgaagtcaccgttactgaagcgggcgctgcagggtaa

SEQ ID NO: 9189 - DNA, 360 bp, Escherichia coli
atgccacagggacatcgccaccagaaacgcgccggttctgacaagatcttccacactcacctgcaggttgccgctggcttcagcctcttctgcccgccgtttcaggagggcaagatgctcaatacgctgcagcgcagacagctcagaaagcgtgacggatacaccgttatattcaaattgttctgttttcaggaacatcgcttatctctcagctctttagccacccggcacattattaacggtaatttcagccaccgcagcaaactgaccattaccggaaatcacagggatgctgacttttccatccttaacccccgtcacagtaatcgtcatatctttcacgctaatggtggcttttga

SEQ ID NO: 9190 - DNA, 312 bp, Escherichia coli
gtgggtaaaccttctgtagcggaagaacgcagcaaaattacgccggtcactgcgattaaggtaacgccgacaggtacggttgaaaaagggaaaacaaccaccctgaccgttactgtggaaccggaaaatgcaacggataagacattcagggcgatttccgccgatccatcaaaagccaccattagcgtgaaagatatgacgattactgtgacgggggttaaggatggaaaagtcagcatccctgtgatttccggtaatggtcagtttgctgcggtggctgaaattaccgttaataatgtgccgggtggctaa

SEQ ID NO: 9191 - DNA, 249 bp, Escherichia coli; identical to SEQ ID NO: 5145

SEQ ID NO: 9192 - DNA, 249 bp, Escherichia coli
atggctgggcagactaatgtactggcaacaaatataactcattttggtatagcgctgtatcagggaaaaggaatgtcaacacctcttacattaggtaatggttcaggaaatggttacagagtgacagcaggtctggacacagcgcgttcaacgttcacctttacttcagtgccctttcgtaatggcagcgggatactgaatggcggggatttccggaccacggccagtatgagcatgatttataactga

SEQ ID NO: 9193 - DNA, 297 bp, Escherichia coli
gtgctgtatctgaacaaccagaatcagctgattgccggtgaaaccctcttcaccggcaccatcaaccgcacggaagtccatccccgggaagtgattaaacgcgccctgtatcacaatgccgcagctgtggtgctggcacacaatcacccgtccggtgaagtcacacccagcaaggcagaccgccttatcacggaacgtctggtacaggcactgggcctggtggatatccgggtgccggaccatctgatagtcggtggcagccaggttttctcctttgcggaacacggtctgctttaa

SEQ ID NO: 9194 - DNA, 279 bp, Escherichia coli
atgaaactgactctgacgctcgaagcagacagcgttaacgtgcaggcactgaacatggggcgaattgtcgttgacgtcgatggtattgaccccgctgagttgaataataaggtcgctgaaaacggttattcactccgcgtggtggatgctcccgaacagcagacaaccgactctccaccaccgtttactgcccttaccgacatacgttcgttgcagtaccgcacatatcacggaaaaggacaacgcctggctgtactcactgtcacatcagacgaatga

SEQ ID NO: 9195 - DNA, 297 bp, Escherichia coli; identical to SEQ ID NO: 9170

SEQ ID NO: 9196 - DNA, 294 bp, Escherichia coli
atgatagtgttttttacctttgcactccccaaactcccgggcccagacgtaatgcagggttgtgggatgcacgcgtttaccttcccgatgcttacgtttctggtaagcgtcgattcgggctttcagggcattgatgaagcgggatatcacagctgcgtccgttgctgccggtacatccgggaaacgcaggtcaacccgcaatgccgtcaggcgggaatgaacattcagtgcgtgccgcaccgtctcacgaatacgttgctgccagaaggggttgtatttgtaggtcatggttaa

SEQ ID NO: 9197 - DNA, 222 bp, Escherichia coli; identical to SEQ ID NO: 6137

SEQ ID NO: 9198 - DNA, 162 bp, Escherichia coli
atgaaacaactggaactcatgctcaccagcggtgaactgaatccccgccatcagcataccgtcacgctgtatgcaaaagggctgacctgcgaagccgacaccctcggcagttgtggctacgtttatatggctgtttatccgacgcccgaaacgaaaaagtaa

SEQ ID NO: 9199 - DNA, 378 bp, Escherichia coli
atgaaaacattacctgtattacccgggcaggcggccagttcacgcccgtctccggttgaaatctggcagacactgctcacccgactgctggatcagcactacggccttacgctgaatgacacaccgttcgctgatgaacgtgtgattgagcagcatattgaggcaggcatttcactgtgcgatgcggtgaactttctcgttgaaaaatacgcactggtacgtaccgaccagccgggattcagcgcctgtacccgttctcagttaataaacagtattgatatcctccgggctcgcagggcgaccggcctgatgacccgcgacaattacagaacggtaaataatattatcctgggtaagcacccggaggtgaaacaatga

SEQ ID NO: 9200 - DNA, 147 bp, Escherichia coli
atgctggacagtgatggacagttttatctgctggaagccaatacctcaccgggtatgaccagccacagtctggtgccgatggcggcacgtcaggcaggtatgagcttctcgcagttggtagtacgaattctggaactggcggactaa

SEQ ID NO: 9201 - DNA, 501 bp, Escherichia coli
atgggcgatccccgtgatgaagagaacgctctcggaccaatggctcgttttgatttacgtgatgagctgcatcatcaggtggaaaaaacactggcgcagggtgcgcgtttgttactgggaggggaaaagattgctggggcaggtaactactatccgccaacggttctggcgaatgttaccccagaaatgaccgcgtttcgggaagaaatgtttggccccgttgcggcaatcaccattgcgaaagatgcagaacatgcgctggaactggctaatgatagtgagttcggcctttcagcgaccattttcaccaccgacgaaacacaggccagacagatggcggcacgtctggaatgcggtggggtgtttatcaatggttattgtgccagcgatgcgcgagtcgcctttggtggcgtgaagaagagtggctttgggcgtgagctttcccattttggcttacacgaattctgtaatatccagacggtgtggaaagaccggaactga

SEQ ID NO: 9202 - DNA, 1308 bp, Escherichia coli
atggaaaaaacggcgctaatacaatttattactgaatacatcgcttcgcgaaggcaacccaaaatcgatgcctttgaaaaagaagccgcaaagcgagtggaacagggcgaggacgccagcgttatcgctcaggagcggcaggaactcgaagcacgctacttgccacgtaactggttaacggatgcggcaaagcgtgccgggcaaatcaaattagtcactcatggcgctaaattcagtcatggtgattctaaagccagtagcttttatctggaaacctccgctaacgaaagctatttaaacacagcatcgttggcgaatgtcgctactgacgcgattggtaacgccgctgcacttgacgtagcaaagttgctacaaaccgatgtgaacggagattcactgcttgccagcctgaagcgtggtgattatcaggcattaagtacgtttgcagaggataaagtgcaactggagctgtgggtagctgggtttagccaggcatggactactggacggccttccagccataaactggcgaaacaaatctatttccctgttgcggatggttatcacctgttatgcccactgttttccagttcactggcgcaggcgatgtatgaaaagctaaccgccgtgcgctttagtgaggagtcgaaagccattcgcgatgcccgcaaagcaggaaaatggcactcccagccagatatctggtttcctaatcttgccgaaatgcattttggcggcacaaaaccgcagaatatttctttgctcaatagtgtgcggggtggccgtgtctggctgttgccgtcaatgccgcccacctgggcgacgctggatcgcgcgccacaaaacatgcgcagtattttttccctacgcggcgatttcaatcgggcggcttcaggcattgtcgcccagatgacctacttactgaaggttgacataaataatgtccatatccgaactgtgcgggcgaaatatattgatgagttgatcgatttgctgttcatgcaggcatccgcttttcagcaagaaaaatggcagggatggtccgcacaatcaccagacttacctcgccaccaacaactttggctggacccgtggcgaagcctctcagatgagactttcaaacaggagcgtgagaaaaacgactggcaagtaactgtcgccgatgatttcgcacgctggctgaactatcgcctgaaaaaatccagttttgacgtaggcgctgtcgaacaaaaagagtggcgcagccagtctctgttcgctcaacggatgcgtgaaatggaagctgttttgcaggaggcgctgaaatga

SEQ ID NO: 9203 - DNA, 438 bp, Escherichia coli
atggctgtttccgaaagaatcaacgggttaggccttaatgggctgcgtggtaattatcagcatccagaatatgacgggttatgtttccgacctcctcaatttgaggttcccgaaaatatcaacgggttaggctggtttccccgatgttcgccgctggcgaatttcgaaaatatcaaccagttaccgccgcaaccgctccggcttcttccagtggtacgtaattttctccgtttcccgatacagtgccacgcggcgattgtaggccagcatttcaagaacgcggatccgtatgttgcgcatatccacatcattaagctggataccatcacggcgcatcacctcagcaacaacacgcgcataattttcggctgtcacgctgtccggctgcgtggcctgttcgtcagtctgctggctgattccaccagcacggcggattaa

SEQ ID NO: 9204 - DNA, 207 bp, Escherichia coli
atggctgaagagaaaaaaggtggtgtttcggtgtacataagccccgaaatcgtggaggtgctcaagcagcgccacaaaaaaaactatgaggctggcgtagcggctggactggatccgctgatgacgccggagccgtcgataggttcacttgtacgctcttatttacttgcggcgcttgggatgcataaaaattatgggggtgaataa

SEQ ID NO: 9205 - DNA, 423 bp, Escherichia coli
atgacagcacagatagccgcttacgggcggctggtggacgacccgcaggtaaaacagaccagcaagggcacaccgatgacgctggcgcgtatggcggtcccccttccgtgcagccaggcagatgacggaacggcgacgatgtggttatccgtcctggcatttggcagacaggccgaagcactggaaaggcaccgcaagggtgaactcctgagcgtggcgggtaacatgcagatcagccagtggactgggcagaacggagaaacgcggcagggctggcaggttatcgcagacagtgtaatcagtgcgcgaacggcgcgactgggcggcaaaaaaggtcaacagggccaggctactgacgcgctgaacagggcaaaacaacaggcggggaatgatgatccgtacggggataacataccgttttaa

SEQ ID NO: 9206 - DNA, 258 bp, Escherichia coli
atgcgcacatcaggaaaacttaataatcagaagaagcagcataaccgcgccattgaccttacagagcactggctgagagtggcgataaaaatcatcgaccgcaacacgggggaaggatacgcgaaagcacatcccgacctgataagcgcattcatgaccacagcggcggcaaactttgccacgctgacagaatgggagattgccgaagcggaacaggtaacaaccatcaacgttaaaaccggagaggtggaatcatga

SEQ ID NO: 9207 - DNA, 300 bp, Escherichia coli
atgaaaaataaaaattctggcgttactgccagcggccccgctcgtcctgaatttatgaacggcgatatttaccgcgataaatatggcggcatggtaacgattaaaggcgtggcagaacggcgcatcacctaccgtcgtgaaggctacgaatatgattgcgtgatgcctgtttatcagtttcggcgtgatttttctctggtacaggcagcgccccgcagtaaaccaaccagcagggagaaagcacgcgccaatattcaggaaataaaaaagatgcttaacgtattcaggggtaaaaaatga

SEQ ID NO: 9208 - DNA, 228 bp, Escherichia coli
atgcataaaataccctttgatgttcttgttcattctgaaaacgcattaatccgcgcaaaggaaatggacgcattactacttaagttaattgatgtgccggaaagtggcgatgaatctgattcaatgatgttttctgccgtgcgtacgctattaacgcctgttattaatgaattaaatacagtgatggcaattcacgagaataataaagcgcagcacaccggagaataa

SEQ ID NO: 9209 - DNA, 180 bp, Escherichia coli
atggcgacaaaagcagtaaacgcaaaatcacaaaccgttgcggcaagggttccgcatgaagttatgaacaatgttgaggcggtaaaaatgcctggcgaaagtacggggcaatttgttactgcggcattaaaacgagaagttgaatatcgccagcggcgcaaggccaaagaaccagagtaa

SEQ ID NO: 9210 - DNA, 210 bp, Escherichia coli
atgcgtgaaataaatgaagatcgcgtaatccgtgaggatgaatgtcgtaagttaactggagtgtgtcgcactacacgctacgaactggagaaaaaagggagctttccgtctcgccgtaatcttggtgggcgttctgtaggttggctgctgtccgaggttatggaatgggttaaaagccgggatcgcattaattcaggtaaggcagcgtaa

SEQ ID NO: 9211 - DNA, 1239 bp, Escherichia coli
atgagcagcgcaattcatagacttagcgacactcttttacgaaaattaagcggatcaccaaccacaaaaaacgccttttttaatgacggtggcaatcttagcgtaagacattccaccagcggcctgttaacctggtatttcacttacagggccggaactggtaggcaggtatcaccggaacgtctgagactgggcaattatcccgatctgagcctgaaagcagccagggaaaaagcagcacagtgtcgcgcctggctggctgaggggaaaaatccgcgctatgagcttaatcgtgctgtacaggatgcgttagcccccgtgacagttaaggaagcgctcacttactggcttgaatcgtatgcaaaggaaaagcgcactgactacgaatcactgaaaagccggatcaataaacacataatcagccagattggcgctttgccgttggaaaaatgcgagctacggcactggttggcatgttttgaccagatggcaaagcgaagcccagtatctgccggatttttgctacaggtatgcaaacaggcgcttaagtactgccgaaaacgacgatacgcaatcagcaacgttcttgatgatatggttgtcggtgatgtgggaaaaaaagcagaagtgagcgagcgcgtactaacaaataaggagcttggggaattactccgcgccctggatgacaaaatattcccgccatactacagcgccctaattcgcctcctgattgtttttggatgccgtaccactgagctaaggcgctctgaggtgcaggagtgggattttaaagaaatgctctggacagtaccgaaggagcacagcaaaacgaaggtcgccatattcaggccaataccggaaagcattttgccgttcgtcacgcaactggtggagcagaacagacacacaggcttattgcttggtgaactgaaaggacaatcttcggtagcagagtacggaagaacagcgcacagacgaattaatcaagccccctggacgttacacgatatccggcacacatttacaaccatactgaacgatttaggcgtggatccgcatattgtcgagcagcttacagcccaccagatgccagggatgcaacgagtctataaccactcccgctaccttgatgcaaaacgtgatgctcttaatctatgggtagaccgtctcgagcttctccagaacaatgatgaaaaaatcgttgttatgaccccgcgaatttacccccaaaattcttga

SEQ ID NO: 9212 - DNA, 669 bp, Escherichia coli
atgaaaggattattagctttactcatttcttctatggtccttcctgcacatgccggtattgttatctacgggacgcgtattatttacccggcagagcacaaagaagtgatggtgcagttgatgaaccagggaaaccgttcttcgctgatgcaggcgtggattgatgatggcgatacgtcattaccaccagaaaaaattcaggttcctttcatgttaacgccaccagtggcaaaaataggggcaaattccgggcagcaagtaaaaattatgccgaataaactccccactaataaagagagtattttttatctgaatgttctggatattccaccaaatagtccagaacaagaaggtaagaatgcactgaagtttgcgatgcaaaacagaattaagttgttttaccggccagcgggtattgctccggtaaataaagtgacctttaaaaagttactggtaaatcgcagtggcaatggattggtgataaaaaatgactcagctaattgggtgacgatttcggatgtcaaagctaataatgtcaaagtcaattatgaaactattatgattgcccccttagaaagtcagagtgttaatgtcaaaagtaataatgcaaataactggcatctgaccattatcgatgaccatggcaattatattagtgacaaaatttaa

SEQ ID NO: 9213 - DNA, 2481 bp, Escherichia coli
atgttgagaatgcccccacttgcatcagcaatcgtagcgttattgatcggcattgaagcttatgcagctgaagaaacctttgatacccatttcatgataggtggaatgaaagaccagcaggtttcaaatattcgtcttgaagataatcagcccttgccggggcagtatgacatcgatatttatgtcaataagcaatggcgtgggaaatatgagatcattgttaaagacaacccgcaagaaacatgtttatcaagggaaatgatcaagcggttaggcattaataccgatagctttgccagcggtaagcaatgtttaacatttaagcaacttattcagggcgggagctatacctgggatatcggagtttttcgtctcgatttcagtgtcccgcaggcctgggtggaagaactggaaagtggctatgtaccacctgaaaactgggagcggggtattaatgcgttttatacctcttattatatgagtcagtattacagcgattataaagcgtccggtaatagcaagagtacatatgtacgttttaacagcgggttaaatttattggggtggcaactgcattctgatgccagtttcagtaaaacaaataacaatccaggggtgtggaaaagcaataccctgtatctggaacgtggatttgcccaacttctcggcacgcttcgtgtgggtgatatgtacacatcaagcgatatttttgattctgttcgcttcagcggtgtgcggttgtttcgtgatatgcagatgttgcctaactcgaaacaaaattttacgccacgggtgcaggggattgctcagagtaacgcgctggtaactattgaacagaatggttttgtggtttatcagaaagaggttcctcctggcccgtttgcgattacagatttgcagttggccggtggtggagcggatcttgatgtcagcgtgaaagaggcggacggttcggtaaccacctatctggtgccttatgcagcggtaccaaatatgctgcaacccggcgtgtcgaaatatgattttgcggcgggtcgtagccatattgaaggggcgagcaaacaaagtgattttgtccaggtgggtcatcagtatggttttaataacttattaacgctgtatggtggctcgatggtcgcgaataattattacgcgttcactttggggactggctggaatacacgcattggtgccatttccgtcgatgccacgaagtcgcatagtaaacaagacaacggcgatgtgtttgacgggcaaagttatcaaattgcctacaacaaatttgtgagccaaacgtcgacacgttttggtctggcggcctggcgttattcgtcgcgtgattatcggacatttaatgatcacgtatgggcaaacaataaagataattatcgccgtgatgaaaacgatatctatgacattgccgattattaccagaacgattttggccgtaaaaatagcttctctgccaatatgagtcagtcattgccagaaggctggggttctgtgtccttaagtacgttatggcgagattactgggggcgtagcggcagcagtaaggattatcagttgagttattccaacaacctgcgaaggataagctataccctcgcggcaagccatgcttatgacgagaatcatcatgaagagaaacgttttaatatttttatatcgattccctttgattggggtgatgacgttacgacgcctcgtcggcaaatatatatgtctaattcaacgacgtttgatgatcagggggttgcctcaaataatacgggattatcaggaaccgttggaagccgggatcagtttaactatggggtcaacctgagttatcagtatcagggaaatgaaacgacagctggggcgaatttaacctggaacgcgccggttgcgacagtgaatggcagttatagtcagtcgagtgcttatcgacaggctggagccagtgtttcagggggcattgtcgcttggtcgggtggcgttaatctggcaaaccgtctttctgaaacgtttgctgtgatgaatgcgccaggaattaaagatgcttatgtcaatgggcaaaaatatcgcacaacaaaccgtaatggagtggtggtatacgacggaatgacaccttatcgggaaaattacctgatgttggatgtgtcacaaagcgatagcgaagcagaattacgtggcaaccggaaaattgccgccccttatcgcggcgcggttgtactggttaattttgataccgatcagcgcaagccatggtttataaaagcgttaagagcggatgggcaaccattaacgtttggttatgaagtcaatgatatccatggtcataatattggtgttgtcggccagggaagccagttatttattcgcaccaatgaagtaccgccatcggttaatgtggcaattgataagcaacaagggctttcatgcacaatcaccttcggtaaagagattgatgaaagtagaaattatatttgccagtaa

SEQ ID NO: 9214 - DNA, 1362 bp, Escherichia coli
atgtttaaaccggaactcctttccccggcgggaacgctgaaaaatatgcgttacgctttcgcttatggcgcagatgctgtttatgcgggccagccgcgttactccctgcgtgtacgcaacaacgaattcaaccacgaaaatcttcagctcggcatcaatgaagcccacgcgctggggaaaaagttttatgtcgtggtcaacattgcaccgcacaacgccaagctgaaaacctttatccgtgacctgaaaccggtggtggaaatggggccggatgcgctgattatgtccgatccagggctgattatgctggtgcgtgaacacttcccggaaatgccaatccacctctcggtacaggctaacgccgtaaactgggcgacggtgaaattctggcagcaaatgggtctgacccgcgtgatcctctctcgcgaactgtcactggaagagattgaagagatccgcaatcaggtgccggatatggagatcgaaatcttcgttcacggcgcgctgtgcatggcctactccggtcgctgcctgctctctggctatatcaacaagcgcgacccgaaccagggcacctgcaccaacgcctgccgctgggagtacaatgtccaggaagggaaagaagatgacgtcggcaacatcgtacacaagtacgagccgattccggtgcaaaatgttgagccgacgctgggtatcggcgcgccaaccgacaaagtgtttatgatcgaagaagcccagcgtccgggcgagtatatgaccgcgtttgaagatgagcacggcacttacatcatgaactcgaaagatctgcgcgccatcgcccatgttgaacgcctgaccaaaatgggcgtgcattcgctgaaaatcgaaggccgtaccaaatctttctactattgcgcacgcaccgcgcaggtttaccgtaaagctatcgatgacgccgctgcgggcaaaccgttcgataccagcctgctggaaacgctggaaggtctggcgcatcgtggctataccgaaggtttcctgcgtcgtcatacccacgacgattatcagaactacgaatacggttattcggtttctgaccgccagcagtttgttggtgagtttaccggtgagcgcaagggggagctcgcggcggtagcggtgaaaaataaattctccgttggcgacagccttgagctgatgacgccgcaaggcaacattaactttacccttgagcatatggaaaacgccaaaggtgaagcgatgccggtcgcaccaggcgatggttatactgtgtggctcccggtgccgcaggatcttgagctaaattacgcgctgctgatgcgtaatttctccggggaaaccacgcgtaacccccacggtaagtga

SEQ ID NO: 9215 - DNA, 198 bp, Escherichia coli
atgtttggttcaccgcaaaatactatttctgatgcgcagattgccgcagcgcgtcgaatggaatacggggccgtgcgtgtggtcgctgcgccagaagagagtaacgatggactggtattttatttaagtcaactttacagttatgacagtgactggtatctgacggtggtggatcagattggtgattgtggggcgtga

SEQ ID NO: 9216 - DNA, 351 bp, Escherichia coli
atgcccccacgaaccccaaaagcctgccgcgttcgcggctgccgccaaaccaccactgatccgtcaggctattgtgaaagccacaaaagcgaaggctggaaacaatacaagccaggacaatcccgtcaccagcgcggctacggttcgaagtgggatgttatccgcgcgcgcgtgctgaagcgtgacaaaggcctgtgtcagttgtgcctgcatgtcggtgtggtgcgtgaggcgaaaaccgttgaccacatcatccctaaagcgcatggcggcactgatgcagactgcaatctgcagagcctgtgctggccgtgtcataaggcgaagacggcccgtgaacgactgaagtga

SEQ ID NO: 9217 - DNA, 477 bp, Escherichia coli
atgcaaaatcttaatcctcagcgtaaagctttcctcgatatggtggcctggtcagaaggaacggataatgggctacaaccgacacgtaatcatggttatgacgtcattgtgggcggagaaatattcactgattactccgatcaccctcgcagacttgtcacgctaaacccaaaactcaaatcaacggctgccgggcgctaccagcttctttcccgctggtgggatgcataccgtaaacagcttggactgaaagacttctctccaaaaagccaggatgctgttgcactgcagcagattaaagagcgtggtgctttaccgatgattgatcgcggtgatattcgtcaggctatcgaccgttgcagcaatatctgggcttcactgccgggagctggttatggtcagtttgagcataaggctgacagcctgattgcaaaattcaaagaagccggcggaacggtcaaagagattcaggtatga

SEQ ID NO: 9218 - DNA, 753 bp, Escherichia coli
atgaaccttgaagccttaccgaaatattactccccaaaatctccaaaattgagcgatgacgcatcggcgacaggctcgggtggtttaacaattacggatgtaatggctgcgcaggggatggtgcagtcgaaagcaccgcttgggtttgccttattcctggcaaaagttggtgttcaggatcctcagtttgcgattgaaggcctgctcaattacgcgatggcactggataacccgacattgaacaaattgagtgaagaaacccggttacagatcatcccttaccttgtgaattttgcctttgctgattattccaggtctgcggcaagtaaggctcgctgtgagcattgtactggtactggatttcataatgtattgcgcgaagtggtgaaacattccagaagcggggaatccgttatcaaagaagagtgggtgaaggaactgtgtcagcattgtcatggcaagggagaagtcagcacggcgtgcagagggtgtaagggtaaaggtattgtcctggatgaaaaaagaacccggcttcatggcacgcctgtttataagacttgtgggcgttgcaatggaaaccggtttagccgtttaccgactacactggcacgacgtcatgtccagaagctggttccagacctgactgattatcagtggtacaaaggatatgcagacgtaattgataaactagtaacaaagtgctggcaggaagaagcatatgctgaaacacaattgagaaaggtgacgagataa

SEQ ID NO: 9219 - DNA, 798 bp, Escherichia coli
atgaataatctgatggttattgatggtattgaagttcgtcgtgatgcttatgggcgttacagcctgaacgatctgcacagggctgccggttctctggataagcataagcctgcattctggctccgcaatgagcaaactgaacgtttaataagcgagttgcagatttgcaactcggtcaatatagagccagttaacgttattcgtggcggaaataaccaggggacgtatgtctgcaaagaactggtgtatgcctatgcaatgtggataagcccgtcattccatctgaaggtgatccgtactttcgatatggtaaccagcacaccggaaaaattatccgggcaggctgctgacaagatgcaggctggcgtgatcctgctggactttatgcgccgggaattaaacctgtctaactcatcagtgcttggagcctgtcagaagcttcaggaggctgttggcttaccgaatctggcaccgcgctatgccattgatgctcctgctgacgcgcctgatggctcaagtcgcccgacactgtcgctgagtgcactgctgaaacagtatggtatccgccttacggctaatcaggcatatcaccagatggcgaagctggggatcgtcgaacagcgcgaacgatacagccgtacagcgattaacaacatcaaaaaattctggtcgctgacggcgaaaggctgcatgttcggcaagaacatcaccagtcctgcaaatccgcgcgagacgcagccgcatttcttcgaatcccgattccctgagctgttaaagctgctcgataccgttcattga

SEQ ID NO: 9220 - DNA, 201 bp, Escherichia coli; identical to SEQ ID NO: 8760

SEQ ID NO: 9221 - DNA, 675 bp, Escherichia coli; identical to SEQ ID NO: 8761

SEQ ID NO: 9222 - DNA, 363 bp, Escherichia coli
atggctagcgaacgcagtaccaacgtgcaggaatttatcggggagctggacggcggcgtatttgaaaccaaaatcggcgcagttctcagtgaagtcgcttccggtgtgatgaacacgaaaaccaaaggtaaggtctcgctcaacctggaaatcgaaccgtttgatgagaaccgtgtgaaaataaaacacaaactctcatatgttcgtccgactaaccgcgggaaaatttccgaagaagacaccaccgaaacgccgatgtatgtcaatcgcggtggtcgcctgactattctgcaggaagaccagggacaattactgactcttgccggtgaacctgacggaaaactccgcgcagcaggtcattaa

SEQ ID NO: 9223 - DNA, 825 bp, Escherichia coli
atgtctcagaacttagacgcaaccgcaattaatcaaatccatgcccttatttctgctcagggtgttaatgaaattatcagtaagattggtgccgacgcagtggcattacctgaaaatttccgcattcatgatctggaaaaatttaatttaaatcgcttccgtttccgtggtgcgctttccactgccagcatcgatgactttacccgttattctaaagatcttgcggatgaaggcacccgctgctttatcgatgccgataatatgcgtgccgtcagtgtgcttaacctgggtactattgatgagcctggtcacgcagataacaccgccactctcaaactgaaaaagacagcaccgttctctgctctgttgtctgttaacggcgagcgtaactcccagaagtcactggcagaatggattgaagactgggccgactaccttgtgggctttgatgctaatggtgatgccattcaggcaacaaaagcggctgcggcagtccgtaaaatcacgattgaagcaaaccagaccgctgattttgaagacaatgacttcagcggcaaacgctccctgatggagtctgtcgaagcgaagaccaaagatattatgccagtggcatttgaatttaaatgcgttccgtttgaaggcctgaaagaacgtccgtttaaattacgcctcagcattatcactggcgatcgtcctgtactggttctgcgcattattcagctggaagcagtgcaggaagaaatggctaacgaatttcgtgatctgcttgttgagaaattcaaggacagcaaagtagaaacctttattggtacttttaccgcctga

SEQ ID NO: 9224 - DNA, 525 bp, Escherichia coli
atgtcatttattaaaactttttccgggaagcatttttattatgacaggataaataaagacgacatcgttattaacgatatcgcggtttctctttcaaatatctgtcgctttgcaggacatctttcacatttctacagcgtcgcccaacatgcggtgctttgcagccaactggtaccgcaggaatttgcttttgaagcgttaatgcatgatgcaacagaagcgtattgccaggacatcccggcgccactgaaacgccttcttcctgactataaacggatggaagaaaaaatagacgccgtaatccgtgagaaatacgggttacccccggttatgagtacgcccgtgaaatatgccgatctcatcatgctggcaaccgaacgccgcgatctcgggcttgatgatggctctttctggcccgtactggaaggtatcccggcaacagagatgttcaaagttattccactgtcgccaggccatacctatgggatgtttatggaacgctttaaagagttaactgagtcgtaa

SEQ ID NO: 9225 - DNA, 867 bp, Escherichia coli; identical to SEQ ID NO: 8607

SEQ ID NO: 9226 - DNA, 522 bp, Escherichia coli; identical to SEQ ID NO: 5509

SEQ ID NO: 9227 - DNA, 852 bp, Escherichia coli; identical to SEQ ID NO: 5508

SEQ ID NO: 9228 - DNA, 234 bp, Escherichia coli
atgagcgacagcgaaattcgccgtcagttagagaaaggggacagcttctcttttgaggagacggcgctgtacaagaaagtttatcaacttgccgaagcgaaaaccggtaaatcactaccccgcgaaatgttgcctggcattcaactggaaagcccgaaaatcacccgcaatctgactacggcctggtttgcgaagcgcgtagacgaacggcgggcgcgttgtatgaaacagtga

SEQ ID NO: 9229 - DNA, 426 bp, Escherichia coli
atgaaaatcaggcatgagcacatccgcatggcgatgaatgcctgggcgcatccggacggtgaaaaagttccggcagctgaaataacccgggcttattttgagcttggtatgacgttcccggaattatatgacgacagccatccggaagccctggctcgcaatacccagaaaattttccgctgggtggagaaagacactcctgatgcggttaaaaaaattcaggcgttgttaccagcgatcgaaaaagcaatgccgcctctgctggtggcccgaatgcgcagccacagttcagcttattttcgggagctggtggagacgcgggaacgactggtgagagacgctgatgattttgtcgcagtggcgatcgctggtttcaaccagatgaatcgtggtggccctgcaggaaatattgtggctgtgcattga

SEQ ID NO: 9230 - DNA, 276 bp, Escherichia coli
atgaacttaagagactatttaaaagagaaacatatcacccagctacagtttgggaagctaacgggtttatctcaggtgcatgtaagtcgagtgctggggggctatgaaagattcagccctgaaaaagcattacgtgttgctgaagtaacgaatttcgaggttacacctcatgaactccggcctgatatttacccgaatccaaccgacggcttacctgttggattcaaggctaacacaccaaatgcatcggagttgattcatgaaaatcaggcatga

SEQ ID NO: 9231 - DNA, 462 bp, Escherichia coli
atgaaaaaaacacgcgaagtgattgcaactccagaagcgagcaagaatttaaaagccgcatggaatgcaagaaaaaaagagctgaagctgactcaagagctggcggctgagttgttgggattcgaatctcaaggcaccgttagccagtatctgaacggcaagataccggtaaataccgacgctgcgctaaaatttgcggctctgttaaaggtaaaaccagaggacattcgagaagaccttaaagacttaatgaattatgtaagatcatcagatacttatgatgataacttttcaggcaaaggatggaggctggtcaatgaagaacaggcagagttacttaacctcttcgagattctacctgcgtcagaaaaagccaaactccttaaccagctacgtggactaaacaagctctacgaggaagccttcgagaacatgctggcactaaagaaacgtaaccagtag

SEQ ID NO: 9232 - DNA, 156 bp, Escherichia coli
atggatactatcgagcttggcaacaacgaatctctggtgtacggcgtgtttcccaaccaggacggcacattcaccgcgatgacgtataccaaaagcaaaacgtttaaaaccgaaaatggtgcccgtcgctggctggaaagaaactcaggtgagtga

SEQ ID NO: 9233 - DNA, 129 bp, Escherichia coli
atggatttcgacacaatcatggaaaaggcttacgaagaatacttcgatggtcttgccgaaggcgaagaagctctcagcttcagtgaatttaaacaggcgctttccagttcgggaaaatctaacggctga

SEQ ID NO: 9234 - DNA, 321 bp, Escherichia coli
atggaatttaaagatttaccaatgccattccaggaaatggcagcgaatatagttcgttcccaactggcgactcttgacctgagtaccgtagaaaaagaaaccatcgatactatatccggtaacgtgcgtcgtgcctttatcggtctgtacgaagagaagcagctctctgataaccaggatttacatgaaaaatacttcctggatctaatggacatcattgataaggggtttggcttgttaatgaaaacgaaagggattcgaatagaaccccttgaaaattactttgcaacaaaaagcattaattcttttgattcaaaataa

SEQ ID NO: 9235 - DNA, 849 bp, Escherichia coli
gtggcgcaacaggaagtggaaaaagtctgcaccgcctgcggtcagaccggcggcggcaactgccctgattgtggcgcggtgatgggcgacgcaacataccaggaaacattcgatgaagagtatcaggttgaagttcaggaagatgatccggaggaaatggaaggcgctgaacatccacacaaggagaacactgacggcaatcagcatcacgatagcgataatgaaactggcgagacggcagatcacccaattaaggtgaacggtcatcacgaaatcacatccaccagcaggacgtgtgaccatctaatgatcgaccttgaaaccatgggaaaaaatcctgatgccccgatcatctcaataggtgcaatatttttcgatccgcaaaccggagatatgggaccggaatttagtaagactatcgatctggaaactgctggcggagtcattgatcgggacaccattaaatggtggcttaagcaatcacgcgaagcgcaatctgccattatgaccgatgaaatcccgttagatgatgcactgttacaattgcgggaatttatcgacgaaaactccggtgaattttttgttcaggtttggggaaatggagccaacttcgacaacacgattttgcgccgttcatacgaacggcaggggatcccctgcccgtggcgttactacaacgatcgcgatgtacgcacaatcgttgagctggggaaagccatagacttcgatgccagaacggctattccattcgaaggtgagcgccataatgcacttgatgacgcccgttaccaggcaaaatacgtttcagttatctggcaaaaactgatcccgaatcaggctgatttttaa

SEQ ID NO: 9236 - DNA, 1131 bp, Escherichia coli
atggcgcgcccgcgaaaatataaaaccgatgttccgggattatctccgtattttgacaaaagaaataacaaagtttactggcgttacaggcatcccataacaggcaaaaatcacggtctcggcagtattgaccagaaactggcagaaactattgcagcagaagcgaacagccgtcttgcccggcagcaaatggaacaaatgctcagtctgcaggagaaaattattagtgataccggcggttcatcaaccgttaccatttttctgaataattacagaaaaattcaacaggaaagatatgaaaacggcgagatcaaactcaacacgctgaaacagaaagcggcccctctcagggtatttgatgaacgttttggcaccagaccgttagatgccataaccgtaaaagatgtggtatcagtactggaagagtacaaggccagaggacataacagaatgggacaaattttcaggaaagtactgatcgatgttttccgggaagctcagcaaacgggcgatgtcccgccaggctttaaccctgcagaatcggcaaaaaaaccgcaggtgcggatatcaagacagcgactgacttttgatgagtggatgatgatttataacgcagcggaaaaggatggttactttttacagcgcggtatgctgctggcactgatgacaggccagcgcctttcagatatttgcaaaatgcaattttcggatatccgggatggttatcttcatgtcgaacagcaaaaaacaggaacccggattgccatccctctggctctgcgttgcgataaattaaatctcaccctagatgatgtggtgtcatcctgccgcgattgcgttcttagtccgtggctattgcaccaccatcacgcgaaagggacagctaagcgcggcgggatggttaagccagcaacattaaccgttgcatttaaaaaagcccgggattctgtggattacaactggcgtgctaatggcaccccaccctctttccatgagcagagatctttatcagagcgattgttcagagagcagggggttgataccaaaattttgctgggccattcgaatcaaaaaatgaccgatatttacaacgacgcacgcggtaaggaatggaaaaaactggtcatttga

SEQ ID NO: 9237 - DNA, 354 bp, Escherichia coli
gtgcaattagcgcgcctgctggtgcaactctgggaacctactccctcaccgaaatggttatttcttgatgaaccaacttcggcgctggatattcaccatcagcagcacttgtttcgtttattacgccagttagttcacgaacggcagttcaatgtttgctgcgtattgcacgatctaaatcttgccgcgcgttatgcagaccgtgttgtattaatgcaaaaaggaaaggttatcgcaaatggtaagccgcaggacgtattgacacagcaggcgctgacaatgctctacggcgcggatattaccgtacttaaagatcctgccaaccattcaccactgatcgtcctcgatcattaa

SEQ ID NO: 9238 - DNA, 198 bp, Escherichia coli
atgatttttctcatgacgaaagattcttttcttttacagggcttttggcagttgaaagataatcacgaaatgataaaaatcaattccctgtcagagatcaaaaaagtaggcaataaacccttcaaggtgatcattgacacctatcacaaccatatccttgatgaagaagcgattagattaaattcctggagaaattag

SEQ ID NO: 9239 - DNA, 1158 bp, Escherichia coli
atgaacagaagaagaaaactgttaataccgttgttattctgcggcgcgatgctcaccgcctgcgatgacaaatcggcggaaaacgccgccgccatgacgcctgaggtcggtgtcgtcacactctcccccggttcggtcaatgtgttgagcgaattgcccggtagaaccgttccttatgaagttgccgagatacgtccccaggtgggcggtattatcattaaacgcaactttatcgaaggcgataaagtgaaccagggcgattcgctgtatcagattgatcctgcgcctttacaggcagagctgaactccgccaaaggctcgctggcgaaagcgctctctaccgccagcaatgcccgcatcacctttaaccgccaggcatcgttgctgaagaccaactatgttagccgtcaggattatgacaccgcgcgcacccagttgaatgaagcagaagccaatgtcaccgtcgccaaagcggctgttgaacaggcgacgatcaatctgcaatacgcgaatgtcacctcgccgattacgggcgtcagcgggaaatcgtcggtgaccgtcggcgcactcgttaccgctaatcaggcagattcgctggttaccgtacaacgtctggacccgatttatgtcgatctcacgcagtcggtgcaggatttcttgcgcatgaaagaagaggtcgccagtgggcaaatcaaacaggttcagggcagtacgccagtacagctcaatctggaaaatggtaaacgttacggccagaccggcacgctgaaattctccgacccgacggtggatgaaaccacgggctccgtgacgttacgggcgattttccccaacccaaatggtgacttgctgcctggcatgtatgtcacggcattagtggatgaaggtagccgccagaatgtattactggtgccgcaggaaggcgtcacccacaacgcccagggtaaagcaacggcactcattctggataaagacgatgtcgtgcagctacgcgaaatcgaagccagcaaagccatcggcgaccagtgggttgtcacctctggcttgcaggctggcgatcgggtgatcgtttccggtttgcaacgcattcgtccgggtatcaaagcacgtgcaatttcctccagccaggaaaacgccagcaccgaatcgaaacaataa

SEQ ID NO: 9240 - DNA, 3909 bp, Escherichia coli
atgcaaaggaaaactctattgtcggcctgtattgcattagctctgagtggtcagggttgggcggcagatattacagaaatagaaaccaccacaggtgaaaagaaaaataccaatgtgacttgtccagcagatcctggaaaactcagtccagaagagcttaaacgcttaccctctgaatgctcctctgtagtcgaacagaacctgatgccatggcttgtcacaggtgctgctactgcgttaatcacaaccttagccatagtggaactaaacgacgatgatgatcatcatcgcaataattctccacttccaccaactccacctgatgatgattcagacgacactccagttcctccaactcctggcggagatgagataataccagacgatggtccggatgataccccgacgcctcccaaaccgattgcgtttaataatgacgttatcctcgataaaacagaaaaaacgttaactattcgcgattcagttttcagttataccgagaatgctgatgggactatttctctgcaagatagcaatgggcgtaaggcgactattaatctttggcagattgatgaaacgaataacacggttgcccttgaagggatgagcgcagatggtgcaacgaagtggcaatataatcacaacggtgagctcgttattacgggcgacaataccacagtaaacaacactggaaaaaccatcgtcgacggcaaaggcgccaccggaactgaaatcgcgggtaacaacgcggtggtgaatcaggacggcgagctggatgtgagcggcggcggtcacgggattgatatcaccggcgacagcgcaactgtggacaacaaaggcggcatgactgtcaccgatccggattccatcggtattcagatcgacggcgacaaggcggttgtcaataaggacggtgacagtgccatcagcaacggtggcaccggcacgcaggttaacggcgacgaagccaccgtgaacaataacggcagcaccaccgttgacggcaaggattccacgggcaccgagataaacggtgacaaagccatcgtcaacaacgacggtgacagcacgatccttgatggcggcaccggaacccgcattacgggtgatgatgcgacggccaacaacagcggcaataccaccgtagacggtcagggttcgaccggaactgaaatcgcgggtaacaacgcggtggtgaatcaggacggtacactggatgtcagcggcggcggtcacggtattgatatcaccggcgacagcgcaacggtggataacaaaggcggtatgactgtcaccgatccggactccatcggtattcagatagacggcgacaaggcggtcgtgaacaacgacggtgacaacgccatcagtaacggcggcaccggcacgcaggttaacggcgacgaagccaccgtgaacaataacggcaacaccaccgttgacggcaaggattccacgggcaccgagataaacggtgacaaagctatcgtcaacaacgacggcgacagcacgatccttgatggcggcaccggaacccgcattacgggtgatgatgcgacggccaacaacagcggcaataccaccgttgatggtcagggttcgaccggtaccgaaatcgcgggtaataacgcggtggtgaatcaggacggcttactggatgtgagcggcggcggtcacggcattgatatcactggtgatagcgccactgtaatcaataaaggcaatataactgtcacggataaagattcggttggtgtgctgattaacggtgatcgagcgacctttgccaatacgggtcatattgacgtcaataattcagctactggcatgagcatcacgaccagcgagggggccatctcccaggcaggtagcatgaatgttggtgacttttcaacaggcatggcgctcagtggtaataacaacagtgtgacgttggcggcgaaagatctgaacgttatcgggcagaaggcaacgggcgtcaacatctctggtgacaataatgccgttgatatcactggtaacattttggtagataaagatcaaaccgcgactaacgcggtagattatttttacgaaccgtctattggtgtgaacgttagcggcaacagtaacactgtatcgctagacggcaagttaactgtggtggctgacagtgaacttacctcacgtatttatgctgactttgatggaagccaggagaatatttccgggcttgtcgtatctggtgatgataataccgtgtatctgaatggtggtatccagctggttggtgaagaaaatcaattgactgatggttctaccgtcgcatcaaatcgcaatggctatggcaaaacaccagtaatcactgttgatgggaagtcgtctgtttacctgaacggggactccacgattaatggtgatttacctctagcctattcagggatgattcggttgaagaatagcgccatgattgagatcggggcggatgccacgattaacatgcaggtagatatttatgaccactatgcgagatctgaatcccaaatgatctttgtagagtctggtgctgagttagtcaataaaggtgatattgatactcgaaatatcggttttgccgctatttctggtgaaaattcaacgggaagtaacagtggcaatattacgctttctcagtacaactatggcttgttagcaaatgcaggagttggctatttcacgactaaaggcggtagtgcggttaataatggtacgattactgcgaaagtcatggaacaagaaagtgtcattaatttgggggcgtctctgggtctgaatgaggcgaacactttctactctgatgcgaacagtatgatggggcttgatgcctttgatcacggatacgtgtccaatgaaagcggtggcagcattgagatgtatggtcgcggcaacgttggtatgttggctattgatgagagtacagcagaaaacgctgggcaaattacactggatgccctgtgggttgatgcagatgataccaccactttgcgtagcaatattggtaatgatgccaggagctatggcgttggtatggccgtaggtacaaatacttacagtgggccaagaaaaaatgctacggccgttaataaacagggtggtgtaataacggtttataatgctggaataggtatggccgcctacggtgccagcaataccgtgattaacgagggtatcatcaatctggagaaaaacgctaactacgatagtagtctgggagcagattctctgatcggtatggccgcctataagagtggtactgccattaatgaacagtctggcgtaattaatatcaatgctgacaatgggcaggcgttttatagtgatggatccggtactattcttaactatggaacgatttgtgttaacactaattgcctgacgggcaatgactataatgagactgactcttatacctcgttactttacacgggtggcgatgtaatcactgcgcagaatgaaacacaaaatctgacccaaaaagcctcgattaacgacaaaaaagaaggcaatgttgttaacagtggttcgctttccggtgctgatattgcgattagtagcggtgaattagttaatacatcgacgggtactattaataatgccatcattatcaatgatggagagttaagtaacgaaggctctgtggcgaaggtgacgctaaacgcaggcacgttcgggaacaccggtacggttaactcgcgcatgttccagacaggaggaacatttaataaccagcaaggtggggtcgtgcaaaacggtgctaacctgagtaaaactgcaatcaccaataacgagggtacctggtatctcggtgccagcagtagtagtgatagcaataatgccagcatgatggagatttataatactgcggtgtttaacaacagcggtgacttctaa

SEQ ID NO: 9241 - DNA, 651 bp, Escherichia coli
gtgaacaacatcttgagaaaatcgccaatcgaacggctttgttcatctgtatcgattacccctcatgaaatggctgtggccttggctggcctaaacccatctatgcgcattagcgatgtgcctgaggaaaatttcgaatatgtcgattttgtcagaactcatcttgccagagctatcaaggtgtacagaggtgaaaaaactagtaaagacgagccttgccatgcccttgatattttcttagcttcttacccatttattgacacaaatacaccagaaataattgttcagaaaatatcagaagcgattgatgatttgcgtggcaccaagggctgggaagaaaaagcccgaaaccttggaggactccagttagtaaactacatcaaagaaaccaaccgcagcggacgtgggcagcatagaaagcaggatgaggaaaacgggacaatgaaaatgatggggttgatagtacatctgctgataaaaaaatcaggctcatcttcctacatccaaaatgggaaacctaatcgcacagctatataccgtgacatagaaaccttaatcaaggatgaagggatatcccataaaggaatagcaaaagccacattcctagaaaaaatctcacgggctttattagctgtccacgatctcgactaa

SEQ ID NO: 9242 - DNA, 219 bp, Escherichia coli
atgacagcacacaagccagcatcatcagctatcccaacaactggatacatccgtcgctttcgcatgccggaattgctaggtgtttcactgcctactattgatagatgggttaaaaatggcactcttccacgcccagtgaagctaacagataacgtgactgcgtttgatgcggtggaaattaataactggctggcagaacgccgcgggaaggtggcctga

SEQ ID NO: 9243 - DNA, 603 bp, Escherichia coli
atgaataatttcttaaccttccatgcagaagcaacgcctgacggcgtaaacatcatgcaccgcagcaacaatggcatgacagaacgcgttgagaccgtctcatatattgatgccgtaaatcgtctggatgccggggattatgacgataaaccagatgaaggcatgtttatacatctcgctattgccagtggcggcaaccagggatatttcgattacacatcacagcatcacgtgattatgtggcgctggctgatagcaacagcattaatcaatgaaatgagaaaggaaaacggcaccgtcagcattattgatgacagtggcaatcattccgtggtttctgtttattccaatggcatcgtcgccatgccgctgtatccagtagcagagcgcctcgctatggcaaacaacattgagggcgcaatgatcgagaaatatggtgttgatgtcggaacaaagaatgccatcattttttacagcaacatgttcgatgtcgaacagggaacactcacttcgtttgggcgagaagtgcttgccgatcttcacaacagctttattgccgaactaaacgaaaacggcatcccagaagcaccagtgacgcactaa

SEQ ID NO: 9244 - DNA, 231 bp, Escherichia coli
atgatgagcacaccattttacaaagtgcgccagttagcttcttcctctggctggcagctacggtttgaggggcgttcagactggctacccattgcggcatgggcgaatgttgaaatgtgtattgacggcgataccgttgaaatcattattccctgcgtggcaagtcgggacggctgtatagagccaacagatatggcagcagaaatcagagaggtaaaacatgaacaataa

SEQ ID NO: 9245 - DNA, 738 bp, Escherichia coli
atgaacaataactattgcatactgcagggaatgaccagaacggagcgcgaagaattaaaaagtttcgctacacagtgcgggaatgctggcgacatccaaagtctggaacgcactttaattatgattgcgcactggatgcgccaggggcaaagagtttcatttactgaatatgccagccagtggacagaggcacagcgcgaacggagcgacggtaatcactcaacacccgaaatggcgaagcaatggcctttcagtggtaaacgctgtatcagtcccggtggttcagattattaccctgctggtgtgggagatgagccatgttgtgacgagactgaaatccgccacgcagtgacagtaattaccgctgaatacccacaatttaaccttgacggactggcgctccacaaccggaatgcggactgggaaaacccgcttgataacccgtcatttatcgtatcggcgaaaagctgcctgagatggatcagagacaacgggatgagtaatgcccagattgagagcttcccgcaggataaccccacatctgacacgttgaagcatgaagtggagcgatataaccagataaaccaccagcacagtgatcacccgcactatatccccaacggagcatttattgcggcgatggtggcaagcggctacaaggttaagccagcgggaagaatgaacgcatttttcaatatttcaaaaaagggattatgtgctgctatgggtaaaaattaa

SEQ ID NO: 9246 - DNA, 312 bp, Escherichia coli
ttgaactacgaaaatttcgtagtgctcaccttcaaaaacgtcacgcccttgtacactggattttacaaaagtctcgtaaaactctttgctgttctgggctatgtgccaaaccgcagcgaatacctccgtctgccagatgagcaaaacataccttataaagaaaatcgctgtttttgctgtaccacctgtaccaccatgtcacaaacccttgtgtggcgcggcctgcaggtggtacaggtgggtaaaaatgacctctccccacctgtacagacctgtaccatttatttaatttttacccatagcagcacataa

SEQ ID NO: 9247 - DNA, 1344 bp, Escherichia coli
atggctacgtggcaacagggtattaattctggtggttttctggctggcatcggtgcgcaaaatgagaatgcgccaaaggcaagcgacattaacgcaacgcttggtctgatccgcgaaaacaatgaactggctcgctcaggtgcaaataacgttgctctgacaggtcttcgtggtctggctggagttgctgacatttataagcagcagcaacagcaggaacgtaaagcggcattccagaaaggttatgcagatgcttatgcgtccggtgacagggagcagatgcgtaatcttattacagcattcccagaagagtttgaggaagtccgtaaagggatgagttatgtcgatgatgctcaaagggatgattatggcaatctggcgctcaaagcacaggtagcctcatcgcttggtcagggcgcatttggcaggttcatgatggataatgagcaggagatgcgtcgtttaggtatccctccagaaactattgctgaaatgcaggttaatgacccgcagggcttccagcatttcgcaggtaatctggcgctgttttctctcggtcatgagaagtatttcgatatcaaagatcaaatggaaggtcgtcgacttgagcaagggcgactggatgaaagtatgcgtcaggctgacatggagaacgcgagaggatgggcaaatatccagaacgctcaactagacagggctcagcgagcacaaattcactcagatgagatgggattgaagctaatggagctggggcaaaaaggtaagccgtcagcagacttaattaagggattaaattctgacattaccaattttggcaaaaattataactctgtcagagcggcggcaaactctctgcaagcccttagcaaggtaaatactggcgctgcccaacttgggattatcttcaactacatgaaatctcttgacccgcagtcagtcgttcgtgaaggcgaacaggttcaggtaatgcggtctgatggcatatggggacaaatcaaaggatacatagaccagcttaatgctggaaacggcctgtcgcaggaggcaaaggataacattgttaacgccgcaaaaatcaacgccaatgctatggggcagcagtttaaccagcaggttgacgagtatctcgatacatatggagaaactattcctcaggggctaagaaaaagccttgaaagaaggaaagcgaagctatttgacgatgtttccgggcagcctacatcacaggctggcactggacaggcaaaagcggcaaccggaggaatatcagaaggcgcaacggcaaccaaccctaaaactggtcagaaaatcatttacaggaacggaaaatggcagcaaatgtaa

SEQ ID NO: 9248 - DNA, 2118 bp, Escherichia coli
atggcagcaaatgtaatcttaccggaaggttttgtgctcgatgaacaacctgataactcacagtttcctgatagttcacagcttcctgatggttttgtgcttgatgcccaaccagaacagcagcaatcacctttggtttcaccagaggaaaattccagacaggaaaatgttgttaataatgctaacggtttcgaccgttttatgtatggcgttctcagtggattgatggatgttggtaaaggtgttggcctgtttcaggatatgacaccagaagagcaagccgcaattcagtctctacagcagaagttagcggcaaaaccatcaaccgcacaagatgttggtgagttcgttggacaagcagcgccatttgttagtggtggtgggattatttctcaggttcccaaaggggcggcaagactggctgccgccgtagggcttggtgctggagaaggggctattgtagccaatggaacaaatagcgatgttgcttccggcgctgctattggcgctgtggctggccctgtagccgaacttgctggccctgcaattaataaaatagctgggaaattaaccaagaagaatgtttcttcgattccagatattgaggggattactcctgccgaagagaaaattcgtaagttatctgcacaaggcaacccaaatcttgcctcttcgcttgaagggctagatctaaaacctcagaaagaaattgttgaggctgcaaataggcttcatgttgattcagttcttccttctcatttatcaggaaatgagcaataccaagctgtagagcaagccctaaagtcacggacaggatcagcgttaaaagctcaagaagataaagcaataagcgaattagcctctagtgctgacaagataatcgatgatgttgctggtgcgccagatgcgttagctatgagcgaaaaatatatttatcagataaatagtagaatggaagcactaaaaaaccgtagtgatcagttatataaacgtgttgattccgctctatcaccaagaacaaaagtcgaagcaaataacacaagcactatgctggaaaaaatcgctgatgatttaggagggtgggataatcttgacccaatagaaaagcgagtttttacagcaataaaccccggcccagatagcatcctaacgtatgcaaatttaaacaggcaaaggcgtttagttggtgatgccctaaataaaaagcaggggccatacaaagatgctgataaagaagcgctatcaagactatatggagctttagctgaagaccaaaaatctgtcttatccaatactggatacttgcgagatttcgaagtcgcacaacgccttgtagctatgagaaaaaacttagaaaggcaaatggtaaatcttcgcgggaaaacacttaatggggatatagcgtataaagtaacgaattctcttcaatctatggcaaaaggtgatgcgagagggtttcgtgagattatgcaaaatactccatcaagaacattgcgaagggagctagtaggaacagcattaagagatatgctttcctctgggaagcgtggggccgactttaatccatctggctttgcagattggtggcaaaacttgcaacacagtggacagctaaagactttggctgaacatttgccaaaagaaacaatgagcggactatatgatgtatacaaagttgccagagcaataaaaaatgctaaagcgcatgaaatatctactggtaagctgaatgagtttgtaaacagatttaatcgggtaacagctccatacgaactagcagcaaaacacattcaaaaaataggcacgatggtaggcgctcattttggatcgcttggagccattgctggggctgatattggagcaagattggcgagtaaagctcgattagctggtggagcaggggcggctgatgctgcggataaattaattgcctcgccagccttccagagcgcagtaaaaaatctacacggaaaagcgcctgggcacattgttgattcacgtatcaggcgctcccctcaatggaagagtttttttaactctcttcctgaacaggaaaaacggaccatcgccagactgggcatcattacttggctatctaatgatccagataatgactag

SEQ ID NO: 9249 - DNA, 396 bp, Escherichia coli
atgattgccattctaaacaaagctaaagggagggttggtgtgagggggcaggcagttataattattttgttgggtttaattgtcgcaaagttatacccgactttatcgatggtgttttttgccattattggcgcagccatctttacttatatcattaaacataccgccttgtggttctataaaattgatatagttcagaagtttgtacgtcctgtgtcgatgttattactagcattaataccaattggtgttgcttatgtaattgatgttttttacccttcggacactgaaaggtggttgatagttttgtattgttatattggtgtagctctcttttgtggatttcattggtgtttcgaaaagatcaatgactctatttcaaagaataaagattga

SEQ ID NO: 9250 - DNA, 483 bp, Escherichia coli
atgtcgaatacatctgcacatgccctcttgaaagatatctggggcgataggaaattcccggttgatccagtatggattgccaatgagttagggttggatgttgttgaaaccacgcttgatgatgatgtttcaggcgcattgctgaaagagccagaacaagatccagtaatcatactcaatcgtaatgatagtaacgtgcgcaaacgatttacgtgtgcgcatgagttagggcattacgtcaaacgaactgagaacggtcagccacttgaatatgagtttgttgattaccgcggaaaactggcaagccaaggtgtagacagcgaagaaatattcgccaataactttgcagcatgtcttctcatgccagaaaaagaggttcgacgcctcaacaatgcaggatatgcaccagtaatgatggcttcctattttggtgtatccgatgatgctatacgttatcgcctaaagaatttagggcttcgatga

SEQ ID NO: 9251 - DNA, 378 bp, Escherichia coli
atgacgtctagatcttacgctatatctgaaaaactaaagcaagcggcaagacaagccagaggtgaaccagcctctggctcatctccatcagcaaaaaccctcacacatctaaatgataaggatccagccaaagcccatcagcgtgcaaaaacaaaagatttaaaaacagacacaaaactgaaaaaaatgtttgctcggtggtttatcggcattctgataggccagctattagttatgaatgggatttttgtccttattggagcaaaactgctccattttagtgatttcgttataaacctatttatggggggaaccctcgctgaagtctttggcattgttttagtgatggcacgctacctgttctccaagcacgtctaa

SEQ ID NO: 9252 - DNA, 1551 bp, Escherichia coli
atgaaaactgtatttacaacattatcagtcatattcggcgtgatattttctcacagtgttctagctcaggacgttactatttattatacgaatgacattcacgcacatgtcaatccggcaaaaatcctcgctgttgataagaacagacttataggtggtatggctaatattgcaggcatcgttaatgaagcgaagaaaaaaagcaaagatgtgtttttctttgatgcaggcgactattttaccgggccgtatatcagcaccctgaccaaaggtgaagctattattgatatcatgaacactatgccctttgatgcggtgtctgttggtaatcacgagttcgatcacggtgtgcccaatatggtgtctcagttatcaaaagcaaaattccccattctgctgggaaatatctactacaccgatacgaataaaccagtttgggatcatccgtggaccattatcgaaaaagatggtttaaagattggtgtgattggattgcatggcgcattcgctttctatgatacagtcgcggcaaaagcacgtgaaggcgtagaagccagagacgaaattaaatatttaaataaagcacttgcagaattaaaaggtaaagtcgacataaccgttttgctaattcacgaaggtgtcccggcgcgtcaatcaagctttggtagtaaagatgtggagcggctactacaggcagatattgagacagctaaaaaagtgaatggtgttgatgtcttaattaccggtcacgcacatgtcggaacaccgcaaccaataaaagttaataacacattaattgtatctaccgatgcatacggcaccaacatcggaaaacttgtgcttgattacaatccgaaaacgaagaaaattgatagttataatggtgagttaatcaccatctttgcagatcaatttaaacctgacaccatcgttcaaaatactattgataaatggagtgcaaagcttaacaaaataacacaggaagttgtcggccattctcccgtagttttaacacgtgagtatggtagttcctcttctaccggcaaccttattcttgatgcaatgatggaaaaaacacctgatgccgttgccggatttcaaaatagcggtgggatgcgagctgattttcctaaaggcgatatcacactgggagatgttattagcacattcccctttaataatgacctcatcgagatggatttgacgggccgcgatctcaaatcattgatgacgcatgcaaccaatctaactaacggtgtgttacaggtttcaaaaagcgttgcggttgtctatgacagcaaaaaaccactcaaccaacggttaatctctttcaccattaacggcaaacccgtggaagataatcaaacatatcgtattgccacgcactccttttgtgccagtggtggtgacggttttgaagcatttttgaatggaaaaaatgtgaagacgataccgggaacaacctcggcggaatctatcatcgattatttcaaaaatcataaacctgtcaccccagacttaactaaacgagtcatggacgtcgccaaataa

SEQ ID NO: 9253 - DNA, 465 bp, Escherichia coli
atgagcacgtcagacgatatccataacacgacagccaccggcaaatgcccgttccatcaaggcggtcacgaccagagcgcaggtgggggcacaaccacgcgcgactggtggccaaatcaactccgtgttgacctgttaaaccaacattctaatcgttctaacccgctgggtgaggactttgactaccgcaaagaattcagcaaattagattactacggcctgaaaaaagatctgaaagccctgctgacagaatctcaaccgtggtggccagccgactggggcagctacgccggtctgtttattcgtatggcctggcacggcgcgggtacttaccgttcaatcgacggtcgcggcggcgcgggtcgtggtcagcaacgttttgcaccgctgaactcctggccggataacgtaagcctcgataaagcgcgtcgcctgttgtggccaatcaaacagaaatatggttag

SEQ ID NO: 9254 - DNA, 492 bp, Escherichia coli
atgaatggacgttatttcaatgcaggcgttatctatgtcaatcttaaaaaatggcatgaagcaaatttgacaccgtatttactcacgcttttacgaggggaaactaaatatggctctcttaaatatttagatcaggatgcgttgaatatcgcatttaatatgaataatatctacctcgcgaaggattttgatactatttataccctgaaaaacgaacttcatgatcgtagtcatcgaaagtatcagcaaaccattaccgataaaacagtattgattcactatacagggataactaaaccatggcatagctgggctggatatccgtctgcatcatactttaatatcgcgcgtgaacaatctccctggaagaaatatcctcttaaagaggcgcggactgttgcagaaatgcagaaacaatataagcatctgtttgcccatggtgagtatattaaaggtataacttcattaattaagtacaagcttaagaaataa

SEQ ID NO: 9255 - DNA, 180 bp, Escherichia coli
atggaacttaaaaaattgatggaacatatttctattattcccgattacaggcaagcctggaaagtggaacataaattgccagatattctatctgttaactatttgcgccgttatttctggtgcataatgctgggaagatatagaggatttggggaaacacatctcgattttttgaagtga

SEQ ID NO: 9256 - DNA, 759 bp, Escherichia coli
gtgagggtgtcacaggcgtgggcggggccggggtttggtaacctggcgataccgcgcgtgggccaggaggtgattgttgacttcctgaacggggacccggaccagccgataatcatggggcggacgtaccatgaggacaaccgttcgccggggagcctgccggggacgaagacgcagatgacgatacggtcgaagacctataaaggaagcggctttaatgaactgcggtttgaagacgccacgggcggtgaacaggtctatatccacgcgcagaagaacatggatacggaggtgctgaataatcggacgacggatgtgaaggctgaccacacggaaaccattggtaacgaccagaagataacggtggggttgggccagacggtgaatgtggggagcaaaaaggaaggtggtcatgaccagaaagtgacggtagcgaacgatcagcatctcacgataaaaaatgaccggcacaaggttgtaaataacaaccagacaagcaaggtgacgggaactgataccgaagaagtcgtcaaaaaacagagtattaaaataggtgataattacgaactgaaagttgagcatggtacaaatatcatatctggggacagtattgagctaatttgtgggcagggagagagcgggacttgttccataaaactggagaaaacaggaaagataataatacgggggacggagtttctatttgaggctaccggtcctgtagatattaaaggaaaagatattcatctgaacggatag

SEQ ID NO: 9257 - DNA, 1677 bp, Escherichia coli
atgctggttaataccagtaattataatgagggagtccaaaaaacaatgaccaacatcaccaagagaagtttagtagcagctggcgttttggctgcgcttatggcagggaatgtcgcgctggcagctgatgtacccgcaggtgtcacactggcggaaaaacaaacgctggtacgtaacaatggttcagaagttcagtcattagatccgcacaaaattgaaggtgttccggagtctaatatcagccgagacctgtttgaaggcttactggtcagcgatcttgacggtcatccggcacctggcgtcgctgaatcatgggataataaagacgcgaaagtctggaccttccatttgcgtaaagatgcgaaatggtctgatggcacgccagttacagcacaagactttgtgtatagctggcaacgttctgttgatccaaacactgcttctccgtatgccagttatctgcaatatgggcatatcgccggtattgatgaaattcttgaagggaaaaaaccgattaccgatctcggcgtgaaagctattgatgatcacacattagaagtcaccttaagtgaacctgttccgtacttctataaattacttgttcacccatcaacttcaccggtgccaaaagccgctatcgagaaattcggcgaaaaatggacccagcctggtaatatcgtcaccaacggtgcctataccttaaaagattgggtcgtaaacgaacgaatcgttcttgaacgcagcccgacctactggaacaacgcgaaaaccgttattaaccaggtaacctatttgcctattgcttctgaagttaccgatgtcaaccgctaccgtagtggtgaaatcgacatgacttataacaacatgccgatcgaattgttccagaagctgaaaaaagagatcccggacgaagttcacgttgatccatacctgtgcacttactattacgaaattaacaaccagaaaccgccatttaatgacgtgcgtgtgcgtaccgcactgaaattgggtatggaccgcgatatcattgttaataaagtgaaagcgcagggcgacatgcccgcctatggttacactccaccatatactgatggcgcaaaattgactcagccggaatggtttggctggagccaggaaaaacgtaacgaagaagcgaaaaaactgctggctgaagcgggttataccgcagacaaaccgttgaccatcaacctgttgtataacacctccgatctgcataaaaagctggcgattgctgcctcttcattgtggaagaaaaacattggtgtaaacgtcaaactggttaaccaggagtggaaaacgttcctcgacacccgtcaccagggcacttttgatgtggcccgtgcaggctggtgtgcagactacaacgaaccaacttccttcctgaacaccatgctgtcgaacagctcaatgaataccgcgcattataagagcccggcctttgacagcattatggcggaaacgctgaaagtgactgacgaggcgcagcgtacagctctgtacactaaagcagaacaacagctggataaggattcggccattgttcctgtttattactacgtgaatgcgcgtttggtgaaaccgtgggttggtggctataccggcaaagatccgctggataatacctacacccggaatatgtacattgtgaagcactaa

SEQ ID NO: 9258 - DNA, 480 bp, Escherichia coli
atgagaaaagtaaaaacagacaacagtgatttaatcgaatatgtaaatacagttaaagaactaaaaaatcacattccaatagaagaatacagaaatgaatatcgtaaactgcgttctgatgatattccattggttaaggcgcaaaaatttaaatctgcccataccgaagttcgcaggttggaaaaaaagagagaatctcttattgaatactttattgacgagttaaatcccatcagcagttcaaaagctaacacatcagcaagatcaactggtaatctcgatttatttaacgaacgcgtgttataccgtaaggccatttcagaaaagagcgatgaagaaatagtagccttggtcataaaacaacgtacagaagccgctgttgagttccaacgttcaattgaacagagtcttgagcaactatctcgtatctcgtcagagttcgaaccatcaaaccaaaagcgcaggaaaatgtctctttaa

SEQ ID NO: 9259 - DNA, 243 bp, Escherichia coli
atgattgatgaatttcatgtgatgtatatgtataaaaaaatccaagtggaagccgcaactaccgacatcaaaacacttgaacagcttttgaaaaaattcaggagcgtggtcaacgaacgtcgtgaagaatactatcaggagattggtgagaaaaaagcacataagttgaaaatgaaaagattacaaagaatgcttgagaaaatggcatgtgaccgggtttcaccagaagatctaaaggaatga

SEQ ID NO: 9260 - DNA, 837 bp, Escherichia coli
atgaaaagaagtgaaatcaggaaagcactggaagcatggtttgatgttgaacgctatgaggcgatagagaaactcaccttacagcatttttatgttgaggttgagcggcgcatcttggcttacagaatgttgttgagccggaacaccatacctacctttaaccgattaatgctggatgattaccgcaacaagatcctcagcggtgaaatctttttcagtggtgataccgctactcttggacatgagcttgccagaacctacgcagtaaatcctacgacacgaagccacgcgcaattttatgcgaaaacgctggcattaaccgaagccacgcctgaactctctgggttaagccagtctgaatttctgtccgagtatctgaaagagacatcccttaataatctttcacgtattactgtcgatattcatctggaagaagcatcaaccgaagagatcattgaacatctgaaagtgttgatcccccgatggaagagacagcttaagatgaagtctccagcgccaagagagtatcgttttgggaaaagcacattcagaaaaattattgaatatcgtcttatcccgatgatggacctgatcttctggggagaagataacggcattaaaatcccgctttcactgatttcctcgctgcttcacgaggacagcgacaacgatcgtgatgaaggaatgctaaaggcaacggactacccgttagcaatggcttttctgacggatgcgagctatctgaaatcgcttgaagattacatgatggaaaacaatcacttgaaagactcccctgttgaaaagcatgtagaagacgacaggaataagaaaaaataa

SEQ ID NO: 9261 - DNA, 1044 bp, Escherichia coli
atgctggcgctgaatatcaacccggtacagcagcgggctgctgaacgtggctcacgaacaccggagaaagtttttaaaaacgtggcgctggcgtggcataaaagtaacaggaaatggtcgcagaacaccgccgaccgtctgcgtgccagtctgaacaatcacatctttccggtcatcgggaacttacctgtatcagaacttaaaccccgtcatttcattgacctgctgaaagggatcgagggaaaaggtctgctggaggttgcgtcccgcacacggcagcacctgagtaacataatgcgccatgcggtccatcaggagttaatcgatacgaaccctgcagcaaaccttggcggcgtgaccacacctcctgtcagacggcactatcctgccccgccgctggagcggctgcctgaactgcttgaacgtattggggcatatcatcagggccgtgaactgacccggcatgccgttctgctgatgctgcatgtgttcattcgctccagtgaactgcgtttcgcccgctggtcagagattgatttcacaaaccgagtctggacgatacccgcgacgcgagaacccattattggcgtgcgttattccggccgcggggcaaaaatgcgaatgccgcatatcgtccccctctcagaacagtccatcgccattctgaaacagattaaggatatcaccggtaataatgaactgatcttccccggcgaccataacccgtataagccaatgtgtgaaaacacggtcaataaggcactgcgggtgatgggttacgacacgaaaaaggatatctgcggtcacggcttccgggcaatggcatgcagtgcgctgatggaatcgggtttatgggcaaaggacgcagtagaacgccagatgagtcatcaggagcgcaataccgtgcgcatggcttatattcataaggcagagcacctggaagcccgcaaagcgatgatgcagtggtggtcggattatctggaagcatgccgagaatcttatgcaccgccttatacaattggtaaaaataagtttatcccatag

SEQ ID NO: 9262 - DNA, 1455 bp, Escherichia coli
ttgaatatctcctctgctttacgccaggttgttcacggcactcgctggcactctaaacgcaagagctacaaagtgttgttctggcgcgagataaccccgcttgctgttcctatcttcatggagaacgcctgtgtcctgttgatgggggtcctgagcacttttctggtcagctggctgggaaaagatgcgatggccggcgtggggttggcggacagcttcaatatggtcattatggctttttttgcagctatcgatcttggtactactgtcgttgtagcatttagtctcggtaagcgagatcgacgacgagcgagggtggcgacgcggcagtcattggtgatcatgacgttgtttgccgtactgttggcaacgctaattcatcattttggcgaacaaattattgatttcgtcgcgggtgatgccacgacagacgttaaagcactggcattgacttatctggagctgaccgtactcagttatccagcagctgccatcactcttattggtagcggggcacttcgtggtgcagggaatacgaaaataccgctactgattaacggtagcctgaatattcttaatattattattagcggcatattgatttacggccttttctcctggccgggactgggatttgtcggggctgggttgggtttaaccatttctcgttatattggcgcagttgcaattttgtgggtgctggcgattggttttaatcctgcgctaaggatttcgttaaagagctattttaaaccgctgaattttagcattatctgggaagtcatggggattggtattccagcgagtgtcgaatcagtgttatttaccagtggtcggttattaacccaaatgttcgttgccgggatggggaccagcgttattgccggaaattttatcgcgttctcaattgcggctcttatcaacttacccggaagtgcgctcggttctgcttctacgatcattacaggccgaaggttgggggtagggcagatagcgcaagcagagattcagttgcggcatgtgttctggctgtccactcttggattaacggccatcgcctggctaacggctccctttgccggggttatggcatcgttttacacccaggatccacaggttaaacacgtcgttgtgattctgatttggctaaatgctttatttatgcctatttggtccgcctcatgggtgctacccgctggatttaaaggtgctcgtgatgcccgttacgccatgtgggtttcgatgttgagcatgtggggttgtcgggttgtagtcggttatgtgctgggaatcatgcttggctggggtgtggttggcgtctggatgggaatgtttgccgactgggctgtgcgggccgtgctgttttactggcgaatggttactggacgttggctatggaaataccctcgatccgagccgcaaaagtgtgaaaaaaagccagttgtatcggaataa

SEQ ID NO: 9263 - DNA, 1131 bp, Escherichia coli; identical to SEQ ID NO: 4874

SEQ ID NO: 9264 - DNA, 432 bp, Escherichia coli; identical to SEQ ID NO: 8375

SEQ ID NO: 9265 - DNA, 792 bp, Escherichia coli
atgatgaaaaatacaggttatatcttagctctttgtctgacagcatcggggcatgtcctggcccacgatgtctggattacaggtaaacaggcagagaacaacattaccgcagagattggttatggtcataatttcccctcaaagggcacaattcctgacagaaggaatttctttgaaaatccccggatttataacgggaaagagacaataacactgaagccagcgtccacggattatgtctataaaactgagtctgcaagcaaagataatggctacgttttgtcaacatatatgaaaccgggatactggtcgagaacctcttcaggatggaaaccggtcagccgggagggcagaaatgatgtggcttactgtgagtttgtcactaaatatgcgaaatcttttattcctggtgaacagcagatgccagcacaactctatcagtctccaacggggcatgagcttgaaatcattccgttatccgatataagtcgtttcagtgaagatgtgaagctgaaagtcctgtataaaacgtccccgctcgccggagctatcatggagcttgactcggtcagttatctgaaatcatcccgtcatactcatgcagttgagcacaaacatcctgttcataaagcagaactcacctttgtaactaatgaggatggtatcgtcacagtaccttctcttcatattggacagtggctggcgaaagtccaaaataagaaaagttttcaggacaaaagcctgtgtgatgaaactgtcgatgtggcaactttaagtttctcccgaaattaa

SEQ ID NO: 9266 - DNA, 1971 bp, Escherichia coli
atgtatatgaacgtaatcagaaacgtcatttgtacattaatcatactcccgatagggttacaggcagagaccagtcattcttctatggctaaagatacaatcaccgttgtcgcgacaggaaatcagaacacggtatttgaaacgccgtcaatggtcagtgtcgtcacgaatgacacgccatggagtcagaatgcggtcacatcagccggcatgctgaaaggtgttgccggtctcagccagactggtgcaggacggaccaatgggcagacctttaatctacgcggctatgacaaaagcggggtacttgttcttgttgacggcatccgtcaactcagtgacatggcaaaaagcagtggcacttatctggatccggcactcgtcaaacgtatcgaagttgtccgcggaccaaactccagtctgtacggcagtggcgggctgggaggtgttgtggacttcagaactgccgatgcagcagatttccttccccccggagagacaaacggtttaagtctgtggggaaatatcgccagtggtgaccacagcacaggctcggggctcacctggttcggtaaaaccggaaaaacagatgcgctcctttctgtcattatgcgtaaaagaggtaatatctatcaaagtgatggtgagcgcgcacctaacaaggaaaaacctgcagccctgtttgcgaaaggctctgtcggtataacagacagtaacaaagcaggtgccagcttgcgtctctaccggaataacaccactgaaccgggcaatcccactcagacacatggtgacagcggcctgcgtgacagaaaaacagtacaaaatgacgtacagttctggtaccagtacgctcctgtggataacagcctcatcaatgtaaagtcaactttatatctcagtgatatcactatcaagacaaacggtcacaacaaaacggcagaatggagaaacaacagaacctccggtgttaatgttgtcaacaggagtcatactctgatttttccgggagcccatcagttaagttatggcgctgaatattaccgtcagcagcagaagccagaaggctctgccacactatatccggaaggaaacattgactttacatcgttgtatttccaggatgaaatgacaatgaaaagctacccggttaacattatcgtcggttcccgctatgaccggtacaagagcttcaatccccgtgccggagaactgaaagccgaacgcctgtccccaagggcggcgatttcagtctcaccgacagactggctgatgatgtacggctccatatcctctgcattccgtgcccccacaatggcagaaatgtacagggatgatgtacatttttaccgcaagggtaaacccaattactgggtacctaaccttaatctgaaaccagaaaataacattacccgtgagattggcgcaggtattcaactggacggcctgcttacaggcaatgatcggctgcagttgaaaggcggatatttcggaacggatgccagaaactatattgccacgcgcgtggatatgaaacggatgcgttcttattcttataatgtatcccgggcccgtatctggggatgggatatgcagggaaattaccagtctgattattttgactggatgctttcttataaccgcacggaaagtatggatgccagcagcagggaatggctgggctccggcaatcctgacacactcatcagtgacataagtatacctgttggtcatggaggagtttctgccggatggcgtgctgaactttcggcagcagccacgcatgtgaaaaaaggcgatccccatcaggctggctatgccgtacattccttttcactgtcttataagcctgtaagtgttaaaggctttgaggcatcagtgactctggataatgccttcaacaagcttgccatgaatggcaaaggagtgccgctttcaggcagaactgtcagtctttatacccgttatcagtggtaa

SEQ ID NO: 9267 - DNA, 564 bp, Escherichia coli; identical to SEQ ID NO: 5765

SEQ ID NO: 9268 - DNA, 642 bp, Escherichia coli
gtgaaatggacgctggccgatgcgcaacaagctggtggcgttgggcaagtcaccacgcttggcagcgacctctccgtagcgacggcgacaacgcatatcggttttaacattggacgcatcaacggacgtttactggatcttgagctttccgcgctcgaacaaaaacagcagctggatattatcgccagtccgcgtctgctggcctcacatcttcagcctgccagcattaaacaggggagcgaaattccatatcaggtttccagcggggaaagtggcgcgacgtcggtggaatttaaagaggccgtcctggggatggaagtcacgcccacggtgttacaaaaaggtcgcatccgactgaaattacacatcagccagaacgttccggggcaggtgctacagcaggcagatggcgaagtgctggcgattgataagcaggagatcgaaacgcaggtcgaggtcaaaagcggagaaacgttggcgctgggcggcatttttacccgtaaaaataaatcgggtcaggatagcgtaccgttgcttggcgacattccctggttcgggcaattatttcgtcatgacggaaaagaagatgaacgacgcgagttagtggtgtttatcacgccacgactggtttccagtgagtaa

SEQ ID NO: 9269 - DNA, 453 bp, Escherichia coli
atggtgactactatgactaaatgttcaaaccttagacagcagattatggatgatgtacaaagaagatatggagaatatcttgataaggataaagtatcttgtattacaagcaagatagctgcggcagaaaataaatacccagcaaaaactacattagctagtgcaatattttatataaaagtagacactcagatcaccagtgaaggtggaaaacatttttcgggaaatgcaggaggattatcatctccaggtggtggtgtgctgtttggtgacttatatacagatgatttggatgatctgtatacaaatacggttagcttccagataacaatgacccctgtattttgtagtgtattgttttttgattctgcatcaaatcttttggggcatttcgagggaggtggtgtgtcaacagtatcgggtgttgcaggtggcacaggctcgtggtcctga

SEQ ID NO: 9270 - DNA, 297 bp, Escherichia coli
atggatatcacgccgatacttcatgcaatttgtgctgtggcggtacaggggctggttgggtgcattaccggtgactgggcttatggtgcagccattgcctgtacgttttttgttgcccgcgaatatacccaggcagaatatcgctggattaagcgttttggtgatggtcaccgacataagatgccgtggtggggcggttttgatccgcacgcgtgggatgtggcaagcctgatggattttgtggtgccggtggtggcctgtgcgggattgtatggctgtatgctgatttttagctga

SEQ ID NO: 9271 - DNA, 279 bp, Escherichia coli; identical to SEQ ID NO: 4619

SEQ ID NO: 9272 - DNA, 1770 bp, Escherichia coli
atgccggaggcactgcgccgttttgagctgatggtgaatgaagtggcacgtcatgccggagcatcatcacagagcgcagcggcagcaaagaaatccgaaactgcagcggcatcatcgaagaacgcggcgaaaacctcagaaacgaatgcagctaacagcgcacaggcggcagcggcctcgcagactgcatcggcaaactccgcgacagcagccaaaaaatcagaaaccagcgcgaaaaatagcgagacagccacaaaggccagcgaaaaaaacgcaaaatccagccagacggcagcgaaaaccagtgagacgaatgccaaagacagtgaagccaacgcaaaggtgagcgaaacagcggcggcgaactcggcgaaagcatcggcagcaagccagacggcagcaaaagcaagtgaagatgctgccagagaatacgcaaaccagacagcagagccgtacagatatgttttacagccgctgccggatgtgtggataccctttaatgattcgctggatatgattacgggctattctccgggttataaaaaagtgaagattggtgataatgtggttcaggttgccagtgataaacaggttaatttcagtcgcgcatcaacggcaacatatatcaacaaatctggcgaactgaaaacggcggaaattaatgagccacgatttgagtgtgatggcctgcttattgaggggcaaagaacgaacttcttccagaacagtacagacccttcgaagtggaataagtcaacttcactggacgttacagaaacaggcacagatagtttcgggtttaattatggccggtttgtcgtacaggattcgattgttggtacaagtaaagcgcataccattatcggactgtattcgagtaccggaggggttgatacttcaggggacgaaaagcatgtaactatatcctgtcgggtaaaaagtgaagttgataatatcgccgttcgtattttatttgaacattatgatggggaggtaaggacatcaataggagcagcaaacctgaaccttaccacccgcataattagcaagacaggtcagacaagccgtgttacagcaaggtctgttaaggatgatgcaactggctggatattttttgaggctacattaaaagcagatacaacagaaaatacggttggtggttttgtccagtattctccggatacagggcagatggttgcatcaggggattatctcgatgtaaccactccacagattgaggctggtacaggcgcatcatcttttattgttacggggacggcaccggtaacgcgggcaagcgatatggttacagttccgattaagaataatctttataatcttccttttacggttctttgtgaggtacataagaactggtataaaacgccaaatgcagcaccgcgtgtttttgacacataccggcatcaggcagatgcggggatcgtaatggggtttggttcatcaggtgggtacgacggttttccgtattgtgatataggtggttcagaccgacgaataaatgaaaatgccgggctggaaaaaatgcttattggtatgcgggtaaagtccgaacggtccacatgtgtagtcagtaacggtaagttaagcagcgaaactaaaaccaaatgggaatatatccggagtacagcaaccattcgcattggtggacaaactacagcaggattacgccatttatttgggcatgtgaggaattttcgtctctggcataaagagctaacagatgcgcagcttggggaggttgtggagtga

SEQ ID NO: 9273 - DNA, 1449 bp, Escherichia coli
atgcgaattagatcactggatgatgcagcgactacagaagagacattgctcactcttgcgttgactcccttagtgaaagagttgaaggctctggagtgtaataaagagtcacaaatatcaaaagttaaagcagctttggttaaagctgtaaatgagatcgctgaacctcatcaagaacgattttcttctatttctcgacaaattcagacagggtttcaacatgtctttcctgctcttggtgttcagctcagtgttgaaatgaatccacctgagcttaaaatagacaatttattaaagcaggggtctggtttattagtcaaagaggctgcgggaaactatcgcattgggcaacaggggacaggagcaagacgagctcttttttgggcaatgctccaggttcataatgaaattagccgacaaaatgaaaagcgagaagctcttcttaaatcctttagagaacaacttaaaaaagaggtgaggaaaaatgtaaaaagtgaaaatataaatcttctgaaacaacaaatagatgctattgaaaatggcgcccctgttcctgaagatacagacgatccagccttgcccggatatattcttttaatggatgagccagaaaatgcgttacacccaatggctgccagagcggcgcaagcgcatctttatgaacttggtaaacatccagattggcaggtgctattaacaactcattcaccatactttataaaccctcttgaggatcatactacgattgctcgtatgcaacgttcaacagatgggaaatcactttctccacgcttgtatgtggctgatgaagctaacttctcacttgatgagaaagataatttacaggcactacaacttacagatattggttttgctgaaatattttttgggagttatccaattattgttgaaggtgatactgaacatgcggcatttatttcagcaatcactaaagaaaaacatgagatgtcaggtaaggtaagtattgtcagagccagaggtaaggcggttctggttcctttgataaagatgttaaatcattttaaagcagattttgggattgtacatgatattgattggccttatcgtagagatggttcgaataatggttcatggacgcttaatacgatcattagaaatgagattataaaatgcaggaataatgggaaaaaagtatatcatcgttggagtgcccccgattttgagcgttttttaggtggtgaggagttggggaaagataaaccctatacagcatttaatcgaatttcgcgcgatgaaaaattaaaagaaaagattcaaaatcttataattaatttgtttgaaggggagtgttatgatcctgatgactttgaacccgatgatgattttaatgctcaactcatggaacaattaaaaatatgggcaaaaaataatggtgaaagtgataatgttcgcgttatgggatgctga

SEQ ID NO: 9274 - DNA, 600 bp, Escherichia coli
atgcgtaaattatgtgctgttattctgtccgcagtagtctggctggttgccgctggtacgccagcgagcgcagcagagcatcagtccacactaagcgccgggtatcttcagacccatactgatatgcctggcagcgatgatctgaacgggattaacgtgaaataccgttatgagtttacggacacgctggggctggtgacgtcattcagttatgccaatgccaaagatgagcaaaaaacgcattacagcgatacccgctggcatgaagattccgtgcgtaaccgctggttcagcgtaatggcggggccgtctgtgcgcgtgaatgaatggttcagtgcttatgcgatggcaggtgtggcttacagccgtgtgtcgactttctccggggattatctccgcgtaactgacaacaaggggaaaacgcacgacgtgctgaccggaagtgatgacggtcgccacagcaatacctctctggcgtggggagctggcgtgcagtttaacccgaccgaatccgtggccattgatattgcttatgaaggctccggcagtggcgactggcgaacggatgcatttattgttggtatcggataccgtttctga

SEQ ID NO: 9275 - DNA, 3693 bp, Escherichia coli
atgggaaaaggtggcggtaaggcacacacgcctcgtgaggcgaaggataatctcaaatccacgcagatgatgagtgtgattgatgcgattggtgagggaccgatagaaggtccggtgaagggactgcagagtattctggtgaacaaaaccccgctgacggacacggacggcaatcccgtgatacacggtgtgacggcggtctggcgtgccggggagcaggagcagacaccaccggaaggctttgagtcctccggagctgaaaccggactgggtgtggaagtgacgaaggcaaagccggtgacgcgcaccattacgtccgcgaacattgaccgcctgcgggttaccttcggggtgcagtcactggtgcagaccacgtcaaagggcgaccgtaacccggcatccgtccgcctgctgattcagttacagcgtaatggccgctgggtgacggaaaaggatgtcaccattaacggcaagaccacctcgcagttcctggcctcggtgattctggataatctgccgccccggccctttaacatccggatggtccgggagacggcggacagcaccacggaccagttgcagaacagaacgctctggtcatcgtacactgaaatcatcgatgtgaaacagtgctacccgaacacggccattgtggggctgcaggtggatgcggagcagttcggcggccagcagatgacggtgaactaccatatccgcggtcgcatcattcaggtgccgtcaaactatgacccggaaaaacgcacgtacagtggtatctgggacggcagtctgaaaccggcatacagcaacaatccggcctggtgtctgtgggacatgctgactcacccgcgctacggcatgggaaaacgtctgggggcggcggatgtggacaagtgggcgctgtatgccatcgggcagtactgcgaccagacggtcccggatggtttcggggggaccgagccgcggatgacctttaatgcgtacctggcacaacagcgtaaggcgtgggacgttctcagtgatttctgctctgcgatgcgctgtatgccggtatggaacggtcagacgctgacgttcgttcaggaccgcccgtcggatgtggtgtggccgtacaccaacagcgatgtggtggtggatgataacggcgtgggattccgctacagcttcagtgccctgaaggaccggcacacggcggtggaggtgaattacaccgacccgcagaacggctggcagacatccacggaactggtggaagacccggaagccatactgcgctacggacgcaacctgctgaagatggacgcgttcggctgtaccagccgcggtcaggcccaccgtgccgggctgtgggtgataaagaccgaactgctggaaacgcagacggtggatttcacgctcgggtctcaggggctgcggcacacacccggtgacatcattgaaatctgtgataacgactatgccgggaccctgaccggcggacgtgtcctgtccattgatgctgccacccgcaccctgacgctggaccgtgaagtgacactgccggagaccggtgccgccacggtgaacctgattaacggcagtggtaagccggtgagtgtggacatcaccgaacaccccgcgccggaccggatacaggtcagtaccctgcctgatggtgtggagacatacggggtgtggggactctccctgccgtcactgcgccgtcgcctgttccgctgtgtctccgtccgggaaaacacggacggcacctttgccatcacggcggtgcagcacgtaccggaaaaagaagccatcgtggataacggtgcccgctttgagccgcagtcaggttccctgaacagcgtcatcccaccggcagtgcagcacctgacggtggaggtgagcgcagctgacggccagtatctggcgcaggcgaaatgggacacgccgcgggtggtgaagggtgtgcgcttcagtctgcgcctgaccagtggtaagggagcggatgccagactggtgaccaccgccatcactgccgatacggagcaccgtttcagtggcctgccactgggggaatacaccctgacggtcagggcgattaacagttatggccagcagggcgaaccggccaccaccaccttccggattaacgcgccagcaaaacccgccaccattgaactgacgccggggtattttcagataacggcggtcccgcgtcttgcggtgtatgacccgacggtacagtttgaattctggttctcagaaaaacgcatcacgaacacagcacaggtggaaaaatctgcccgttatctggggaccggcagtcagtggactgtccaggggagccggattaagccggggacggatttctggttttacgtgcgaagcgtcaacctggtgggaaaatctgcttttgtggaagccagcgggcagcccagcaatgatggtgaagggtatctggaaattttccgggggctgatagatgagacgcttctgggccaggcactgaaagagcgcattgatgcttcagcgctgcgtacggaggtcacgcaactggaagaagatatccgtcagcggatggacacggatatcgcagaagtgacccggaaaatcgggaaggcggaaaacagcctcacgcagctggttgcgaaaaagaatgaggaccagacactggccatcgcgcaggtgagccagaaagtggaccgggtgagcagtgaaatctcacagactgtcagccaggggcagtcagaaaacgcccgacagatagcacaggtccgccagtacgtggataaaaaagggagtgaaattacctcgaccacggataaaaagctgggtgaccaggccgtgaccatacagcaaatccagcgggttcagtcagacacgcgcaatgagctgaatgccatgtatatgctgaaggtgcagaaaacaaaaaacggtattccctatgtggccgggattggcgcggggattgaggatgttgatggtcagaccctgagtaacattctgctgcaggccgatcgcattgcgatgattaccccggagaacggcaacaccacgccgctgtttgtggcgcaggggaatcagctgttcatgaacgacgtgttcctgaagcgactgtttgcggtgagcatcacgtcatccggcaatcctccgacgttttccctgacgccggatggcaggctgacagcccgcaatgcggatatcagtggagccatcacggcgaataccggcacgctcaataatgtcaccattaacgagaactgtgtcatcagagggaaactgtctgcaaaccagattgaaggcgatctcgttaaaacagtgggtaaggctttcccccgtgactcccgtgcaccgaagcgttggccatcaggaaccattaccgtcagggtttatgacgatcagccgtttaaccggcagattgttattccggcggtggctttcagcggtgccagacatgagcgggagaacagcgatacttattcgtcatgccgcctgatagtgaagaaaaacggtgctgaaatttataaccgtaccgcgctggataatacgctggtttacagtggtgttattgatatgcctgctggtcgcggtcacatgacgctggagttttctgtatcagcatggtgggtaaatggctggtatcccacagcaagtatcagcgatttgctggttgttgtgatgaagaaagccactgcaggcatcacgattagctga

SEQ ID NO: 9276 - DNA, 744 bp, Escherichia coli
atgacacagacagaatcagcgattctggcgcatgcccggcggtgtgtgcctgcggagtcgtgcggcttagtggtgagaacgccggagggggagcggtatatcccttgtgtgaatatctctgcagagccggaggcgtattttcgtattgcaccggaagactggctgcgggcagagatgcagggggagattgtggcactggtccacagtcatcccggtgggctgccctggctgagcgaggctgaccggcggctgcagataaaaagcgcactgccctggtggctggtctgccggggtgacattcacaaattccgctgcgtgccgcacctgacgggacggcgctttgagcacggggtgacggactgttacaccctgttccgggatgcataccatctggcggggactgaaatgccggattttcatcgcgaggatgactggtggcgcaacggtcagaacctttacctggacaatatggcggtcaccggcttttaccgggtgcccctgtcctctgcacaggcgggcgatattctgctgtgctgctttggtgcttcggtaccgaaccatgccgccatttactgcggcaacggtgagctgcttcaccatctgcctgaacaactgagtaaacgggagaggtattccgaaaaatggcaacgacgaacgcattctgtctggcgtcaccgccactggcacgcatctgccttcacggggatttgcaacgatttggccgccgcctcagcctgtatgtga

SEQ ID NO: 9277 - DNA, 342 bp, Escherichia coli
gtggctgagataaaaacgctgcatctggtcccgcgtgaagggatgcaggtgagtgagaaaccgtcggtggtgagggttcggtttggtgacggttatgaacagcgccgaccgacgggacttaatgccagactgaagacgtttcaggcggtgttccgggtgacggatgaaccaacccggcgctggctggatgaatttttatcctggcatggtggttaccgtgcctttttgtggcgaccgccgaaacataaccggacggtgagggtggtatgccgggagtggagcgtcacagataacgccaggtacagtgatttcagttgtacgattgagcaggtggtgaactga

SEQ ID NO: 9278 - DNA, 1224 bp, Escherichia coli
atgacagagcgtgaactgtccattatccgtgcgctgggtgaagaattcgccacggtgctggcggatttacagcgcacatttgaggagaagatggccgcacagtcgggggcgtttgaagagaaactggcttccctgtctgctctgttacagaagcatgtgacggtggatgaggtgcgccctgttctgcaggcgatgatgaatgacgccgtgggggccattccggtaccgcgcgatggtcgtgattatgatccggaggtgctgcagcaggcggtgaatgatgcggtcgcgaaaataccggtaccggcggacggtaaaagtgtcactgcggatgatgtacgcccgatgatcgagcagatggtgaaggacgcagtgagtcatatccctgctccgcgcgatggtcgtgattatgatccggaggtgctgcagcaggcggtgaatgatgcggtcgcgaaaataccggtaccggcggacggtaaaagtgtcactgcggatgatgtacgcccgatgatcgagcagatggtgaaggacgcagtgagtcatatccctgctccgcgcgatggtcgtgattatgatccggaggtgctgctgagggcggtgaatgacgctgtcggaaaacttccggtaccggcagatggaaaaagtatcacaccggatgatgtgcgtccgatgctcgagcagatggtgacggatgccgtgagtcatatccccgttccgcgcgacggtcgtgactacgatccggaagttctgcagaaggcggttctggatgcggtgagtgccctgccggctccacaggacgggcgtgatgctacggcactggaaatattcccggcgattgatgagcaaaaatcctttccccggggcacgtatgccacacaccagggcggactctggcgggcgtatgaaaaaacgcacgggatgcggggatgggaatgcctggttgacggggtggccgatattgacgtcagcatgaccggcgaacggtcgttcactgtggtggtccggcagagcagtggccagtgtacggaaaaaacattttccctgccggtgatgctctatcgcggtgtattcagaaccggcgaaacctaccaccccggcgatacggtgacgtgggggggctcgttgtggcactgcaacagcatgaccggtgataaacccggagaagctcattcatcaggctggaccctggctgcaaaacgagggcgggatgcaggaggtggaaagtga

SEQ ID NO: 9279 - DNA, 1365 bp, Escherichia coli
atgtggaaccttttgcggcgaacccgaaaaaaccagaaatcaggacgtgatgtaaaagaggtgggctggaccagcctgtttcaggcggtggctgagccttttgccggtgcctggcagcagggtgtgaaagccgatccggaaaccgttttgtcctttcacgcggtgttttcttgcatttcgctgatatcccaggatatcgccaaaatgcggctgcgcctgatgcagaccgatacacaggggatccgccgtgaaaaacgacagggggatattgcccgtctctgtcgtcgtcccaatgcacagcagaatcgtatccagttttttgaactgtggctgaacgccaaactgcgtcacggcaatacggtggtgttgaaaatccgtaactcccgggggcagatcaaagaactgcgtattctggactggagccgggttgaacctctggtggcggatgacggcgaggtgttctatcgcattacaccggaccggaactgcgggatcactgaggcggtgacggtgcctgccagggaagtgatccacgaccggtttaactgtttttttcatccgcttgtggggctgccgccggtgtatgctgccgggctggcggccacgcaggggcatcatattcaggaaaattcgacgtcttttttcagaaatggcggcaggccgtccggggtgattgagatccccggcagtattacggaagaaaatgcgaaaaaactgaagagcaactgggacagcgggtatacaggcgaaaatgcggggaaaacggccattctgagcaacggggcaaaatacaaccccacgacgttttcaccggtggatgcgcagacggtggaacaactgaagatgaccgctgaaattgtctgttcggtgttccgtgtcccggcctacaagattggcgtgggacaaccgccttccagtgacaacgtggaggcgctggagcagcagtattattcccagtgcctgcagacgctgattgagtccattgaactgttactggatgaggcgctggaaacgggggaaaacgagagtacagaatttgatgtcaccacgctgctgagaatggacagtgagcggcgcatgaaaacgctgggggatgcggtgaaaaatacgcttctcacgcccaatgaggcccgtaaacgggagaacctgccgcctctggccggcggtgatgcactgtatcttcagcagcagaactacagtctggaggcgctgtcccgtcgtgatgcccgtgaggatccgttcgcgtcgaccgggaaaacagtttcatcacagctgcctgacggcgcatctgacggtaataaggccataagcgaaacagagcgtgatgcggtgaaggcgatgttcagggggatactgcgaaaatga

SEQ ID NO: 9280 - DNA, 1662 bp, Escherichia coli
atgatacctgtatggagcacagcctgcccggactgggcagagcgcctgaaaaaggggctgtcgattattccggatccgatttatccggacgaggccgcacatgccctggcgatttttaaacaactgcggattgtggatgcacctggtagcccgacgttcggggagtcctgtgcaccgtgggtgtttgacctggtggcggccctgtttggctcctacgatgcgcagaccggtgtacgccatatcaaggaagtttttatccttatccccaagaaaaactcgaagtccacgctggccgcggggatcatgatgactgcactgttactgaactggcggcaggcggcgggttacacgattctggccccgactgtggaggtggcggccaacgccttcaaccctgcccgggatatggtacgacgtgacgatgatctggatgacctctgccaggtacagacccatatccggaccatcacccacagggtgacagacaccaccctgaaggtggtggctgccgatccgaatacggtgtccggtatcaagtccgtgggtacgctgattgatgagttgtggctgtttggcaagcagtgcaaggcggaggacatgttacgtgaagccataggcggccttgcctcccgcccggaagggtttgtggtgtatacgaccacccagtcgaatgaaccgcctgccggggtgttcagacagaaactgcagtacgcccgggatgtgcgcgacggcaaaattcatgatccgcactttctgccggtgatatttgaacaccctcctgaaatggtggaaagcggggctcacctgctgatggaaaacctcgccatggtcaatccgaatctcggctattcagtggatgaggcctttctgtaccgggagtaccgtaaagcccgggaagccggtgaagagacattccgggggttcatgtcaaaacacgccaatgtggaaattggtcttgccctgcgctctgaccgctgggcgggggctgatttctgggaagagcagggccgttgtatcagcctggacgatatcctgcgtcgtgctgatgtggtgacggtggggattgacggcggagggctggatgatctgctggggatgtatgtgattgggcgtgaccgggagacccgcgaatggctgggctggggccatgcctgggcgcatgaaaccgcggtggtccgacggaagagcgaggcgtcccggtttcaggatcttgttgcctgtggagatatgaccattgtccggcgtgtcggggatgacacggcggaagtggcggaatatgtgcgtcgcattcatgaggctgagttactggaccatatcggtattgacccgtcaggggtggggcagattctggattcactggcggaagccgggatccccgacggaattgtggtggggataagccagggctggaagctgggcggggccatcaaaaccaccgagcgcaaactggctgaaggggtactggtgcatggtggccagcccctgatggcctggtgtgtcggcaatgcccgggtggagcctaaaggtaacgccatccttattaccaaacaggccagcggacggggaaaaattgacccgctgatggcgctcttcaatgcggtgtccctgatgtccctgaatccggaaccgaaaaagaaagcgtatgaggtttttttcatataa

SEQ ID NO: 9281 - DNA, 495 bp, Escherichia coli
atgaaccgcgtactgtgcgtggtcatcattgccctgctggtggcctgtggtgcgcttagtctggggctgaatcattaccgtgataacgccataacctacaaagcccagcgcgacaaaaatgtcagagaactgaagctggcgaacgcggcaattactgacatgcagatgcgtcagcgtgatgttgctgcgctcgatgcaaaatactcgagggaattagccgatgcgagagctgaaaatgaaactcttcgcgctgacgttgccgctggtcgtaagcgcctgcgtatcaacgccacctgtccaggtcccgtgcgtgaagccaccggcaccgcccgcgtggataatgcaaccggcccccaactggcagacaccgctgaacgggattatttcatcctcagagaacggctgatgacaatgcagaagcagctggaaggggcgcaggaatatatccgcactcagtgcactaagctggctttttattatccggaggatacatga

SEQ ID NO: 9282 - DNA, 441 bp, Escherichia coli
gtggaaaaagaaaatatcaccctcgatccgcgttcttcatttactccatcttcgtcggcagatattcccgtgccaccagatggattagttcaacgcagtacccgaattaaacgcattcaaaccaccgccatgttgttattattttttgcggcggtaatcaattatctcgaccgcagttcgctgtcggtagcaaatttaacgattcgtgaagaattgggattaagtgccaccgaaatcggcgctttgctctccgtgttttcactcgcttacgggattgcgcaacttccttgcggcccactattggatcgtaaaggcccgcgcctgatgttgggacttgggatgttctctggtcactgttccaggcaatgtctggcatggtgcacagctttacgcagttcgtgttggtgcgtatcggtatgggaattggtgaagcgccgatga

SEQ ID NO: 9283 - DNA, 639 bp, Escherichia coli
atgagcgggcttacgattaatgcgctgtgcgccggttacggcaaacggcggattattgagcatctgtcgatttctacgctgccgtttgctcgtcgggctgaaaaagttgtgttcctgccgcagtccctgccgcagggcgtgcatttacaggtgctggagtcggtggttgtcgcccagcgcgcctccggcgccgggcaaaatcaggcgcaggctatagcgctgctcgaagagctaggcatcgcacatctggcaatgaactacctcgatagcctgtccggcggtcagaagcagctggtggggcttgcacagtcgcttattcgccgccccgcattattattgctggatgaaccactgagcgcgctggatctcaattatcagttccatgtgatggatgttgtatcgcgcgaaacgcgaagacgcaatatggttacgctggtcgtcttacacgatatcaatatcgcactgcggcatgccgcccaggtcatcatgctgaaagaggggaaacttatcgacagcggcgacccgcaaacggtgatccatgcagagagccttgcgcaggtatacggcgtacgcgggagagttgaacgttgtgctcagggaagatcgatggtgatagtggatggtgcaatcgaaaaatag

SEQ ID NO: 9284 - DNA, 822 bp, Escherichia coli
atgcgattagcaagtcgttttggttatgctgcaaaccagatacgtcgtgaccgtccactgacacatgaagagctgatgcaccatgtgccggggattttcggggaagagaaacacacgtcccgaagccagaactatacgtacatccccaccatcaccgtactggaaaatctgcagcgggaaggctttcagccgttcttcgcctgccagacccgtgtgcgcgaccagagccgccgggaatataccaaacatatgctgcgtctgcggcgggccggacagataaccggtcagcatgtgcctgaaattattctgctcaactcccatgacggttcatccagctaccagatgttacccggatattttcgtgccatttgtaccaatggcctggtctgcggtcagtcgctgggagaagtccgggtgccacaccggggaaacgtggtggacagggtcatagaaggtgcttacgaagtggtgggcgtgtttgacctgattgaggaaaagcgtgatgccatgcagtcgctggtcctgccgccaccggcacgccaggcgctggcacaggcggcgctgacttaccgttatggtgatgaacatcagcccgtcaccactaccgacattctgacgccacgacgccgggaggattacggtaaggacctgtggagtgcttatcagaccatccaggagaatatgctgaaaggcgggatttccggtcgcagtgccagaggaaaacgtatccatacccgggccattcacagcatcgataccgacattaagctcaaccgggcgttgtgggtgatggcagaaacgctgctggagagcctgcgctga

SEQ ID NO: 9285 - DNA, 465 bp, Escherichia coli
atgaaaacattgtctcagaacaccacctcttcggcctgtgcaccggagactgacctgcaacaactggttgccaccctcgtccctcatgaacagcgcatcagcttctggccgcagcattttggcctcattccacagtgggtgaccctggaaccccgtgtcttcggctggatggaccgtctgtgtgaagactactgcggtggtatctggaatctgtacaccctgaacaacggtggcgcatttatggcacccgaaccggatgacgaaacatgggtgctgtttaacgtcatgaacggtaaccgcgctgaaatgagcccggaagccgccggcattgccgcctgtctgatggcgtacagccatcacgcctgtcgtacagagaattatgccatgacggttcattattaccggctgcgggattatgccctgcagcatccggaatgcagcgccattatgcgcatcattgactga

SEQ ID NO: 9286 - DNA, 273 bp, Escherichia coli
atgcagcatgtccctgaaggcgtgattcaggcaccagaatcacccgacgccccggaggcgctgccggggtgtcgttccatttctgatgatgacctgtgcgcctggtgtacccgtctgctttaccgtcccggagaaatcagtctgtgcagactgagtatacaggcaatggcatctggccatccgtctgtgaccggaacggttacgcgtacggctgtccggaatttcagccgaatatcattcatccctgatattaccgggtctcacggtcagtga

SEQ ID NO: 9287 - DNA, 819 bp, Escherichia coli
atgcgactagccagtcgttttggttatacgaaccagatacgccgtgaccgtccgctgacacacgaagaactgatgcactatgttcccagtattttcggtgaagaccggcatacttcccgcagtaaacgatatgcgtacattcccaccatcaccgtactggaaagcctgcagcgggaaggctttcagccattcttcgcctgccagacccgtgtgcgcgacccgggccgccggggatacacaaaacacatgctgcgtctgcggcgggccggagagataaacggagaacatgtccctgaaatcattctgctcaactcccatgacggtacctccagctaccagatgctgccgggttacttcaggttcgtctgtcagaacggatgcgtctgtggtcagtctccgggggaagtgcgtgttccgcatcggggaaatgtggtggacagagtcattgaaggggcttacgaggtggtgggcgtgtttgaccggattgaggaaaagcgtgatgccatgcagtcgctggtcctgccgccaccgacacgccaggcgctggcacaggcggcactgacttaccgttatggtgacgaacatcagccagtcaccaccgctgacattctgacaccacgacgccgggaggattacggtaaagacctgtggagcgcatatcagaccatccaggagaatatgctgaaaggcggaatttccggccgcagtgcaaaaggaaaacgtatccacacccgtgccattcacaacatcgacaccgatattaagctcaaccgcgcattgtgggtaatggcagaaacgctgctggagagcctgcgctga

SEQ ID NO: 9288 - DNA, 873 bp, Escherichia coli
atgaatccgtctgatgccattgaggcaattgaaaaaccgctctcctccctgccttactcactttcccgtcacatcctggaacatctgcgcaaactcaccagtcacgaacccgtgattggcattatgggtaaaagcggggccggtaaatcctcactctgtaatgcactgtttcagggggaggtcaccccggtcagtgatgttcacgccggcacccgggaagtgcggcgcttccgtctgagtggccacggtcacagcatgattatcactgacctgcccggggtgggcgagagccgggacagggatgcagagtatgaagccctgtaccgtgacattctgcctgaacttgacctggtactgtggctgattaaagccgatgaccgtgccctgtctgtggatgagtatttctggcgacacatcctgcaccggggacatcagcaggtgctgtttgtggtgacgcaggccgacaaaacggagccctgccatgaatgggatatggccggcattcagccttctcccgcacaggcacagaacattcgtgagaaaacagatgcggtattccggctgttccggcccgtacatccggttgtggccgtatcggcctgcaccggctgggaactggatacgctggtcagtgcgctcatgacagcgcttcccgaccatgccgccagtcccctgatgacccgcctgcaggacgagctgcgcacggaatctgtccggtctcaggcccgtgaacagtttaccggtgcggtggaccggatatttgacactgcggagagcgtctgtattgcctctgttgcacgcgcggttctgcgtgccgtccgtgactcggtggtctctgttgcccgcgctgtatggaactggattttcttctga

SEQ ID NO: 9289 - DNA, 273 bp, Escherichia coli
atggcgcataatttcaaatttcgcaattctgattctgcctttgccagcaggcacgggtggcgttctcacgcattcaaatatgactggtatcagcacgatccctgtactgaagaacaggccgaatggctgattcataactaccgcagacgtggatatgagtttaggaaagccctcaccctcgattatcgtcactggataatctacgtcagactcccttattccgaacgcccaccgcgtccgtcccgcacattccagcaacgcatctggaggtaa

SEQ ID NO: 9290 - DNA, 222 bp, Escherichia coli
atggaccccgaacagggggagtgctatttatctggaaggattctgttgatgaaaatcgaagaattacgtgaaatttttagtgaagatggcctctatgctgtgcgcgttgagaatgggggtattacctacacagcgttaattcctgatgatcatgtagtgttatctgttgaggcattcattgaatacttggaaagactcggtttcaaggtagttcgggaataa

SEQ ID NO: 9291 - DNA, 1104 bp, Escherichia coli
atggaacatcaggtgaataacttcactgagtatcggggtgataagctcaaactagcgagaatggctgttgggctttcttgtgaagagttagccgaaaaaattggcaagacaaagcaattcgttagcaaactggagaaggggtgcaggccatcggagcaatgtcttgagttaatatcttcagcgcttatgattaagtccagttttctttttactgaacgaaaatacgctctggaaagtgatgtctgccattttcggagtaagaagtccaggactcaaacgctgactaatagtgtattggccagggctgagattcttaatattataatttctgctgttgaaggtgaaatcgaatttcctgacgttaacataccggagcacccaggggctgaattacttactccgaatgatattgagcgagtggcagaagattgtcgccgtgcctggaatttaggtcttggccctatatcatcaatggttaaattggcggagagtttaggggtaatcgttgcgcatgttacgggagtcgatgatcgtgttgatgcttttactgttcacaataacaggcctgttatcatcaggaacaatgttaaaaaaagcatatgtagatttcgctctgatttaggtcatgaattagggcatttagtaatgcatgagggcataacgacaggtgataaacttacggaatcacaagccgatcacttttcgagcgccttattagttcccaggttatctttcattaaagaatttccacgaatacgaggtaagcaattcgactggaatgctctggttgaatttaaacttagatggaaaatcagccttaaaatgtgtatttatcgagccagcgcattaggcttattgacccaggaacaggcaagaactggctatatgcatcttaattccagagggtatacgagagttgaacctggtgatgaacttttgcgccctgaagaacccggcatgctggccgaggcgattgaaatgctggatgatgcaacctggctaagaattcttatgaaaactggcttgagccaagatttaattcgtgagttgttctccatcaacagacctattacaaatccaagaaatattttccagattgtttga

SEQ ID NO: 9292 - DNA, 651 bp, Escherichia coli
atgaatgaaaatcagttagctccttgttgggaatttcaaccttatcttgctgaaaactatgttcgccacttgttggcggagatcgctaacgtacttgagcagctgtactatcataagcacgcattagacagcaactggtctgaaggtgtaagggcttatgattgggtcagaaatcatcttattcaaaatgaagatgcaattcctggccttgagatgatttccaaggggttggactatgtagttgctttaaataaagttccgctacaatttaccaaagattgcattaataaccccaaaaagaaacatcgtctgcgtcgaaataaagtagagtatgagcagctctcattgtttggtgatgttgaggctgagcaagatattacatggcgagtcatagctgagccttttttatccgaagagggcgatggtgaattagagtccacactgcctcgttgggaggtagctcttgttggatttaatacttatggtgctcagattagtatagtttctcatcaatctacagcatcgatgccgcttatgcctcttgattataacacactccctgacgaagcggagattaataaggtgcctcttcgtcggcgtacgaaggataaagatttggatgtgagcagtgatggaacatcaggtgaataa

SEQ ID NO: 9293 - DNA, 213 bp, Escherichia coli
atgctctacacacgtaggttagcctcttacgtgccgaaaggcaaggagaagcaggctatgaagcagcaaaaggcgatgctaatcgccctgatcgtcatctgtttaaccgtcattgtgacggcactggtaacgaggaaagacctctgcgaggtacgaatccgaaccggccagacggaggtcgctgtcttcacagcttacgaacctgaggagtaa

SEQ ID NO: 9294 - DNA, 168 bp, Escherichia coli
atgaccactattaccaaagaacgtattgaattgttcattaaaaacccgcttgaaaacgggcttacccgtggtgaacaaatggaactggcacggattgcgctggcatcgctggaagcagagccggttgtgttctggtttgaaaaatatcaagaaggggctacggcatga

SEQ ID NO: 9295 - DNA, 264 bp, Escherichia coli
atggcaactttgacaaaaaaagaacaggcatggttgaacgaattacaggacgttcttgatcgctgtccatcaccgaaaaaaattggtttttacaccattggcgataaaagcatttacctgtatgacctgcgccgcatggatgaaatcatggaggctcttgataatcgttcgtcaatggattggtgtgttgctgtccatgatatgaatgcagggtttgatgaaaagattttgttcccctcatcagttgaaagcactgcgggttaa

SEQ ID NO: 9296 - DNA, 219 bp, Escherichia coli
gtgcctacattattcagaaaagaatatccgcgaaaaagtagagcgacagaatttttgtttctcattctgtttatcgtgttgatgataccgatatccccgttaattctggtatggggaatcggaaaaataattgagccagttattgaattgtataacgacgtggtatgggctccgttcaacacactgcacaataaaattaatccgtataaggaaaactga

SEQ ID NO: 9297 - DNA, 216 bp, Escherichia coli
atgggtattgccgcaagttataccatgcatctctattgtgattgccgccagtgtacggatggcaaatatcagtcgccagattttggtgagtatatcggtacgtcatgggctggctgtgcaaaagaggcacgtaaagatgggtggcgaataagtgccgacaaaacgcgtgcttttgcgccagggcataaaattttgaggagcaacaaaggagagtga

SEQ ID NO: 9298 - DNA, 183 bp, Escherichia coli
atgcgaaaattcaaaataattattgaaacgggaatagccggtggagatttcgaggatgaattcgaagtggatgatgatgcaacaccagatgaaatacaggatgaagctaaagatattttctttaactactgcaattactcataccacgaaataaaagacgaagaggaagaacaaaatggctga

SEQ ID NO: 9299 - DNA, 771 bp, Escherichia coli
atggaaaccgtatttgacgcactgaaagcaatgggaaaagccacatcggtagaactggccgcgcgacttgatatcagtcgtgaagaggttctcaacgagctgtgggaactcaaaagaaatggcgtcgttgataaaactggtcacacctggtttctggctggcgaaggtgaatcccgggtaaccgaagagcggccagtaaaatctgaagcacaggatatgctgaccggggaggtcgaacaaaaagttaccgcagacatgatgattgagtttatcggtcaggatggtgctaaaacgtgtgaggaactggcgggtaagttcggcgtcagtactcgcaaggttgcctccacgctggcggtggtaaccgcaacggggcggctggcacgcgttaatcagaacggtaaatttcgttactgcatgccgggcgataatttaccagcagagccgaaagccgcgctggtaacggaaagtgatggtaaggcctttcctcagccagcaggtgctgcgttaccagtccgggaagccgcaacacaggaagaaattaaaacagaaactgtggcggacattgtgcagccgttgccatcgtttaccgaaacgcaagcagatgagctgatttttccgtcccttcgcagggcaaacctggcgctgcgcagggcgaaaagtgatgttcagaagtgggagcgagtctgcgccgcgctgcgggaggtgaacaagcaccgggatattgttcgacagattactgattcttcccgccgtgttgtatcggaaaagtga

SEQ ID NO: 9300 - DNA, 423 bp, Escherichia coli
atggaccgctgccgggcgggtgaaacatggcctccggacctggctgagtttgtggcgctgatttcagaaagcggggccaatccatttggcctgacggtggatgctgtgatggaggagtaccgccgctggcgtgatgagtcctggcgatatgacggaagcgacaaatatccgtggcctcagcctgtgctgtaccacatctgcctcgaaatgcgtaccagagggattgagcgccagatgacgcagggtgagttaaaacgacttgcggaacggcaactgacgaaatgggcaaagcatgttggtaacgggatgagtgttccgccagtgcgacgacaactggaaggggcgaaacacccgcaagggccaacgccaattgaacggctgaaacaggaatacgaacgccggaaggccgctggttttatttga

SEQ ID NO: 9301 - DNA, 945 bp, Escherichia coli
atggcagtgtatatccaccttctggtgagcgcgtcacgaaatgtcacgacatgtcacggcgtgtcactacgtggtcacattgatgtcacgacggaagatttagcaagtgcgcttgatgtgacggaagaagtaattgattcaattttacaggcaatgcaggggcgggtacttgatggagatttaatcaccggatgggaaaaacgccaggtactgaaagaggacaatggcaacgtttcacaaaccgcgaaatccccggcagagcgcaagagagcgcagcgcgagagggaaaaattacgaaaacagaatgaggggtgtcacgacgagtcacgcatatgtcacgacatgtcacgacgagtcacgacagataaagatacagataaagaattaaaccccacacataacgcgcacgtgcgcgagagtgctccgaccagtgagtcgagtggtacgccgttgcaggcagcagaacctgcatccctggatggactgagcgaacccatcgggaaatttccgatggtcgatgactggcatccgtcgccggattttcgacgacgggctgcgttgtgggggatggctttgccggagccggaatttacacctgctgaacttgccgctttccgggactactgggcagcggaggggaaagttttcacgcaggttcagtgggagcagaaattcgcccgtcacgtaaatcacgtcagggcgcaggttaagccagtcagcaagggggtaaaccatgcagcagcaccaggtggcaccgcatcacgggcagttcaggaaattcgggcagcacgtgagcagtgggaacgtgaaaacggatttatcagcgacggaaacggtctggaagctgtgggaactcatgggggaggtttattcgaaccgctggacccagaagaacggggccgcaccttcgaagctctggattgcacagattggcgcgatgactga

SEQ ID NO: 9302 - DNA, 216 bp, Escherichia coli
atggtaaaagaattcgtggcaatttataaccatgagcggtcacatttggcattgaaatacaaaacgcccgatgaagttcatcaaccgttttacggacagaaaactgtcaacttatatcaggaacagttaaagccaggtgcgtattttcatgaaaggagatcactcaataaccccctgtgtcagcatagttgtcgcctcaattttttaaggagataa

SEQ ID NO: 9303 - DNA, 513 bp, Escherichia coli
atgccaggacaaccaataccaagtgagctcaaagagaaaggactgatatggcttttaccaccatactgctggtcacatcgtcagatagcccgtaagctgaagatcagtgcctcagttgtatcaaaatggagatgtgagttagtggagcaaggacttttacctgaaaatgaaaagattacctccgttgatgttgaagactggacaccggagcgtcgattctcagttgttcttgagacggctacgctgtcagaaatggaacttgctgattattgccgacgcacgggattgtttgttgaacaggttaaagaatggcgggctatctcaattcaggcgcatgaaaagaaattgacggaaaatatccgaacagacagggcattgcgtgacgcaaaaaataagttacgagaactggagaaagagcttaagcgcaaagataaagctctggcggaagcagcggccctgcttatattaagggaaaagttcaatgccctctgggacaacagcgaggaagactga

SEQ ID NO: 9304 - DNA, 807 bp, Escherichia coli
ttgtgcaactctccagagtttgcatccttacctccaaatgtgatcgtaccaactctggcagacaggggtatttatattgcttctgaatcaagcttttatcgtgtactgaaatcagccaaccagttgaagaaacgatcccgtgaatgtcagtataaacggcctgatgtactcagggccgttgcaccgaatcaagtctggagttgggatatcagctatttgccgtccggggtcagaggtcagcatttttacctctatatgatcgtcgatatttacagtcgcaagattattgctgcagaggtatttgccagcgaatctggaaaacatgcagcagaactactccagcgggcaatatggaatgaaaaatgttcatccagcaatctggtactccattctgataatggtgctcccatgcgcagttacacgttgttggcgaaaatgtatgcgcttggtgtgctaagttcttattcccggccaagagtcagcaatgataatccttactcagaatctttgttccggactctcaaatattgtccctggtggcctgagaacggttttcgcactattaatgatgccagaatatgggtaaaccgttttgtaaactggtacaactttgaacataagcacagcgggatcaaatacgtcacgccagccgagcgtcatcaaggtaatgatatgaaaatactggcggccagaaaaacagtataccagctggcacgcgaacagcatcctgaacgttggggaaagcatctacgtaactgggactacatatcagaagtctacctgaatccagaaaaagaggctgcataa

SEQ ID NO: 9305 - DNA, 243 bp, Escherichia coli
atgcacaaggaaaaggaagccgttcaacatactacggtagattacttccagatatgcctgcatatactatcaatacatattttaaccgacctgggaatggttgccatattcactatgagcaagatcgtgttctatcccagagagaagctgcaagattacaatcgttcccggatgattttattttcttcggaggtcaaacagcaattaatacccaaatcggtaatgcagtgcccccatttttag

SEQ ID NO: 9306 - DNA, 135 bp, Escherichia coli
atgtccgttaatgaatcagaagagaggttgcttaactccacaaagaaaacatttctgtcaatgtggtctcacagcaatattttctataagaaaggaaaggaaaggaaaggaaaggaaaggaattttgcgatgtaa

SEQ ID NO: 9307 - DNA, 519 bp, Escherichia coli
atggctgtaccgcctgacgcggatgcgccgccaccaacagccccgccaatagcgctgccgatactcccgacaatccccaccattgcctgcttaagcagaatttctgtcatcatggacagcacggaacgggtgaagctgcgccagttctgttcactgccggtcagcatcgccgccatattctgcgcaataccatcaaaggtctgcgtggcagcacttttaacctgcgacatactgtccgtggcactctcttcccactcactccagccggacttcaggcctgccatccagttcccgcgaagcaggtcttcagccgccctggtctttttctgctctgacatgacgttattcagcgccagaggattatcgccatactgttccttcaggcgctgttccgtggcttcccgttctgcctgccggtcagtcagcccccggcttttcgcatcaatagcggcccgttttgcccgttgctgctgtgcgaatttatccgcctgctgcgccagcgcgttcaggcgctcctga

SEQ ID NO: 9308 - DNA, 975 bp, Escherichia coli
atggcagtgtatatccacctcctggtgagcgcgtcacgaaatgtcacgcgaggtcacattgatgtcacgacagaagatttggcaagtgcgctcgacgtgacagaagaggtaattgattcaattttgcagacgatgcaggggcgggtacttgatggtgatttaatcactggatgggaaaaacgccaggtgcttaaagaggacaacggcaatatttcgcaaaccgcaaaatctcctgcagagcgcaagagggcgcagcgagagagggaaagaaagcgggaacaaaatggcgattgtcacggcgcgtcacgaaatgtcacgcacatgtcacgacgagtcacgacagataaagatacagataaagatacagatcaagaagatcaaaacactatggtccatggcgtaaaaaacgccacgaaccaggcaggggatgttcagaccgtcaatcttggtcagccagcaggcacgacaccggaagccgattcagcgtatgcgctgaaagccgattcgggcgctgtgcagcaggtgatgaccgcaaggccggagcaatcacaccaactgcagcagcccgaagccgattccgccattcagcgggaagccgatcgggtagtcccggaaaacaccgggcagtctgtgggacgagtggattatccggatgtgttcgaacaggtctggcgggagtacccgttgcgtgctggggcaaacccgaagaaatccgctttcagtgcctggaaggccagattacgcgagggggtgccaccagaggccatgctggatggcgtgaggcgttacgcaagatacttggcggctaccgggaaaacgggaacggaatttgttcagcgagcgacgacgttttttggaccggaccggaattttgagaacccctggttgctcccggtaagcggcacgaacaaccagcgttgtgtgaatcatatttctgaaccggataacgaaattccgccgggcttcagggggtaa

SEQ ID NO: 9309 - DNA, 213 bp, Escherichia coli; identical to SEQ ID NO: 4953

SEQ ID NO: 9310 - DNA, 1143 bp, Escherichia coli
atgaaggcaattgacttatttgcgggggctggagggtttagtttatccgcccacaatacaggcgctatagatgttgttgctgctatagaattcgatagcgcggctgcaaacacctacagaaaaaatatgttagaaaggcttgagcataagaccgaacttttacaggaagatattttactcgtaggcccaaaaaagttaagaaaaaaaataaagctcaagaaaggcgagcttgatatgatacttggtggacctccgtgccaaggtttttccagtcatcgaattaatgatgctggtgttgatgatcctagaaataaattacttttaaggtatttcgattttgtttgtgaatttaaaccaaaagcttttttggtagaaaatgtctccggtttgttatggaagagacatgaagcccatttgaaacgctttaagtttttggcttccaaaaatggttatactttaattcattgtgatgtattaaatgctcgtgattatggtgttccgcaaaatcgcaaacgagttttcattgcaggtgtcagaaatgacattttaaaaaaaagaaataatattgagtttccacctcaagctactcatttcaaccctaattctaatgaagtaaaaaacaattcaaaaaaaagatatatatctgaatactttcttaaacatacttcttactcaattgatgaagcacaagagctacttgaaaacctagaatatcaagacgcacccataagcgaaaaagatccatgcaacatacatatgataccaactgagcgtatggaagagcgtttcagagccacaaaactcaatggcagtagaagcgatgcaggaaaagaatttgagctaaaatgtcattccaatggatacgcaggccataaagatgtttatggccgcataatgattcacctcccagccaatacaattacaactgggtgtaacaatccatctaagggaagattcattcatccatgggaaaatcacggcatcactttaaggcatgcggcaaggttgcaaacgttccctgatgactatattttttggggtaatgcgacagagcaagcaagacagattggtaatgcagttccccctatgttaggcacaatattaataaatgcattacttaacataattgcacccaatagataa

SEQ ID NO: 9311 - DNA, 198 bp, Escherichia coli
atgctaaaacagcaggatatgacagaaaccgccagagtggtgtttaatgaattaagcgttaccgaaccggcgacagtcggggagatagcgcagaatacttacctttcacgcgaacgctgccagttaatactgacccagctggttatggcgggtctggcagactatcagtttggttgttacagacgccttcagtcctga

SEQ ID NO: 9312 - DNA, 375 bp, Escherichia coli; identical to SEQ ID NO: 4955

SEQ ID NO: 9313 - DNA, 924 bp, Escherichia coli
atgcgtaatctgccgtccggggttgttcctgccgttcgccagccgctagtggaagacaaaacattgctgccgtttttcagtaacgcacgggtgattcgtgctgctggtggtgctggtgcattgtctgactggctgttgcgccatgttaaatcctgccagtggccacacggcgattatcaccacagtgaaaccgtcattcaccgttatggtaccggcgcaatggtgttgtgctggcactgcgacaaccagctgcgtgaccagacatccgaatcactcgggcaacttgctcatcaaaacctgtcagcatggatgattgacgtcatactccatgcaatgaatggctcgcaggaacgggaattatcgctggctgaattatcctggtgggcggtccgcaatcaggtggcggacgcgctaccggaagcggtattacgtcgttcgctggggttgcgtgcggaaaaaatccgctcaatgtaccgtgaaagcgacatcgtaccgggagagcagaccgccaccagcatactgaagcagcgcacaaaaaatcttgcgccgctgcctcacgcccaccagcaaaccccgccacaggaagagacggtggtcagcattgccgttgatcctgagtctccggaatctttcatgaaacgacctaaacgtcgccgctgggttaacgagaaatacacacgctgggtgaagacacagccgtgtgcgtgttgtggtaagccagccgacgatccccatcacctgattggtcatggtcagggcggaatggggacaaaatctcacgatattttcacgctaccgctgtgtcgggagcatcacaacgagcttcatgcggatcctctggcgttcgaagaaaagcatggttctcaggttgatttaatttttcgttttcttgatcacgcctttgcaactggcgtgcttgggtaa

SEQ ID NO: 9314 - DNA, 1611 bp, Escherichia coli
gtggcgcttgaggatgcgagcacgacgaaaaaggggatagtacagctcagcagtgcgactaacagcacttccgagtcactggcggcaacgccaaaagccgttaaggccgcgtatgagctggctaacgggaaatacaccgcacaggatgcaacgacagcacagaaagggatagttcagcttagcaacgcgaccaacagcacatctgaaatgctggcggcaacgccaaagtcggtaaaggcagcctatgaccttgctaacgggaaatatactgctcaggacgctacgacagcacaaaaaggaattgtccagctcagtagtgcaaccaacagcgcatctgaaacgcttgccgcgacaccgaaagcagtgaaagcagctaataataatgcgaatggtcgggtaccttctgcccgtaaggtgaatggtaaggcgctttcagcggatataacactgacgccgaaagatattggtacgcttaactcaacaacaatgtcattcagcggtggtgctggttggttcaaattagcaacggtaaccatgccacaggcgagttctgttgtttcaattacgttgattggtggtgcgggatttaacgtggggtcacctcaacaggcaggtatatctgaacttgttttgcgtgcaggtaatggtaatccgaaggggattactggtgctttatggcagcgcacatcgacagggtttacaaattttgcctgggtcaatacatctggtgatacttacgatatttacgttgcaatcggaaattatgcgactggtgtaaatattcaatgggattataccagtaatgccagcgtgacgattcatacgtcaccagcatattctgctaataagccggaagggttaacggacggtacagtttattcactctatacgccatcagagcagttttatccgcctggcgcaccaatcccgtggccatcagataccgttccgtctggctatgccctgatgcaggggcagacttttgacaaatctgcatacccgaaacttgcagccgcttatccgtcaggcgtgatccctgatatgcgtggctggacgattaagggcaaacccgccagtggtcgtgccgtattgtctcaggaacaggacggcattaaatcgcacacccacagcgccagcgcatccagtacggatttggggacgaaaaacacatcgtcgtttgattacggaaccaaatccacgaataacaccggggcgcatacgcacagtctgagtggctctacggggtctgccggtgatcatactcatggtaatggtattcgttggccaggaggcggcggttctgcgttagcattttatgatggcggtgggttcacttatgtccaggattcacagtatcaagtaagcccggggacttcttcccgtagatcgtattatcaacgtattcagacacagtcagcaggtgctcatacccactcgctgtctggtactgcagcaagttctggcgcacatgcacatactgtaggtattggtgcgcatacgcactccgttgcgattggttcacatggacacaccatcaccgttaacgctgctggtaacgcggaaaacaccgtcaaaaacatcgcatttaactatattgtgaggcttgcataa

SEQ ID NO: 9315 - DNA, 678 bp, Escherichia coli
atgaataccagaactctttttcccctgcttttcactgttgcatccttctccgcctccgccggtaactgggctgtcaaaaacggctggtgccagaccatgacggaagatggtcaggcgctggtaatgctgaaaaatggcacgattggtattaccggcctgatgcagggatgcccgaatggcgtacagacgctcctgggcagccgtatcagtattaacggtaacctgatccccacatcacaaatgtgtaatcagcagacgggattcagggctgttgaggtggaaatcggacaggcgccggaaatggtcaaaaaagccgttcactccatagcagagcgtgatgtgtccgttttacaggcatttggtgtacgaatggaattcacccgcggtgatatgctgaaggtctgtccgaaatttgtcacatcacttgccgttttttccccgaaacagacgaccactattaataaagactccgtactgcaggctgcccgacaggcatacgcccggaaatacgacgaggaaacaacagaaaccgctgattttggctcttacgaagtaaaaggcaataaggttgagtttgaagtattcaatcctgaagaccgtgcgtacgacaaagtgaccgtcacggttggtgctgacggtaatgccaccggcgccagcgttgaatttatcggaaaatag

SEQ ID NO: 9316 - DNA, 234 bp, Escherichia coli
atgttggactgtcgccctgttttattgcccgaaggccctttctcacgcgaacaggcggttgtcatcacaacagcttaccgcaatgtgcttattgaagatgaccagggaacgcatttccggctggttatccgcaatgccgaagggcagctacgctggcggtgctggaattttgaacctgatgccggaaaacagctaaattcgtatctcgccagtgagggaattctcaggcaataa

SEQ ID NO: 9317 - DNA, 1962 bp, Escherichia coli
atggcatttaaacactatgacgtggtcagggcggcatcgccgtcagaccttgcgaaacgactgacacaaaaactgaaggaggggtggcagccatttggcagtccggtggccatcacgccttataccctgatgcaggccattgcggcggaaggtgatgtcaccacacctgtggtggtgaagccgtcggatggagaaggcgcagttatcagcaccaccagcaacccggagtattactttgttgttgccctggccgggcagtcaaacggtatggcgtatggtgaagggcttccgctgccggagacatatgaccgtccggacccgcgtattaaacagctggcgcgtcgcagcactgtcacgccgggtggtgcgtcctgtaactacaatgacattattcctgcggaccactgcctgcatgatgttcaggatttgagtaagttttcacacccgaaagccagcgcagctcagtatggatgcgtggggcagggattacatatcgcgaagaaattgttgccgtttattccggcgaatgccggtattcttctggttccgtgctgccgtggtggttctgcatttttggcgggcgatgaaggtaccttcagcgaatccaccggcgcaagcgagacctcggcacgctggggtgtagataagccactgtacaaggacctgcttacccgtactcaggccgcactgaaggccaaccctaaaaatattctgcttgcagtggtctggatgcagggcgagtttgatttgaaacagggtgcatacgccactcagccggggctgtttgattccatggtggaaaaatatcgttctgacctgtcggaattcggaggtcagtgtctcgggggctctccgtcatcggttccctggatttgtggcgacacgacctactactggaagcagacttattcttcgcaatacgatgcggtgtatggtgcatacaagacgaaatccgcaaaaaaaatcttctttgtgccgtttatgacggatgaaaacgggcgaaatgtgggtaccaacgagccgtcagaagatccggatgttgcggatattgggtattacggagccggtggtcgaacggacgccaaaacctggacgacggctgaccgtaaaacgcattttggatcatgggcacgtcgtgggattatttccgaccgtctggcaacggcgattcttgtgcatgccgggagaaacgctgaattcattaccggaaaacagcctgatacggtgaagcccaccggaccttccggtgaaggtacggagagagagccggaagccccggtcagtaaccgaaccctgatgagtctgctggcgtccggcgaagacctggcatcacagggctggcgctattatcacaaaccggcgagcggagacaatgttaacaaaaacattgctgaagcggtggtcagtgatgcgggggctacgggaggtaaggccctgcaactgaataaaccggaaaaccacatctggtttctggagcatgatgcagccggacagggagtggagttactgaagaaggggggacgtgtgagcgtacggtttaagttgccgggttcactggtgccgaatcagtttgccctgggcatttactggcagttgtcgtccctgccggagggagtgacgctggcagaggaaggcaacgacatgctgatgtccttcttcctgcagacggatgcgacgaacctgaacgcgatgcaccacaagaagccgaatgcgaagctggatacgttcggggtctttgataacggatggcacacactggcttttgagtttgccggaaacaacagcattcaggtgacgccggtactggatgagaaacgggggacgccgttcacactggtgaaatctccggcatcaggggcggcggacaaactgcaactgacaggcatatcaaaggcggcgacatatacgctgctgattgacagtgtgaaggtggaagtgaacaacgcggacatcgcggcatga

SEQ ID NO: 9318 - DNA, 1464 bp, Escherichia coli
atgataaagaaaaaaggatttaccttactggaagtgacgattgtgttaggtattggaacgcttatcgcttttatgaagtttcaggatatgagaaacgatcaggaagcggtattggctgataatgtcggaacacagattaaacagcttggtgaagcggttaaccgctatatcagtattcgttatgacaagatttccacactgtcatcatccaacaatcaaagtagcgatccggggccaagaacctgttcggctgctggttgtgaaatcacttaccagacattaattaatgaaggtctgttacctgtaggctatacaggaacgaacgcgcaaaaagcatcctacaagattgtgttaaagcgttcaggaacagcgcctgattatgtcattaatggccttataacaaccgccagcccgtgggaggaaggtggtcgtattcgttatgacctgttaggaaaagcggttcaggcggcaggtgttgatggtgggatgagcagaaacaccaagatagcgtccggctatggtggtcagtggagtgagaactctaatagctacagcaatatcacggggggtgggttactggcttaccgcgtggggtataactcttcaatgtattctgtttatctgcgtcgtgatgggacgttgccgatgacgggcgatctgaatcttggtgggaagagcatcaaaaacatcaaagatatgacggcatcagggacaacaacaaccggagcacttaagacaacgggtaatgcgtctgttgcatcagatctgagtgtgggtggaacatctacccttaatggtcctgtaaatatcaacaacaacctgaaagtaaaatccgacacctatctgaacacgctatcaacaacaggtctggcgaagtttggtagtcgtatcgcgacgaatggacttaatccaaacgatctgcctgctgggtgggctggtggtgttcgcacctatgatttgtatgcgtcagggactgttggtgtaggaacaggtaaaacagttaaagcttacatgaacaatgcgggtaatatttatgcgtcaggtaatcttactgctggaacgataaaatccaatggaacaattgaatcaacaggcagaatcaaagcaggtgaatatctccatttgaatggtcaggcaacattaaatgcgaaatgtacgcctaatggtctggtggggcgagacagtacaggtcgagtgttatcgtgtgtcagtggtaaatggcagacagcaagcggtgatggcctgaaaggtatttttataacaataaccgatcaaacatctggatataaatgtgtaatacccaatagtgatacaggtgcatgtgcttgtccggggtcgatgtatgactcaaggtatggttttttatctggaacacttattgcggaatatgatgaacgtcgttgtagtggtagtaagaacgagcactgttatagtaattttagaaggttatatgcatgcaaataa

SEQ ID NO: 9319 - DNA, 558 bp, Escherichia coli
atggttttattaaataacaaaagaaaaagcaagaaaggtttctcactactcgaactattacttgttttgggcatcattgctgcattagtggtagctgcttttatcgtttatcccaaggttcaggcttcacaaagagcgcaggcagaatccaataacattgccaccatacaggcaggtgttaaagcgttatacacgtcggcatcaagctttactggcctgacaaatactgtggctgttcaggcaaaaatcttccctgacaatatgttaagtgggtcaggaacggctgctaaacccatcaatgcctttaaaggtaatgtgacgctggctgctacagcgacaggtccgtcatcagcgactggctcttctttcactatcacatacgataatgtgccagcagcggaatgtgtgaagattgcgacagcggcggcaggtaatttctacattactacggttggaaccaaggttgttaaagccgcaggaggaacactcgatgtggcagctacggcagcagcatgtacgaatgccacaagtaatacattagttttcacgtctatttaa

SEQ ID NO: 9320 - DNA, 237 bp, Escherichia coli; identical to SEQ ID NO: 6055

SEQ ID NO: 9321 - DNA, 129 bp, Escherichia coli; identical to SEQ ID NO: 7749

SEQ ID NO: 9322 - DNA, 222 bp, Escherichia coli; identical to SEQ ID NO: 4947

SEQ ID NO: 9323 - DNA, 993 bp, Escherichia coli
atggacaataccgaagcggtcatggcggaagtcaaacgcaaatggggcgaccgctttgttgccgtcacgcaaaaaaataccggtaaaggtggtgcgctgatgaatggcctcaattacgccacctgcgatcaggtttttttaagtgatgccgacacctatgttccgcccgatcaagacggaatgggctatatgctggcggaaattgagcgtggcgctgatgccgtaggcggcattccctctactgcgttgaaaggcgcgggtctgttaccacacatccgcgcgaccgtaaagttgccgatgattgttatgaagcgcacgctacagcagcttctgggcggcgcaccgtttatcatcagcggtgcctgcgggatgttccgtactgatgtattgcgtaagttcggtttctcggatcgtactaaagtcgaagaccttgatctcacctggacattggtggcaaacggctaccgtattcggcaggcgaatcgctgcatcgtatacccacaggaatgtaacagtccgcgtgaggagtggcgccgctggcggcgttggattgtgggctacgcggtctgtatgcgcctgcataaaagacttttatttagccgcttcggtatcttcagtatatttcctatgctgttggttgtgctttatggcgttggtatttatctcactacctggtttaatgaattcatcaccaccgggccacatggtgtggtgttggcaatgttcccgcttatctgggtcggcgtagtttgtgttattggtgcatttagcgcctggtttcatcgttgctggttgttggtgcctttagcaccgctttccgttgtgtatgtattattagcttatgccatctggattatttatggacttattgccttttttactggacgcgaacctcagcgcgacaaacccacccgctattccgcactggtggaagtgtcaaccgcttattcccacccttctgtcacaggaactgaaaaactatctgaagcttaa

SEQ ID NO: 9324 - DNA, 525 bp, Escherichia coli
gtgattattgatgaaagtgccggtgaggttgttatcggcgcgaatacccgtatttgccacggtgccgttattcaggggccggtagtgattggcgcaaactgcctgataggtaattatgcgtttattcgtcctggcacaataatcagcaatggcgtaagaattggttttgccaccgaaattaaaaatgcggttattgaagcggaagccacgattggtccgcaatgctttattgccgactcggtagttgcaaaccaggcatatttgggcgcacaagtacgaaccagtaatcatcgtctggatgaacagcccgtgtctgttcgaactccagatggaattatcgctaccggatgcgataaattaggttgttatatcgggcagcgttcacgccttggcgtacaagttattattttgcctgggcgaattatttccccgaacacgcaacttggcccgcgcgtgattgtagaacgtaatttacctaccggaacttattcactccgacaagaacttatccgtacaggagattaa

SEQ ID NO: 9325 - DNA, 1488 bp, Escherichia coli
  misc_feature (1117)..(1126): n is a, c, g, or t
atggcgatttttcatctggattttaaaattgtgaaacgaagcgaaggcatgacttccgttgcgaaagctgcctaccatgcccgtacacgtattacagatgatcgcattggcgaaacatttgatttcagccacagaacagatcttcatggtcatattttattagcccctgtttcagcacctgctcacattgttgaaagttcctcagcactctggaatgaagttgaaagagtggaacgccagaacaacggtcaaacagcccgttattttgatgttgctatacctgtagaactcaacaacgatgataagaaaaaattggttgccgaatactgtcagaagaactttgttgataaaggaatgattgctgatatcgcatttcatgacttggatagtaagaatccccatgctcacgtcatgttaaccctgaaaaccattggtccagacggcttcggtaaaaaagacagaagctggaatgataagaagataatgatccaatggcgtgaatcatgggccaccatgtcaaacagctaccttgaagccgcaggcagtgaagaacgtatcgatcaccgttctctcaggacacaatgtgctgatgcccttgctcaagcagaggaagcattcagcgctgaagagaaagcattctggcttgccaaagcaacagaaacaaaccgcccggcaatgcaacgtgttcatcgtgctaaatggaatgacaccgagtcacaggaacaacgagctgccgaacaagctcaacgtgatcagcaaatagaggaagcgaagaaggtctatacgacattcagtgagctaccactggagatcgtggttgatgtcagaagctttacgattacacatcttgctgaacccgaagagatcattatccctgactacccagcaacagtagaaccgcaaccggctatggcgacacctaccacaagcagaagaccagcagcaaaatcttaccgtaatcccaataaggtcagtaaagtaaatgtttcagggaagaaatcccctgttctggttgttcctgaaccaaaagcatccactaaattgaaaaccccatctcttcaaaacaccagagcggtgaaccgtgctcccctacatatcagaaagcagaccaagccannnnnnnnnntcacactactcatcgtagacttcctgaaagagagatttgtatgggcgagaaggaaaactgataccactgatgctgaccatgataagcgtatcgctgaaaattatgtgtttgatgaagtgctgggtgtcaatgttccacgctcggagtttgaaagacgcgctaagtttaacaataaccaaacatcacaagaagcaggagtctatggtaacgaatcaaatattaacaagactgttcgtttcccaaatcgttttgagcaagaacaaacggaggtcaataaacacatggaatttatactgtctattggtggaaaaccttctatgccaaagttaaaacaaactaacagaaaatctaacatcaaatag

SEQ ID NO: 9326 - DNA, 348 bp, Escherichia coli; identical to SEQ ID NO: 6157

SEQ ID NO: 9327 - DNA, 381 bp, Escherichia coli; identical to SEQ ID NO: 6156

SEQ ID NO: 9328 - DNA, 840 bp, Escherichia coli
  misc_feature (136)..(145): n is a, c, g, or t
atgtgtaaggctaaggtgttggctataattgttacttacaacccggaaattattcgattgacggaatgtattaactctttagccccacaagttgagagaataattcttgtagataatggctcaaataatagtgatnnnnnnnnnngcattgcatttgctcagaaccatggtgttaagaagggcctggaagcaaaagagtttgactatttatttttctcagatcaggatacttgctttcctagcgatgttattgaaaaacttaagagtacatttacgaaaaataataaaaaaggtaaaaatgttgcttgtgcttctcctttttttaaagaccatcgttcaaattatatgcatccgtcagtcagcctaaatatttttacgagtacaaaagttatatgtagtgaagtagacgatgatctttatccctcgcatgttattgcttctgggatgttaatgtctcgtgaagcatggcgcgtcgtcggaccattttgtgaaaaactctttatagactgggttgatacagaatggtgttggcgtgcattagctaataatatgattattgttcagacaccatcagtcatcatttctcatgaacttgggtatgggcagaaaatttttgctggtcgatctgttacaatacataattctttcagaaatttttataaaatacgcaatgcaatatacttaatgctgcattcaaattatagcttcaagtatcgttatcatgctttttttcatgcgacaaagaatgttgtatttgaaattttatattcgaaagaaaaattaaattcactgaaggtttgttttaaagctgtacgtgatggtatgttcaataatttttaa

SEQ ID NO: 9329 - DNA, 165 bp, Escherichia coli
gtgacggtaaaaatgcgtctggctgtggttgcgctcctgctgtttctggtggtgatggtggacttcagcagccggataatgtcagtgctggctgacggtgtgctggtggcgggtgtggtggttgttgctttcccgttgctgaaaaagaaagcatcaggcgattag

SEQ ID NO: 9330 - DNA, 432 bp, Escherichia coli
atgcttggaatcttcaaaaagaaaacccgcagagcgtctgcggaaattaaaaagtttgaaaaacgcgatctggcacaggcagtgattaacgctgcatacctggtggcttatgccgatggtgaatgtgaggcttccgagaaagcgaagatcgaacaggtattacgtaaccagcccaccttgtccgcgtttacgtcagaaattaatgcgattagcgcaaccattatcggtcagctggatacgaactttaaaattggtcgtcgtgcggcgttacgtgagatcgaggatgtgaaacacgatacgcgtgaagcggaagacgtgctggatgtggcggtggccattgccgaagcagacggcgaaatagagccggaagagcgcaaggtgctggaagagattgccggtgttctgggccttcgtctggagaatcatctgtga

SEQ ID NO: 9331 - DNA, 141 bp, Escherichia coli; identical to SEQ ID NO: 6191

SEQ ID NO: 9332 - DNA, 345 bp, Escherichia coli; identical to SEQ ID NO: 4961

SEQ ID NO: 9333 - DNA, 237 bp, Escherichia coli
atgatccacgccctgccaccgcaggcaaccagtgcggtttattcacatatccggggggaaaaccgctctgaacaggcccagaaacacgcacaacagacttttggtgacgccatcgggaaaagttttgacgacgccgttgcccggttcacttttccggtctggatgttacagcttctgcgtaaagcccgggaccgcattatccgcctgctggaaacactgtgggatcgtctgttctga

SEQ ID NO: 9334 - DNA, 309 bp, Escherichia coli
gtgatcagccgctggcgcatcgagcagtgcagcgaactgagtgcggtgagtgcctcctttgtactgtccacgccgacggaaacggatggcgctgtttttccggggcgtatcatgctggccaacacctgcacctggacctatcgcggtgatgagtgcggttatcacggtccggcagtcgcggatgaatatgaccagccgacgtccgatatcacgaaggataaatgcagcaaatgcctgagcggctgtaagtttcgcaataacgtcggcaactttggcggcttcctttccattaacaaactttcgcagtaa

SEQ ID NO: 9335 - DNA, 378 bp, Escherichia coli
atgaaaacattacctgatacacacgtacggaaggtatcgcgctgcccgtctcccgtcaccatctggcagacactgctcacccgactgctggaccagcactacggccttacgctgaatgacacaccgttcgctgatgaacgtgtgattgagcagcatattgaggcaggcatttcactgtgtgatgcagtgaactttctcgtggaaaaatacgcactggtacgtaccgacctgccgggattcagcgcctgtacccactctcagttaataaacagcatcgatatcctccgggctcgccgggcaacaggcctgatgatccgcgacaattacagaacggtaaataacattaccctggggaagcatccggaggcgaaacgatga

SEQ ID NO: 9336 - DNA, 351 bp, Escherichia coli
atgaagaaaaaatacgaactggttgttaaagggataaataattacccggataagattactgttactgtggcactggaagttggtgggtatccgtcactgttgttgccagatgtggctattagtcttgaccgtactgaaggtgccacgctggagttttacgaagctgaggcgaaaaagcaggcgaagcagtttttcatggatgttgctgccgggttatgtgaagggaacgaaccgttgccggaaaagcgccccgtgattttagaggcgcagaatgtatggataacctacaaaggaaatctaccgggaagaattactggttctctgaagactccaccggaatcacaaccttaa

SEQ ID NO: 9337 - DNA, 438 bp, Escherichia coli
atgcaagataacaataatacgcactatgattttttcatatcccatgcaaaagaggataaagatacttttgtcagaccactggtagacgagttaaatagacttggtgtaattatttggtatgatgaacagacacttgaagtcggcgatagcttaaggagaaatattgatttaggcctaagaaaagcaaattatggcatagtcatactttctcataactttctaaacaagaaatggacacaatacgaattagatagtttaattaatcgtgcagtgtatgatgataataagattatattgccaatctggcataatatcaatgctcaagaggtatctaaatacagccattatttggcggataaaatggcactgcaaacttctttatatagcgttaaggaaatagcaagagagttggctgaaatagcatacaggagaagataa

SEQ ID NO: 9338 - DNA, 330 bp, Escherichia coli; identical to SEQ ID NO: 8750

SEQ ID NO: 9339 - DNA, 402 bp, Escherichia coli
atgtacgcaaaatcctttatcgctcttgatggcaacggacgtctgacgggcgcccgtactgcacaggccgcaccttatgctaactacacctgccacttgtgtggcagtgcactcagataccatccgcaatacgacactgaacttccctggtttgaacacactgacgacaggctgacagagcacggtcaacagtgcccttatgtcaggccggagcgcagagaaatacagttgattaaacgtctgcagcaattcgtaccggatgccttacccgtggtgcgtaaagccagctggcactgcagacaatgtcaccacgattattatggggagcagtactgcacacactgccagaccggaggattcagtattccccggacaactcaggaggaaatatgcgaattctga

SEQ ID NO: 9340 - DNA, 210 bp, Escherichia coli
atgacggatggctggccgctgtatgaatcacgcctgaagggaaagctgcacgttatcagcaagcgttacactcagcgcattgagcgacataatctgaatctgagacaacatctggcaaggctgggacggaagtcactgtcgttctcaaaatcggtggagctgcatgacaaggtcatcgggcattatctgaacataaaacactatcagtaa

SEQ ID NO: 9341 - DNA, 267 bp, Escherichia coli
atgctgcggtgtctcaccaatgccgggcagatcgaccagcgtcattctgcgttcaccgagttgcagggtaagacgatgagcctggcgggtgcagccgttcaggggatgcgtggcgcagatacgggactgaaaaatggcattacacaggctgcttttgccggtgccggatttacccataatgccaatcacgggctcgtaatgaataacactgtggagatgttcaaggattttctggcgaatttcttcaggaagaaacgtcagatatga

SEQ ID NO: 9342 - DNA, 435 bp, Escherichia coli
atgcattataaatctctcttaaatgagataaaaccaaacggttttatttttgaaaatgttgctggtttgttgaatatggaaaaaggtaaggtctttgaaagagtcaaagaagaattctcatcaaccatgaaaactatgaatggatggatattaaactctgaacattatgcaatccctcagcgccgaaaaagggttatattggttggttcaaacgaccctttattttcaattgaacctccacaaaaattaacagaagataaggaatcttgggtatctgtaaaggatgcattatctgatctgcctcctttgcaacatggtgaagatggaagtggtaaatattatatccatcaccccgaaaatgactatcaattattcatgagaggtaatattactccttcagaatattatgaaaggaatataaagccctctttataa

SEQ ID NO: 9343 - DNA, 504 bp, Escherichia coli
atgccgggcaactgcccgcattatgggcgttggcctcaacacgattttacgtcacttaaaaaactcaggccgcagtcggtaacctcgcgcatacagccgggcagtgacgtcatcgtctgcgcggaaatgggcgaacagtggggctatgtcggggctaaatcgcgccagcgctggctgttttacgcgtatgacaggctccggaagacggttgttgcgcacgtattcggtgaacgcactatggcgacgctggggcgtcttatgagcctgctgtcaccctttgacgtggtgatatggatgacggatggctggccgctgtatgaatcccgcctgaagggaaagctgcacgtaatcagcaagcgatatacgcagcgaattgagcggcataacctgaatctgaggcagcacctggcacggctgggacggaagtcgctgtcgttctcaaaatcggtggagctgcatgacaaagtcatcgggcattatctgaacataaaacactatcaataa

SEQ ID NO: 9344 - DNA, 264 bp, Escherichia coli
atgggagttcagcaggatgatttcagggacatgttgtccgtttatctccccgtcacggcgcagacgcagcatgtgtttggtgtatccccggcggcccgggtcgcgcacacgggtctggcaggcgaagaatggctgaaaaccttcccgctgcaggctttccagcactgtgatggtggggatccaggtatagttctcgcttctggatgtgtgcttatcttccccgaatacgctggggacgacctgcatcagttcttcacgagttaa

SEQ ID NO: 9345 - DNA, 276 bp, Escherichia coli
atggaaaacaataccatcaaatgcccgttctgtttcaaagagagccagcgtggggttcacgtttgcacaggttgcttagcgactgtgttatatggcacttatcccggctggtatgctgctgttgttttgttgttgacttttggtttatcgacgttgatcggtatgtcaacaggtatggcaggagctactatcagtctaccaataattgcggttgttgggtttatagctggtaaggcgatattctctgataatgttgtgtttaggcgaaagatataa

SEQ ID NO: 9346 - DNA, 222 bp, Escherichia coli; identical to SEQ ID NO: 9129

SEQ ID NO: 9347 - DNA, 228 bp, Escherichia coli; identical to SEQ ID NO: 4959

SEQ ID NO: 9348 - DNA, 219 bp, Escherichia coli
atgttccggatccgggaggcggaagaaacaaaaaacaacctgatgcaggtagccagtgagcatattgcgccgcttcaggatgctgcagatctggaaattgcaacggaggaagaaacctcattgctggaagcctggaaaaagtatcgggtgttgctgaaccgtgttgatacatcaactgcacctgatattgagtggcctacgaaccctgtcagggagtaa

SEQ ID NO: 9349 - DNA, 186 bp, Escherichia coli
atgtggaactactcaagtatgacgggagaaagccaactatctaactacataccgggccttgctctattgaccaatagcagcacagcacacattaaatcactggatatctggtttaagggtgatgttgtggaacgttatgattttcgtcagactgcaagtaagacctcacgtggtttgatggattga

SEQ ID NO: 9350 - DNA, 141 bp, Escherichia coli
atgctgaaaggcgggatttccggtcgcagcgctaaaggaaaacgtatccacacccgtgccattcacagcatcgacacggacattaagctcaatcgcgcattgtgggtaatgacagaaacgctgctggagaacatgcgctga

SEQ ID NO: 9351 - DNA, 243 bp, Escherichia coli
atgtcattcgatattgttgatcaagatatcgtgaaaatatcaagaactacttatttcaaaggtatgaaagaacttgctgacaagaaatttattgctgagaccatgatacagaactattattttattaatccagactatatgtttaatggtgatcgtttaactttcatgaaaacttattacttgaaggacaaaaaaactaaaactaaagagaacaaaattaattgccaaggcaaaacacagtag

SEQ ID NO: 9352 - DNA, 276 bp, Escherichia coli; identical to SEQ ID NO: 8395

SEQ ID NO: 9353 - DNA, 714 bp, Escherichia coli
atgattaaaaatttgccgcaaatagtgttgttgaatattgtcggcctcgcgctgtttctttcctggtatattcccattaatcatggattctggttgccgattgatgcggatattttttatttctttaatcagaaactggtcgaaagtaaggcctttttgtggctggttgcattgaccaacaatcgcgctttcgacggttgttcactgctggcgatgggaatgttgatgctgagtttctggctgaaagaaaacgccccaggcagacgacgtatcgtgattattggtctggtcatgctattaactgcagtggtattaaaccagctgggtcaggcattaattcctgtaaaacgggccagtccaacgttgacttttaccaatattaaccgcgtcagcgaactgctctctgttcccacgaaagatgcctcacgagatagctttcccggcgatcacggtatgatgctgcttattttttcggcattcatgtggcgttatttcggcaaagttgctggccttatcgcccttattatttttgtggtttttgcgtttcccagagtaatgattggcgcacactggtttactgacatcatcgtcggttccatgaccgtgatattgatcggtttgccctgggtgttgctgacgccattaagtgatcgattaatcaccttttttgacaaatcactacctggaaaaaacaaacatttccaaaacaaataa

SEQ ID NO: 9354 - DNA, 1110 bp, Escherichia coli
atgaaatcacgtgctgccgttgcatttgctcccggtaaaccgctggaaatcgttgaaattgacgttgcaccaccgaaaaaaggtgaagtgctgattaaagtcacccataccggtgtttgccataccgacgcatttaccctctccggcgatgacccggaaggtgtcttcccagtggttctcggtcacgaaggggccggggttgtagttgaagtcggtgaaggcgtaaccagcgtcaaacctggcgaccatgtgatcccactttacaccgcagagtgcggcgagtgtgagttttgtcgttctggcaaaaccaacctgtgtgtcgcggttcgcgaaacgcagggcaaaggcttgatgccagacggcaccacccgtttttcttacaacgggcagccgctttatcactacatgggatgctcaacattcagtgaatacaccgtggtagcggaagtgtctctggccaaaattaatccagaagcaaaccatgaacacgtctgcctgctgggctgtggcgtgaccaccggtattggcgcggtacacaacacagctaaagtccagccaggtgattctgttgccgtgtttggtcttggcgcgattggtctggcagtggttcagggcgcgcgtcaggcaaaagcgggacggattatcgctatcgataccaacccgaagaaattcgaactggcgcgtcgcttcggtgccaccgactgcattaacccgaatgactacgacaaaccgattaaagatgtcctgctggatatcaacaaatggggtatcgaccatacctttgaatgcatcggtaacgtcaacgtgatgcgtgcagcgctggaaagcgcgcaccgcggctggggtcagtcggtgatcatcggggtagcaggctccggtcaggaaatctccacccgtccattccagttggtcaccggtcgcgtatggaaaggttccgcgtttggcggcgtgaaaggtcgttcccagttaccgggtatggttgaagatgcgatgaaaggtgatatcgatctggaaccgtttgtcacgcataccatgagcctggatgaaattaatgacgccttcgacctgatgcatgaaggtaaatccattcgaaccgtaattcgttactga

SEQ ID NO: 9355 - DNA, 192 bp, Escherichia coli
atgaatccagtatttgcacttattctgacggtttttcttgtttccggagagccagttgatattgcagtcagtgttcacagaacaatgcaggaatgtatggcagcagcaaccgaacagaaaattccaggcaactgttatccggtcgataaagttattcaccaggataataacgaaatcccggcaggattttaa

SEQ ID NO: 9356 - DNA, 1422 bp, Escherichia coli
atgaaaactgatactccctctttagaaacaccgcaggccgcgcgcctgcgacgcagacaactgattcgccaacttcttgagcgcgataaaaccccgttagccattttgtttatggcggcagtcgtcggcacgcttgtcgggctggctgcggttgcttttgacaaaggtgtcgcctggttgcagaaccaacgtatgggggcactggtacatactgctgataattatccgcttctgttaaccgtcgcttttctctgttcggcggtgctggcgatgttcggctactttttggtgcgcaaatacgcgccggaagcaggtggttcggggatcccggaaattgaaggggcgctggaagatcaacgtcctgttcgctggtggcgtgtgttgccggtgaaattctttggtgggctggggacactcggcggaggcatggtgttggggcgcgaagggccaaccgtgcagataggcggcaatatcgggcggatggtactcgatgttttccgcctgaaaggtgacgaagctcgtcatacgctactggcaaccggtgctgctgcggggctggctgcggcctttaacgcgccgctggcgggtattttgtttattatcgaagagatgcgtccgcagtttcgctatacgttaatttcgattaaagcggtatttattggcgtcattatgtcgaccattatgtaccggatttttaatcatgaagttgcgttgattgacgtcggtaaactttctgatgcgccgcttaatacgctgtggctttatctgatcctcggtattatttttggcattttcggccctatttttaataaatgggtgctggggatgcaggatttgctgcaccgtgtgcacggtggcaatattaccaaatgggtactgatgggcggtgcgattggcggtttgtgtggattgctggggtttgtggcaccagcaacttcgggcggcggttttaacctgattcctatcgctaccgcggggaatttcagcatgggaatgctggtgtttatcttcgtcgcgcgggtcattaccaccttactctgcttctcttccggcgcgccgggcggtatttttgccccgatgctggcgctgggtactgtgctgggaaccgctttcggaatggttgccgttgagttgtttccgcaatatcaccttgaggcggggacgtttgctattgccggaatgggggcgttactggcggcatctattcgcgcgccgttaacggggatcattctggttctggaaatgaccgataactaccagctcattttgccaatgattattaccggtcttggcgcaacactattagcacaatttaccggtgggaaaccgctatactcggcgattcttgcgcgcacgctggcaaaacaggaagctgagcaactggcgcgaagcaaggccgcatcagccagcgagaatacttga

SEQ ID NO: 9357 - DNA, 627 bp, Escherichia coli
atgataatagtattaggtagtcaaaagggtggggtaggtaaaagtacactggcggtatctatagctgcgtatctgatgtcactaggcaatagagtgattattgtcgacgcagatgaccagaaatcagtattaacctggtacaacaatcgccctgaagatctccctcatattccggttacaggcgcgacaggtaacatcaaagccatgttaaaggaacacgaaaaatcctatgattttgttattgcagactgtgctggccgtgatagcgcagaaatgcgtagtggattgatggccgcagatgtattcatttctcctttgcgcccatctcagatggacctggatgttgtgcctcatacatgctccgtttttacagcagcaaaagattttaatgaggatgttcggggatatctcgttttaaacatgacgcccacaaatatgtttgttaatgaagccaatgaggcagctgaagtacttaaggattaccctgaaatgcatctggcaaactcccgggtatgtgatcgtaaagcacatcgagatgcttgggccgaatcaatgacaatttttgaaacgcaaaatgataaagcccagcaagaaatcgaagcgttagtgaaagaggttattctgtga

SEQ ID NO: 9358 - DNA, 303 bp, Escherichia coli
gtgagaaatagagcaaacacttcacctcgtgacgaggcagcatttattaacggtggcacggctggccttgataataccaaaaagtcatcagataaatcatcggttgtaagcaaagcaaaaccagtgagtatttctttttttgaagaaaacctaaaagacattgatgcccttataacggctgagatggtttcaggtaaaggcagagtgaatcgttctgatgttgtcagggcggcggtagaagcacttaaaacactatcaaaaacagaggtatcacgattgatagcagaagtaaaacaaagataa

SEQ ID NO: 9359 - DNA, 1347 bp, Escherichia coli
atgccaatgatacttgtaaagaagaatccccggggcaaagtgattcgggagcttagcagtgaggaagagactgcagtaaagacggtctgtggactgaaaaagccagcaaccatggcactacataacctggccaatgatattctccgggaaatgcgtgagtatgatgcatggttacagtgtgactgtattccgggagattcgccggccatgaattttgctgctcttaaaaacaatacgggtactctttatctgtccagttttaatcatgagcatgcacctgaatgccccatgtatcgtcagttatccggaaatgaagaggaaacatcttccggagcaagccggcatcccgttagcacccgtataaattacagaaactttttaccacctgatgacagtaattctgttatcagactgcaggcccgctctgcttaccataatggtgagagctcctccgttcgcaagaaacgtccgcgccttgcccgtttactcctgtcgcttattgacgatgctgggctgaataaactggattccctggctaatccccgtatccggactaattatcgtgagtgtcttgatgccatacggcaggttacactgcagcaggagtatattcggggaagatccttatctgaaattatccatttccggcctggaatgtctgaaaggtctcaggagcggttaatggaaacgctggagaattcagaacgacactggcctgccagaagaaaacatatgttctttcagatttttatggcgcagcacatctgtcgtgatgctgtggaaattcactgggcgaacggtaatattcaggtcatcagacctgtgcgggggatcagtattaatggtgaagcgcagggcggaatacgtcccccttactgggttattcttgctttttgccggagtgccgatggcagaatcatctgcagtgaagggtatgctcatgctctttatcaactgacatgtccggtgcctgtggacagcaaactggaacgaaacacgctcactgctcttctgaatgtggccagctggcttaaaagaaagccaggtacgccggaattaagtctggaaaggcccctgtttgatacagaagtttatgttaatggtgaaaagaaatatgtcctgccggatttcattgtcacagcaagggctcctgacggaaagacggccagagtggtcatcgaaacgatgggatatgaagacagtgattactgcgcgagaaaatccaggcagcataccggcatgaagcagattggtgttctgcataccgatccaccgaaatggctggataacgatcatcccccttttgagaaacatatgtacggtgtttttatgcatctcaggtactga

SEQ ID NO: 9360 - DNA, 342 bp, Escherichia coli
atgatatttacaaaatttcaatctctgacccacaagatagatacaatgattattcatgatattaaacgggagatgccattgaaatacgggttatacagggtggccaaatggtttgcctggctcgcccacacaggaattttttgtacctttattatatatatagggttttccatcatcactcagcacgccggccaggaactaccggagacgtttaaacatggattcgccttgactttctgttcatttgcaacagcagctctggtcagccagtggatcggaggcggattgcatagcaaactggaagaaagaattcggatgaagtggcagaaccacgctcactga

SEQ ID NO: 9361 - DNA, 321 bp, Escherichia coli
atgagaacaatcacaacacgtgaacaattattaattaatgggagagtccacgaaagaatcgccacacatatagttacaggagctcatgggtatgaaacgctttgcacaaatggctataacgtcagatacaacaaggcgcagcaactggttgaaagctgcgaaaaaatagctgaaggtaaactacctgttacctgtcctgtctgtttcaccatatggcaggatgtacacagattcacccacgttgactttgacacacaatcggggaaaagtgattttattgatacctgccattcggagatcataaccggcatgtttcaataa

SEQ ID NO: 9362 - DNA, 297 bp, Escherichia coli
atgaacggccagtcgttttcctgttcccggtatcctcagcttgcccgtgcttatcctagctgtaaattgcccgatctgcgcggtgtttttatccgtggctgggataatgggaagggacttgatggtgatcggaacagacaactcctgagttatcaggccgatcaatcaggcgtctatcacgaacgtggcggatggctgaaagggcatcatagtggtatgccatactgggcacaggggagtaccacagaaatgcgtcccaaaaatattgcattcaactacattgttaaagccagctag

SEQ ID NO: 9363 - DNA, 315 bp, Escherichia coli
atgcagatcaaataccggatttatatggctcacgcgttccatgccttcaggcaacaatgcatggactgccagttgcgacacgaccgaagatcaaaatggttccattacagtttacgccatttgccagtgacgatacttatcactggcaaaccacgatgtaactacatttccccgacaggtcagttcggtgagtaccgccataaaagttgtattcgtcatagaagccgcatttcacaattcgattggcatcataggttgcaactgaccccgcaaaataattcggcttccacccgtgcggattttctgcattactga

SEQ ID NO: 9364 - DNA, 1125 bp, Escherichia coli
atgtttcgaaaaataaaaattcgcaaaatgactctcaaccgggcgctggacaaatacctgaagacagtatccatccacaaaaaaggtcatctgcaggagttttatcgcgtcaatgtgattaaacgtcaccctatggccgagcgctatatggatgaaatcaccaccgttgatatcgccacttaccgggatcagcgtttggctcaaattaacccacgaacagggcgtcaaatcaccggaaacaccgtccgtcttgaacttgctcttttatcatcattattcaatatcgccagtgtggaatgggggacatgccgtatgaatcctgttgaactggtccgaaaacccaaaatcagtagtggacgcgatcgtcgcctgacttctggcgaagaacgccgactctcccgctatttcagagataaaaatcagcagctctacgttatcttccatctggccctggaaacagcaatgcgacagggggaaatcctcacattacgctgggaacacctcgatttgcagcacggagtggcgcatcttcctgaaacgaaaaatggtttaccacgcgatgtcccactctcccggaaagctcgcaactacctgcaaattctgccacaacagataaacggcaatgtgttcagttacacctcatccggtttcaaaagcgcctggcgtaccgcacttctggacctgaaaatagaaaatctgcattttcacgatctccgtcatgaagccatcagccgatttttcgaacttggtacattgaatgtcattgaagttgccgctatttcaggccaccgctccctgaacatgttaaaacggtacacgcatctccgggcatatcagctggtcagcaaactcgatgccaagcgtaaacagaccagcaaaatttccccttattttgttccctaccctgcaactgtcgggtgcagaaacgggctgtttgtcgtgacactgcacgatttcgaccttgaaacccgtgcagaaacccgggaactggctatatctcatgccagcgtattgttgctgcgcacactggcacaggcggctcagcggggtgaacgcgttcccacgccaggcgagctacccgcaaacattgatgaacgggtcatgatttgtccgttaacaaactga

SEQ ID NO: 9365 - DNA, 582 bp, Escherichia coli
atgttttaccctgctgttgactatcttgtgattattctgcttcttgcctttctcatggtgactttatttgcctgtatcttttgtctcagacacgaatatataagaaaagaatcagaaaaacgaaaaaaggactttttcaagaaaaaagaattgaatatcactgagttttcatggttcaggtacaaccagcataatgagaccggaattaatattaccatggataaaaccatcatcgtgatggtggctgtgaacggccgaatgttcagtaaaaaatacagtataacctcacttacatttgacacaaaaaatattaccgaagcggcactatatgaaaacggcattgtcacccgtaagctcacgcttcatcgacctgtcagtgatgacaggcctgcaggcgttccatcgaaacagcccataagaacaatcctcctctgtatcagacaaaaagatcacaccgacgatatttctttcatcctctaccagggacgtcttgaacaacgaggacataactacaccataataaaaagcaaggctaattctgttatcctgttattaaaaatgctgctgacaaacaaaatataa

SEQ ID NO: 9366 - DNA, 1155 bp, Escherichia coli
atggctgagataaacagcactgcgcaagtcacatcagcgttaaccggcgtcagcgatgtgctgacaccggtgttcactctgtggtatctgcagaaaaacatcacctctgatatcgcgccttatgtcacccgtgtgacctggagcgataacatcaaaaatgagtccgataccattgaggtggagctggacgacaccgatggccgctggctggataaatggtatccgggcaagggtgacacgctgacgctgaaaatgggctatcagggcgagaagctgctgtcctgcggtacgttctctatagacgagatcgaagtgagttcgcccgcttccgttgtttctatccgtggggtggccacctcggttaacagtgccctgcggactaaaaccagtcgtggttttgagaacaccacgctggcagctgttgcggggcggattgccagaaagcaccggctgaaactggtgggcagcattgagtccatcagaatcgaccgggtgacccagtatgctgaaaccgacgtgggttttctgcgccggctggccagcgagtatggttatgcagtgaaagtggtcagtgaccagctgattttttctcatctggccacactgcgcagtcaggagccggtcaggcagttaaaaccgcaggatgtggcccgcttttccctgcgtgacaccatcaaccgggtctataaatctgcaaaggtaaaacaccagaaaagcagcagtaaaaaactgatcgtctacgaagctgatggtggtacccgtgaaagcgacaaaaagctcaaaggtggtaaggttaccagcgctgactcacttaaagttaacagccgcgtcagcgacccggacagtgcccggattaaagcggattcagcactggccagacataacgaataccagcagaacggctccctgacgctgacgggaacacctcaactgacagcaggcaacaaaattgaactggtgagttttgggcagttatccgggccatggctcataaccactgcccgccatgcgtttgaccgtaacagcggctacaccacagagctggaagtggcacgggggccagtcacaagagggaaaaaacaaaaaactcagaaactcacggtttatcacccggatggcagtacatcgacggtgattaaggagaagaaaaaatga

SEQ ID NO: 9367 - DNA, 3213 bp, Escherichia coli
atgtcgggacagttttcagtcggcgttgttatcggcgggatgattggcagcacattccgttctgcaatgagcggtacccgccgtgcgcttgattccctgagcgatacctcacgccgcctgcaggaacgtcagaacgctttaacccgtgcaacagaacgttatggtcaactgggttcttcccggatgcagcatctcaacagcgagctgctgcgggtaagccgcaccatggagcaaattgagcgccagcagcgccgtctgtcagcggcatccgctaccagtgatgcgctgaaagctaaccgcatggcgctgtatggtcaggggattgaagcgtatggcatggcacagactgtttatcatacggtttcccctgccgttcagcagtccatgtcttttcaggacaaaatgattgatatgtcgatcaccgcaaaatatgacaataaaacgcgggatgcacttgccggacagataaaaggctgggcgcttaaatacaatcagtatcaggatgagctgcaggaggcgatgggttcactcatcagcgacaatattgataatgtgtcagatatcggttttctgatgccggatattgcccgcgcggcaacggcaacacgcacgtctgctcaggactgggcaaaagtggccgcagtctggcaaaactccctgaaaggcgcggccagagattttggtgccgttcagaatattatggcttatgccggtgaccaggggtcatttgaaatcccggatcaggtcaagtggatgcagtccctggccccaatgatggcgggtattgccagtggaaaagaggctgttgctgaaatcggggccagtctccagatagcaaaaatcggtgcaggttccaccgacgaagcagccaataattttaaaaactttcttaccaaaatttttgcccgcgatactcagaaacagtttgctgatctgggtattgatttgcagggatctattgcgagttataaagctgcggggatctctccgattgaagggatgttgagtgttatagaacgttacctcaatgccaaaagccccgaagcgctggccggcttcaaatcagccatgaaaataaagaatgatacggcaagagatgaggcacttcaggctctggcgaaaaactttggtctgggcgatatgttcgcggatatgcaggtcatggcatttatccgcccgatgctggccaacatggacagatatcgagagatccgtgccggtgctctcagggctgcggataacgatttgcttgccagtgcttatgatcagcggctgaaatctccccttgaagccactaaaacacttatggtcagcagtcgcgatctggcaattacgctgggcgatcaattagctccatcttttatttctctgactcaggacttgctcccactcattcaggggacaaaacactgggtggcgactcacccgcaatttgtcagtggggcttttaagctcatcagtgcgctccttgcgattaagatagcgactgttggtctcaaactggggctgaatctccttatttccccctttgtgaacgtctggaaaactgctgttttactccggaccaactggcatcgactgactaccgcactcggagaaggtggcaaattacgctggcttgtcactggattcagccgactgaccagcggaggactgaaactcagcaaagttctggcgggcagcctcgttcgcggttttatgagcgctgcacgtgccgttctctggattgggcgagcgctgatgatgaatcccatcggtctcgttatcaccgctgtcgcggcagcagcttaccttatctaccgcaactggggggcagtcagtggctggtttaaacagcgctgggctgacattcaggaagcctttaacggcggtatcgcgggaactggtaagctgctgattaactggtcgccggcaggcctgctctataaagcctttgcggctgcgctgaaatatttcggcgttactctgccggcaaagttcaccgacttcggtggccatcttatcgacggtttgattaacggtatcaaaaacaaatgggggtcgctcaaatccagtgtaaccggaatgggtgacagcatcagtagctggtttaaacaatgctgggctgacattcaggaagcctttaacggcggtatcgcgggaactggtaagctgctgattaactggtcgccggcaggcctgctctataaagcctttgcggctgcgctgaaatatttcggcgttactctgccggcaaagttcaccgacttcggtggccatcttatcgacggtttgattaacggtatcaaaaacaaatgggggtcgctcaaatccagtgtaaccggaatgggtgacagcatcagtagctggtttaaacaatgctgggctgacattcaggaagcctttaacggcggtatcgcgggaactggtaagctgctgattaactggtcgccggcaggtctgctctataaagcctttgcagctgcgctgaaatatcttggtgttgatctgccggcaaagtttaccgacttcggtggccatcttgtcgatggtctgattaacggtatcaaaaacaaatgggagtcgctcaaatccagtgtaaccggaatgggcgacagcatcagtggctggttcagcgaaaagctgggcattcattcgccgagccgcgtgtttatgggctttggtgacaatatcgcgcagggggccgccattggcctgcagcggaccactccgcttgcagctctggccgggcagcgaatggccagtgaactgctccccagaatgcccgtgagcattcaggggccagaaatacgggataacacttcaggtgttcgcttcagtatgccgttgcccgatatcaatgggtttatgtcgtctgctaaaaatgcgatcggagccgtaatcaatagtttgtcttccatgcccgctattccgctctccacccgggcatcgattttaccagggcaacgtctggcaaatgagatgacaccggatgttccccgtatcccctcgcctgaaatcctggctgccggatattcaggccgtggtgcagctgcaaccggcggtggaacgtctggtggtatccaggtcagctttaatcctcagtttttcctcaatggcagggaaaccacagcgcctgcaggactgactggtgccctgaatatgagtctgcatgagctggaaaaaatgctggagcgtctgctggctcagaaacaacgtaaggagtaccgctga

SEQ ID NO: 9368 - DNA, 1776 bp, Escherichia coli
atgaagattttttccgtccgacagaccgttttgcccgcactgcttgtcctttcccccgttgtttttgccgctgatgaacagaccatgattgtcagtgccgcaccgcaggtggtttcagaactggataccccagcagccgtgagcgtggtggatggcgaggagatgcgcctggcaacaccgcgcattaacttgtctgaatcactgaccggagtgcctggtttacaggtacaaaaccgacagaactatgcgcaagatttacagctgtcgattcgcggatttggctcccgctccacttacggaattcgcggtattcgcctgtatgtggacggtattcccgctaccatgcccgacggacaagggcagacatctaacatcgatttaagcagtgtgcaaaatgtggaagtgctgcgtggccccttctctgctctgtatggcaacgcgtctggcggtgtaatgaatgtcaccacccagaccggacaacagccaccaaccattgaagccagtagttactacggcagttttggcagctggcgctatgggctgaaagcaacgggcgcaacgggcgacggcacacaacccggcgatgtcgattacaccgtcgcaaccacacgttttacgacccacggctatcgtgaccatagtggcgcacagaaaaatttagccaatgccaaactgggcgtacgcattgatgacgccagcaaattaagcctgattttcaatagtgtggatatcaaagcagatgacccaggtgggctaaccgaagcagaatggaaggcgaatccacaacaagcgcctcgtgcagaacagtacgacatgcgaaaaaccatcaagcaaactcaggctgggttgcgctatgagcgtagcctgagcgcacaagatgatatgagtgtgatgatgtatgccggagagcgagaaacgacccagtaccagtcaatccccatggccccgcaacttaacccgtcacatgcgggcggcgtgattaccctgcaacgccattaccaggggatagacagccgctggacacaccgtggtgaactgggcgttccagtcacgttcacaaccggcctgaactacgaaaacatgagtgaaaaccgcaagggttacaataacttccgcctgaatcgcggcgtgccggaatacgggcaaaaaggtgagttgcgccgcgacgaacgcaatttgatgtggaacgtcgatccctatttacaaacccagtggcaactgaccgacaaactttcgctggatgctggcgtgcgctacagctccgtgtggtttgattccaacgatcattacgttactccgggtaacggcgatgacagcggtgatgccagttatcacaaatggctacctgccggatcgttaaaatatgcaatgaccgatgcctggaatgtctatctggcagccgggcgcggttttgaaacgccgacgattaatgaactgtcttatcgcgctgatggacaaagcggtatgaactttggtttaaaaccctccaccaacgatacaattgagatcggcagtaaaacgcgtattggtgatggactgcttagtctcgcattgttccagaccgacaccgatgatgaaattgttgtcgatagcagtagcggtgggcgtacgacttacaaaaatgccggaaagacccgtcgtcaaggcgctgaactggcatgggatcaacgtttcgcgggagattttcgcgtaaaagcgtcctggacctggcttgatgcgacctatcgcagcaatgtctgcaatgaacaggattgtaacggtaaccggatgcggtaa

SEQ ID NO: 9369 - DNA, 2367 bp, Escherichia coli
atgagtctctctttcagtgaagcaaaattagaacaagcgatcattgaactgttacaggatcagggatatcaacacctgatcggcgataatgtcccacgttcgagcctcgatcaggtcattatcgaagacgatctccgtcattatttagcggcacgctaccagcctgatggcattactgaagaagagattcagcgactgatcaaacagttcaccacgcttccggcctccgatctttatgaaagcaacaaaacattttgtcgctggctggcaaatggttttctgttcaaacgcgacgatcggcaacaaaaagatctctatattgaattgctcgacacccggcatctacctgccgcactgcgccagatatttgacgccgaagatgtcccgttgcaacaggcggcggaactcccgccttcctatatgaatccgccgcttaaccggattaagattgttaaccagcttaaaatctccggcaaagataatcagactcgtattcctgacggcattctctatatcaatggtctgccattggtcgtctttgaatttaaaagtgcggtgcgcgagcaggaagccagtattggcgatgcctggaagcagctctgtaaacgctatcgccgggatattccgcaactgtttatctacaacgcgctctgcattattagcgatggcgtaaataaccggatgggcaacctgtttgcgccctatgaatacttttactcatggcgcaaagtcaccggtaatgaaaaccgtgaacaggacggaattccatcattgcactcaatgattcaggggctgtttcatccggtacgtctgctggatgtgattaaaaactttatctgcttcccggataaagccaagcacgaagtaaaaatttgctgccgatatccgcagtactatgccgcccgcaaactctattacagcatcaagcaagcgcgtaaacctttcggtagcggtaaaggcggcacttactttggcgcaacgggctgtggtaaaagttacaccatgcaatttttaacgcgtcttttgatgaagagcgtggagtttgccagcccgaccattgttttgatcaccgaccgcaccgatctggacgatcagctttctgcgcaaatgtgcaacgccaaaaattacattggcgacgacaccatcgttcccgttaccagccgtgaagatttgcgtaatcaactggcaggacgcaatagtggcggagtctttctgacaacgatccataaattcaccgaagacaccgaactcctttctgaacgcaacaatatcatttgcatctcggacgaagcacatcgtagccaggttaacctcgaccagaaagtcatcgttgataaagaaagcggaaaagtgcgcaaaacgtatggctttgcgaaatacctgcacgattcactgccaaacgccacctatgttggctttaccggcacaccgattgacgcgacgctcgatgtcttcggtgaggtgatcgacagttacaccatgaccgaatccgttcaggatgaaatcactgtacgcatcgtgtacgaaggccgtgcggctaaagtgatcctggactccagcaaactggaagaagtcgaaaagtattacgaagagtgcgcaaacgcaggcaccaatgagtggcaaatcgacgaaagcaaaaaagccaccgccaccatgaatgcggttctgggtgatgaagatcggttaaaagccctcgcagaagattttgccaaacattatgaaaaacgcgtagccgaaggttccaccgtaaaaggcaaagccatgtttgtttgtgccagccgtgaaattgcctgggatttctaccgtcagcttaaagctattcgccctgcctggtttgaagtgaagcaagcacccgatggcgtcgtcctgacggaacaggagcagaaagagttaccgccttcagaaatggtgaagatggtcatgacgcgcggtaaagatgacgacgaggcgctttatgatttactgggcacaaaagaatatcgcaaagagctggataagcagttcaaaaacgctaaatcgaatttcaaaattgccattgttgttgatatgtggctgaccggtttcgacgtcccggaactggataccatctatattgataaacccttacaaaaacataatcttatccagactatttctcgcgttaaccgtaaactggaaggcaaaagtaaagggttagtggtggactacatcggcattaaaagtcagatgaaccaggcactggcaatgtattcccgcattgatgccaccaactttgaagatattcagcaatcggtaatagaagttaaaggtaatgactccaacttactgatagtgttttatgttcagataatgcccgatgactttgtcatgcagctccaccgattttga

SEQ ID NO: 9370 - DNA, 273 bp, Escherichia coli; identical to SEQ ID NO: 7046

SEQ ID NO: 9371 - DNA, 138 bp, Escherichia coli
atgcatcatatgatgctggaaaccacacattaccgggaaaatatcaccgatgcccgttgtatccgtgaaatgcatgaagcgccattacaggcgctcaatattctgtccagatacccgcataaaaaggacgaggtgtga

SEQ ID NO: 9372 - DNA, 2721 bp, Escherichia coli
atgaatgccatcattccgaaaaaaagacgcgacggaaagtcttcttttgaagacctgattgcgtacacctcagtgcgggatgatgtgccggaagatgaactcaggcctgacacggaaatgaaagctgagattccgcaccggaaccgcttcagacgtcttgttgattatgcaacacgtctgcgtaatgaaaaatttgtttccctgattgatgtgatgaaagacggcagtcagtgggtgaatttctatggtgtgacctgctttcataactgtttgtctcttgaatctgcggctgaagaaatgcagaaagcagcagagcttgctcatttttccaaagatgatacagaccctgtttttcactatattctctcctggcctgcgcacgaaagtccgcgttctgagcagctttttgactgtgtgcgtcacaccctgaaatcccttgagctgtcaaaacatcagtatgtggcagccgttcatacagacacggataacctgcatgtacatgttgcagtgaatcgtgtccaccctgaaaccggctatatcaattgccttccgtggagccaggaaaaactcagtcgtgcatgccgtgaacttgaacttaagcacggattcgcgccggataatggttgctttgtacatgcaccgggcaatcgtattgtgcgcaaaacagcgctggtacgtgagcgccgtaatgcctggcgacgcgggaaaaagcagacgttcagggaatatattgatcagatgtcgattgccgggctgcgtgaagagccagcacaggactggttatctttgcataaacggctggccagtgatggtctgtatatcacgatgcaggaaggggaactggtggtgaaggatggctgggacaaagcgcgggaaggtattgcactcagttcgttcggaccgtcatggacagctgaaaaactggggcggaaactgggggaatatcagcctgtaccgacagatattttcagtcaggtggggacacccggtcgttatgatccggaagccataaacgttgatatccggccggaaaaagtggcagaaacggagagtctgaaacagtacgcctgccgtcattttgccgaacgcttaccggcaatggcgcgcaatggtgaactgaaaagctgcctggctgtacaccgtactctggcagaggcgggattatggatggggattcaacacgggcatctggtactgcatgatggatttgataaacaacagacaccagtacgtgcagacagtgtgtggccgttaatgacgctggattacatgcaggatctggatggtggatggcagcctgtaccgaaggatatttttactcaggtcgttcccggagaacgattccggggacacagtattggctctcagcctgtcagtgattacgaatggtatcgcatgaggatgggcacaggtccgcagggggctataaagcgtgaactgttttctgataaggaaagtctgtggggatacggccttattcagtgcaggagcctgattgaagagatgatagctgacggggatttcagctggcaggcatgtcatgagatgtttgcacgtaaagggcttatgctgcagaaacagcatcatggtcttgtgattgtggatgcgtttaatcatgagctgacaccggtgaaggccagcagtatccatcctgatttgacgttatcccgtgccgagcctcaggccgggccatttgaaattgcggctgcagatattttcgaacgggtgaagcctgaatgtcgttacaatccggaacttgctgccagtgatgaagtggagcccggcttccggcgcgatcctgagattcgtcgtgagcgccgtgaagcccgtgcagctgcgcgggaagatttgcgtgcgcgttatcttgcatggaaggagcactggcgtaaacccgacttacgttacggagaacggttacgggaaattcatgctgcctgccgtcggcgcaaggcgtatatccgtgtgcagttccgggatccacaattgcgtaagctgcattaccatattgcggaagtgcagcgtatgcaggcgctgatcaggctgaaggagagtgtgaaggaagagcggttgtcactgattgcggagggtaagtggtatcctttgtcctaccggcagtgggtggaacaacaggcggctcagggagacagggctgcagtatcgcagttacgtggctgggattatcgtgatcgtcgctcgcgtaataaggataaaagacgcacaactaatgttgatcgttgtgtcgtactctgcgaacccggaggaacgccactttttaataatgttgcaaaacttgaagctcgtcttcagaaaaatggaagtgttcatttcagggatacgcggacaggaaaaaatgtctgtacggattacggagatcgggttgtgttctaccatcacacggaccgaaatgaactggcagagaagcttaatttaattgcgccagttctgttcagccgcaacggaaagcttggttttgagccggaaggttcataccagcagtttaatgatgtgtttgcagaaatggtggcctggcacaatgcagcgggaataaccggaaacggacacttcaccattactcgtccggacgtggatttgcaccgtcaacgcagtgagcagtattaccgggaatatatcagacagcagacccgtttatcggagagccatgatgataattatacgttacggcaggagaaaacatgggagccaccatcacctggaatgtaa

SEQ ID NO: 9373 - DNA, 333 bp, Escherichia coli
atgagtgagaagaaaacccgaagtggcagtgagaaacggcaaaagaatgtcctcattgctgttcgtttttcaccagaagaggctgagattgttaaagaaaaggcagaaaaaaacggactgacagtttcaactctgataagaaaaactgtgctgggaaaacagataaatgcccgcattgatgaagattttttgaaagagctgatgcgtcttggtcgcctgcagaagcatctgtttgtggaaggaaaacgcacgggagataaagagtatgcagaggttctcgttgctataacagaacttgctaatactctgcgaagaaatttaatgggacgctga

SEQ ID NO: 9374 - DNA, 171 bp, Escherichia coli
atgacgattgcagaacgtcttatacagaaaggttttgaaaaaggtgctcttgaagtggcgcgggaaatagcctgccggctttggaatatgggctggccgccggaacggattcaggaggcaaccggactttccggtgaagaactgaaaaaactgtttcctgatgagcagtag

SEQ ID NO: 9375 - DNA, 1959 bp, Escherichia coli
atgcctgtaacgaagtgtgaaccagaaaccacccgcaaagcaagccgtaaatatgtaaaaacgcaggaaactgcactgtctgccctgctggcgcagacggaggaagtgagcgtgtcgctggcctcactgattaagtcaccgctgaatgtgcgcacggtgccgtattctgcggagtccgtcagcgaactggctgagtccattaggggcgttggcctgctgcagaatttggtcgtgcataccctgcctggtgaccgttacggtgtcgccgcaggtggtcgccgactggctgcactcaacatgctggcagagcgtggcatccttacggctgactggcctgtacgcgtgaaaattattccgcaggagctggcgactgccgcatcaatgactgaaaacggtcatcgtcgggatatgcaccctgccgaacagattgccggattccgtgcaatggcgcaggaaggcaaaacgcctgcacaaatcggtgatttgctgggctattcgccccgccatgtccagcgaatgctgaaactggctgaccttgcgcctgtcatcctcgatgcgctggcagaagaccgcatcaccacagagcactgtcaggcgctggcgctggagaacgacaccgcgcgtcaggtgcaggtgtttgaagccgcctgccagtcgggatggggcggtaaaccggaagtacagaccattcgtcgtctggtgaccgaaagtgaagtggcggtggcggggaacagtaaattccgcttcgtgggggctgatgccttctcgccagacgaactgcgcaccgatttgttcagcgacgacgagggtggctatgtggactgcgtggcgctcgatgccgccctgctggaaaaactccaggctgtcgcagagttccttcgggaagccgaaggctgggaatggtgcgccggacgcatggagcctgtcggtgagtgccgtgaggatgccggaacataccgctgtctgccggagccggaagcggtgctgacggaggcagaagaagaacacctgaacgaactgatgacgcgttacgacgcgctggaaaaccagtgtgaggaatccgacctgctggaagcagaaatgaagctgattgactgcatggcgaaggtcagggcgtggacgccggagatgcgtgccggaagtggcgtggtggtgtcctggcgttatggcaacgtatgtgtccagcgtggtgtgcagttgcgcagtgaagatgacgcgactgacgacgctgaccgcacggaacaggtgcaggagaaagcgtcagtggaggaaatcagcctgccgttgctgacgaaaatgtcctcagagcgcacgctggcagtccaggcggcactcatgcagcagccggacaaatctctggcactgctggcatggacgctctgcctgaatgtgtttggcagcggggcgtacagtaaaccagcacaaatcagcctggaatgtgaacattactcgctgaccagcgatgcgccatcggggaaggaaggtgccgcattcatggcgctgatggcagaaaaagcccgtcttgctgccctgttaccggagggatggtcacgggacatgacgacattcctgtcactcagtcaggaggtgctgttatccctgctcagcttctgcactgcgtgcagcatccacggtgttcagacccgtgagtatggtcacacgtcacgcagtccgctggactcgctggaaaccgctatcggctttcacatgcgcgactggtggcagccgacaaaagcaaacttcttcggacacctgaaaaagccgcagattatcgcagccctgaatgaggcaggactgtccggtgccgcacgggacgcggagaagatgaagaaaggcgatgccgctgaacatgcagagttccatatgaaagacaaccgctgggtgcctggctggatgtgttcaccacgtccacagacggatgccactgaacgcgccgataacctggctgatgccgcctga

SEQ ID NO: 9376 - DNA, 234 bp, Escherichia coli; identical to SEQ ID NO: 8563

SEQ ID NO: 9377 - DNA, 378 bp, Escherichia coli
atggacgaacagtggggatacgtcggggctaaatcgcgccagcgctggctgttttacgcgtatgacaggctccggaagacggttgttgcgcacgtattcggtgaacgcactatggcgacgctggggcgtcttatgagcctgctgtcaccctttgacgtggtgatatggatgacggatggctggccgctgtatgaatcccgcctgaagggaaagctgcacgtaatcagcaagcgatatacgcagcgaattgagcggcataacctgaatctgaggcagcacctggcacggctgggacggaagtcgctgtcgttctcaaaatcggtggagcagcatgacaaagtcatcgggcattatctgaacataaaacactatcaataa

SEQ ID NO: 9378 - DNA, 276 bp, Escherichia coli
gtggcttctgtttctatcagctgtccctcctgttcagctactgacggggtggtgcgtaacggcaaaagcactgccggacatcagcgctatctctgctctcactgccgtaaaacatggcaactgcagttcacttacaccgcttctcaacccggtacgcaccagaaaatcattgatatggccatgaatggcgttggatgccgggcaacagcccgcattatgggcgttggcctcaacacgattttacgtcacttaaaaaactcaggccgcagtcggtaa

SEQ ID NO: 9379 - DNA, 486 bp, Escherichia coli
atgccagaactcgttgatccaacagactcattaattagttttcaatacgccttttctaatggtctgattaagccttcaccatgcatagttcacccaaatatgaaggtgcttttggatgatgcagagggtacaccacggtttacttatgcattctttgaaggagaaaatgttaaaggtgttgctatatatgtccctgcagagtttgttgaaggtaaaccatgctttggcgttggctatgcagtagccgatgaatataaagcgcaaggcatcggtactcaacttctcatcgccagcattgaagaaatgcaatacggatttagaaattccttcaatgaattctatgtagaggctattgtcggggttggtaatcaagcctccaacaaattagctgcaaaagttttatctgatactcctgagccagggacagattcttactcaggaaaacctatcaatcagtacatgaaacttttcaaaaccacaaaataa

SEQ ID NO: 9380 - DNA, 957 bp, Escherichia coli
ttgtctaatgcaaaaaatgaacgtgaaagctatatcgattatttacgagaaactggatttgaaaatgattgcttaaatggcggtgctactgttgttgatattggttacagtggttccatgcaatattatttaaaaaaaatactgcaatgcccttgtgtgaacggattttattttttaacacatcaccatagtcgtgattatttttcaaatgatcattttgaaggtttcttgcaaaatcttgatgatcataagatcgcttatagacatggattaaatgatcatgtgtttatttttgaagcagcattaagttcccctgaaggaagtctgattaaaatggaagggaaaggtcaagaaagagaaatgatttttctcgaggcagaagaagagattgtaagaaaaaatgctctattaggaacacatcgtggcgtaatggactttgttcatgatatcaaaactcgttttggttcttactttaaatacattgaattttctcctattctttcttctcaacttattttgaattttgcgaataatcccaacggtatagatgcagggatgtttgcttctcatgaagtcgaaaatgtttttggtggggggtctgtatgcttaatttcgcctttactagattgctataaggactctaatggcaccattaaccctaaaattatcgatgagttattaaaagcatctaaatggaagagaggtgccagtgcttattataacttagtcaatggaactcaaccgcgagttaatcctgctaaaatgccagcgccatctgttaacccagttgttgtgaagcaaacgccacaaactacttatgcacatcctttaaagacaactacgcagcgtaaacttgctaagttaaaaaaagacccatatttattctttaatgattcccaaaaacctcttttaaaaagtttacgattgttcttcaaaaatacatcaaagcttaattaa

SEQ ID NO: 9381 - DNA, 987 bp, Escherichia coli
atgagtatttctttgaaaaatattgattttgctaaaggtcctgttgattccctccatcatgattattacttatggcgagggaagaacattgaggataaaagactttttctcgttttctcatctcggggagcaggtcctggagaatttagttttttcaaaacttttgatgcgcttaatgtaaatgttttgcatgttacaccctctgatttttcatggtaccaaaaagggttagtcggtttagggagtgatttgccttctgcatttaaagccctatctgaccgaatagataatttctgtatttatcataaaataaaacaaattatctgtgtaggggcttccatgggaggatatggtgctttaatttatggggctttatctagtagaaaaataaaaacaacacttattctttttggcaccgaaacaatattaaaacttccttattctaaaagttctgagagtgaatttgatattctcaaaaaatttaaagatgtaaggtttctagattattctgatcttgatgtgaatatgatatttggtgagtttgatattgtagatacttattgtgctttatcgatgcgacatgatcgaaatttttcatttttttcatgcactagcgcctcacatgttgttccggaatacttaaatagacaaattggaattgttaatttttttacagacttcttatcgggtggaagatcttttattggaagaggccacattgcttctgagctttatcctgaggatatttctcctcttctgttctcgaaacaatttactgaggaatacaataatgccctcctctgttgcttgaaaaaatatccttcatttgggtttgcatggaatagattaggcgtatatttacacaatataggagatctggctgggtctttagcagcattaaaaagagcatttttcatcaaccctgattatccaaatacaattgagcatcttaactcggtaagaaataaactaaaaactaaaaactaa

SEQ ID NO: 9382 - DNA, 873 bp, Escherichia coli; identical to SEQ ID NO: 8321

SEQ ID NO: 9383 - DNA, 1491 bp, Escherichia coli; identical to SEQ ID NO: 8027

SEQ ID NO: 9384 - DNA, 207 bp, Escherichia coli; identical to SEQ ID NO: 6172

SEQ ID NO: 9385 - DNA, 1071 bp, Escherichia coli; identical to SEQ ID NO: 7594

SEQ ID NO: 9386 - DNA, 414 bp, Escherichia coli; identical to SEQ ID NO: 4230

SEQ ID NO: 9387 - DNA, 534 bp, Escherichia coli
atgtacatctacgttaactcggcaagcgacgttatcgcaaagggcttcgaactggagatggattatgatgcaggttttgcttttggccgactctctttcagccagcagcaaacagaccagccaacctccatcgccagcacccactttggcgcaggggatataaccgaactgcccagaaaatacatgacgctggatactggtgttcgcttcttcgataacgcgttgaccctgggcactatcataaaatacacaggcaaggctcgtcgcctgtcgcctgattttgagcaggacgaacataccggcgcaataatcaaacaggatttgccgcagatcccaacgattatcgatctctatggtacttacgagtacaaccgcaacctgacactgaaactttcggtacaaaacctgatgaacagagattattcggaggcgctgaataagctcaacatgatgccaggtcttggtgacgagacccacccagccaattccgcgcgtggcagaacatggatatttggcggggacattcgtttctga

SEQ ID NO: 9388 - DNA, 933 bp, Escherichia coli
atgaactcaatttttaccgaagagaatctgttggcatttactaccgctgcacgttttggcagcttcagtaaagccgcagaagagttgggtttaaccacttccgccattagctacaccatcaagcgaatggaaacagggctggatgtggtgctgttcactcgcagtacccgcagcattgagttaacggagtccgggcgttattttttccgcaaagctaccgacctgctgaatgattttcacgccattaaacgcagtatcgatactatttcgcagggcatagaagcgcgtgtgcgcatttgtattaatcagctgctttatacgcccaaacacaccgcacgcttattacaggtgctgaaaaagcagtttcctacctgccagattaccgtcaccaccgaagtgtataacggcgtctgggatgcgattattaataatcaggcaaatatcgctatcggcgcacccgacacgctgctggacggtggcggcattgattacacggagattggcgcgattcgctgggcttttgccatcgctccggatcatccattagcctttgtgccggagccgatcgccgaaagccagctgcgtctctaccctaatatcatggtggaggacaccgcgcatacgattaataaaaaagtaggctggttgctgcatgggcaggaatcgattctggtgcccgatttcaacaccaaatgtcagtgccagattttaggtgaaggaattggttttttgccggattacatggtccgtgaggcgatggcgcaatccttgctggttacccgacaaatccataacccgcgccaggattcacgcatgttactcgcaacccagcactctgccaccggtcaggtgacgcagtggattaaaaaacaatttgcgccaaatggcatattaacggggatctatcaggatttactgcatcgggagagttaa

SEQ ID NO: 9389 - DNA, 861 bp, Escherichia coli; identical to SEQ ID NO: 5314

SEQ ID NO: 9390 - DNA, 705 bp, Escherichia coli; identical to SEQ ID NO: 5348

SEQ ID NO: 9391 - DNA, 366 bp, Escherichia coli; identical to SEQ ID NO: 7607

SEQ ID NO: 9392 - DNA, 357 bp, Escherichia coli
gtgggcgaagtcaaacatcagaatggaaggcatcccgggatcggcaaagaagcagcaatggcgctttatattgacatcagcgccattgccggacaggtaagaattatcagagcggtaactaagcggtatgcgcctttacttcagaaagtctctggtaagtgcaccgaagatattgtcaacgatttcgtcatcgaactgcgaggactcatcttcagttacaaggtgaccacaatttttgcagatggctcccgcgaaactgtcagagccctgcgacttaaaggatgtgtcaaagacttcgccaccacattctgggcaagaaaacttgattgtactcataaccaatttcctctcgagtaa

SEQ ID NO: 9393 - DNA, 1071 bp, Escherichia coli
atggctaacgcctggctcagattatggcatgacatgccaaatgaccctaagtggcgaacaattgccagggtgtcagggcagccaattgcaacagtgatggcagtgtatatccacctattggtgagcgcgtcacgaaatgtcacgcgaggtcacattgatgtcacgacagaagatttggcaagtgcgctcgacgtgacagaagaggtaattgattcaattttacagacgatgcaggggcgggtacttgatggtgatttaatcactggatgggaaaaacgccaggtgcttaaagaggacaacggcaatatttcgcaaaccgcaaaatctcctgcagagcgcaagagggcgcagcgagagagggaaagaaagcgggaacaaaatggcgattgtcacggcgcgtcacgaaatgtcacgcacatgtcacgacaagtcacgacagatacagatacagagaaagatacagatcaagaagatcaaaacactatggtccatggcgtaaaaaacgccacgaaccaggcaggggatgttcagaccgtcaatcctggtcagccagcaggcacgacaccggaagccgattcagcgtatgcgctgaaagccgattcgggcgctgtgcagcaggtgatgaccgcaaggccggagcaatcgcacccactgcagcagcctgaagccgattccgccattcagcgggaagccgatcgggtagtcccggaaaaaaacgggcagtctgtgggaagagtggattatccggatgtgttcgaacaggtctggcgggagtacccgttgcgtgccggggcaaacccgaagaaatccgctttcagtgcctggaaggccagattacgcgagggggtgccaccagaggccatgctggatggcgtgaggcgttacgcaagatacctggcggctaccgggaaaacgggaacggaatttgttcagcgagcgacgacgttttttggaccggaccggaattttgagaacccctggttgctcccggtaagtggcacgaacaaccagcgttgtgtgaatcatatttctgaacctgatacagaaattccgcctggtttcaggggataa

SEQ ID NO: 9394 - DNA, 357 bp, Escherichia coli
atggaaataaaaccagaggatgagttaagcaatatcgttttatttccggtaaaagaggatgaccctcgtaatcaggttaactttctttatgagccatcggaaagaccatattgtcatcacgcctctgtccgggttgacgaaaaagagcgtcaggtccgctgtaaaatctgcggtgcagttgtggagccatttgactggatgctctctgtggcgaaaagagaaaccagactggcagatgatgtaaggctcttgcgtcaggaggagcgggaaaggcgaaaaaatatagaaaagctaattcagattgagcgtaacgcgaaagcgcggatacgcagggcgacaaaatccagaactgaataa

SEQ ID NO: 9395 - DNA, 183 bp, Escherichia coli
atgcgaaagtttaaaataattattgaaacgggaatagccggtggagatttcgaggatgaattcgaagtggatgatgatgcgacgcctgatgaaatacatgacgaagcaaaagatattttctttaactactgcaattactcatatcacgaaataaaagacgaagaggaagaacaaaatggctga

SEQ ID NO: 9396 - DNA, 201 bp, Escherichia coli; identical to SEQ ID NO: 5078

SEQ ID NO: 9397 - DNA, 207 bp, Escherichia coli; identical to SEQ ID NO: 5080

SEQ ID NO: 9398 - DNA, 540 bp, Escherichia coli; identical to SEQ ID NO: 7602

SEQ ID NO: 9399 - DNA, 405 bp, Escherichia coli
atgaaatcattaaccgcagtgcgtaaaaaaagccctaattatcccgttgagttcaaaatcaaaatggttgaactctcgcatcgaccagagatctccgtagcgcaactcgctcgtgagcatgggatcaacgataatttgctgttcaagtggcgccagtactggcgcgaaggaaaactacgtcctccttcaacaacagaaaacaacgtgcctgagctgctcccgataactcttgatgccgaagatgttgtccctacaacctccccccggtcacaacctgtagctgctgcgacacctgaatcactcaatatcagctgtgaagtaacgttccggcacggatcactccgtctgaatggtgccatcagcgaaaatatcctgaacctgctgatacgggagctcaaacgttga

SEQ ID NO: 9400 - DNA, 348 bp, Escherichia coli; identical to SEQ ID NO: 8336

SEQ ID NO: 9401 - DNA, 474 bp, Escherichia coli
atgccatcgggtgggttaagcataaatgtaagcctggtgccaaatggcccgaaattcaggcagagatgcgcatctggaaaaaacgtcgtgaaggtgaacgcaaggaaaccggaaaatacacgtctgttgttgatctcgcccgcgccagagccaatcaacagtacactgaaaattcaacaggaaaaatcagcccggtcattgctgccattcatcgcgaatacaagcagacatggaaaacactggatgacgaactggcctacgctctctggcctggtgatgtggatgccggaaacattgacggcagcatccatcgctgggcaaaaaatgaagttatcgacaacgaccgcgaagactggaagcgtatctcggcatcaatgcgcaaacagcctgatgcccttcgctacgaccgccagactatttttggccttgtccgtgaacgtccgatcgacattcacaaagaccctgtggcactga

SEQ ID NO: 9402 - DNA, 201 bp, Escherichia coli; identical to SEQ ID NO: 8170

SEQ ID NO: 9403 - DNA, 192 bp, Escherichia coli; identical to SEQ ID NO: 8188

SEQ ID NO: 9404 - DNA, 1059 bp, Escherichia coli
gtgcgggtattacttcgacctgttctggtaccggaactcgggctggtgatcgttaagccgggccgtgaatccatgccggtattccacaatacccgggtactggtggagccggaaccgaaaagcatgcgtaatctgccgtccggggtcgttcctgccgttcgccagccgctggcggaggataaatcattactgccatttttcagcgacgaacgagtgattcgtgctgctggtggcgctggcgcattgtctgactggttactgcgccatgttaaatcctgccagtggccacacggcgattatcaccacagtgaaaccgtcattcaccgttatggtaccggcgcaatggtgttgtgctggcactgcgacaaccagctgcgcgaccagacctccgaatcactcgggcaacttgctcaccaaaacctgtttgcatggatgattgacgtcatcggtcacgcaataagcggtacgcaggaacgggaattatcgctggctgaattatcctggtgggcggtccgcaatcaggtggcggacgcgctaccggaagcggtattacgtcgttcgctggggttgcgtgcggaaaaaatccgctcaatgtaccgtgaaagcgacatcgtaccgggagagcagaccgccaccagcatactgaagcagcgcacaaaaaatattgcgctaccgcctcacatccaccagcaacagaacccaccacaggaagagacggtggtcagcattgccgttgatccggagtcaccggctcagtatctccagcgccagaaatcacaacgggaagagatgcctgtatacacgcgttgggtaaaaacgcagaaatgcatgacgtgcggtaatcaggcagatgatccgcatcacatcattggtcatggactgggagggatgggaacaaaggctgatgatttgtttgttattccgctgtgccgtaaatgtcataacgaactgcacgccggggtaaaagattttgaagaaaaacacggcagccagctgttgttgctgattcgttttttaatgcacgcgagaaattcgggtgtcctgaagtggaaagcatga

SEQ ID NO: 9405 - DNA, 237 bp, Escherichia coli
atgacgagactgacaaacctgacccccgctgagaaaaagtttatcgacgacgctatagccgctgccgaacgtgcggccgggaagaagctcaatcagcctaaccggcacatcgtcctgaacagagcgcgtgcgcagattgagtcgcagcgttacgccgaccgccagcgtgcattacgtgaggatgagcggcagcagtccgattttgcctggtcacgtccgcgcgcgccgcgccgctga

SEQ ID NO: 9406 - DNA, 405 bp, Escherichia coli
atgaagattttggctgcaatggaaatagctgattgtgattttgaacatatggatatggatgtcttagtaggggctttactgaaattaaaattgtgggatagccaccatcacaacttgaacatgcaaggtaagaggagctttctcgatgatttaagagcggatggtattgaggctattaagaaatacgaggctgaaattgaatctgagaatgagtcctttgcggaggagcgattaatactgaggatctatcagaacgagcttggcttatggttagggaggctcttttgtggtgaggctgagatcggtcagtgtggtgtttatggatcggctgatgaggttcgaacagctgcgcgtcaaagcggtattttgtgcgatagcatcgaaatttttcaaaaggatgcctaa

SEQ ID NO: 9407 - DNA, 1023 bp, Escherichia coli; identical to SEQ ID NO: 6152

SEQ ID NO: 9408 - DNA, 348 bp, Escherichia coli; identical to SEQ ID NO: 8352

SEQ ID NO: 9409 - DNA, 384 bp, Escherichia coli; identical to SEQ ID NO: 8439

SEQ ID NO: 9410 - DNA, 570 bp, Escherichia coli; identical to SEQ ID NO: 8546

SEQ ID NO: 9411 - DNA, 573 bp, Escherichia coli
atgctgcgtctgcggcgggccggagagataaacggagaacatgtccctgaaatcattctgctcaactcccatgacggtacctccagctaccagatgctgccgggttacttcaggttcgtctgtcagaacggatgcgtctgtggtcagtctccgggggaagtgcgtgttccgcatcggggaaatgtggtggacagagtcattgaaggggcttacgaggtggtgggcgtgtttgaccggatagaggagaagcgtgatgccatgcagtcgctggtcctgccgccaccgacacgccaggcgctggcacaggcggcactgacttaccgttatggtgacgaacatcagccagtcaccaccgctgacattctgacaccacgacgccgggaggattacggtaaagacctgtggagcgcatatcagaccatccaggagaatatgctgaaaggcgggatttccggtcgcagtgcaaaaggaaaacgtatccacacccgtgccattcacagcatcgacaccgatattaagctcaaccgcgcattgtgggtaatggcagaaacgctgctggagagcctgcgctga

SEQ ID NO: 9412 - DNA, 1098 bp, Escherichia coli
atgagcttcgttaatgatgttgaaaaaggcataaagattgatcgtgataatattctttatgttttactttcaaaagttcacttatcacataaaaatgatttgtttaatggaaaatcttatctaaataagttgaaggatttatttaataagtttacctctaattgcgacgaatatgagtattttaacactaaaaaaagtattgatgaagttcgaaaagatatcatctgtggcaacagagaatggttactgaaaaaaaactttattgactcaaaattagttcctgaagtagaccatttacgtgttgcaatgtcgcattcaaaagcgatctcttatgatctttttgatactcttgttgaacgtgattttgttgaacctcatgaattatttaatctaattgaatcccgtgtacgtaatgagttaaacaataaaaacttccctttctattatgtaagacgacaagccgaaattgacttgcgcagagagacaagaggtgagtttgaaattactctcgatgaaatttacgaaagatttccaagatactttgatcttactttagaacaactagagaagataaaaaatatagaaatagatgctgaagtcgaactcgttcatccgaaaaaagaaatggttcgtgaattttatttttctcaaatgatttgtgaaagtgtatctatcattacagatatttatctttctcagaatgttattgagcgtattttacaaaaagtaaaaattagtggttacaataaattattggtttcagcagaaactaaaacaagaaaacataacggaactatttatcctgaatatttgaaatatataagagataattttgatattaatgcaggacaggctcttcatgtcggtgataataaacaagctgatggtgatatggctaaaaaacatggcataaaaacatatgtatttcaaaaagcgattgataattacaaaaaatctttaattgctgatattttacgttccagtattaatcatccaggtatttcgagttctgttattaatggtttgtttgctaacaaatatcacgcaggacactggctgtctcttatacacatctccgagcccacgagaccgtactag

SEQ ID NO: 9413 - DNA, 435 bp, Escherichia coli
atgtacggaacatgcgaaacgctatgccgggagctggcagcaaagtatccgggagacgcgccgctgatgctggttatctggtccccggaagagattcaggcactggctgacggtatggaaatttctctgaccgatcatgaaatcaggaccgtcctggcgcgcatggaggacatcccggaagaccagcggactgaatccggtatttcttccgccgcggtgatggagattatcagcaacgtgagcgaaaaccgccaggtgaccgtccctgctgaactgctggcgtccctgattcagaccgctgagcaggcattgtggaaacgtgaatgggccgcccgggatcatggcctcgccgtcccggaatgcgtcacccgccgtcaggaggtggttaatcaggcccgcaccctgctgaaaaacaacacacacgaaaacgactga

SEQ ID NO: 9414 - DNA, 570 bp, Escherichia coli
atgacctacaaatacaaccccttctggcagcaacgtattcgtgagacggtgcggcacgcactgaatgttcatccccgcctgacggcattgcgggttgacctgcgtttcccggatgtaccggcagcaacggacgcagctgtgatatcccgcttcatcaatgccctgaaagcccgaatcgacgcttaccagaaacgtaagcatcgggaaggtaaacgcgtgcatcccacaaccctgcattacgtctgggcccgggagtttggggagtgcaaaggtaaaaaacactatcacctgatgctgctggtcaaccgggatacctggtgtcgtgccggcgattaccgcgctccgggatcactggccgggatgattaaacaggcgtggtgcagtgccctgggagtggatgtcgggtgccatgccacgctggtgcattttccggcctggccggcggtgtggctggaacgcgatgatgacactggctttcagcaggtgctggaacgtgctgactatctggcgaaggaacataccaaagctcactgcaccggtgagcgcaattttggctgtagccggagttga

SEQ ID NO: 9415 - DNA, 570 bp, Escherichia coli
atgacctacaaatacaaccccttctggcagcaacgtattcgtgagacggtgcggcacgcactgaatgttcattcccgcctgacggcattgcgggttgacctgcgtttcccggatgtaccggcagcaacggacgcagctgtgatatcccgcttcatcaatgccctgaaagcccgaatcgacgcttaccagaaacgtaagcatcgggaaggtaaacgcgtgcatcccacaaccctgcattacgtctgggcccgggagtttggggagtgcaaaggtaaaaaacactatcacctgatgctgctggtcaaccgggatacctggtgtcgtgccggcgattaccgcgctccgggatcactggccgggatgattaaacaggcgtggtgcagtgccctgggagtggatgtcgggtgccatgccacgctggtgcattttccggcctggccggcggtgtggctggaacgcgatgatgacactggctttcagcaggtgctggaacgtgctgactatctggcgaaggaacataccaaagctcactgcaccggtgagcgcaattttggctgtagccggagttga

SEQ ID NO: 9416 - DNA, 786 bp, Escherichia coli
gtggcttttgatggttcctccgatatcacattaaaagcaagtcatgttggtgcgtttgccttagggaaaacaggaagcaccgttgcgaatgataaagcagttggatggaactggagtagcggagcctataacgcaactattagtggtgcatcaacgttaattattcatttttatatgggagaaggaagttgtcctgcagctcagtttcggattaattataaaaatggcggtattttttatcgttcagcccgtgatggttatggttttgaagccgactggtccgaattttacaccaccaccagaaagccttcagcaggagatgttggtgcactgccgttatctggtggtcaactgaatggtgcactgggtatcggaacatccagtgctcttggcggtaattcgattgtattgggtgataatgacacgggctttaaacaaaatggcgatggtaatctggatgtttatgctaataacgtccatgttatgcgctttgtctccggaagcattcaaagtaataaaaccataaatattacagggcgtgttaacccctcggattacggtaactttgattcccgttatgtgaaagatgttcgacttggttcacagcaatattatggagtgaacaactggcaaacatggaatttccagtgcccttcaggtcatgtattgtctggtattaatgttcaggatacagggtctaactctgccgataatatagcgggcgtttattacagacccgttcaaaagtatataaatggcacctggtataatgtagcgagcgtttaa

SEQ ID NO: 9417 - DNA, 252 bp, Escherichia coli
gtggcggatacgggcataaaacgcgccgctttccgctgcctctttatcgcctttttgcaggaagttgtcggcatagtggtaggcttcgccgtaggtggtgttatcgcccccggtggcgtcatgctgctctgtcatcatctctgctgtggcggtgcggtagttgtagtcccgagtggtgacgcttttttccaccacgctgtacgcggtattcagcccccataccgcttccgtttcaccatcaaacagccctga

SEQ ID NO: 9418 - DNA, 222 bp, Escherichia coli
atgaaaattatcactcgtggtgaagccatgcgtattcaccaacaacatccgacatcccgtcttttcccgttctgtaccggcaaataccgctggcacggcagtgctgaagcgtataccggtcgtgaagtgcaggatattcccggtgtgctggccgtgtttgctgaacgccgtaaggacagttttggcccgtatgtccggctgatgagcgtcactctgaactga

SEQ ID NO: 9419 - DNA, 543 bp, Escherichia coli
gtgcatttcaccgcaaaaagaggtgactggtatgacatctggggtaacgaggatgtatcggtgtggtggaaccgtctgtgtgacaacgtactgccggaaaaaaccatgccgtttgacctgctgacggttttgccgacccgcctggatattgaagtgaatggctttaacggcggtgttctgaacggtgttccttctgcatatcactggtatacagaacggtatggcgtgaagtggccttgtgggtatgacctgaatatcagcagtcagggggaaaacttcattcaggtagatttcgacacgccgtggtgtcagccggaaagcgacgttgttgcagaattaagccgccgtttcggctgcacgctggagcactggtacgccgaacagggctgcaatttctgtggctggcagttgtatgagcgcggagagctcgttgatgtgctgtggggggaactggaatggtcttccccgacagatgatgatgagctgccggaagtcaccggacctgcgtggataatcgacaatgtggcgcattatggcggatga

SEQ ID NO: 9420 - DNA, 165 bp, Escherichia coli
atgaaccagctacctcgccgtgcgctttcgctttatgccctgacttttcagggacatatcctttcagtaaactgtcagtgccggatgctcacccgtgtccggcgcacgcactccacctcatccgtggagaactccttaattaccaaccttagcttcgttggttag

SEQ ID NO: 9421 - DNA, 219 bp, Escherichia coli
atgcagaaacgagaacccgtcatcatcgcgccagactataccgatgatgaactttatgagtggatgcaccagaaaattaatgcagcgcaggatctgaaatgggccaatgaagccaggactaagcaggctgaaaatctgtccgctctggagcaggatatcactaatctggaaaaagcagcggcattaagcattgccagaatgattacatacccgcgttaa

SEQ ID NO: 9422 - DNA, 432 bp, Escherichia coli; identical to SEQ ID NO: 8375

SEQ ID NO: 9423 - DNA, 423 bp, Escherichia coli; identical to SEQ ID NO: 8332

SEQ ID NO: 9424 - DNA, 288 bp, Escherichia coli
gtgaaggaaagcgatcacccctgctggctcgatgaagatgacgaaaacctgcccgtggtgctcgatgccatcgtgaaccggggagcacgtttttcgtcggtggaaatgtatctggtcagtgagtgtattgagcatatcctgtccagtgggctggcctgcgatgtgctgcgtataccggatgaaccgccccgccgctggtttgaccgtggtgttctgcgggaggtggtccgggaagcccggaccgaaatccgcagcatggcggatgccctggcaaaaatccggaaatga

SEQ ID NO: 9425 - DNA, 426 bp, Escherichia coli
atgcaatatgcgaaacctgtcactctgaatgttgaagagtgcgaccgtctctcctttctgccgtatctgtttggcaacgattttctgtatgccgaggcgtatgtgtacgcgctggcgcaaaaaatgatgccggaatatcagggaggcttctggcacttcatccgcctgccggacggtggcggttacatgatgccggatggcgaccgtttccacatggtgaacggtgcaaactggtttgaccgtaccgtgagtgctgatgccgcaggcatcatcctgacctcccttgtgattaaccgccagttgtggctgtaccacgacagcggggatgcaggactgacccagctttaccggatgcgcgatgcgcagttgtggcgtcacatcgaatttcaccccgaatgcaacgcgatttacgcggctctggactga

SEQ ID NO: 9426 - DNA, 303 bp, Escherichia coli; identical to SEQ ID NO: 5063

SEQ ID NO: 9427 - DNA, 273 bp, Escherichia coli; identical to SEQ ID NO: 9286

SEQ ID NO: 9428 - DNA, 273 bp, Escherichia coli; identical to SEQ ID NO: 9286

SEQ ID NO: 9429 - DNA, 573 bp, Escherichia coli
atgtctaaaaaattaggttttgccctgtctggtcttatgctggcaatggttgcaggtactgcttctgctgatatggacggtggtcagattaacatcagtggcttggttagcgataacacctgtgaaacaaaagttgatggcggcaagcaagatggcctggttcttctgcaaactgtaacggttgctgaaattaccgctggtgtatctgaaactgctgtcggtgccaaagcgaaaccgtttagcattactgtagactgcagcaaagcgactccgggaggccaaccgactctgacattcggttcagttttctttggtaacagtcgtggcactttgaataacgatatgtccatcaccaccccgtcatctggtgtgaatattgccctgcacaacattgacggcaccactgttaaacaagtcaaaattaataatgcatctgatgcttacactaaagcattaaccaataatgttgcagtctttgacttcaaagcctcctatgttcgtgaagacgactcaacaccagcaacggctggttatgtaagaaccaacacagcttacaccatcacctacaattaa

SEQ ID NO: 9430 - DNA, 780 bp, Escherichia coli
ttgtcgcccccttgtcttgaaaacaattcatgtcatggatggtatattttgttaaataaaaagaatattgtcgcattatgtgttgccagtagtatggcatttagcatgcctgttatggctgatattgttatttccggtacacgcgtcatttataaaagtgatcaaaaaagcgttagcgtacgcctggagaataaaggcaatagccacctgttagtacaaagctggctggataccggtgacgataacgctgagccaggaagcattaatgtaccatttacggcaacacctcccgtttcacgtattgatgctaaacgcggtcaaaccatcaaattgatgtataccggcagtaccgtactccccagcgataaagaaagcgtattctggtttaacgtgctggaagtgcccccaaaaccagatgctacaaaagtagagaatcagagcctgttacaactggctttccgtacccgtatcaagctgttctatcgtccggcaggattaaacggtaacccgtctgaagcaccattagccctgaaatggaaatgggctgaagggaagtctggcctgagtgtatataacccaacaccttattacgtctctttcaacagtgcagagttaatcgctggcggtaagtcgaacccgctcaatgtaaaaatggttgcaccgaaaagcgaagagattttcaccataagcggttcaggcgggaaagcaacgtcaggaaaggtacatttctccgcgattaatgattttggcggcgcaattgaaggcgatgtcaatttgtaa

SEQ ID NO: 9431 - DNA, 2622 bp, Escherichia coli
atgcagcaggaagccaatgtaatgaaaacaacgacatcgactaaacgccataatcttacgcgtatcgcaatgtattgctcaattatgtatagcggcgctaccatcggagccgaaagcgttgagtatgaccctacctttttaatgggtggcaacgcttccagtattgatgttagccgctatagcgatggcaacccgactttgcctggtgtttacgatgttagcatctatgttaacgagcaacctgttgctaacctggagatcccctttatcgcgatccccgataaaaagaatgctcaagcctgtattaccctgaaaaatctactacaactgcatatcaagacacccccggcagacgaggaaaatactatccttcttccacgggatgaaacgcttggcaactgtcttgacctgtcgttagccatacctaaatcctcagtgaactatgacccctctgaacaacgtctggatatcaatgttccccaggcatgggtgatgaagaattatcaaaactatgtggacccatcactttgggaaaatggcattaacgcggctacgctgtcttataacatcaacgcttatcgcagtgaaaattcaaattatacaaatgatagcgtttatacatcgttcaatggtggcgtcaatttaggggcctggcgtctgcgtagcagcggtaactatagctggagaaacgacgcgggaagcaatgttgagtttatgaatcgctacgtccagcgcgacattaccgctattcgctcgcagctcattatgggggaatcctacaccacaggtgaaacgttcgactccgttagtatccgtggcattcgcttatacagcgacagccgaatgctgccgcctgtattggcaaacttcgccccgacaattcgtggtgtagcaaatactaacgccaaagtcagcatcacccagagtggatacaaaatttacgaaaccactgttccaccgggaccttttgtcattgatgatctcagcccgtcagggtatggcagcgatcttatcgtaaccattgaagaagctgatggcagcaagcgtacattttctcagccattttcttcagtaattcaaatgctgcgcccgggtgtttctcgctgggatatcagcggcgggcaaattaataaagacgacttgcatcatgaaccaaacttactacaagcgacctattaccgtggtttaagtaaccttttcactggctatactggttttcaggtcacagataatcattatgctgcaggcttacttggcattgggatgaatacttctgtcggcgcaatttccttcgatgtcacccactccagtgtcgatataccggatgataaaaggtaccaggggcaaagctatcgcatctcctggaacaaattttttgacctgacagatacatcattaaacatcgcggcttaccgctactccacgcaggactatctgggcctgaatgatgcattaacacttattgatgaagttgaacatcccactcaggatcttgatcccaaaactatgcgcaactacgggcgcatgaaaaaccagttcaccgtaagcattaaccaaccgctacgctttgggaaggatgattatggctcgttctatacatctggaagctggtctgattactgggggggcagtaagagccgtagcaactattcggtcggctacagtaacagcgcttcatggggaagctacagcatcagcgctcaacgatcctgggatgagtacagccaaacagaaaacagtatttacctcagcttttcgatacctatcgaaaagctgatgggtacggagcaccgtgattccggtttccaaagtattgatacacaacttagtaccaatatggatggtaataatcagttcaacatgagcagtagcggttatagcaacgataaccgcgtgagctatagcgtgaacgcgggttatgggatgaataaaaccggcaaagatctcagcaacattgggggttatgccagctatgaatcgccatggggaacgctagctgggtcagtctctgctaccagcgataataaccgccagtactccgttaatacagatggtggatttgtgttgcacagcggaggactgacgttcagcaacgacagtttcagtgataatgacaccattgctctggttaaagcaccgggtgcaaaaggggcgcgtattaactacggcaacaataccgttgaccgttggggatatggcgtaaccagtgctctttcaccataccaggaaaacaaaattgctctggacactgaaaacctggaaaacgacatcgaaatgaagagcaccagtacggttgccgtaccacgccagggctcggttatctttgctggttttgaaaccaatcagggacaatctgcgattatgaatatcaaacgcagtgacggaaaaggtatccccttcgccgccgatattcatgatgaaacaaatgcaatcattggcaacgttgggcagggcgggcaggcatttgttcgcggtattcagcagcagggcacgataaaaatcacctggctggaagccagcatgcccaaaacctgtattgcgcagtaccagcaacccaatgtgacatcggagaaaatccagcaaacgattattctcaataatattctttgccagctccaataa

SEQ ID NO: 9432 - DNA, 561 bp, Escherichia coli
atgataaaaaacacacggtataaaatagtactcctggcaggcatttttttactgcccggcgcactggcacaagatattaatgttgattttgttgccacaatcaaaggcacgacatgtaatatcactctggaagggacacgcgtcaccgctgatggcaataatcagtacacgctacggatattaaatgttgctctggataaaatcataaacaagatgccagaagcacaagccgactttaaactggtcgctaattgtgatggtaacataggcaagattacgacatcgctggcagggaatccttcagtagagttaccctatttaatttctccattaacttcagataattcatccaccacagaatatattgctatggggattaaacttcgaaatgcctctgacactgaatttattcccccagatggttctaaaaagatttcctggggagagggattaacaaaaccggaacttgagatgacggtagcacttcgcgaaacccgaccaggttcaggaagagcaggtagttttaaagcacttgcgacattcaatttcacctacgaataa

SEQ ID NO: 9433 - DNA, 600 bp, Escherichia coli
atgcagatgaaatcattacattatgggatatttgcaagcattactctgagcttattattattcagcacgttttctatagccatcacggataacattggcctaaacgttatgaccactgttgaaaacagaacttgtcaaagcgaaatcagcaaccaggggttggttaatcttggcactgttggagtgggatattttgccagtaatgttagtgcggaagataattatccaggcggaaagacctttactgtgacagtaaaagattgcccctccgctggcacaacatcaagccagttgcatatagaatttaaacctgtcagtggtgtaatggccactggtagccaacagatattcgccaataatcatgtcggcggtgcacaaaatgtaggaatcgtgatttttagccaaaataatcagtcatcggacacagtgaatgtgctgtcaccaacagggcagtttcgcacagtctggccagttgcctctgcaaacatgaataattcatcgtggcaattttatacacgaatgcaaaaaattgatccgttacttcccgttggggcaggatttgtcaccagcaatgtattagttgatatttattatcaataa

SEQ ID NO: 9434 - DNA, 1251 bp, Escherichia coli
atgaagtcagcgttccgatactttctttttttatggattatcacagccagcattaataatgtaaatgctggaaatcttacttttatggtcggtgacgatgctggcgtaggaaaccttaatggcccatcaggcgataaactaatatcattttcctatccggttggtggagtaaacaatattgtattttataatccaacatcagccacaccgaccaatgcacaaataaaattatattggagtgacctggacacatcaagtagccgtgggtttgtatattgtacttcaaaaagtaattccagcggtatgccaattactgtccggcataacatggttgactcaggaaaaatggcagatgggcacagattatatgaaactaatgtaaccggtctatattatacgttaatgctcaatagattctggtcgtatgaacttcgctcaagctctccagatatatacgttggagacgatggctggcacactgtacaattttctattacgggtgattatatacgaggtcaatgtaatacttccaggtatcaagcagtcggaggtcttttgcacgatgccacggtggaattctataccgacagcagttttaaccctgctccaaatactaacgtgcaattaaaacatactggtgattatttgtattcattcgcaaatgaagggccaggggttccaaatgtaagtgcatctaagatgctaaaaattgattttaatttaacagacatcaatatccaactgccaacatgctttacgtctatccttttgggtgagagcgtaacgcgatcaaccgtaaatctcggggaatatactgttggacagatcacctcagattctgcaacacctgttaattttcagatctcgctgcaaaattgtgttcgtataagcagtattaaaacaaaactaaaatctaatgtagtaggagtgaataatcctctgttgcttggtaatactttgacaggaaccgatgatgcaaaaggtgccggagtacttattgaagggttacccaacagcaaaaattcacaaaatttcacgcttaagccaaatgatgagacatcaagctataacgatgctgaagatgatcctggagaaaacaatggaatttataacccagattatcctaatgccaacggtcgtactacaacccaggacctgaaatttcaggcaacattaaaacgcgatggtaatgcaactgtgaaacccggcggatttaaggctaccagtacattccaggtcacctacgagtaa

SEQ ID NO: 9435 - DNA, 2352 bp, Escherichia coli
gtggcgcaggcaggttttatcttaacccgacactggcgggacaccccgcaagggacagaggtctccttctggctggcgacggacaacgggccgttgcaggttacgcttgcaccgcaagagtccgtggcgtttattcccgccgatcaggttccccgcgctcagcatattttgcagggtgaacaaggctttcgcttgacgccgctggcgttaaaagattttcaccgccaaccggtgtatggcctttactgtcgcgcccatcgccagttgatgaattacgaaaagcgcctgcgtgaagctggcgttaccgtctacgaggccgatgtgcgcccgccagaacgctatctgatggagcggtttatcacctcaccggtgtgggtcgagggtgatatgcgcaatggcactattgttaatgcccgtctgaaaccgcatcccgactatcgtccgccgctaaggtgggtttctattgatattgaaaccacccgccacggtgagctgtactgcatcggcctggaaagttgcgggcagcgcatcgtttatatgctggggccagagaatggcgacgcctccgcgctcgatttcgaactggaatacgtcgccagccgcccgcagctactggaaaaactcaacgcctggtttgcgactcacgatcctgatgtgatcatcggctggaacgtggtgcagtttgatctgcgaatgctgcaaaaacatgccgagcgttatcgtattccactgcgtcttgggcgtgataacagcgagctggagtggcgcgaacacggcttcaaaaacggcgtcttttttgcccaagccaaagggcgactgattatcgacggtatcgaggcgctgaaatccgcgttctggaatttctcttcattctcgctggaaactgtcgctcaggagctattaggcgaaggaaaatctatcgataacccgtgggatcgaatggacgaaattgaccgccgtttcgccgaagataaacctgcgctggcaacttataacctgaaagattgcgaactggtgacgcagatcttccacaaaactgaaatcatgccgtttttactcgaacgagcgacggttaacggcctgccggtagaccgccacggggggtcggtggcagcgtttggtcatctctattttccccgaatgcatcgcgctggttatgtcgcgcctaatctcggcgaagtgccgccacacgccagccctggcggctatgtgatggattcgcggccagggctttatgattcggtactggtgctggactacaaaagcctgtacccgtcgatcatccgcacctttctgattgatcccgtcgggctggtggaaggcatggcgcagcctgatccagagcacagcaccgaaggttttctcgacgcctggttctcgcgggagaaacattgcctgccggagattgtgactaacatctggcacgggcgcgatgaagccaaacgtcagggtaataagccgctttcgcaggcgctgaagatcattatgaatgccttttatggcgtgcttggcaccaccgcctgccgcttcttcgatccgcgcctggcgtcgtcgatcaccatgcgtggtcatcagatcatgcggcaaaccaaagcattgattgaagcgcagggctacgacgtgatctacggcgataccgactcaacgtttgtctggttgaaaggcgcacattcggaagaagaagcggcgaaaattggtcgtgcactggtgcagcacgttaacgcctggtgggcagaaacgctgcaaaaacaacggctgaccagcgcattagaactggagtatgaaacccatttctgccgttttctgatgccaaccattcgcggagccgataccggtagtaaaaagcgttatgccgggctgattcaggagggcgataaacagcggatggtgtttaaagggctggaaaccgtgcgcaccgactggacgccgctggcccagcagtttcagcaggagctgtacctgcgtatcttccgcaacgagccatatcaggagtacgtccgcgaaaccatcgacaaactgatggcgggtgaactggatgcgcggctggtttaccgtaaacgccttcgccgtccgctgagcgaatatcagcgtaatgttccgcctcatgtacgcgccgctcgccttgccgatgaagaaaaccaaaagcgcggtcgccccttgcaatatcagaaccgcggcaccattaagtacgtatggaccaccaacggcccggagccgctggactaccaacgttcaccgctggattacgaacactatctgacccgccagctacaacccgtggcggagggaatactcccttttattgaggataattttgctacacttatgaccgggcaacttgggctattttga

SEQ ID NO: 9436 - DNA, 759 bp, Escherichia coli
atgaaagtatcagttccaggcatgccggctacacttttaaatatgagcaataacgatatttataagatggtgagcggggacaagatggacgtgaagatgaatatctttcaacgcttgtgggagacgttacgtcatctgttctggtcagataaacagactgaggcttataaacttctgttcaatttcgtgaataaaaaggctggcaacatcaacgcctcaaaatactttactggggctgtcgacgagaatgagaaagaaaagtttatccatagtctggaattattcaatgaactcaaaacatgcgcaaaaaatccggatgagatggtcgcaaagggcaagatgcgctgggtcgccgagatctacggtgatatcgagttaagtgtcacttttttcattgaaaataaggagatatgtactcagacgttgcagctgcataaaggcccaggtaacttgggcgttgatcttggagaggcttaccttcccggcgttgacatgagggattgttactttggtaaaaaaacaataatagataaaaaagccctttacttggaacctgggtggaatgctaacctggacggtgctaccctggacggtgctatcctggacggtgctaccgtggatggtgctacccgcctatatgctgaggtaattattattaataaaatcaccccaaaaaaaattgttactgaaggagttgctactaaacaaagtactgctgaaaaattattgccaacgcaattattgaatgatccagaataa

SEQ ID NO: 9437 - DNA, 1401 bp, Escherichia coli
  misc_feature (53)..(96): n is a, c, g, or t
atgacagatggtatctcaacctcgccacgttgtctttataaatcaaatatagnnnnnnnnnnnnnnnnnnnnnnnnnnnnnnnnnnnnnnnnnnnnaccgagttcttaattttgtttgatgactttttcagaagccaggatttgcctaaaccatctccagtccttcatcatttttttcaatatactcatctaagagatgcgcatttttatagatgtaaactcatagaacatacagttcaattttctttttttaaacacaaagatatcacattacttagattggatgtttttgatgacagaacaagcgaatgtctttctgaagagattaagatatatcaagaatgccatgaaaaattcattaagtttttaaagataaacttcagccaggaaatatacccacagctatatactcctgaaatattttatgaggcctgcagaaacctccagtcattttatgatcatcaggagacgtcacaaaacgctaattacagtgcaatagacaagaaaaaaagttattttaataaggaaatcaaaaatctaattaaaaagaatatttatcctgagctatacaatgaacaatgcttgaaaatccccgcctcatcgacagatgataaccaggaaataacatggcggaattttaaaactagcaatgcggcatattcacaactatgtgaaaaattatctttatttaaaagcgcgcccagtcggttaatagaaaaatcagcttactgctcaattgaaaacatgatcaccaataaatttgatgttgtcttttcttactgcggagatgatataaaggaatttatacttttattaccctataataaatcactggagatgtatgaacttaacgagcaaaagatccagtatttgaccacccctaatattaatataaataaactattgctatcaaatataacaatagaaaagagcaacctttcatatgggtattattttggttgtgtattatccaatatatcatgttttgaaagcgacttatcaaacaccatcttttcaaatggagaaataaataacctcttcattaaaaaaagcaacatatttggaacatcgttcactaataccaagataaaaaatttgcgctgtgaagatattatgcctggtcgatggaccactcaacttgtcaataagcacttaggttacagatatacaggagtattcaaaaccctggcaagtattgatgacaaaccgtcccgtttcgaaattttgataccattgatacaaactttagttcgcgacaatgtaaagctaaataatgatgtgtataaagaacttaataagtttatgcacgattacgacaaaacatccccagaaatgagaaaataccttcagagcatcaacgagtgtatgctccttatgaaaaacatagttcaccaagattaa

SEQ ID NO: 9438 - DNA, 684 bp, Escherichia coli
gtgagaataataacagcattactgatgtcattttttattttacctgttcatgccggtgtggtcatctatggtacgcgcattatttatccggaaaaaaacagagaagttctcgtacagttaatgaatcaaagtaaaaatgcctctttgattcaggcatggatcgatgatgggaacaccactatcgcgccagaaaaaattcaggtcccatttattctcacaccgccagtaagtcgtgtagcaggtggttctggccaacaacttaaaataagaaaaatgccaaacaatttgcctcacaataaagaaagtttattttatctaaatgttctggatatccctccaaacaacccacaaaatgcaggaaaaaacaaaattaaacttgcattgcaaaaccgtataaagttactttggcgtccaagcggaatcgctccggtagataaaaaaagcctttctcaattaaatatcaaaaagaaaaataacgccatctcaataaacaacgaaacagccaactggataacggttacaactatcaaagcacaaaacgtgaaagttaataatgaaagtatcttactgcctccattttcgaataacgacattacattaaaaaataaccacgcatcagaatatgaactaacggtagttgatgattacgggaataacatccatagtaaaatcgccgcgagataa

SEQ ID NO: 9439 - DNA, 900 bp, Escherichia coli
atgtctcatatcaattacaaccacttgtattacttctggcatgtctataaagaaggttccgtggttggcgcagcggaggcgctttatttaacaccacaaaccattaccggacagattcgggcgctggaagagcgcctgcaaggcaaattatttaaacgcaagggacgtggtctcgaacccagcgagctgggagagctggtctatcgctatgccgataaaatgttcaccttaagccaggaaatgctggatatcgtgaactatcgcaaagaatccaatttattgtttgacgttggcgtggctgatgcactttctaaacgcctggtcagtagcgtacttaacgccgcagtggtagaaggcgagccgattcatcttcgctgcttcgaatccacccacgaaatgctgctggagcaattaagtcagcataaactggatatgatcatttccgactgtccgatagattctacgcagcaggaaggtctgttctccgtgagaattggcgaatgtggcgtgagtttctggtgtacaaatccaccaccggaaaaaccgttcccggcttgtctggaagaacggcggcttttgattcctgggcgacgttcaatgttagggcgcaaattgcttaactggtttaactcccagggattaaacgtagaaatcctcggcgagtttgatgatgccgcgttgatgaaagcttttggtgcgatgcacaatgcaatcttcgttgccccaacgctttatgcatatgacttttatgccgataaaactgtcgtagaaattggtcgcgtcgaaaatgtgatggaagagtaccatgctatttttgctgagcggatgattcagcacccggcggtacagcgaatctgcaatacggattattctgcgctttttagcccagcggcacgttaa

SEQ ID NO: 9440 - DNA, 1938 bp, Escherichia coli
gtggaaaaagccaaacaagttacctggcggctgttggctgccggtgtctgtctgctgacggtcagcagcgtggcgcgagccgactcactggatgagcagcgtagccgctacgcccaaatcaagcaggcctgggataatcgacaaatggatgtggtcgaacaaatgatgcctggactgaaggattatccgctttatccctacctggaataccgtcagatcaccgatgacctgatgaatcaaccggcggtgacggtcactaactttgttcgcgctaaccccacgcttcctcccgctcgcacgctgcaatctcgtttcgtcaatgaactggcgcggcgtgaagactggcgtggcttgttagcctttagcccggaaaagcccggaactaccgaagcgcaatgtaattactactatgcgaaatggaataccgggcagagtgaagaagcctggcaaggggcgaaagagctgtggctaaccggcaagagccagcctaacgcctgtgacaagttatttagcgtctggcgtgcgtcaggtaaacaagatccgctggcgtatttagagcgtatccgtttggcgatgaaagcgggtaacactggactggtaacagtgctggcagggcagatgcctgccgattaccagactatcgcctcggcaatcatttcactggcgaacaaccctaatacggtactgaccttcgcgcgtacaaccggagcgaccgattttacccgtcaaatggcggcggtggcgtttgccagtgtggcgcggcaggatgctgagaatgcacggctgatgatcccatcgcttgcccaggcgcagcagcttaatgaagatcagattcaggagctgcgcgatatcgtcgcctggcgtttgatgggcaacgatgtcaccgacgagcaggcgaaatggcgcgatgacgccattatgcgctcgcaatccacgtcgttaattgaacgccgtgtgcgaatggcgcttggcaccggcgatcgtcgcggcctgaatacctggctggcgcgtttgccgatggaggcgaaagagaaagatgaatggcgttactggcaggcggatttactgctggaacgcggacgtgaagctgaagcaaaagagattttgcatcaactcatgcaacagcgtggtttctacccgatggttgcagcacaacgcatcggagaagagtatgagctgaagattgataaagcgccgcagaatgttgacagcgccctgactcaggggccggagatggcgcgcgtgcgcgagttgatgtactggaatctcgataacaccgcgcgtagcgagtgggccaatctggtgaagagcaagtcaaaaacagagcaggcgcaactggctcggtatgctttcaataaccaatggtgggatcttagcgttcaggcaacgatcgccgggaagctttgggatcatctggaagaacgattcccgctggcctacaacgatcttttcaaacgttacaccagtgggaaggagatcccgcaaagctatgcgatggcgattgcccgtcaggagagtgcctggaatccgaaagtgaaatcgccggtaggggccagcggcctgatgcagattatgccgggcacggcgacccatacggtgaagatgttctctattcctggttatagcagcccaggacaattgctggatccggaaacgaacatcaacattggcaccagttacctgcaatatgtttatcagcagtttggtaataaccgtattttctcctcagcagcttataacgccggaccggggcgggtgcgaacctggcttggcaacagcgccgggcgtatcgacgcagtggcatttgtcgagagtattccgttctccgagacgcgcggttatgtgaagaacgtgctggcttatgacgcttactaccgctatttcatgggggataaaccgacattgatgagcgccacggaatggggacgtcgttactga

SEQ ID NO: 9441 - DNA, 888 bp, Escherichia coli
atgattgatttacgccaactgaagtacttcgtggtggtcgcagaagaagagcacgtgggacgcgcagccgagcgattacatatctcgcaatcaccgctgagccgccagattgcacaactggaagaacggctggggctgacgctgtttgagcgtaatcagcagcgcattcgcctgaccgctgatggacagacattccttgccgaaacacgttcgttgctgacacacgccaaccgcctggagtcgttaggcaaacgcctgggacggggggaagatgggggcttgtgtattggctatatcgaaaacgccatgcattccggtgtactttctacggcgttacgtacgttacgtgtatcgcgtccgaatgtgcatatcgctctttacagccaaccaccggcgacccagattgaaggcctgcgccagcgcagtctcgatttttctctggtcgatacgccgcccaccgacagcgagcaggatctggaatatattcaggttctggatgatcgaatgttgttggccttaccgcaaaatcatcctctggcgcaggaggaaaaccttgtcgcgtcacaacttggcgatgagcagtggattgcggtgattcataacgacgatgcgcattctcgcgatcattttgtcgccgcctgtgttaacgccgggtttaatcctgatattcgcctggaagcgggtgaacccctcacggcattaggtttggtcgctgcgggattaggtctggccttaattcaacatagtctgcgtcataatgcgccggaaggggtggtattacgtgaattgccgtggatgaattattcaacgcaattatgggcagcctggcataaagccaaccaacgtccgctggtttcccatttccgccagattttgcgcggtgaataa

SEQ ID NO: 9442 - DNA, 1011 bp, Escherichia coli
atgagcatcaaaaatttacttcccggcaaaattggcttaggcggcgcaccactcggcaacatgttccgtgccattccggaagaagaggcccacgccaccgtgagcgaagcctggaacctgggcgtgcgttactttgataccgcgccgctgtacggctctggcctttctgaaatccgcatgggcgaagcgctgtctcagtatccacgtgatgaatacgttctgagtagcaaagtcggtcgcatcatgctggacgaaatggaagatccggcaaaacgggatttcggtgaaaaaggtggcctgttcgaacacggcctgaaaaacaaaattctgaatgactactctgctgacgccacgctgcgctcgattgaagacagcctgaaacgcctgaaaacagaccgtctggacattgtctggatccacgacccggcgcaggacttctacggtgacagctggctggagcagttcaacattgcccgtaccggtgcgtttcgtgcactgacacgtttgcgtgacgaaggtgtgattaaagcctggggactgggtgtgaaccgcgtcgaaccttgcgaactgacgctggcgctggacgaaccgaagccggatgcgttcctgctggcggggcgttattccctgctggatcacgaacgtgcgctgcaacgcctgatgccagaagcactggaacagaacgtggatattgttgtgggcggtccgtacagctctggtgtactggcaggcggcgagcactttgaatatcagaaagcctctgcggccatccagcagaaagtggcgcaaattaacgccattgccacacgtttcaatgtgaacgttaaagcagctgcgctgcagttcgcgctggcaaacccggccgttgcagcggttattcctggctccagccgtcctggccgtatggcagaagatctggctgcactgaatgcgcctgttccggctgaattctgggcagaaatgcgccgtcaaaatctggttgcggaaaacgctccgctgccgacccgttaa

SEQ ID NO: 9443 - DNA, 798 bp, Escherichia coli
atgaaactggatctgacaggtaaagtcgcggtggtcagcggctcaacctccggcattgggcagggtatcgccgccggactggcaaaagcaggcgcaacggtggttgtcgtcggccgtaaacagcgcggcgttgatgacgccatggcagcgattgcgacacaaactcccacggcgtcactgcgtggcgtggtggccgatctcagcaccgaagacggcgtggctgcgctgatcgctgcagtcccaacggctgatgtgctggtcaataatctgggcattttcaacgataaagatttctttagcgttccggatgatgagtggatgcacttctataacgtcaacgtcctctccggcgttcgtctggcgcgtcactatgcgccaggcatgacggaacagggctgggggcggattatctttgtctcgtccgaatccggcgtggcaattcctggcgacatgatcaactacggcgtcaccaaagctgcgaatctggcggtctctcatggtctggcgaaacgactggcggggaccggtgtgaccgtcaacgccattctgccagggccaacctttaccgatggcctgaaagagatgctggcggatgccgctgcacaatcgggacgcagtgcgcgtgaacaggccgatgagtttgttaaaacctcgcgtccgagctccatcatccagcgtgcggcggatgtggaagaagtagcgaatctggcggtttatctcgcgtcaccgctttcctcggcaaccacaggggcagccctgcgcgtcgatggcggtgtcgtcgacaccctgactatgtaa

SEQ ID NO: 9444 - DNA, 417 bp, Escherichia coli
atggctaaaacaactgtatcgatcgaaattccggcttctgccgacgccgtatggcaattgatgggcggctttgatgcgctgccagactggctgccgttcatcccgaaaagcgtagtgacagaaggcggtcgcgttcgttcgctgacaacctctgacggcggcactgtggttgaacgtctggaagcgtttgataaccgtcaacgcagttatacctattccattattcaggcaccgttcccggtggtggattacctctccaccattaccgttcatgaaaccgccgacagccaggtttcccgtgtggaatggttcggtgaattcaccccggtgaatgtgacgaacgaagaggccgaagcgctgtttaccggcatctatcgggatggtctcaaggcgctgaaggacaactttgttgcctga

SEQ ID NO: 9445 - DNA, 213 bp, Escherichia coli
atgaaaacgatcatcgcaatttttacagcttctcttttctctgtcgcggcgtttaacgcatcggcgcaaagcgtgacagcaaccggtacaacactggattctgcggaagcagttattgcgcagaaagcgaaagagatgaacgcctctgaatataaaattaccagcgctcgcatgggcaataccgtcaccatgagtgccgaactgtataaataa

SEQ ID NO: 9446 - DNA, 1164 bp, Escherichia coli
atgaacaactttaatctgcacaccccaacccgcattctgtttggtaaaggcgcaatcgctggtttacgcgaacaaattcctcacgatgctcgcgtattgattacctacggcggcggcagcgtgaaaaaaaccggcgttctcgatcaagttctggatgccctgaaaggcatggacgtgctggaatttggcggtattgagccaaacccggcttatgaaacgctgatgaacgccgtgaaactggttcgcgaacaaaaagtgactttcctgctggcggttggcggcggttctgtactggacggcaccaaatttatcgccgcagcggctaactatccggaaaatatcgatccgtggcacattctacaaacgggcggtaaagagattaaaagcgccatcccgatgggctgtgtgctgacgctgccagcaaccggttcagaatccaacgcaggcgcggtgatctcccgtaaaaccacaggcgacaagcaggcattccattctgcccatgttcaacccgtatttgccgtgctcgatccggtttatacctacaccctgccgccgcgtcaggtggctaacggtgtagtggacgcttttgtacacaccgtggaacagtatgttactaaaccggttgatgccaaaattcaggaccgtttcgcagaaggcattttgttgacgctgatcgaagatggtccgaaagccctgaaagagccagaaaactacgatgtgcgcgccaacgttatgtgggcggcgactcaggcgctgaacggtttgatcggcgctggcgtaccgcaggactgggcaacgcatatgctaggccacgaactgactgcgatgcacggtctggatcacgcgcaaacactggctatcgtcctgcctgcactgtggaatgaaaaacgcgatactaagcgcgctaagctgctgcaatatgctgaacgcgtctggaacatcacagaaggttccgacgatgagcgtattgacgccgcgattgccgcaacccgcaatttctttgagcaattaggcgtgcctacccacctctccgactacggtctggacggcagctccatcccggctttgctgaaaaaactggaagagcacggcatgacccaactgggcgaaaatcatgacattacgctggatgtcagccgccgtatatacgaagccgcccgctaa

SEQ ID NO: 9447 - DNA, 2220 bp, Escherichia coli
atgagctctatctccctgatccaaccggatcgcgacctgttctcctggccgcagtactgggccgcctgttttggaccggcaccgtttttgccgatgtctcgtgaagagatggatcaacttggctgggatagctgcgacatcattttggttactggcgacgcgtatgtcgatcacccaagcttcgggatggcgatttgcggtcgtatgctggaagcgcagggctttcgcgtcgggatcatcgcccagccggactggagcagcaaagacgactttatgcgtctgggtaaaccgaatctatttttcggtgttactgctggcaacatggactcgatgatcaaccgctataccgccgatcgccgtttacgtcatgacgatgcctacacgccggataacgtcgcgggtaagcgaccggatcgcgccacactggtttatacccagcgttgtaaagaggcgtggaaagatgtgccggtgatcctcggcggtattgaggctagtctgcgccgtaccgcgcactatgattactggtcggataccgtgcgccgttccgtgctggtggattccaaagccgacatgctgatgttcggtaacggtgagcgtccgttggtggaggtggcgcaccgtctggcgatgggcgagccgattagtgaaatccgcgatgtgcgtaatactgcgattatcgtaaaagaggcgttgccaggctggagcggcgtggattccacccgtctcgataccccagggaaaatcgacccgatcccgcatccgtatggcgaagatctgccgtgcgcggataacaaacctgttgcgccgaaaaagcaggaagcgaaagccgtaaccgtgcagccgccgcgcccgaaaccgtgggaaaaaacctacgtattgctgccttctttcgagaaagtgaagggcgataaagtgctgtacgcccatgcttcgcgtattctgcaccacgaaactaacccaggctgcgcccgcgcattgatgcaaaaacatggcgaccgctatgtgtggatcaacccgcctgctattccgctctctaccgaagagatggacagcgtttttgcgctgccgtacaagcgcgtgccgcatccggcctatggcaatgctcgtattccggcttacgaaatgatccgtttctcggtcaacattatgcgtggctgctttggtggctgttctttctgttctattaccgagcatgaagggcgcattattcagagccgttcggaagagtcgatcatcaatgagatcgaagcgatccgcgacaccgttccaggttttacgggcgtaatttccgatctcggtgggccaactgccaacatgtatatgttgcgctgcaaatcgccacgcgctgaacagacctgccgccgcttgtcgtgtgtttacccggatatttgtccgcatatggacactaaccacgaaccgacgatcaacctctatcgccgtgcgcgtgatctgaaaggcattaaaaagatcctgatcgcttccggcgtacgttatgacatcgccgtggaagatccgcgctatatcaaagagctggcgacccatcacgtcggcggttatctgaagattgccccggaacataccgaagaagggccgttgtcgaagatgatgaagccgggcatgggcagctatgaccgctttaaagagttgttcgatacctactcgaaacaggcaggtaaagagcagtatctgatcccgtatttcatctccgcgcaccccggtacgcgtgatgaagatatggtgaatctggcgctgtggctgaaaaagcaccgcttccgcctcgaccaggtgcagaacttctatccgtcgccgctggcgaactcaaccaccatgtattacaccggcaaaaacccgctggcgaagattggttataagagcgaagacgtcttcgtaccgaagggcgacaagcagcgtcgtttgcataaagcgttgttgcgttaccacgatccggcaaactggccgttaatccgtcaggcgctggaagcgatgggcaaaaagcatctgattggcagccgtcgcgattgcttagtgcctgcgccaaccattgaagagatgcgtgaggctcgtcgccagaaccgcaatacccgtccggcgttgactaaacatacgccgatggcgacccagcgtcagacgcctgctacggcaaaaaaagcgtcgtctacgcaatctcgtccggtgaatgctggtgcgaagaaacgccctaaagcggcggttggacgttaa

SEQ ID NO: 9448 - DNA, 1071 bp, Escherichia coli
atgaaattaatcactgcaccatgcagagcattacttgctctgccgttttgctacgcgttttctgcggtcgctgaagaagctcgtccggcagaacatgacgacacaaaaacacccgccattacctcgacatcttctccttcatttcgtttttacggcgaattaggggttggtggatatatggatttagagggtgagaataaacataaatacagcgacggcacctatattgaaggtggactggagatgaagtacggctcctggttcggcctgatttacggcgaaggctggaccgtacaggccgaccacgacggtaatgcctgggtgcctgaccatagctggggtggtttcgaaggtgggattaaccgtttctatggcggttatcgaaccaatgatggcaccgaaatcatgctcagtctgcgtcaggattcctcgctggatgacctgcaatggtggggcgacttcacccccgatctgggctacgtcattcccaatacccgcgacattatgaccgcgctgcaggtgcagaacttaagcggcaactttcgttatagcgtcaccgccacgcctgccggacatcatgacgaaagcaaagcctggctacattttggcaagtacgatcgctacgacgacaaatacacctatccggcaatgatgaacggttacatccagtatgaccttgccgaaggcatcacctggatgaacggtctggaaatcaccgacggcacagggcaactctatctgacgggactgcttacccctaactttgccgctcgcgcctggcaccataccggacgcgccgacgggctggacgtaccgggaagtgaaagcgggataatggcgagcgccatgtatgaagcgttaaaaggcgtttatctctccaccgcttacacctacgccaaacatcgccatgaccacgctgacgatgaaaccacctctttcatgcagtttggtatctggtacgaatacggcggcggacgtttcgcaacggcttttgatagccgcttctacatgaaaaatgcctctcacgatcccagcgaccaactcttcctgatgcaatatttctactggtaa

SEQ ID NO: 9449 - DNA, 1542 bp, Escherichia coli
atggtaacaccatgccacatcaaagccagtgcaggtatgacattgcccctggccctggagaaccaggagagctgcaggacacgtctggaagagatgataaatttaatcaacaggaatacagactgcagcacgggtgttcctgaccaggttaacgcactggtggctaccatggcggacgctctgcagccgtacacagtgatgacgaacgaactgccggagtatccgaacatgccggaacgtgtcctgtacattcctgagccgttcagtttctgtttttccggccacaccatcaccttcacgaacacgaaaagggattacaacggggacaatctcgtgaacattgcggtcagcaaggacggggggaatgcccgtggcgatgctgactgtgccctgtttcacgcctttgtcacaaaaatgatgtcacgcagtcgccagccaggaacatatgatttctttccctcactcaaggaagaaaaacaaggggaaggaatgcatttcatggtaacaccacgcaactccagcatcagcgcgggcgcgataatgtctcggcccctgctgcagacccagcacggctgtgaaattctgaataagataataaatttaatcaacgcggatacggacgaggttaatgaactggtagttgccatgacgaacgcgctgtttctgtatcagacggtggtgaggactgagctgcaacgcactgagccattcactgagccgttcaggttcagtttctttttttccagccacaccatcacctttacgaaggcggagagtaatagcaaattagtgcagattgaggtcagtaggggcggggtgacggtccgtgaatgtgttggcagtgcccggtttcgcaccattgccgcggcaatggtgtcatgccgtatcagtgaggccgctgcaacttccctggccctgcagcagaccctgcacagtcgggtaattctgaagctgatgataaaattaatcaacgcggatacggaccgcagcatagctgttcctgaccgggttaacgaactggcagttgccatgacgaacgcactatatcggtaccagacggtgaggggtgataagcagataatccctgaatcgttcagtttcgggttttccggccataccatcaccgtcacgccgggaaggtatagtcgctctgtgaaccttaaggtctgtgggggcggggtgccagcttgtgcaacagctgaccgtactctgtttcgcaccattgccgcagcactggtatcaagcaaccagcaaggaacacttgatttcagatcctccctccccttcctggtggaaagaaacctgagcacggaaaatgaggctaccccgccactgcccacccgcccccgcgtccaggttaggcggaaagtggccaaaaggaccagcccccatgtcaaaaacatccgaagtttcaggtcttcacagcccttactgatggatggaaatcagagtgcggaacatgcgcctggcccgcaattgccctccgtcctggcaagacagaaagggaccaaaaagcccccattatcgacgaagtcattctga

SEQ ID NO: 9450 - DNA, 1137 bp, Escherichia coli
atgagccacttagacaacggtttccgttcactgacactacaacgttttccggcgacggatgacgttaacccgctacaggcgtgggaagcggcggatgaatatttgctgcaacagttggacgacacagaaatccgcggcccggtgttgatcctgaatgatgcctttggtgcgttaagttgtgcgctggcggaacataagccatacagcattggcgactcatacatcagcgaactggcgacgcgcgagaatttacgcctcaacgggattgatgaatcgagcgtgaagtttctcgacagcaccgctgactacccgcaacagccgggagtggtgctgatcaaagtaccgaaaacactggcattgctggaacagcaactgcgtgcgctgcgcaaagtggtcacgccagatacgcgtattattgccggtgccaaagcccgtgacatccacacttccacgctggaactgttcgaaaaagtgctcggcccgaccaccaccacgctggcatggaagaaggcacgcttaattaactgtactttcaacgagccgccgctggccgatgcgccgcagaccgttagctggaaactggaaggtactgactggactatccacaaccatgcgaatgtcttctcccgcaccgggctggatattggcgcgcgcttctttatgcagcatctgccagagaatctcgaaggtgagattgtcgatctcggttgtggtaatggcgttattggtctgacgctgcttgataaaaacccgcaggcgaaagtggtgtttgtcgatgaatcgccgatggcggttgcttccagccgtttgaacgttgaaaccaacatgcccgaggcattggatcgctgcgaatttatgatcaacaacgcgctctccggcgttgagcctttccgctttaatgctgtgctctgcaacccgccgtttcatcagcaacatgcgctgaccgataacgtcgcctgggagatgttccaccacgcccgccgctgtctgaaaatcaacggcgagctgtatatcgttgccaaccgtcacctggattacttccataaactgaagaagattttcggcaactgcaccaccatcgccacgaataataaatttgtggtgctgaaagcagtgaagctggggcgtcgtcggtaa

SEQ ID NO: 9451 - DNA, 672 bp, Escherichia coli
atgagcgagccgttaattgtcggcatccggcatcatagtccggcctgcgcccggctggtgaaatcgttaatcgaaagccagcggccacgatacgtgttgattgaaggcccggctgattttaatgaccgggtagacgaactgtttttagcccaccagcttccggtagctatttacagttattgccagtatcaggacggtgcagcccccgggcgtggtgcctggacgccatttgctgaattttcgccggagtggcaggcgctacaagccgcacgtcgtattcaggcacaaacttacttcatcgatttgccttgctgggcgcagagtgaagaagaagacgaatcacccgatacgcaagatgacagccagaccttactgctgcgtgccacccgcatggataacagcgacaccctgtgggatcacttgttcgaagatgaaagccagcaaactgcattaccctctgcgctggcgcactattttgcacaactgcggggcgattcccccggagatgccctcaatcgtcagcgcgaagcctttatggcccgctggattggatgggcgatgcagcaaaacaatggcgacgtgttagtcgtctgcggcggctggcatgctccggcactggcaaagatgtggcgcgaatacacgcaggaaattaacacgccggaattgccctag

SEQ ID NO: 9452 - DNA, 456 bp, Escherichia coli
atgtcaccgcagaataatcatctgcagcgtccgcctgctgctgtgttatacgccgatgaactggcaaaattaaaacaaaatgataacgcaccttgcccgcccggttggcagttaagtttgcctgcggcccgtgcttttatccttggcgatagcgcgcaaaatattagccgtaaagtggtgattagtccctccgctgtcgaacgtatgttagtcactcttgccaccgggcgcggtttgatgttggtgggggaaccgggcaccgcaaaatctctcctgtctgaattactggcaaccgctattagcggcgatgccgggttaaccatccagggcggcgcatctactactgaagatcaaatggaactacgccctgcttatcaaccatggtccgtctacggaagcactggtccctgccccgctttaccagggaatgcgcgacggcaaaatcgtccgttttga

SEQ ID NO: 9453 - DNA, 1035 bp, Escherichia coli
atgatgttcagaaatggaatgttactaatatttattttatgggttaattttacctgggctggatgtcgtaccactgcatcattaaatattactgatagtattaatgtgggggagattttagcgaatgaggtttcctttagtaaaagtgttgtgtttaccgggatatcttgtgatacgagcacggataaaatagtctataaaaatatccaaagtgattgggttgaagtcgggccttttggtaatggcgaaaagttaaaggttaaaatagagtctttaggtaaaaccagtgacacgattgggaaatccagcaatgcgcaggcagtattaccctatgtggttaaaatatctaaaggcacacctgattttactggagaaagaaaacctacctggtttctttcagatactgtgattgcaaatattggcggtgagtcatcttcatccattgacttttggttgagcatttgtaagacattgaagattaactggtgtgtaagttatctcaccagtaaactggcgggggatacatttacgcttggattaagtatttcctattatcctaaaaatacgacctgtaagcctgaaaacacaataataaaagtagatgatattgccttgtcccaactcagaagtcagggaaagattacggcgaatagtaaggaaggaataattacgttgaaatgtgataatcttttcggcgacacaaaacaagcatcgcggaatatggtcgtatatctttccagcagtgacttagttacaggaagcaatacaattttgcgcggcaacatagataatggtgtaggatttgtgttggatctaaaagaaccacccaaagggactgaagcagccatcaaaatttctgctagcggcgatcagggcgcggcgacatcattatggaaaacagataaaaccggggcttctttaaatagtaatattattaatatacctgtcctggccagttactacgtctacgatacaaacaaagttaaatctggcgcactacaggcaaccgcattaatcaacgtgaaatacgactaa

SEQ ID NO: 9454 - DNA, 147 bp, Escherichia coli
atgactaagagcaccacgatgatgagtagcttcatcatgaccctttccttatttaaggccccttcctcgggaggggctttcccgtttcagcgtcccgctgaaatcgtcgacttacctcctttcgccctgtatgcagtctatcgctga

SEQ ID NO: 9455 - DNA, 1449 bp, Escherichia coli
atgtctgatgtaccgttgattgctgttgtaatggctggtggtacgggtagccgtctttggcccctctcaagagagcactatccgaagcaatttctgcaattatcaggtgagaatactttattacagtcaactttattacgactatccccgctttcttgcgaaactccattagtaataactaacgagcagcatcgttttgtggtcgcagaacaattgcgtcaaataaaccaattaagcgataacattattcttgaaccatgtggaagaaatactgcaccagctatagcactttcagcatttacagccttaaagcgtaatgaacaacaagatcctatacttttagttcttgcagctgaccatgttataaacaaaacagatgttttttgtaatgctattaaaaattccatttcaattgttgaacaaggaaatattttaacatttggtattattcctgattatgcagaaaccggttacggttatatagaaaaagggagtatagttaaagaatcacaacgtggagttggtaatacattctatcacgtggaacaatttgttgaaaaacctaatcgctcaagggctgaagagtatatctcctcaggtaaatatctctggaatagtgggatgtttatgttcaaagcatcagtatatttagaggagttaaaaaaatacagacctgatatatacgatatatgtgaaaaaacaatttcttcgtcctaccatgatcttgattttatacgactttcgaaagatgtttttcaaaattgtccatcggaatcaattgattttgcagtaatggaaaaaacaaagcgttgtatagtctatcccgttgatattggttggaacgatgttggatcttggcaatcattgtgggacgttagtgataaaacccctacaggggacgtttgcaaaggtgatatcctgacctataatacaaaaaataattatattcattcggagtcagccttagtagccgctgtaggtgtggaagatattgttattgttcagacgaaagatgcaattctagtttcaaaaaaatccgaagttcaggatgttaagaaaattgttcaaatgcttaaaatgcaagaacgttctgaatatctatcacatcgcgaggagtttcggccttggggaaagtttgatgctatagaacagggagatcgatataaggtcaaaaagattgtcgttaaaccaggggaagggctatccttacgtatgcatcatcatcgttcagagcattggattgtcctttcaggtacagcaaaagtaacgttaaataacaaaactttcttagttactgctaatgaatccgtttatattcctctgggtgctacttatagccttgaaaatccaggtataattcctctcaatcttattgaagttagttcaggagattatttaggtgaggatgatattgttcgtcaaaaagaacgttacaaaatagatgactaa

SEQ ID NO: 9456 - DNA, 1389 bp, Escherichia coli
atgaaaaaattaacctgctttaaagcctacgatattcgcgggaaattaggcgaagaattgaatgaagatattgcctggcgcattggtcgcgcttatggcgaatttctcaaaccgaaaaccattgtgttaggcggtgatgtccgcctcaccagcgaaaccttaaaactggcgctggcgaaaggtttacaggatgcgggcgtcgatgtgctggatattggtatgtccggcaccgaagagatctatttcgccacgttccatctcggcgtggatggcggcattgaagttaccgccagccataatccgatggattacaacggcatgaagctggtgcgcgaaggggctcgcccgatcagcggcgataccggactgcgcgatgtccagcgcctggcagaagccaacgactttcctcccgttgatgaaaccaaacgcggtcgctatcagcaaatcaacctgcgtgatgcatacgttgatcacctgttcggttatatcaacgtcaaaaacctcacgccgctcaagctggtgatcaactccgggaacggcgcagcgggtccggtagttgacgccatcgaagcccgctttaaagccctcggcgcacccgtggaattgatcaaagtgcacaacacgccggacggaaatttccccaacggtattcctaacccgctgctgccggaatgccgcgacgacacccgcaatgcggtcatcaaacatggcgcggatatgggcattgcttttgatggcgattttgaccgctgtttcctgtttgacgaaaaagggcagtttatcgagggctactacattgtcggcctgctggcagaagcgttcctcgaaaaaaatcccggcgcgaagatcatccacgatccgcgtctaatttggaacaccgttgatgtggtgagtgccgcaggtggcaccccggtaatgtcgaaaaccggacacgcctttattaaagaacgtatgcgcaaggaagacgccatctacggtggcgaaatgagcgcccaccattacttccgtgatttcgcttactgcgacagcggcatgatcccgtggctgctggtagccgaactggtgtgtctgaaaggaaaaacgctgggcgaacttgtgcgtgaccggatggcagcttttccagcaagtggggaaattaatagcacgttggaagatccattatgtgctatcgcacgggttgaaagttattatgcaaataaggcaattgagatcgatcgtacagatggtataagtatgacttttaatggatggcgctttaacttacgttcttctaatacggaacccgtagtccggttaaacgttgaatctagaggagatgtggccgcaactaaaaaatatacatgcttcatattagacttattaaattataaaaagtcaatatcatcttaa

SEQ ID NO: 9457 - DNA, 693 bp, Escherichia coli
atgaaggcgttcgatctccaccgtatggcatttgataaagtgccttttgatttccttggcgaagtggcactacgtagtctgtatacctttgtactggtttttttgttcctcaaaatgaccggaagacgcggagtgcggcagatgtcgctgtttgaagtgttaatcattctgacgctggggtcagcggcgggagatgtggcgttttatgatgatgtgccgatggtcccggtacttatcgtctttatcactctggcgttgttataccgcctggtaatgtggttgatggcacacagtgaaaaactggaagatcttctggaaggtaagccggttgtcattattgaagatggcgagctggcctggtcgaaactcaataactccaacatgacggaatttgagttctttatggagctacgattgcgcggtgtagagcagttggggcaagtacgtctggcgattctcgaaaccaacgggcaaatcagtgtttatttctttgaagatgacaaggtgaaaccgggcttacttattttacccagtgactgtactcagcgttacaaagtggtgccggagtcggcggactatgcctgcatccgttgcagtgaaatcattcatatgaacgcgggggaaaaacaattatgtccgcgctgtgcaaatccagaatggacgaaggcaagtcgagctaaacgggtgacctga

SEQ ID NO: 9458 - DNA, 1113 bp, Escherichia coli
atgagcactttttatgacagtgataatacgtcaggtgaggttttaaataatgattttacagaagaagagtcatttgaaactgcgttagatgtagagcatgcaatagtgcttggatttgctgatgataattttgaaacaaaacctgttcattatcaggatttattaacacgatttagtgcctttcaagataccgtgtttaatttgtttcctgaaatgcactcttcgcattacaacgatatttgtagcgtaagtgtggatatgacaaagggaacgcaatgcatgatccacttgatggtgaatgaagaagttttcatgtcgttgcctgttccagttgccacgatggtacgtgaagatgcaactaatttagtcaatcttaaaacactactcaatgatggttgctttattaaatatagtcattttaatgacgtggcattaataaagcaaaacataagtaatctctatttatcacacactgttgtgaatgaaagcatattgaaaaaatgttgttttgaaaacggcagtttaggtgatgttaaaataacaaatagcaatatagtaaacaatgtattcaaaaacgtttcgtttagaactgttaaaattaacaatgtgaatactcattctttaaaatttattaattgccatttttttaatgttgatatgataagagttaatttcagcaaatgtctttttcatgactgtagtatgcatggtgtcaagataaaaccatggttgccagtaaaatggacaaaagagttaataaatgattatttgtatggctgtttactatctctgtactctatctgtgcaagggatatatataatatgagcgccgggaataacgtgaaggttgctgcggatgctttccttgaaatactttattctcttaaaaataaatattgtattaaactattaagcgctcaggatcgggcgtttatatacgaatttgcaagaatgatcttcgcttatattaatgacaaaagtattgagatcttattactttcttgttttgcggcggctgaccaaaaagcaatccagagatatatacctcaggcgcaagatggggaagactttaggaatcatttacaatataagttgactcttcccactcattaa

SEQ ID NO: 9459 - DNA, 3282 bp, Escherichia coli
atgactccagtaaaagtgtggcaagagcgcgttgagatcccgacctatgaaaccgggccgcaggatatacatcccatgttcctggaaaatcgcgtttatcagggatcgtccggcgcggtttatccctacggcgtgaccgatacgctgagcgagcagaaaaccctgaaatcctggcaggcggtgtggctggaaaacgactacatcaaagtgatgatcctgccggaactgggcggtcgggtgcatcgcgcgtgggataaagtgaaacagcgcgattttgtctatcacaatgaagtcattaaaccggcgctggtggggctgctgggaccgtggatctccggcgggattgagtttaactggccgcaacaccatcgcccgaccacctttatgcccgttgatttcaccctcgaagcccatgaagacggcgcacaaaccgtgtgggtaggcgaaacggagccgatgcatggtttacaggtgatgacaggtttcaccctgcgtcctgaccgggcggcgctggaaatcgccagccgcgtctataacggcaacgccacgccgcgtcatttcttgtggtgggccaacccggcagtgaaagggggtgaagggcatcagagcgttttcccaccggatgtgactgcggtgtttgatcacggcaaacgggccgtctctgctttccccatcgccaccggcacttactacaaagtggactactccgctggagtggacatttctcgctataaaaatgtgcctgttccaacctcatatatggctgaaaaatcacagtacgattttgttggcgcgtggtgtcacgatgaagatggcggtttgctgcacgttgccaaccaccatattgcgccaggtaaaaaacagtggagttggggacacagtgaatttggccaggcgtgggataagagtctgaccgacaataacggcccgtatatcgaactgatgaccggtatttttgccgataaccagcctgattttacctggcttgatgcgtacgaagagaagcgtttcgagcagtatttcctgccttatcattctctgggcattgtgcaaaatgcctcccgcgatgcggtgataaaactccagcgtagtgagcgggggattgagtgggggctgtatgccatctctccgttgaaaggataccgtctggcgatccgcgaaatcggcaaatgcaacgcgttactcgatgatgccgtggccctgacaccagcgaccgccatccagggcgtgttgcacggtatcaatcctgaaaggctgaccattgaactctccgatgccgacggcaatatcatactgagttatcaggaacatcagccgcaagagttgccgttgccggacgtcgccaaagcgccactggcagcacaagacattaccagtacagatgaagcctggtttatcggtcagcatctggagcaatatcatcacgccagccgttcaccgttcgattactacctgcgcggcgtggcgctggatccgctggattatcgctgtaacctggcgctggcgatgctggaatataaccgcgccgatttcccgcaagcggtggcgtatgccactcaggcgctgaaacgcgcacatgcgctgaacaaaaatccgcagtgcggacaggccagtttgattcgcgccagtgcttacgaacgtcagggacaatatcaacaagccgaagaggatttctggcgtgcggtctggagcggcaatagtaaagcaggcggctattatggtctggcacgactggcgacgcgtaatggtcacttcgatgctggtctggatttttgccaacaaagtcttcgcgcctgcccaaccaatcaggaagtgctttgcctgcataatctgctgctggtgttaagtggtcgtcaggacaacgcgcgtttgcagcgcgagaaactgctgcgcgattatccgctgaacgccactctgtggtggctgaactggttcgatggtcgtagcgaatcagccctcgcgcagtggcgcggtctgtgtcagggacgcgacgttaacgccctgatgaccgccgggcaactgattaactggggaatgcccaccctggcggcagagatgctgaacgcactggactgccagcgcacgctgccgctttacctgcaagccagcttgctgccgaaagccgaacgcggcgaactggtcgcaaaagccattgatgtcttcccgcagtttgtccgtttcccgaatacgctggaagaagtggcggcgctggagagtattgaagagtgctggtttgcccgtcatttactggcctgcttctactacaacaagcgcagctacaacaaagccattactttatggcaacgttgcgtagagatgtcgccggagtttgccgacggttggcgcgggttagcgatccatgcgtggaataagcaacacgattatgagctggccgcgcgttatcttgataatgcttatcagcttgcgccgcaggatgcacgtctgcttttcgaacgggatttgctggataagttaagtggagccacaccggagaaacgactggcgcgtctggaaaataatctggaaattgcgctgaaacgcgacgacatgaccgcagaactgctcaatttgtggcatctcacgggtcaggcagacaaagcggcggacattctcgccacgcgcaaattccacccgtgggaaggcggggaagggaagatcaccagtcagtttatcctcaaccagttattacgcgcctggcagcatcttgatgccagagagccgcagcaggccagcgaactgcttcatgccgcgctgcattatccggagaatttaagcgaaggccgtttaccggggcaaactgataacgacatctggttctggcaggcgatatgcgccaacgcgcagggcgatgaaactgaagcgacgcgttgtttacgtctggcggcgaccggcgatcgcaccattaacatccacagttattacaacgatcagccggttgattatctcttctggcaaggaatggcgctgcgactgctgggcgaacaacacaccgcacagcaactgtttagtgaaatgaaactgtgggcgcaagagatggcgaaaaccagtatcgaagcggatttctttgccgtctcgcaacctgacctgttgtcgctgtatggcgatttacaacagcagcataaagaaaaatgcctgatggtggcgatgctggcgtccgcgggactaggggaggttgcgcaatatgaatctgctcgcgctgaattgacggcgattaatccggcctggccgaaagcagcattattcaccaccgtgatgccttttatttttaaccgcgttcactaa

SEQ ID NO: 9460 - DNA, 999 bp, Escherichia coli
atgtctgcttcgtcattaccattgccgcagggcaagagcgtctcgctcaaacaatttgtcagtcgccatattaatgagatcggtttgctggtggtgatcgccattctttatctggtcttttctctgaacgcgccgggttttatctcattgaataaccagatgaacgtgctgcgcgatgccgccaccattgggattgccgcctgggcgatgacgctgattattatctccggtgaaattgatgtcagcgttgggccgatggtggcttttgtctcggtgtgcctggcatttttgctgcaatttgaagttccgttggcgattgcttgtctgctggtgttgctgttaggcgcgctgatgggaacgctcgccggggtgctgcgcggcgtgtttaacgtgccaagtttcgtggccacgctggggctgtggagcgccctgcgcggaatggggctgtttatgacgaacgccttgccagtgccgattgacgaaaacgaagtgctggactggctggggggacaatttctcggtgtgccggtatccgcgctgatcatgatggtgttatttgcgctgtttgtgttcattagccgcaaaaccgccttcgggcgctcggtttttgctgttggcggtaatgccactgcagcacagttgtgcggtattaacgttcgtcgggtacgcattcttatttttaccctttcgggattattagcagcggtgaccggcattttgttggcggcgcgcctcggttccggtaacgcaggtgccgcaaacggtctggagtttgatgtcatcgccgcggtcgtggttggcggtacggcgctttccggtggtcgcggttccctgtttggtacattgcttggtgtgttggtgattacgctaatcggtaacggtctggtgctgctcgggattaactcctttttccagcaggtggtgcgcggcgtcatcatcgtggtggcggtgctggcgaatatcttgctgacccagcgtagcagtaaagcgaaacgctaa

SEQ ID NO: 9461 - DNA, 216 bp, Escherichia coli
atggaactgcattgtccacaatgtcagcatgtgcttgatcaggataacggccatgcgcgttgcccatcctgcggggaatttattgaaatgaaagctctttgtccagactgccatcaaccgttgcaggtgttaaaagcctgcggtgcagtagattacttctgtcagcacgggcatggcttgatatcgaaaaaacgcgttgaattcgtgctggcttaa

SEQ ID NO: 9462 - DNA, 1188 bp, Escherichia coli
ttgctgaccgataccaagctgcgcaacctcaagccgagggataaactctacaaggtgaatgaccgggatggcctctatgtggctgtcactcctgccggctctatctcattccgttacaactactcgatcaatggcaggcaagagacaatcacctttggccgctatggcgttgggggtatcactctggcagaagcccgtgagcgacttagtgaagccaagcggatggtcgctgatggaaagtcgccagcgaaggagaaggcacgggacaaggcgcgtgtaaaaggggctgaaacctttggtgcctgggcggaaaagtggctacgtggctaccagatggccgactctacccgtgatatgcgccgctcggtttatacgagagagctggaaacgaaattcggcaatcagaagctgaccgaaatcacccacgaggacttgcgagcacttaccgacgccatcgtagagcgcggtgcgcctgctacggcggttcatgcgcgtgagattgtactccaggtataccgctgggccactgagcgaggccagaaggttgagaacccagcagacctggtgcggccagcaagcattgccaggtttgagccgagagatcgaaccctgacgcccgaagaaattaggatcatgtatcagtacatggggcgtattggtacatcaccatcgatccgcgcagcggtaaaactgttgttgttgacgatggtgcgaaaaagcgagctgacgaatgctacctggagtgagatcaacttcagcgaagcgctctggacgatccctaaagaaaggatgaagcggcgaaatcctcacctggtgtttctatccaggcaggccatggacattctcatcgctttgaagacgttctccggtggatcggattatgttctgccgtcgcgttacgattctgacgtgcccatgagcagtgccacgctaaaccgggtgatgacgatgacttacaagctggctcagaaagaagggcagtcccttgccaagtttggaccccacgatctgaggcgtacagcaagtaccttactccatgaagccggttacaacaccgattggatagagaaatgcctggcacatgagcaaaaaggtgtgagggcgatatataacaaagccgagtatcgtgatcagcgtacatctatgttgcaggactgggctgatatgattgatgagtgggttatttag

SEQ ID NO: 9463 - DNA, 1962 bp, Escherichia coli
atgaaaatagagaagataaagctacagaattttcgttgtttcgggcatgaggtggtcgagctaaattttgaggaagaactgacaatacttgtcggcggaaacggctccggaaagacggcagtgctgcaagctgtgtccaggttgtttggtacaacatcagcgcagcgatcggtacagcgtcgagattttcacatacctattgaccggcaggagctgcagtctggcgacagtctgtttgtcgaagcggtacttgccttccctgaactggaagagcaagacgcttctcctcttgatgccgttccggagttctttaatcagatggcggcttccggtgagggagagccccttaaggcccggatacgactacaagcaacatggacggatgacggtacgccggagggagcaattgaggaggatatacgctggataagagccctggatgataattttgaatgggatgactgttccagggttcaggctgtagagcgctcttcaatccagtttatttacttaccggcaaatcgtgatgcgacgactcaagtgaccgcccttctaaaagggcggttatggcaggctgccaaatggtcgacggcatttagggatgcaagctatgttaatgccggtcagatccagagcagtttcgaggaagaggagccgtcgaagtttctgctggagcgtctttcgaagcgttggcaacaggtccatgaggccgatacagacagtaaaccgcgtttaaggctcatcgagaaccgttttgaggagcttgttcgtaaagccgaatttacttttacgcctgatgaagaaggtcaggagcgtcgtttgtccgagctgagtgacggtcagcgctctctgttccatatcgctcttacagcggcaacgctcgaaaccgagcgggaagcattttctttgcctgctgatgacagctcatttgaacaggataagttacgccgtattcacctgacgattcttgccatcgaagaaccagaaaacagcctgtcaccgttctttttatctcgcatcatcaagcaggcgagagagattggcgcactgccttccgcgcaggttctgctatctagccattccccatctatcctgagccggatagagccggaggaagtgagatattttcgtatggaccggagcgctcggtgctcatcgatccgagaactgaccctgcctgaagatgatgttgaggcaagcgtttatgtcaggctggctgtaaaggcataccccgaactttattttgcgcgatttgtaatcctgggtgagggagactcagagcgagtagttattccgaaaattgcggaagagatgggtgtttcccttgatccatcattcgttcccgtcgttccgctcggtggacggttcgtagcgcatttctggcggctgctgaatgatcttgagattccacatgccactttgctcgatcttgatctggggcgccgacatggtggggcgaatgccatgagaagctgccttcagaatttggccgctatcgggagtaatttggggagcaccaatggtgctaatgctgctcagcttaccgaccaacagctttataatgaaggcctgcaaggtcaatggcttcaagcattcaggagggaaggagttttcttttcctatcccattgatctcgattttgccatgttgctcgcctttccaaccgcttatcaggttgccaatccaggtggcaatggaccccagagtagtgctgctgctattcaagccaaaaaggtcagtacgctgaaaacaggtggtaatcctgccttgtataccgcgcattatgatgacgctttcaaatggtatccgtatctgttcctgagccgcagtaagcccgaaactcaccttgcggctttttcccgtatcgcgggcggcggtgttactgcgtccgctcctgtagagctcagggcgctcattgagtacgttacggataagcttaatctgtcaggagagaatgaatga

SEQ ID NO: 9464 - DNA, 1866 bp, Escherichia coli
atgacccgcgtaagcagagacgactgggtacctcagggtgtcggtggtctggaagggagagcgtgggaggctttacgtgaaaccgatagcagcatccttgtgaccgctggtgccggtgccggaaaaactgagtttctggcacagaaggcgacctatcttctgcagacaggtatttgtccggcacccaaacgtattctggccatcagctttaaaaaagatgccgcccaaaacctcgccgaaagggttgcaaagcgttgcccgagagatcaggcgcggcgctttgattcgatgacttttgatgcctttaccaaggggcttctggaccggtttcgtccggctttacctgagccgttcaatgcgcccggtacgtatcagattgttaatccgtttcgtagggattatgacgattttattgagcgacatggctatcacggagtgagtgctcaacagcttgagagaagactgcttctgacagacctgccaattgacttgtcaaatggatctgaagtacatcgtgcgttagcagattactggcatgaacaattcttcgggggcgacgagatatccctgtccttcccgatgataaacaggcttgtaaaactgctgcttcaggaaaattcatatatccgccgggccttacaggcaacatatcccatcgtctttcttgatgaataccaggacaccacctatgcccagtatgacatgctgctaacggcattcgatggtagcgatgctgtctttacggcagtcggcgatgataagcagcgtatcatgggatgggcgggagccatgaatgacgcctttgaccagtttgaaaacgactttgctgccagacgcataacactgctttctaactggcggtcacatgtggatctggttcgtattcagcacgagattgcccgccggatagacgataatgtggaagaagtgcaggcacaagggacccgtgaaatcgaaggtgaggtttctgctatctggcaattccggagcgcagatgacgagaacaattatctggctgaatgggtgagccgtgaggttcagtcagagcgtgttgcaccacatgatgtagcgattctgatcagaatgcgggcagatcaggttgagggtgaaatagccccctcttttgcggcacgaggtctcaggatcagaaatgcggcccggtcagtcggtgaaattcagatacaggatctgcttggtgaagagctgaccggtatatttgttcctttactccgcctgggagcgacggagcgaagcccggaaaactgggagcagacccagcagaactatctgtttttggaggctgccgatccggataacgatctcacgcaggaacgattgctggttaagcttgaagcattcgtccgtaaattaaggacagagctagcgcatcgccagcctagtccggattcggcggaagagattgcagagatgcttcttgaatttgtcgggacccctaggcttcggcaatcctttcccgcttaccagcgtgcaagagattttgagagggtgtggagtggatttgtcactctcctgaaagagtgtgcagaacacagcagcagctggacggaggcgctggatgagttcgaaggtattggccaggtagctctgatgaccgtccataaaagcaaaggtcttgagttccatacgatgatattttatgggctcgacaatcagacttggtggagccttacgccgcaacggggtgaagagctaaacactttttttgttgcctttaccagagcaaagcagcgtgcgtttttctcccagtgcgttgagcgagggcatgctattggctggatacagcaattattggccccggcgggagtcgaaaccatagatggtacgactatattgggtactacgtga

SEQ ID NO: 9465 - DNA, 1044 bp, Escherichia coli
atgaatatcgaacaccaagctagactagacctagggcaagactacatagccatccttccaggctgcgcccagcctgtttctcttgctatagccaaatttagaacgcgctggggaccttactctgccttctctcggcgctatcccattcttcgcctgatacaagaactgatcgatcctgccatagctgagtacatggattccctcccaaacagctataaaaaccatgttgcgggtattggctcaggagttggatttagcgaaatcatccggctgatagggctggaagcaatggtgcgcatgcagcgccaactgctacgtcagttcataaagacaagtgatgaacaaacccaaagagatctgtgcttcgccgcaaccattgaatcgttaattgaattaacctgggattgcgcctgtaagcgtccgaagaaatcaacagcgaccaaaggcgtcaacctaaacgtacaacgaaaacatagtttctgcgaattctgtggaaaccttacggagtactcaaaattcatgctcacagtagagcagagacaaacaaatgaggttgaacttatagaccacaagaaactagaacttagccacaattactgtaaagagcatcgccccaaacttgccaatgacgagtggaatccaagttacaaacaggcaaagcgctccctcgcacaattcaatatcgaactttccaggttaactcatcaatctgcacatcgcgctaagcctcatgctatgtcaggagacaaactgatcgatgactatttcttcctattcatgttgaatttaacattacagcctgcagacgtagcggatcttcgcaatctggctcgaaagatggtcgactctaagctttcagacaataagaagaaaatgctggtacttcagcattatggttacactcaatctcaaattggcaaaaagctactaagcagaaaacaacaaccaatgacacctcaagcagtatctaaagcattagcagcagttcgcaaagattttttgcttcctgctaacaggcccggaaaaagtcaacagaaattttag

SEQ ID NO: 9466 - DNA, 231 bp, Escherichia coli
atgcaaacaatggcaaataaagttctcatcaacaggaaacagctcctggagatgattccactttcaacgcgcacaatttataacctggaacagcgtggggagtttccgaagcgcatagcccttacaagcagaaacgtcgcgtgggacctgtcggaagtagagcagtggattgaggagcgtaagtcttcaggaatccaggctactcggcctggcaacaccataggggcctaa

SEQ ID NO: 9467 - DNA, 864 bp, Escherichia coli
atggcccttgatcttatggcggccttttcggaaacgccgccgcctcttgattatgttttacctaacatggtttccggcacggtaggggccttggtttcaccaggtggtgccggaaaatccatgctggccttacagcttgccacgcagatcgctggaggcccggacttgctggaagtcggagaatttcctgttgggccagttatctatcttcccgcagaagatcctcccgcggctatccatcaccgattacatgcgcttggagcgcatctcaccgccgagcagcggcaagctgttgctgaaggcttgctgattgagccactgataggaaggtgccccaacattatgtgtctagattggttcgatggccttaagcgagcggctgcgggccgccgccttatgatcctagacaccttacgtcgtttccacatcgaagatgaaaacgttagcggtccaatggcgcaagtgatcggacgtatggaagccatcgccgccgatacagggtgctctatcgtatttttgcaccatgccagtaagagcgccgccatgattggtgcgggtgaccagcaacaggccagccgtgggtcgtctgttctggtcgataacattcgctggcaatcgtacctgtctggcatgacgcaaactgaggctgaggaatggggtgttgatgatagtcagcgtgggtacttcgtccgctatggcgttagcaaggcgaattatggctctcctttcgccgagcgttggttcaggcgtcacgaaggcggtgttctgaaacctgccgtgctggagaggcagcgtaaggccaaaggagtattaccgttcaagaaatctaaagttgctatggaaggcgttgatgacaactggtaa

SEQ ID NO: 9468 - DNA, 756 bp, Escherichia coli
atgacaactggtaacaaggtcactccaactagtaccagtgcacaggcaagagtgatgctttaccaggccagtcagcgcccaagcctgatggaggccgactggatggaaacatcctttggccgctgtcgcattaagggaaggcttggtcagcggcacgcagatgttgttgaggctattttgcactgtgccgaacgtcgacgcgatatttcagatggtggtgtagagctattggtagaccctgccaaagtgcggaaaacgttgtcagatagccggtatagttcctcccatcttgagaagctgctggcagagctgcgagcagcaacagtaacgattgaaacaccacagttcgattttccgataatcggcggcttgatcgatcatgttatcccttcacctatgacacgccctgatcccttgacgggaggagagcgaaatctgtggagagttcggcttggtatcgccttggtcatgttattggagcatgaccttagtctgtactacgatcctgccccaattgctcgcttgcagcacgggattagccaggcggtcgcgcgacacatattgacccacaagaatgatccagccggagggtggcatgttgatactctcattcgcgcagtctgtggtgaaaacatcaatagtaagaagatgcgaaatgggcgttccaggcttagggaggatgcagaaaaattgcatgaagttggaataacgatagatgctgagaataggatcaggcgcctcacacccgcccgatag

SEQ ID NO: 9469 - DNA, 777 bp, Escherichia coli
atgcaaaaagttaaaagaaaaaatttagccgctaaaattgctctggctgtcgctatgacgacctgcaccttgcagcccgtttacgccggtattccagtagttgatggcaccaatctgacgcaaaacatcatgtctgctttggaagcggtcgcgcagacggccaagcagattcaggaataccaaacccaactccagcagtacgaaaaccaactgcaaaacacgatggccccggcggcccatatttgggaccaggcgcagcgcaccatcaacgatctgaaccaggcgaccaacacgctcgcctattaccagaaccaacttggcagcctcgatgcttacctgggcaagttccaggacgtggcctattaccgcagctcgccttgtttctcggcggcgggatgcagtgatgccgaacgagccgcgatggccgagaaccgtcgcctggcgtctgaatcgcagaagaaggccaacgacgcgctgtttaagggcctggagcagcagcaagacaatctggaagccgacgcccgacagcttaaccgcctgcaatctgccgcccagggcgcagacggccaactggccgccattggctacgccaatcagctcgccagcaaccaggctaaccagctcctgcaaatccgtagcttgctgattgctcagcagaatgccgttggcactcgaatgcaggcggatgctgaccgcgaagctcaatatcaagcgtcccgtgaaaggttgttcgatatgggtgagccaaccgaccgttcagaaaacagagggttttaa

SEQ ID NO: 9470 - DNA, 198 bp, Escherichia coli
atgaagaatatcacccgagtttttatcgttagcgcgttggcctctttcgttctggtggggtgcggtgaagatgacgggccaaagcctgcaacgatcaactgtgacaacccaaacctgacgaaagagcagagggaagaagggaactgtctttgggatatgggcgaacccactgatcgctccaagaacaaggggttctaa

SEQ ID NO: 9471 - DNA, 1296 bp, Escherichia coli
atgagcaagatattcattcgacttgtgatgctcctggtagttttactgacttcgcaaactgcgtcagcggccattgagcctaatggtgtcttggatgaagtggccgtgcgtttcatgacggccagtgctacttggggcacggtaattacaaactatgccgcctggctgttctggacgctgggcactatatcccttgtttggactggcgggaccttaatccttaaacaagcggatataagggagttctttgccgagttcgtgcgcttcatcctgacgtttggtttctatctctggttgctcagaaacggcccagactttgcgacgtcgatcatcgactcgttgagaatgatcggtgctcaagccggtggccttccgagagacctaactccgtcagagcctattagtattgcgttcgacattattgtgaaagctggtaagtcctacagcattacaagcccgatagataacttgtctattttcttaatcacgctggcaattttggcttgtatggcggtagtggcagccaatgtgttgttggccttggtgacggcttggatattgatctatgccggtgtcttcgtgctggggtttggtggttcgcgttggacttcagatatagcaatcaactacttcaaaagcgtattgggcgttgctttgaagttgatgacaatgacgttgctcattggcattgccatgtcgatcatggacggtttctataccgatctatccaatgatgcccctatgcgtgaactgctggtgatctttgtcgtttcactggttctcgtgatgcttattcactcggttcccaatgtggttgccagcctggttcctggaggcggtgcggcggcaggtgctggcagtatcagtgccggggcgatggccggagcggctgttgccactggtggtatggctgccggtgcagcaatggctaccgccggcggtgtgtctgctattcaggctgcatttgcaaaagcaggtgagaacgtagcgaacaatactgacgttatgtcgagcctgggcggagcatttagcggaggcggcggctctgatgaagctggatctttttcccaagcttccggccaatcttctagcggtggcgaatcctctggcggcggctttaaaggtagcgctgtaaaagcgggtcgtattgcagcggataccggtgcgaatttgatgaagggaatgagtgatatggccggggatagaattggccgcaccgctggaggtcgtttagccagctcgatccgaaacagtacgaaagatgacggggatgacgacgacaaggagggcgactga

SEQ ID NO: 9472 - DNA, 288 bp, Escherichia coli
atgacggggatgacgacgacaaggagggcgactgacgacgcttcccctgcatttgacaacgatagcttaggcggtggcggcactggctggatgaatcaaaccggcggttttgatggcctatccagtgaggaccaggaagaagcccgcaaagcacacgcagagtggcaagagcgcgacccggaaaagcacaccttcgacgttgaggactacgtttcgtatgcccaggaacgccagcaggagcgcagcgaagaggttgccagttttgttaaaaaaggtcgcatggcctaa

SEQ ID NO: 9473 - DNA, 255 bp, Escherichia coli
atggagtttaactttccaccccaaaatcttgcggaagtatttggtttcttcgcagtgatgttcattgtgatgctggccttctattttttggggcagtggctgcacaacaccgggcacggcccgaagatgaaagccattgccgacaaaatggaggtgttccaaaacaggttggccgggcgtgcctacaaggacatgacgagatcggccgatcaaatcgacaaaatgagacgctggctgtttggccgacgcaagtag

SEQ ID NO: 9474 - DNA, 243 bp, Escherichia coli
atgacaaccacacataatatcgaagttcagcaagcaattcatcaggctgcgatcaagctggccgccctggagttcatcgaccaggaaaccgcccggcaggttttgccagtcgcggaggcggtcgccaatatgtttacgatcctgtactaccaggctgaaactggccgagtgacgccggaggacttcgagcaggcgttggacactatccgacaggtgacaaagctgagaacggacttatattaa

SEQ ID NO: 9475 - DNA, 1695 bp, Escherichia coli
atgatcatgacaacagatgaaattaacaatttaagtgaagaggctgattcacacatactaaacagagactatgaagccctagaaagtcttattgagagattgacatcagaagaatttgaatttgaacaccctttttatgaggctcattacctttacacaatagcaaactgctattccttgctctacgaggcccgaagagttgaatggtactcagacgatctaatgaaagccataatctattacagaaaatctcttcacagaatcccaaaacctgactgcaatcaaaaggctgaaaatattcaggcatttaataacctcaagtcaatggttctaaccaacttggctaaccatctttcttctcaaggaagggctttatgttgcatacctctttatgatgaagccatagctataaataaaaaaatagaagcgattgcatcaaaggctagaaaccagctctttcttggcgaatcgctatatgacaacgggcacaaagagtatcactattttatcgcctacaggcttatcaaagaggcagtagagaatatcggacaactataccccgaacacagagtagacttagaaggtgacgggtatctaattagatttaaggaatggttcgaggaaaactttgaggaatcttcattcgattatttttcagaagagtataacagctcaaaagcgagaaaggaaaaacaatacctgcaatggtgcgcaaagaataagctatttattaacgatctaaatgatgtctgcgattacgagatatcccatcaggacgttcttgctcttccttctttctctcaatctataaattcaacactcaccatgcatgaagagctagcgtatcatggcaactttgatgaaataaaaaatgactactgctacgcacgctacttattttttactgcccacagcatacctgatgaagaacagcacttctacaactcaacataccgacatgttgacgacatgtctcattcaatcaacaatctaaaaacaagtcattacaaaacctcattccggatactttattcattattcgataagatcgcttatttgataagtcgtttttttgaccttaacaacataaaagatgacaacatgataagcattgacaacctatttcgggacttcaagtcaaataactggagaaagaaatggaagccaaataaaaagctagaaactagcgacaatcatttcattcatgctttattttacatattaaaagatattcgcgatattaaagacacttcatctgtatcaaaatggatagacccagacgctaaagcattttctgaaattaggaatgccatggagcatagatcacttaaaatagtagatgattttggttatgagttgacaacctcacataacagctatcataacagcgaattagaaaaacttaacttagatattgaaaaaataaaataccagttaaaatcctctttaccccccgaagaatccagatcactagaatccaacctagtaaagctcgaatcggatctttatgaaaagaaaaaactaagctcgcattctctattaatgcctttgagtcaatttgagtcacggctaatgacgctaacaaaactggcaagaaactcaatcatttatctgtcgctatccatccacttcgaagaaaaaaaacgccccaatggaaagatatacttaccaaagggcgtcccattaaaagattaa

SEQ ID NO: 9476 - DNA, 267 bp, Escherichia coli
atgagcgagcaagagtgccgagcatcacaggcatcggcagcagaggtcaaggcagagagtatgcgttggcctctggagcaggctgaagggggcaaatccgcagtgcgttggttgactcctgaggagcgacaagagctgcgcagtgacatggcagaggcatctgcctgggctcggactgagcttcggaagcgcagagctgcaaaaaatcaaaaaaattctgtgcatggtacagataatggtatcgataaagatcgcatttctaactag

SEQ ID NO: 9477 - DNA, 618 bp, Escherichia coli
atgaaccgctttgtggtggccgaaccactgtggtgtacaggatgtaatacctgtctcgctgcctgttcggacgtgcataaaacgcaaggtttacagcaacacccgcgcctggccctggcgaagacgtcaacactcactgcccctgtcgtgtgtcatcactgtgaggaagccccttgcctgcaggtctgcccggtcaatgccatctcccagagggacgatgcgatccaactcaacgaaagcctctgtattggctgcaagctttgcgccgtggtctgcccatttggcgcaatcagcgcttcaggaagccgtccggtgaatgcccctgcgcaatatgtttttcaggctgacggctcactcaaagacggcgaagaaaacgcgccgacccaacatgctttgctgcgctgggaaccgggtgtccagaccgtcgcggtgaaatgcgacctgtgtgatttcttgccagaaggtccggcctgcgttcgcgcttgcccgaatcaggcgttacggctgatcaccgacgatagcctgcaacgtcagatgaaagaaaaacagcgccttgccgcaagctggtttgccaatggcggggaggatcccctttccctcactcaggagcaacgctaa

SEQ ID NO: 9478 - DNA, 1005 bp, Escherichia coli
atggaaaacattgcgcttattggtatcgatctgggtaagaactctttccatattcattgtcaggatcatcgtgggaaggccgtttaccgtaaaaaattcacccgaccaaagctaatcgaatttctggcgacatgcccggcaacaaccatcgcgatggaagcctgtggcggttctcactttatggcacgcaagctggaagagttagggcattttccaaagctgatatcaccgcaatttgtccgcccattcgttaaaagcaacaaaaatgacttcgttgatgctgaagctatctgtgaagcagcatcacgtccatctatgcgtttcgtgcagcccagaaccgaatctcagcaggcaatgcgagctctgcatcgtgtccgtgaatccctggttcaggataaggtgaaaacaactaatcagatgcatgcttttctgctggaatttggtatcagcgttccgcgaggtgctgccgttattagtcgactgagtacccttcttgaggacagtagtttgcctctttatctcagccagttactgctgaaattacaacagcattatcactatcttgttgagcagattaaagatctggaatctcagttgaaacgaaagttggacgaagatgaggttggacagcgcttgctgagtattccctgcgttggaacgctgactgccagtactatttcaactgagattggcgacgggaagcagtacgccagcagccgtgactttgcggcggcaacagggctggtaccccgacagtacagcacgggaggtcggacgacattgttagggattagcaagcggggcaacaaaaagatccgaactttgttggttcagtgtgccagggtattcatacaaaaactggaacaccagtctggcaagttggccgactgggtcagggagttgttgtgtcggaaaagcaactttgtcgtcacctgtgctctggcaaacaagctggccagaatagcctgggcactgacggcgcgacagcaaacttacgaagcataa

SEQ ID NO: 9479 - DNA, 564 bp, Escherichia coli
atgaaactcaaacatgtcggtatgattgtcgtttctgtgttggcgatgtcgtctgctgcggtaagcgcagccgagggtgatgaatcagtaacgaccactgttaatggcggtgttattcattttaaaggtgaagtggtaaatgccgcttgtgcgattgattcagaatcaatgaaccaaacggttgagctgggtcaggtccgttcttctcgtctggctaaagcgggtgacctcagctccgccgttggcttcaatatcaagctgaatgattgtgataccaatgtttccagtaatgcagctgttgcattcctgggtactactgtcaccagtaatgacgatacgttagcgctgcagagttcagcggcaggctctgcccaaaatgtcggtattcaaattttggaccgtacgggtgaggtattaatacttgatggtgccacttttagcgctaaaactgacttgattgatggcacgaatatactgccgttccaggctcgttatattgctctcgggcagtcagtagctggtactgcaaacgctgatgcgaccttcaaagttcaatatctataa

SEQ ID NO: 9480 - DNA, 705 bp, Escherichia coli
atgaaaagcgtacttgcagcagcggctatgtcgcttgttatttctgattttgctaatgctgaggaaacaagaggtaaagctatgatgaaaatagaaccgtcagcgatttcggaagctgatattcgttccgtctcaccggctctcgcgcgctttggtcgcgaagctattactgaagatctgtggacacgcgacgccctctcaccgagggatcgtagtgtggtgaccgtcgccatgctgattgcccgcaaccagcctgccgagcttaagcactatattgacgtcgctctcgatagcggcgtgacgccagcggaattatcagaaatcattacccatctggcgttctactcaggttggccaaatgcaatgtcagccgtcagcgtgaccaaagcagtatttgaaactcgtggcgtcacgccagatgcgcttcctgacgcttctccggacctgcttcctctcaatcaggaagcagaaaagcagcgttcagagacagtggaaaaaaatgttggcccaatatctccaggcctggttaaattcactgctgatccactcttcctggatctatggcaaagacccgcgctgaaaccccgcgacagaagcctgattacggtcattaggtgtccttgtaatttaaagatattatcgttcttcgtgaaatgtaataaccctggaaactatattctcagggcaatatcccatcaagaatga

SEQ ID NO: 9481 - DNA, 696 bp, Escherichia coli
atgcaaataagcagccctgtctttgcaacaaaaccggacgcgccgaataagccggagatgaatatcttcgagctcggcatcagacccgatcgggacaacgactttgcagacgtggccagacagacgatttccgcttcggttgatcatgaagcaggtacactggcgatgtatgccctgcaacgcagcgacaattcaggtcaggcattcatgttcgaactctatgaaaatgagcgtgcttatcgcaaacatctcaatgccgccccatacaaagcattcgctgctcgtgcacctgacattattgacaggaagaagaaaattaccctggagccacagtttctgggcgacaaacacatcataccgaatgaacgaactatcaataatctggtgatcgtcgaagtaaagcctgaatttcagagcgaatttagaaacatcgtccttcctgaaatggtcgagtcgctcaaagtagagaaaggcgtgttagccatgtatgccggtacagattcagagactccaaaacgctggtatttctatgagatttacgccagtgaggaggattatcaactgcaccgacaaacgctgcacttcctggattacctcaggcaaacggcgcatatgagcgccaggaaggacgcaatcccggtaaaaccggtatttcttcgtaacaaaggcggaatcaaacaggagccgcaacgttga

SEQ ID NO: 9482 - DNA, 1020 bp, Escherichia coli
atgcagtatacccggctcggtaaaagtgacttacttgtttcccgcatctgcatgggatgcatggggtttggcgatccgtcgacgggtcagcatagctggacgctggacgaaacagcaagccgcgacatcattcgctatggccttgaaaagggcatcaacttttacgataccgctatagcctaccagaatggctccagtgagcgatacgttggccgggcattacgggagatggcgaaacgcgatgatatcgtcctggccaccaagtttctgccgcgaacccccgcacaaattgccggagggatcagcggaaaagaggcaatcgctcaatcccttgaccagagcctgaagaatctggggatggactatatcgacctctacatctaccacatctgggattacaacacgcccattatcgacgtgcttgaagcgttacataccgctgttactgctggcaaagtacgatctgttggtatttcaaactgctatgcctggcagctggcgaaggcgaacgcccttgctgaacgcgaagggctgatgccctttgtttccgtacagagccactacaatctaattatgcgcgaagatgaacgggagctcttcggcctgtgcactgaggataatatcgcaatgaccccctatagcgcgctggccagcggccgcctctctcgtaaagaaggctatacacggcgagccacagaggatgactatgcgcgtggaaaatatgacagcacggctgaacaggatcgcagcattattgagcgtgtagccgaactggccgaacgccatctggtgtcaatgacggaaatatctctcgcttggctgctgacaaaagtcacatcacctgtcgtaggggctacaaaaaaagctcatgtcgatggcgcggtaaacgcagtaaatcttcaactaagtccggaggaaattcagtttctggaagaaacctaccagccgcatgttctgacgggggtcatggcgcaaaatacgccgcaaacgaaagatgttaagcaggtctggatgcgatag

SEQ ID NO: 9483 - DNA, 573 bp, Escherichia coli
atgaaaaatatccttgttatttcaggtcatcctgagcttacccattccgtcgccaatgccactattcttgatgaagtggagaccgcccttcccgatgttgagattcgtcgtctggacaggctctatccggatggcaaattcaacatcgcggcggagcagaaaagcctgctcagggccgatgtgattgtctggcagttccctttttcctggtatgggctgccaggattaatgaaaaaatggctggacgaggtctttgttcacggcttcgcgcatggctcaacggcgaaactgggcggtaaaaagctgatcctctcctttacaacgggagcgccagaggagctctataccgtcgacagtttctttggccataccattgaagagtatcttattccgttcgaaaccacggcaaggctgtgcaatcttgagctgctggcgccggtttatacctgcggtatcagctatgccgaccgggatgccgacaaaatcgcgcagcaaaaaacgcttgcccgggaacacgcttcaaggcttgtcgaactgctcaattccgtcgtgaataatccagagggagaataa

SEQ ID NO: 9484 - DNA, 447 bp, Escherichia coli
ttggcgacagggggaaaaccgtcgctgatggtcataatcctgaccgactccctgctttcccgctttaataaactgaatgtgccactctatcttcatcccgggttaccgcttaaaagcgtacagcaggcctacttcacgggcttcagcgcagaggtcaacgccaggctttctatgtttgcctggggctggcatcacgaagcggggatccatttgttgcggctgatgttatcgggcgcatttgataaatatcccaacctgcaggtaatcagtggccactggggggagatgttacccttctggctccagcgtcttgatgacagcctaccactggctgcaacgggtctgtcacgcacgctaacgagaaccttccaggaacacgtttacgttaccccgtcatatgctaacactgccgcacttccagtttatctacgcgttaatgggtgctga

SEQ ID NO: 9485 - DNA, 948 bp, Escherichia coli
atgaaaacactacctccagtcgcactaggtacatggtcctggggcacaggctttgccggcggcgacaccgtctttggtaatcatctttctgatactcagatggcagaagtgttcactgcggccatgagtaagggcctcaatctctgggataccgcagcagtatatggtatggggagttccgagactgcgctgggagcattagtccgtcagtttccccgcgagaacataattttatccaccaaattcacgccgcagattgcggacaagcagtctgcgcagcctgtcagcgatatgcttgaggccagccttgggcgcctgggcgtggacgcgattgatatctactggatccataatcccctcgacgtcgaaaaatggacaccaggactgatcccacttttacaaagcggtaaggtaaaacgcgtaggtgtttccaaccacaatctggcacaaatcagacgcgccaatgaaatccttaacgcttccggttattccctcagtgcagtacaaaatcactacagcctgctctatcgcgcttctgaagaggccgggatccttgattattgccgacaaaataacatcacgttctttgcttacatggtcctggagcaaggcgcgctcagtggtcgttatgattcaaatcatcccatgcctgccgggagtggccgggccgaaagttataacgcagtactgccgcagatagaaagactaaccgccgccatgaaaaaaatgggagccgaaaggaatgccagcgtggcacagatagccatcgcatgggctattgcgaaaggtacccttcccctcgttggtgcgactaaagtccatcacgttctggacgccgcctgcgcttcagacatccagttacgcgatgaggaaatcatcctgctggaacaactcgccgcagagaccagagtggatacacgaggcgcctgggaaaaaccgatggtgtaa

SEQ ID NO: 9486 - DNA, 690 bp, Escherichia coli
atgaaacctgcatataaaccagtgctatgtgtcgtttccagccatccgattaaaggcgcatccggtgtaccaaccggttttttcctggccgagctgactcatccgctgaaagtactggaagatgccggaataaaaacaacaatagccagtattcgcggggggcagccaccggtggatggatttgacctcagcgaccctgttaacgcctggtactggaacgaaaccgattttcagcagcgcctggcaacaacacctgcgttatccgagctgaaaggtgccgattacagcgcagttttctttgcaggtggtcatgggaccatgtgggatttccgtgataatcaggatgcccagcgtattatccgcgaagtgtatgaaagtgatgggattgtctcagccgtctgccacgggcctgcggcattggttgacgcaaaactcagtagcggcgaatacctgataaaagggaaaaatgtggcggcctttaccaacaaggaagaggaagaagttcacacaacagatgtggttcccttcctgcttgaaaccgcacttcgcgagcatggtgcgctttatcatgaagctccaaactggtctgaaaacgtggttaccgacgatcgccttatcacggggcagaatcccgcttcagcacatggggttggtgtggcgctgttaaatgcactccgccggacagcttaa

SEQ ID NO: 9487 - DNA, 309 bp, Escherichia coli
atgcgaattttatgtctggatatccctgcccctggagcatcgctggagaaatatgctccgcacctcaacgctgaagcgctgcacgcctggggattgtataaatcaggcttcatccgcgacatctacttccgtcaggacagacctggcgtcgctatttttcttgaatgtgactctgtcgatgaagcgatgaacgttatggccgaattcccgttggcaaaagcaggcttactaagcttcgagtgtataccgcttggctcctttattaactgggaaaatctcttcgccgatgaatttaaaaataaagagtga

SEQ ID NO: 9488 - DNA, 900 bp, Escherichia coli
atgaataacgctctttataaccagattcgcatcttccagagcattgcgcgggagggcaatatttcggcagccgcaaggaaactggaaattacgcctccctccgtcagcaatgcactaaagctgctggaagagtatatcggccatccgctttttgtgcgtacgacccgccgtatagagctgacggaaaccggtcaattattgctggaacagaccgctgcggcggtggagtcgctggaaaactcacttgaaagcattcgcgaccagcatcaggagccctctgggatggtgcgaattacgctctcgcgttttgcctacctgttaattcttaagcctgcgatggcagaattctgtcagcaatatccgggtatacagttagaaatttcggtctacgacggtaccgtgaatatcatcaaagagcgttttgatctggggatccgttttggcgatattcttgagggaggggtggtggcccgaccgttaatgaaaccgtttcgtgaaggattatatgcatcctcagcgtatctctcccgacatggaacgcctgaagtgccggcagatctctgtcatcaccagctgattggttaccgttttatcaccaacaaccgcatccttccgctgctcctgaacgatcgcggtgagcagttgaccgttgagatgccggggcagttaatcagcaacgatattgacgttatggcagacgggatccgtaacgggctgggaattgggcgcttgtttgagcctgtctggcagttacagccggacagggagcgctttattccggtgatggagagatactggaaaacctacccgccagtgtatctctattaccccaaaaacgcgggtaaaacgaaaagagtgaaggccctgattgattttctgatatccactacggggcgataa

SEQ ID NO: 9489 - DNA, 819 bp, Escherichia coli
atggctgcgaccaccactgaatacggtaaaccgatgatcctctacagcgataaagccagcgtattcagagtcaataataagcacgccaccaccggtctcggcgatacccagtttgccagggccatgcgctgccttaatattactcctttgtgtgctgaaaccagccaggcaaaaggccgcgttgaacgtgctcatttgacacttcaggaccgactcgttaaggagctcaggcttaaggggatctgtacaatagaagcggccaatgcatttgcagaagaatacatggcggattataaccggcgctttgccaaagaacccttgcatgattttaacgcgtaccggccgctggcattagacgatgaccttgatgcagaatttacctggcgagagcctcgccgggtatcaaaaaatctgactgtacaatacgataaaatgctctatctgattgaggacaacgagtacagtcgaagagccatcggcaagtatattgatgtctggcattatcctgacggacataaggagctgcgactaaatggcgtgctgctaccctactccacctatgaccggctttctgaggttgagcccgtcgccattgtagataacaagagacttggccatgtgttggatgttgcccgtcaggtccagagaaaacgggacaataatcgctcactatcgttaccttgttctggtgatgagccttcccgcagacggcacgcgcctagcatcaacaaatctcagcgctcactgaacgaagatgacctacttgaaaccatgataaagcttcagggaagctctgaggccatctttggtaaaaggtga

SEQ ID NO: 9490 - DNA, 1353 bp, Escherichia coli
atggacttctctgaatatcagacagaaataattgaagatatcaaatcatgtcttgaaggtttacaggtacagccaattctctttatgggtgcaggggtatctcaacgctacttgaaagctcctgattgggaaaacctgttaaagtatctcgctgaaacttgcccattaatcactcgcccgtatggttactacagtcaaacaagaaatgacaataaaccaatgatagcaagtgatttttctgagtcatacgctgagtgggcttgggatgtggggacatctcgttatcctgaacagtatttcaatggaaaaagctctaaagatatatatatcaagcatgagattgcaacattgttgaataacctttcagactcggttgatttttcagcaatggagtacactgaagaaattgaaaagttaaaaaaagtaaggccccatgccattattacaacaaactatgacgatctgcttgaaaagatatttgataactaccaaccgatagttggccataatgttgtgactgttaactatactacatacggtgaaatcatgaagattcacggcagtagtaaagaaccagaaagcatcattataacaaatgaagactatgttgagttttataagcgtaaaaagtatatcagtgcaaaacttttaacatatttcgtcgagcatccgttgttcttcattggctatagtattaatgatgagaatattaaagccatcctgtctgatattgatgagataattgcgccaaataacgctttgattccgaatatttatttggtttcctttagtccagaatgtgaaggtacaggttcacaccagaaagagattttgattggtgttggtgaaaataaaagcatccgaatcaaagtgatctatgccaatgatttcggttggatttatgatgccctatcgtcaaatacgccagaaatcagtgttaacccaaaattagtcagggcgctattagccagaacctatacatttgcctctcaatctcttgtaaaacaagagcttccatatgattttgaaatgcttaagaacattgctgagcaagataacgtgttagcgaaactttatggaattgcagagttaaataatgggcaagcacttaacgcaagctatccctacaccatatctgaacttgcaaaattacttgatatgggatcttggcattacgtccataaagtattagaaagaatacacaaggaaactggttttaatattaaatcctcagataataactatcatgtgctagtgaaaacggggaaggaaggtgttcataaatattcccccgctgcattcgagttaatcaaaaaaatcattaatggtcagaagtataaactcaaaccataa

SEQ ID NO: 9491 - DNA, 4617 bp, Escherichia coli
atggcagataatccaaacctttcatcgcccctgccggacgtgttttcaccggcaacccgcgactggtttcttcgcgcctttaaacagccgaccgctgtccagtcgcaaacctggcatgtagcggcgcgaggcgaacatgcgctggtgattgcaccgactggctccgggaaaacgctggcagcatttctctacgccctcgatcagctcttccgcgaaggcggcgaagatacccgcgaggcgcataaacgtaaaacctcacgcatcctctatatttcaccgataaaagcccttggcaccgacgttcagcgcaacttgcagatcccgttacagggtattgccgatgaacggcggcggcgcggcgaaacggaagtcaatcttcgcgtggggatccgtactggcgatacgcctgcacaggaacgcagcaaactcacccgtaatccgccggatattctgatcaccacacccgaatcactctatctgatgctgacctcccgcgcgcgcgaaacgctacgcggcgtcgaaacggtaattattgatgaagtccacgcggtagcaggcagtaaacgtggtgcgcatctggcgttaagtctggagcggctcgatgcgctgctccacacctcagcacagcgaattggcctttctgccactgtgcgttcagccagcgatgtggcagcatttcttggcggcgatcgcccggttacggtagtcaacccgcccgcaatgcgccatccgcagatacgaattgtcgtaccggtcgccaatatggatgatgtctcatcggtcgccagcggcaccggcgaagacagccatgccggccgggaaggctccatctggccatatattgaaacgggtatccttgatgaagtgttgcgccatcgctcgaccattgtctttactaattcacgcgggctggcggaaaaactgacggcacgattgaatgagctttacgccgcacgcttacagcgttccccgtctatcgccgttgatgcggcccatttcgagtcgacctccggcgcaacctctaaccgtgtacaaagtagcgacatttttattgcccgctcacaccacggctccgtctctaaagaacaacgagcaataaccgaacaggcgctgaaatcgggtgaattacgctgcgtggtcgcaacctccagtctcgaactggggattgatatgggcgcggtggatctggtgattcaggtggcaacgccgctttctgttgccagtgggttacaacgcattggacgtgccggacaccaggtaggaggtatctccaaagggctttttttcccccgaaccaggcgtgacttagtcgattccgcagtcattgttgagtgtatgttcgcaggcaggctggaaaacctgacaccaccgcataatccactcgacgtccttgcgcagcaaaccgttgccgccgcgtcgatggatgcattacaggcagacgaatggtactcccgcgtacgccgtgccgcaccgtggaaagatctgccaagacgtgtttttgacgccacgctggatatgctttccgggcgctatccctctggcgatttttctgcttttcgaccaaaactggtctggaacagggagaccgggatattgaccgcccgacctggcgctcagctgttggcggttaccagtggtggcaccattccggatcgtggcatgtatagcgtgttattacccgaaggtgaagaacaggccggttcgcggcgggtgggtgaactggatgaggagatggtatatgagtcgcgggtgaacgacattatcactctcggcgctacctcatggcggatccagcaaatcacccgcgatcaggtgattgtgactcctgctccgggtcgttctgcccgccttcccttctggcgtggtgaaggtaacggacgtccggcagaattaggcgagatgatcggcgattttctccatttactggcggatggcgcgttcttttccgggactattcccccgtggttggcagaagaaaatacgatcgccaatattcaggggttgattgacgagcagcgcaacgcgacgggcatcgttccggggagtcgtcatctggtcctcgaacggtgccgtgatgaaattggtgactggcgtattattttgcactctccctatggaagacgggtgcatgaaccctgggcgctggcgattgccgggcgaatacatgcactatggggcgctgacgcgtctgtggttgccagtgatgacggcattgttgcgcgcattcctgacaccgatggtaaattgcccgatgccgcgatttttttgtttgaaccagaaaagttgctgcaaattgtccgcgaggcggtaggcagctcggcacttttcgccgcccgttttcgcgaatgcgccgcgcgggcattattaatgccgggccgcacgccgggccatcgcaccccgctctggcaacaacggctgcgcgccagtcagttgctggaaatcgctcagggatatccggattttccggtcattctcgaaaccctacgcgaatgtctgcaagatgtttatgatcttcccgcgctggaacgtttgatgcgtcgcctgaacggtggcgaaattcaaatatccgatgtcacgaccactacgccctcgcctttcgccgctagtttattgttcggctatgtcgcggaatttatgtaccagagcgacgccccgctggcagagcgccgggcatccgtactgtcgctggacagcgagttactgcgcaatctactcggacaggtcgatccgggggaattactcgacccgcaggtcattcgccaggtggaagaagagttgcaacgactggctcctggcagaagagcgaaaggtgaagaaggattgttcgacctgctgcgcgaactggggccaatgaccgttgaagacctggtgcaacggcatacaggcagcagtgaagagattgcgtcgtatctggaaaatcttcttgcagtaaaacgaatcttccggacgatgattagcgggcaggagcgtcttgcctgtatggatgatgccgccaggctgcgcgatgctctcggcgtacgactaccagagtcactgccagagattgatttgcaccgagtcagttacccgcttcgcgacctctttctgcgctatctccgggctcatgctctggtcacgtctgaacaactggctcatgagtttagtctcggtattgccattgtcgaagagcaacttcagcaactgcgcgaacaggggctggtgatgaatctgcaacaagacatctgggtgagcggtgaagtatttcgtcgtctgcgtttgcgctcgctgcaagccgccagagaagcgacacgtcccgttgcggccacgacctatgcgcgattgctgctggaacgtcagggcgtattacccgccaccgatggtagcccggcactctttgcctcaacatcgccaggcgtttatgagggcgtggatggcgtcatgcgggtgatcgaacagcttgccggagtcggtttacccgcctcactctgggaaagccagatcctgcctgcccgcgtacgcgactattcgccagaaatgctcgatgaattactggcaaccggtgcggttatctggtcggggcaaaaaaaactgggtgaagatgacggcctggtggcactgcatctacaggaatatgctgcagaatcgttcactcccgccgaagcgaatcaggcgaatcgttcggcactgcagcaagcgatagtcacggttctggctgacggaggagcctggtttgcacaacaaatcagccaacggatacgcgataaaatcggcgaatcggttgatccctcggcactgcaagaggcgttatgggcgctggtctggcaaggcgtcatcaccagcgatatttgggcaccgttacgcgccctcacccgcagcagttccaacgcgcgcacctcaactcgccgcagtcaccgggctcgtcgtgggcgtcctgtctatgcacaacccgtctcgccgcgggtatcttacaacacaccaaagctggccggacgctggtcgttattgcaggtggagccactaaacgataccgaaaggatgctggcgctggcggaaaatatgctcgaccgctacggcatcatcagtcgtcaggcggtgatagccgaaaatatccctggcgggtttccatcgatgcaaacgctttgtcgaagtatggaagactccgggcgaattatgcgaggtcgttttgtagaaggtttggggagtgcgcaattcgctgaacgtctgactattgaccgattgcgcgatctggcgacacaagccacgcaaacgcgccactatacaccagtggcgctctccgccaacgatccggctaatgtgtggggaaatcttctgccctggcctgcacatccggcaacgctggttccaacgcgtcgggcgggtgcgctggtggtcgtttctggcggcaaattgttactctatctggcgcaaggcggcaaaaaaatgctggtctggcaggaaaaagatgaattactcgccccagaaattttccaggcgctgaccaccgcactgcgtcgcgaaccacggctgcgctttacgctaacagaagtgaatgatctaccggtccggcaaacgccgatgtttacgctgctgcgtgaggcgggattttcaagttcgccacaagggctggattggggatag

SEQ ID NO: 9492 - DNA, 1245 bp, Escherichia coli
atgactacgcaacgttcaccggggctattccggcgtctggctcatggcagcctggtaaaacaaatcctggtcggccttgttctggggattcttctggcatggatctcaaaacccgcggcagaagctgttggtctgttaggcactttgttcgtcggcgcactgaaagctgtagcgccaattctggtgctgatgctggtgatggcatctattgctaaccaccagcacgggcagaaaaccaatatccgccctattttgttcctctatctgctgggcaccttctctgctgctctggccgcagtaatcttcagttttgccttcccttctaccctgcacttgtccagtagcgcgggtgatatttcgccgccgtctggtattgtggaagtgatgcgcgggctggtaatgagcatggtttccaaccccatcgatgcgctgctgaaaggtaactacatcgggatcctggtgtgggcaattggcctcggtttcgcactgcgtcacggtaacgagaccaccaaaaacctggtcaacgatatgtcgaatgccgtcacctttatggtgaaactggtcattcgcttcgcaccgatcggtatttttggtctggtttcttctaccctggcaaccaccggtttctccacactgtggggctacgcgcaactgctggtcgtgctggttggctgtatgttactggtggcgctggtggttaacccattgctggtgtggtggaaaattcgtcgtaacccgttcccgctggtgctgctgtgcctgcgcgaaagcggcgtgtacgccttcttcacccgcagctctgcggcgaacattccggtgaatatggcgctgtgtgaaaagctgaatctggatcgcgatacctattccgtttctattccgctgggtgccaccatcaatatggcgggcgcagcaatcaccattaccgtgttgacgctggctgcggttaatacgctgggtattccggtcgatctgcccacagcgctgctgttgagcgtagtggcttctctgtgtgcctgtggcgcatccggcgtggcggggggttctctgctgctgatcccactggcctgtaatatgttcggtatttcgaacgatatcgccatgcaggtggttgccgtcggctttatcatcggcgtattgcaggactcttgcgaaaccgcgctgaactcttcaactgacgtgctgttcactgcggcagcttgccaggcggaagacgatcgtctggcaaatagcgccctacgtaattaa

SEQ ID NO: 9493 - DNA, 1203 bp, Escherichia coli
atgcgcatccttcacacctcagactggcatctcggccagaacttctacagtaaaagccgcgaagctgaacatcaggcttttcttgactggctgctggagacagcacaaacccatcaggtggatgcgattattgttgccggtgatgttttcgataccggctcgccccccagttacgcccgcacgttatacaaccgttttgttgtcaatttacagcaaactggctgtcatctggtggtactggcaggaaaccatgactcggtcgccacgctgaatgaatcgcgcgatatcatggcgttcctcaatacgaccgtggtcgccagcgccggacatgcgccgcaaatcttgcctcgtcgcgacgggacgccaggggcagtgctgtgccccattccgtttttacgcccacgtgacattattaccagccaggcggggcttaacggtattgaaaaacagcagcatttgctggcggctattactgattattatcaacaacactatgccgatgcctgcaaactgcgcggcgctcagcctctgcccatcatcgccacgggacatttaacaactgtgggtgccagtaaaagtgatgccgtgcgtgacatctatattggcacgctggacgcgtttccggcacaaaactttccgccagccgactacatcgcgcttgggcatattcaccgcgcgcagattattggcggcatggaacatgttcgctattgcggctcccccattccactgagttttgatgaatgcggtaagagtaaatatgtccatctggtgacattttcaaacggcaaattagagagcgtggaaaacctgaacgtaccggtaacgcaacccatggcggtgctgaaaggcgatctggcgtcgattactgaacagctggaacagtggcgcgatgtatcacaggagccaccggtctggctggatatcgaaatcactactgatgagtatctgcatgatattcagcgcaaaatccaggcattaaccgaatcattgcctgtcgaagtattgctggtacgccggagtcgtgaacagcgcgagcgagtgttagccagccaacagcgtgaaaccctcagcgaactcagcgtcgaagaggtgttcaatcgccgtctggcactggaagaactggatgaatcgcagcagcaacgtctgcagcatcttttcaccacgacgttgcataccctcgccggagaacacgaagcatga

SEQ ID NO: 9494 - DNA, 1197 bp, Escherichia coli
atgaaaacctggatatttatatgtatggccgtagcaatattgctatggttcctgagtacgttaaggcgtaagcccagccaaaaaaaaggttgtattgacgccattatacctgcgtataacgaaggcccgtgtctggcacagtcactggataatctactgcgtaacccttatttttgccgggtaatttgcgttaacgacggctccacggacaataccgaagcggtcatggcggaagtcaaacgcaaatggggcgaccgctttattgccgtcacgcaaaaaaataccggtaaaggtggtgcgctgatgaatggcctcaattacgccacctgcgaccaggtttttttaagtgatgccgacacctatgttccgcccgatcaagacggaatgggctatatgcttgcagaaatagagcgcggtgctgatgccgtaggcggcattccctctactgcgttgaaaggcgcgggtctgttaccgcacatccgcgcgaccgtaaagttgccgatgattgttatgaagcgcacgctacagcagctcctgggcggcgcaccgtttattatcagcggtgcctgcgggatgttccgtactgatgtattgcgtaagttcggtttctctgatcgtactaaagtcgaagaccttgatctcacctggacattggtggcaaacggctatcgtattcggcaggcgaatcgctgcatcgtatacccacaggaatgcaacagcccgcgtgaggaatggcgtcgctggcggcgttggattgtgggctacgcggtctgtatgcgcctgcataaaagacttttatttagccgcttcggtatcttcagtatatttcctatgctgttggttgtgctttatggcgttgggatttatctcactacctggtttaatgaattcatcaccaccgggccgcatggtgtggtgttggcaatgtttccgcttatctgggtcggcgtagtttgtgttattggtgcttttagcgcctggtttcatcgttgctggttgttggtgcctttagcgccgctttccgttgtgtatgtattattagcttatgccatctggattatttatggacttattgccttttttactggacgcgaacctcagcgcgacaaacccacccgctattccgcactggtggaagcgtcaaccgcttattcccaaccttctgctacaggaactgaaaaactatctgaagcttaa

SEQ ID NO: 9495 - DNA, 774 bp, Escherichia coli
atgataaaacggacgttattagcggcagcaatttttagcacattgcccgcttatgccgggttaacttccattaccgcgggctacgattttaccgattattctggcgatcatggcaaccgtaatttagcgtatgctgaactggtggcgaaagttgaaaacgcaacgctgctttttaatctttcccaggggcgtcgtgattatgaaactgaacatttcaatgccactcgcggtcagggtgcggtctggtataaatggaataactggctgacaacccgaacgggtattgcctttgcggataatacgccggtctttgcccgccaggattttcgtcaggatattaacctggcactgttgccaaaaacgcttttcacgaccggttatcgctacacgaaatattacgatgatgtcgaagtcgatgcctggcaaggcggcgtatcactctatactggcccggtgatcaccagctatcgctatacccattatgactccagcgatgcaggtggtagttacagcaatatgatttccgtgcgtctgaatgacccgcgcggcactggttatacgcaactatggctaagccgcggaacaggtgcttacacctatgactggacgccagaaacacgctacggcagcatgaagagcgtcagtttgcaacgtattcaaccgctgactgagcaacttaatctcgggctgacggcaggtaaagtgtggtacgacaccccaaccgatgattataacggtctgcaacttgcagcccatctgacctggaaattctga

SEQ ID NO: 9496 - DNA, 1212 bp, Escherichia coli
atgtcgactcgtaccccttcatcatcttcaacccgcctgatgctgactatcgggctttgttttttggtcgctctgatggaaggactggatcttcaggcggctggcattgcggcgggtggcatcgcccaggctttcgcactcgataaaatgcaaatgggctggatattcagcgccggaatactcggtttgctacccggcgcgctggttggcggaatgctggcggaccgttatggtcgtaagcgtattttaattagctcagttgcgctgtttggtttgttctcactggcaacggcgattgcctgggatttcccctcactggtctttgcgcgactgatgaccggtgtcgggctgggggcggcgttgccgaatctgatcgccctgacgtctgaagccgcgggtccacgttttcgtgggacggcagtgagcctgatgtattgcggtgtccccattggcgcggcgctggcggcgacactgggtttcgcgggggcaaacttagcctggcaaacggtgttttgggtcggtggtgtagtgccgttgattctggtgccactattaatgcgctggctgccggagtcggcggttttcgctggcgaaaaacaggctgcgccaccactgcgtgcgttatttgcgccagaaacggcaaccgcgacgctgctgctgtggttgtgttatttcttcactctgctggtggtctacatgttgatcaactggctaccgctgcttttggtggagcaaggattccagccatcgcaggcggcaggggtgatgtttgcactgcaaatgggggcggcaagcgggacgttaatgttgggcgcattgatggataagctgcgtccagtaaccatgtcgctactgatttatagcggcatgttagcttcgctgctggcgctgggaacggtgtcgtcatttaacggtatgctgctggcgggattcgtcgcggggttgtttgcgacaggtgggcaaagcgttttgtatgccctggcaccgttgttttacagttcgcagatccgcgcaacaggtgtgggaacagccgtggcggtagggcgtctgggggctatgagcggtccgttactggccgggaaaatgctggcattaggcactggcacggttggcgtaatggccgcttctgcgccgggtattcttgttgctggcctggcagtgtttattttgatgagccggagatcacgaatgcagccgtgcgccgatgcctga

SEQ ID NO: 9497 - DNA, 573 bp, Escherichia coli
gtggcgattaactataacggctcgaacgcagtgaaagagcacggcttccagtgccacgtcggatcgatgcgctcgccaagccgtgggcatgtgcggattaaatcccgcgacccgcaccagcatccagcgattctgtttaactacatgtcgcacgagcaggactggcaggagttccgcgacgcaattcgcatcacccgcgagatcatgcatcaaccggcgctggatcagtatcgtggccgcgaaatcagccccggtgtcgaatgccagacggatgagcagctcgatgagttcgtgcgtaaccacgccgaaaccgccttccacccgtgcggtacctgcaaaatgggttatgacgagatggcagtggttgacggcgaaggccgcgtacacgggctggaaggtctgcgcgtggtggatgcgtcaattatgccgcaaattatcaccggcaatttgaacgccacgacgattatgattggcgagaaaatagcggatatgattcgcgggcaagaagcgttgccgaggagcacggcaagatattttgtggcaaatgggatgccggtgagagtgaaaaaatga

SEQ ID NO: 9498 - DNA, 711 bp, Escherichia coli
atgttcaggcgacgtggcgtaacattaactaaggccctgctgacagcggtctgtatgctggcggcacctttgacacaggcgatttcggtcggcaatctgacattttcgctgccgtccgagactgactttgtcagcaaacgtgtagtgaataacaacaaaagcgcacggatataccgtattaccatcagtgctatcgatagcccgggcagcagtgaattgcgcacccgaccggtggatggtgaactgcttttcgccccccgccagctggcgttgcaggctggtgagagcgagtattttaaattttactatcatggtccacgggataaccgcgagcgctactaccgggtctcatttcgcgaggtccccactcgcaaccagacaagacgcagcccaaccggcggcgaggttagcacggagccggtggtggtgatggataccattctggtagtacgacctcgtcaggttcagtttaaatggtccttcgacaaggtgacaggaacggtaagtaacactggcaacacatggtttaagctactgattaagccaggatgtgattcgaccgaagaggaaggcgatgcctggtacctacgtccgggagacgtggttcatcagcctgagttacgtcagccggggaatcattatctggtctataacgacaaatttattaagattagcgattcctgtccggctaagcccccttcggcggactaa

SEQ ID NO: 9499 - DNA, 690 bp, Escherichia coli
atgagcaaccaaggcgaatatcccgaaaataatcgggttgggaagcacgagccgcacgattttagtttgacccggcgcgatctgattaaagtgagcgccgcaacggcggcgaccgccgtggtttatcctcattctacgcttgcggcaagcgttccggcagctacacccgcgccagagataatgcccctgacacttaaggtgaacggcaaaaccgagcagttggacgttgatacccgaaccacgctactggacgctttgcgtgaaaatctgcatctgatcggtaccaagaaaggttgcgatcacgggcagtgcggagcctgtaccgtgctggtcaatggtcgcaggcttaatgcctgcctgacgcttgcagtcatgcatcagggggacgagatcaccaccattgaaggcctgggttcaccagagaatcttcaccccatgcaggcggcctttatcaagcatgatggcttccagtgcggctactgcacctccgggcaaatttgctcatcagtagcggtgctaaaagagattcaggacagcattcccagtcacgtcacggtcgatttggtttcccctccagaaagaactgccgatgagatccgtgaacgtatgagcggcaacatctgtcgctgtggtgcatacgctaacatccttgccgccattgaagatgctgcgggggagataaaatcatga

SEQ ID NO: 9500 - DNA, 957 bp, Escherichia coli
atgaaggcgtttacctatgaacgagtgaacaccccggccgaggcggcacttagcgctcagcgcgtacccggcgcaaaatttatcgctggcgggaccaatctgctggacctgatgaagctggaaattgaaacgccaacccaccttatcgatgtgaacgggctcgggctcgataagattgaagtgaccgacgcgggtgggctgcgcatcggcgcactggtacggaacaccgacctggcagctcacgagcgcgtgcgtcgtgattacgcggtactctcccgcgccctgctcgctggcgcgtctggtcagttacgtaatcaggcaaccaccgcaggtaatctgctccagcgcacgcgctgcccctatttttacgacaccaatcagccctgcaataagcgcctacccgggagcggctgcgcggcacttgaaggctttagccgtcagcacgcggtggtaggcgtaagcgaagcctgcattgccacccatccgagcgatatggcggtcgcaatgcggttgctggatgcggtggtggaaaccatcacgccggagggaaagactcgcagtatcacactggctgatttttatcaccctccgggaaaaacgccgcacattgaaaccgccctgcttcccggtgagcttatcgttgcggtgacgttacctccgccgctcggcggaaaacatatctaccgcaaggtgcgcgatcgcgcctcctacgcctttgccctggtatcggtcgcggcgattattcagcctgacggcagcgggcgcgtcgcgctgggcggagtagcacataagccctggcgcattgaggctgcggatgctcagctatcccagggggcgcaggccgtgtatgacgcgctgttcgccagcgcccatcccaccgctgaaaacacctttaaactcctgttggcgaagcgaacgcttgcctccgtactggctgaagcgagggcacaggcatga

SEQ ID NO: 9501 - DNA, 2199 bp, Escherichia coli
atgaaatttgataaacccgcaggggaaaacccgatcgatcagctgaaggttgtcggtcgtccccatgaccgcatcgacggaccgctgaaaactaccggcacggcacgctacgcctacgaatggtatgaagaagctcccaacgccgcctatggttatatcgtcggttccgccattgccaaaggatgcctcaccgccctcgatacggacgccgcgcaaaaagcgccgggcgtactggctgtcattaccgccagtaacgccggggcactcggcaaaggcgacaaaaacaccgccaggctgttaggaggccccactattgagcactatcatcaggccattgcgctggtagtggccgagaccttcgaacaggcgcgagcggcggcctcgctggtgcaggcgcactatcgccgtaataaaggagcttactccctggcggacgagaaacaggccgtcagtcagccgccggaagacacgcccgataaaaatgttggtgactttgacggggctttcacctccgctgcggtgaagattgatgctacctacacgaccccggaccagagccatatggcgatggagccgcatgcctcgatggccgtctgggatggaaataagcttaccctctggacctcaaatcagatgattgactggtgccgcaccgatctggcaaaaacgctgaaagtgcccgtggagaatgtgcgtattatctccccgtatatcggtggagggtttggcggcaagctgttcctgagaagcgatgcgctgctggcggccctcgccgcccgtgcggtgaaacgtccggttaaagtgatgctcccccgccccactattcccaataacaccacgcaccgccccgccacccttcagcacctgcgtatcggtgccgaccagagcgggaaaatcaccgctatctcacatgaaagctggtccggaaacctgcccggtggcacgccggaaacggcggtacagcaaagcgaattactctacgcaggggcaaaccgtcatacaggcctgcggctcgccacgcttgatttgccggaagggaacgccatgcgtgcgcccggcgaagcccccggtctgatggcgctcgaaatcgcgatcgacgaactggcggaaaaagcgggcatcgatcccgtcgagtttcgcatcctgaatgacactcaggttgaccccgccgacccgacgcgccgcttctctcgccgtcagcttatcgagtgcttgcgcaccggagcggataaatttggctggaagcagcgcaacgccacacccggacaggtacgcgacggggagtggctagtcggccacggtgttgcggcgggctttcgcaataatctgctggaaaaatcgggtgcgcgggttcacctagaacaaaacggcaccgttaccgtggaaacggacatgaccgatattggcaccggcagctacacaattctggctcagacggcagcggaaatgcttggcgtaccgctggagcaggttgcggttcacctcggcgattccagtttcccggtttctgcgggttctggtggacaatggggcgcgaatacctccacctccggcgtttacgccgcctgtgtgaaacttcgcgaaatgattgcctcggcagtcgggtttgatcctgggcagtcgcagtttgccgacggcaagattaccaacggtacccgaagcgccacgctacatgaggccaccgcaggcggcaggctgacagcggaagagagcattgaattcggaacactgagcaaggagtaccagcagtcgacctttgccgggcattttgtggaggtcggcgtgcatagcgcgacgggagaagttcgggtccggcgtatgctcgctgtgtgtgctgcaggacgcatcctgaatccgaaaactgcacgcagccaggtcattggcgcgatgactatgggcatgggcgcggcactgatggaggagctggcggtagatgaccgtttgggctacttcgttaatcacgatatggcggggtatgaggtgccggttcatgcggatatcccaaaacaggaggtgattttcctggatgataccgaccccatctcctccccgatgaaggccaaaggtgtcggtgagctgggcctgtgcggcgtgagcgcggctatcgccaacgcggtgtataacgccaccggtattcgggtacgggattatcccatcactctggataagctgctcgataagctgccggatgtggtttaa

SEQ ID NO: 9502 - DNA, 954 bp, Escherichia coli
atgtcatactcgctttttgacaaagacgagcactggcataagccagagcaggcgtttctcaccgatgaccaccgggccattctgcgcttcgccgtagaggcgctaatgtccagtaaaggagcggtgctggtgacgctggtggaaatacgcggcggcgcggcgcgcccgctcggggcgcagatggtggtgcgcgaagatggtcattactgcggttttgtctctggcggctgcgtggaggccgctgccgcttttgaagcgctggagatgatgggctcaggccgcgatcgcgaaattcgctatggtgaaggttcgccgtggtttgacatcgttctgccctgcggcggtgggatcacgctgacgctccataaactacgctcggcacaacctctgctcgccgtgctgaaccgcctggaacagagaaaaccggcgggtctgcgctacgatccgcaagcacaatcgttggtgtgcctgcccacgcaaacccggacgggctggaatctcaatggctttgaggtggggttcagaccatgcgtcaggctgatgatttacggacgttctcttgaggcgcaggcaaccgcgagtcttgcagcagccacaggctatgacagccatatcttcgatctttttccggcctcagccagcgctcagatcgataccgatacggcggtcattttgctgtgccatgatctcaaccgggaactgccagtgttgcaggccgcgcgagaagcaaaacccttttatctcggcgcattgggcagctatcgaacccacactttacgtctgcaaaagctccacgagctgggatggtccagggaggagacagagcaaatccgggcacctgtcgggatattccccaaagcccgggatgcgcatactctggccctttccgtactggcagaagtcgccgctgtacgtctccgtcaggaggattcatgcctgcccccatcgtcctga

SEQ ID NO: 9503 - DNA, 1128 bp, Escherichia coli
atgaccctgtgcgtgtttgtgctgattgcttctgaatttatgcccgtcagcctgctcacgccgattacccgcgatttaggcgtgacggaggggctggcagggcaggggattgctatctccggcgcgctggcggttctgaccagcctgacgctttcaacgctagctggaaagatgaatcgtaagttcctgcagctggggatgacggttctgatggccgtatcggggcttattattgcgctggcttccagttatctgatgtatatggtcggtcgtgcgatgattggtgtggctattggcggattctggtcgatgtcagcggcaacggcgattcgtctggtgccgcagcatcaggtcacgcgtgcgctggcaattttcaacgccggtaatgcgctggcgacggtcgtggccgcaccgctgggaagctatctgggggctacggtcggatggcgaggcgctttcttgtgcctggtgcccatcgcggttgtcgcctttatctggcagtgcatcagcctgccaagcatggatgcgaataaaagccacacttcatgtggcgcggtattccgcttatttagccgccgcatggttgtggtcggcatgatagcttgtggcctgtttttcatggggcagtttgcgctattcacctatgtgcgcccgtttctggagtcggtgacacgggttaattccttaggcttgtcgtcgattttgctgattatcggcgtggccggttttattggcacgctggttgtttcggcatttctcaacagaaaattctaccctacgctgatggccatacccggactgatggccgtcattgccatcggtctgatgcttaccgggcatcacgtctggacggtctcgctgctgttaggactctggggcatgctggccaccgccgcgccaaccggatggtggacatggattgcgcgtacgttgcctgacaacgccgaagctggaggcgggctcatggtcgcggtgattcagctcgccatcgcccttggatcaacggcaggaggcattgtgtttgaccgccttggctggcagagcacgtttgctatgagtagcgtgctgctcctttgcgctggcgtactgacctttgttaccgcacgccagaaggccggtgcgctttag

SEQ ID NO: 9504 - DNA, 1137 bp, Escherichia coli
atgaaagccttcacccgcacgctaaaaaccgcgatgccgaccatgctgcttttcgcatcattaagtggagtcacgacaatgagttatgctgattcaaccaatcctaatgcccctgtgtccatgacagataaatgggataaaacgttcgccgagagccagaaagtcgatcaccgtaaagtctcgttcccgaaccgatatggcatcaccttagtgggcgatctttacctgcctaaagaccgtggcgatcgcaagctggcggcgattgcggtcagtgggccatttggcgcggtgaaagagcaatccagcggcctgtatgcgcagacgctggcggaacgagggtttgttaccctggcgttcgatccttcttacaccggggaaagcggcggctatccgcgaaacgtcgcctcaccggatatcaacactgaagatttcagcgcggcagtggatttcttagggctgcaaaaagaggtagatcgcaaccgtatcgggctgctcggtatttgtggctggggcggcatggcgctgaacgacgcggcgatggatacccgcgttaaagcggtagctaccagcgtgatgtatgacatgagccgggcgatgggccatggtgtgggggatggcaaagaccgttattctaccgccgaccgtcgtgctgttctgcaatatctgaatgaacagcgctggaaggatgcgcagagcggaacgttcgctcacggtggtcatgatattaatgtcgacagcaacggcaaggtcagtgcgggcgagcgcattctgccagaaacgctgccggcaaatcctcatccggtactgaaagagttctttgactactatcgcatgccgcgcggcttccacgaacgttccgttaactctaccggggcgtggacggcaacgatgccgctgtcatttatgaatatgccgctgttgagctacgccagtgaaatcaccattccgacgctgattgtgaccggtgagaaagcacattcacgctattttgctgaagatgcttacaaggcggttggcagtaaagacaaagagttggtggtggtaccaggggcaaatcacgtggacctgtacgataacgtggccggaaaaatacctttcgcgaagttcgaacaatttttccagaccaaactgaaataa

SEQ ID NO: 9505 - DNA, 885 bp, Escherichia coli
atggcgaaaagggagaactacaacgagctgtacctgtttatgcaggtggtgcgggaaggcagctttaccgcagcggctcagcggctgggtcttgctcagtcaggagtcagccgttctgttcgcgagcttgaagaaaggctgggtgtccagctgctagtgcgcaccacgcgtaaactgtcgctgacacaagcaggcgagcagctctaccagaagacggcatctggatttgaaatgttagatcttgggcttgccacgctggcgcattatcgagagacgccctccggcacggtgcgtatcaatgccagccagcacgcgattgataaatgcctgctgccaaagctggcggtatttaaacagagatatcctgatatccggcttgaactgataaatgagagccggttcgtcgatatcatcgaggaaagattcgatgcaggtgtccgcctggggcctgaagtcggccagggtatggtcgcggtacgcatcacgcccgatatggagatggcaattgtggggactccggaacattttcgtcgctatggttttccgcaaaccccggcggatttaaaggcgcatccctgtatcgcctatcagtttgccgacggcagcgtataccagtgggaactcaatcaggatgataaaaaaatcactcatcgccctgaagggcaatgggccctatccgacagctatatggaagcagaagccgcccggctgggcctcggattggcctatgttcctgttgaactggtcgcggatgatttagaacacggtaagcttatcagggtgttgcagcgttacagcctgcgaatggagggattgtttctctattaccctcatcgcaacgtctcccccgccctgcggatggtcattgatacattgaaaatctga

SEQ ID NO: 9506 - DNA, 3210 bp, Escherichia coli
atgacatatcaggcaattttcactggctgggatgatctgacgattgaagaccttctggtcgcttaccggaaagcaaaagccgatagcttctttgagaatacatttcctgttgctatcaaatttgccgagtatgagcaggaattacttgaaaacctgcaaaaactcttagatcttttgcagagcgaagatggattcagtagcaataagaagttgattggcaaatttcgtttgttaccgaaaaaattaaccacaaagaaaaaacatgaatcccaaaatggacacgtccacttttctaatcctaaacgagcagccgaccatttatttaataattttgatctgataccagagtttcgtattattggtgacttcccggttgatagtcacattatctctgcactatggattaacatggtcgggcataaatttgatgccagcttagataactgttgctatggcgcgcggctaaagcgtattcgtaatgatgaattatttagcaatgagcaggataatccattccatatcagtgccgtgggttcttttagcccctacttccagccctaccaaaaatggcgtggtgatggcttaaaagctatacgtgacgagttggaaaaagatcgtgacattatcgccgcctcactggatttaaaaagttactatcattttattgatccactggctataacctctgatgatctctataacacactaaacataaaactgactgaggatgaaaaagcgtttactgcacagttagcagtattcttaaagcactggtctgacggcgcagcggcatttggaaagaaaatagcgtacaaaacacctgttattaatggtggtctggtcattggattaacagccagtcggatcatttcaaatatattgctacaccattgggataaattagtcattgaaaaactatcaccaattcactacggtcgttatgtcgatgatatgttccttgtaatacgcgatacagggacaattactaataatcacgaatttatgttattgctgcaagataggcttggcaatgattgcgtttatttgaaaaacgagcaaaaacaaatatggcaaatacagcagggcgagcatttccagggtaagaccaccatccagttacaatccgataagcaaaaacttttcgtgcttcaagggagggctggaatagacctgctcgacagtatcgaaaaggagatctacgagctttctagtgaacaccgcttgatgccttcaccggatcaactggaacactccaccgcagctaaagtcctttccgctgccggtagtgtaggtgaaaatgccgatactctgcgccgtgcggatggattaaccattcgtcgtttgggctggtcactgcaattacgctacgttgaaacactggcacgagatctgcctccaagtgaatggaaagaacagcgggaagagttttatcagtttgcctacaaccatattcttagggctgataatctatttgcacattttagttatctgccaaggctgcttggctttgctatcagtatgaatgaatggcagcacgcggaaaaaattgtacttaaagcttacgaatccatcaacctgttggcatcggtgattacttcaggtaaggaagtgaatataaatggttgcaaaactcgagcagtaaatgatctttggcgctgtataaaaggcacattaagctggctatttgttgatgcagcgacacgatattacagtcctgacagattatttcttgataaacgttcaaagaaagaagagtgccttgcggatacattttttaatcatatttcacaaagtctgacgaatctaaaggatttactggatcttcgctttgattcagcagatttttatttaaaagcgccattggtagctcgagctgatttagcaaaggaaccttataaacagatcgtaaagagtcagtcggcagaaaaacttgttaatcagcgtgatagtaaaaaagaagttaaaatactgaaattaatgagcgactcatcgcttattgatattgacgttattaagctatttttgaaatcaaccaagaatacccgactggaaaaagtggctaaaggaaatcgtaagaacgaaagttacctaccttacattttccctacacgtcctttaacacccgctgaaatatcagaactggcccccgaatgtgttggattaccctccacatccgacaaaaaaccagatgagagaccgtccaccatttgggcaaaatatactcaagcattacgcggagtatggatcaaaccgacgttgctagcatcggagcaggactcagatgaagcgacaaaaaaagctcggcctaagaaattcattcatattggcacagacaggaaacataaagttgtcgttgcgctaaccagcattaaaacagaggaggacgactgggctaaaatggcctgcaataaatctaacttgtcccgttcaaggtaccagcggatttctgaactggttaatgcaacattgaaactatctcctaaacctgattatgttttattccctgagctttcaatcccgttacgctgggttaacagtattgctgatcgtttgagttcggcgggtatcagtctaattgcgggaacagaataccgccacttagacgataatcaactgaagagtgaggccgtacttgtcctttcagataacagactcggctatccagcgagtgtcaaaatatggcaacccaagctggaacccgccgtaggtgaagatgaggcattattttcaatttatggtaagtcttgggattcgacacttaatgttaaacaacgtaagccggtatatattcatcacggcgtcaattttggcgttatgatttgctctgaactccagaatagtaaagcgaggatccgttttcagggcgcactcgatgcattaatggtattgagctggaataaagatctagatacgtttgcatcgttgattgaatcagcagcgctggatattcatgcctatactattttagtgaataaccgaaaatacggcgatagtcgcgtacgttccccggcaaaagaaccctttatgcgtgatattgctcgtgtgaagggcggtgataatgactttgtggtcgctgcaacgctggatatcgactcgttaagggcatttcagagcagggcaaaacgctggcctaaaggcggcgataaattcaaaccgttacctgaaggattccagttggcaaagaaccgcaaaaagctaccgccaaaataa

SEQ ID NO: 9507 - DNA, 141 bp, Escherichia coli
atgatgcaacaggactggcattccgccgacattattgcggtgctgaaaaagcggggaacgcctctggcggcacagagaaaaactcattgcggaagcgctgtaaatatcgccagaaatcatctggccttcaaggtactttga

SEQ ID NO: 9508 - DNA, 279 bp, Escherichia coli
atgattaaggtcagcgcgctaggctctcgtcatagaaaaacattcgacgatgtaatgacggagccgccaaaatctggaattaaatgggatgatgttgttgcactcattaaagctgtgggtggaacaataaaaaataacaacggctccagacgaaaatttcagattggaacgaccaaattcagcacacatgagccacatccaaagaatgtgatggataaaggcgcagtagcaggtcttaaggagtggtttgttaactgtgtaggggtagattatgaataa

SEQ ID NO: 9509 - DNA, 357 bp, Escherichia coli
atgaataaagcatcgaacattatcacaattaaaggtcaaccagccgcagtgacatttgaagccgatatcaacgcatttcgcggcaagttcctcaatgtaaacggttattgtgactttgtagccacaagtattgaggcattatatcgtgaaggcgaaagcgcgctggatgagtggatggcggattgtgaagaggacggtattgccccttttcgtgaagaagaagagcaaaaacgcctgacgcttcgtgttcctcatcacattgattcgcggctgaccatcgtcgccagacaacattccatttcaaaaaaccagctcattgttgatgtcttagaacgtgagttttcagcccagatgtaa

SEQ ID NO: 9510 - DNA, 618 bp, Escherichia coli
atgggttgccagaaagatattgcagagaagatacaaaaacagggaggtgattatttattcgctgtaaaaggaaaccaggggcggctaaataaagccttcgaggaaaaatttccgctgaaagaattaaataatccagagcatgacagttacgcaatgagtgaaaagagtcacggcagagaagaaatccgtcttcacattgtttgcgatgtccctgatgaacttattgatttcacgtttgaatggaaaggtctgaagaaattatgcgtggcagtctcctttcggtcaataatagcagaacaaaagaaagagccagaaatgacggtcagatattatattagttctgctgatttaaccgcagagaagttcgccacagcaatccgaaaccactggcacgtggagaataagctgcactggcgtctggacgtggtaatgaatgaagacgactgcaaaataagaagaggaaacgcagcagaattattttcagggatacggcacatcgctattaatattttgacgaatgataaggtattcaaggcagggttaagacgtaagatgcgaaaagcagccatggacagaaactatctggcgtcagtccttgcggggagcgggctttcgtaa

SEQ ID NO: 9511 - DNA, 279 bp, Escherichia coli
atgttcagaatcatttttcctaacacctggtacgtcgaccaccacggcgctccctgcaaaatcctgcgttctacccacaacaaagttcactacatccgaaaaggcagaacatgtatcgccagcatgttccgctttaatcatgactttgaacctgtgaataaagctgatgcagatcggatagcagaagagatcgaaacggcagaacacattaagaagttacgtgacatgcgttcaaaaagcagaggtaaccatggaatcatacagcctcacactcgatga

SEQ ID NO: 9512 - DNA, 231 bp, Escherichia coli
atgacaatcaatattcagccgattctaataaaccgcgagcgtgttcaggagatgcttggtggtatctccagaactactttttaccggaagcgtaaacagtgggagcaatcagggacaccattccctcgggaagtggaagaaatccacccaccgaaaggcggcgccctctttcgctacaaggaagttattcagttttgcaaagataaaggattgatttccgaacactcttga

SEQ ID NO: 9513 - DNA, 1209 bp, Escherichia coli
atggcactcaacgatacaaagctgcgacgtatatccggaaaagcatatgagggacctgaggagatagctgacggaggcggactttctgtcaggatcagcccgaagggacttatcacctttcaataccgctatcgtttcaatggaaaacccgccaggttaaagctcggaacgtacgggaagatgtcgcttaaggaagctcgcgatgcattggaagagtgtaaagggtggttggagaagggtaaagacccagccatgcaaaggaagaaagccaaagatattgcatcaagttccccaagcatcagtaccctagttgacgagtggtttgatactccttcagtaaaagagatggtgaagtacgaatactggaagcggatgctgaaacttcacatcaccgacaattacggtaagctgattgcagatgaaatgagtcctgtagagtgggagcaaatattcattcgcataacaaaaggtgggtcacccgtacaggcgggaaatgtactggtgaagatgaagcaagtgatccgctatgcgttacgcagaaaacgcataacatcaaatgcactgatgcttcttgagattaatgatatcggcagtagacctaataatggcgaacgttttcttaacgatgttgagataggcgcattctggaatgccatcgacaaaacgaaaatgtcgtggcaaaacaaaatgtttattcgaattgttgcgttaactggttgtcgtggtgttgaattgcggttggctaagaagactgattttgatctgaagtctagagaatggactataccgaaagagaactcaaaaacgcgtaagcgatttgttcgcggtatttcaaaactcgcagcagattatttgcagcaggtatttgatctataccctgatctgtcaatcgtatttcctccggctaagttacaggaaaatcgcccaatgtctgccagcaccctaatttctattgcagaacaggtagaagatgttatggggggcgagcactggtcattgcacgatctgcgcagaacgtgcaaaacaaaaatggctgaacttggagtagcacctcatgtttcggagaaaattctcgggcataagctcacggggatgctggctgtttatgaccagtatgactacatccccgagcagcaggacgcagcagaattatgggctaagaaaattcaagagtgttcggaaatcaatcctttatctttgcaaaactga

SEQ ID NO: 9514 - DNA, 1899 bp, Escherichia coli
atgagtgaaaacgacattattatcagaactcattataagtctcctcatagaatgcacatcgatagcgacataccaacgccttcatcagagcctattaatcaatttgcgcgccaactcatcaccctacttgatacctctgacttaagttcgatgctgtcatactgtgttactcaggaatttaccgcaaactgtcgaaaaatatcacaaaattgttattccactgccctttttaccattaactttgccacttcacccatccatgcagaaaatatactcattacattacactataaaaaagaaatcatttccttattactggaaaccacgcctattaaagctaaccatttgcgaagcatactggattatattgaacaggaacagttaactgccgaaaatcgtaaccattgtatgaaactgtctaaaaaaatccatagagaaaaaactatacaaccaacagtaaatctcaatggtagtgcatttttttcgcaatctccttctgacgctattttttgtcgccatctgtcattgcaatacgcacttgattcactgagaaatggaaaaggcaaagtcaatctgattaaacattactcctccgttgaatccatacagcagcatgttcccttagtccgggacgcggagttcagatcattacttcgccatcctcctgcagggagtcgcgttatcgcgagtaaggattttggcttcgctttagatattttcttctgtcgaatgatggcaaacaatgtcagtcatatgtccgcgattttatatatagacaatcatactttgtcagtaaggctacgaataaagcagtcagcgtatgggcaattaaattatgttgtgtccgtttacgacccgaacgataccaacgttgccgtcagaggcacccacaggacagcacggggctttctctcgctcgataaattcatcagttcaggtcccgatgctcagacctgggctgatatgtatgttcgcaactgtgcaattgcttttctgcccctattacctgagggagttccaggggctattttcgcgggtattgcatcacgaatgccatttgcccctatacatccatcggcaatgttgttaataatggccacaggccagactcaacagcttattgcattattcaaacagttacccatactccctgaaaaagaaatcattgaaataataactgcgcagaatagcgttggtacacctgctttatttctggctatgatgaacggacatactgacaacgtaaaaatatttatgcaagaaattcagtcactggtagataatcatatcattcatgaagataatctggttaaattactgcaaactaaaagtgctaacgaaacacctggactctatatctccatgttgtatggattcgatgaaataatcgatatctttctgaatgcattaaccactccaataacacaagagcttttaagcaaaaaaatggtgatggatattttagcaatgaaaacacgtgatggtgagccaggattatatgccgcaatggaaaataatcaccctttgtgtgtcacacggttcctctctaaagtttatggaatcgctgttaaatataacctcagcaaaattaacatcatggatttattaaaaggcgcaacagcatatggaacccctgctttatacatcgccatgagcaagggtaataaagacgtcgtgttatcttatatatcaacgctgggtacttttgcaaataaatattcttttagtcaatgtcagttattcacattgttggccgctaaaaatcatgacaatatgtcagctgttcatatagccattcatcataatcattataaaactgtagaaacatattatgctgctataaacgtaatcagccaaagcctgagttttagtgctgatgaactaaagacgtatttataa

SEQ ID NO: 9515 - DNA, 210 bp, Escherichia coli
atgtttaactcccgtttaacaaccatggagtatagggcagtagcccgcagtatggatcgtcaccgacgtcatttcagcatcaggccttttaacgcctgcctttctggcactctatgccgcacctttcgtttgcattttgtcgttacgcctgcattatttctggcgtcgaatagctattccttaagcaggagcttgttatggaattcttaa

SEQ ID NO: 9516 - DNA, 801 bp, Escherichia coli
atggagattaccactcttcaaattgtgctggtatttatcgtagcctgtatcgcaggtatgggatcaatcctcgatgaatttcagtttcaccgtccgctaatcgcgtgtaccctggtgggtatcgttcttggcgatatgaaaaccggtattattatcggtggtacgctggaaatgatcgcgctgggctggatgaacatcggtgctgcagttgcgcctgacgccgctctggcttccatcatttctactattctggttatcgcaggtcatcagagcattggtgcaggtatcgcactggcaatccctctggccgctgcgggccaggtactgaccatcatcgttcgtactattaccgttgctttccagcacgctgcggataaggctgctgataacggcaacctgacagcgatttcctggatccacgtttcttctctgttcctgcaagcaatgcgtgtggctattccggccgtcatcgttgcgctgtctgttggtaccagcgaagtacagaacatgctgaacgcgattccggaagtggtgaccaatggtctgaatatcgccggtggcatgatcgtggtggttggttatgcgatggttatcaacatgatgcgtgctggctacctgatgccgttcttctacctcggcttcgtaaccgcagcattcaccaactttaacctggttgctctgggtgtgattggtactgttatggcagtgctctacatccaacttagcccgaaatacaaccgcgtagccggtgcgcctgctcaggcacctggtaacaacgatctcgataacgaactggactaa

SEQ ID NO: 9517 - DNA, 426 bp, Escherichia coli
ttgagtaatcatgatgatttactggcgggatttctccgcaaacgacacagtgtcagtaagctggttgtgcaccttatttttacgacaaagtatcgacgcaaactattcgacagtcagatgatcgctcagttgcgtgaggcttttggctccgctgcggcaaagcttgaatgcgaaattattgagatggacggggagccagaccatgtacacctgctggttgcctacccgccaaaactggcggtcagtgtgatggtcaataatttaaaatcggtatcatcacgtttgctacgccagcagaacgcgcatttacgcatgcagagtaaaacggggcttttgtggtcgagatcgtactttgtctgtagcaccggagaggcaacgattgaaacgctcagagcctacgttcagagtcagtcaacacctgattga

SEQ ID NO: 9518 - DNA, 1170 bp, Escherichia coli
atgttaagagcaacaaaagtacgcatctacccgacaccagaacaggctgaatttatcaacgcccagttcggtgcagtgcgttttgcgtacaacaaagctctgcatatcaagaaacattcttaccagcggcaccgcgtaaatttaaacccgcgtaaagacctcaaaccactgcttgcagtggcgaagaaatcccgccggtatggatggcttaaagaatatgattctattgcgttgcagcaggcggtaattaacctcgacgtggctttttctaactttttcaatccgaaactgaaagcaggtaaacctacctttaaaagtaaacacggcagacaatcgagctaccattgtgttggcataaaagtccttgatgctgcgataaaaataccgaaaatcttgccgattgaagcgcgtttacatcgtgaaattacgggaatgctgaaaagtatcacgttgagccgcagcgcaaccgggaaatactacgcgtcgttactctgtgacgacgggatggaagcgccggcaaagcccgcactgatatcaaatgtgacagggctggatatggggctggcgcattttgtcatcaaatcggacggcaataaaattgccagtccccgccacctaatcaatgcaagtcgcaacctgcgccggaagcagaaagcactgtcccgtaagaaaaaagggagcgcaaacaggcgcaaagccagaatacaacttgcagccgttcacgaacgggtagccggtgcccgtgccgatttccagcacaagttatctcgcgcaattgttgacgaaaaccaagcggtaattgtcgagacattgaaaatggcaaatatgatgaaaaatcaccatctggctcgtgcgataggcgatgctggatggtctggattcatcacaaaactggaatacaaagcaacagagaaaggtgtgcatctggtgaaactggatcaatggttcgccagttcgaagacctgccactgctgcggtcacaaaatgtcggagatgccattacataagcgcatctggcagtgtccagagtgtggagttgaacatgaccgcgatatcaacgcggcgctcaacatcaaacgcaagggcatactggaattacaagcggcgggactcgtcgtttctgcccatggaggccagcgtaaatccgtcacacagacggttgcggcttaa

SEQ ID NO: 9519 - DNA, 660 bp, Escherichia coli
atggctaactggttaaatcaactgcaatccctgcttgggcaaagcagttcttctgcctcctcgtctgcggatcagggattgggcaaacttttagtgccgggcgcattaggcggactggctgggctgctggtcgcaaataaatcagcacgtaaacttcttacgaaatatggcaccaacgcgttgctggttggcggcggagcggtagcgggtacggtgctgtggaataaatacaaagataaaattcgcgcggcgcatcaggacgaaccgcagtttggcgcgcaaagtacgccgctggatgagcgtactgaacgtttgatccttgcgctggtctttgccgctaaaagtgatggtcatattgatgccaaagaacgtgcggcaatcgatcagcaattgcgtgaagccggcgtggaagagcaggggcgtgtactcattgagcaggcaatcgaacaaccgctggatccacaacgcctggctaccggggtccgcaatgaagaagaggcgctggaaatctatttcctgagctgcgcggctattgatattgaccattttatggaacgcagttacctgaatgcactgggtgacgcgctgaaaatcccccaggacgttcgtgaaggcattgaacgcgatctcgaacaacaaaaacgcactttggcggaataa

SEQ ID NO: 9520 - DNA, 1179 bp, Escherichia coli
atgacgttattaggcactgcgctgcgtccggcagcaactcgcgtgatgttattaggctccggtgaactgggtaaagaagtggcaatcgagtgtcagcgtctcggcgtagaggtgattgccgtcgatcgctatgccgacgcgccagctatgcatgtcgcgcatcgctcccatgtcattaatatgcttgatggtgatgcattacgccgtgtggttgaactggaaaaaccacattatatcgtgccggagatcgaagctattgccaccgatatgctgatccaacttgaagaggaaggactgaatgttgtcccctgcgcgcgcgcaacgaaattaacgatgaatcgcgagggtatccgtcgcctggcggcagaagagctgcagctgcccacttccacttatcgttttgccgataacgaaaaccttttccgcaaggcggttgctgaaatcggctatccctgcattgttaaaccggtgatgagttcctccggcaaggggcagacgtttattcgttctgcagagcaacttgctcatgcatgggagtacgctcagcaaggcggtcgcgccggagcgggccgcgtaattgttgaaggcgtcgttaagtttgatttcgaaattaccctgctaaccgtcagcgcggtggatggcgtccatttctgtgcaccggtaggtcatcgccaggaagatggcgactatcgtgaatcctggcaaccacagcaaatgagccagctggctttggaacgtgcgcaagaaattgcccgtaaagtggtgctggcactgggcggttatgggctgtttggtgtcgagctgtttgtctgtggtgatgaggtgattttcagtgaggtctcccctcgcccacatgataccgggatggtgacgttaatttctcaggatctctcggagtttgccctgcatgtgcgagcctttctcggacttccggttggcgggatccgtcagtatggtcctgcagcttctgccgttatcctgccacaactgaccagtgagaatgtcacgtttgataatgtgcagaatgccgtaggcgcaggcctacagattcgtttatttggtaagccggaaattgatggcagccgtcgtctgggtgttgcgctggcgaccgctgagagtgttgatgaagcgattgagcgcgcaaagcacgccgcagcacagataaaagtacaagcttaa

SEQ ID NO: 9521 - DNA, 819 bp, Escherichia coli
atgatttacatcggtctgccgcaatggtcgcatcctaaatgggtgcggttggggatcaccagccttgaagagtatgcccgccactttaactgtgtggagggcaacaccacgctttacgccctgccgaaatccgaggttgtcctgcgctggcgtgagcagaccacagataattttcgcttctgttttaagtttccggcgaccatttcgcatcaggcagcattacggcattgcgatgatttagtgactgaatttttgacccgcatgtcaccgttagcgccgcgcattgggcaatactggctgcaactgcctgccacatttggcccacgggatctgcctgcgctttggcattttctcgattcccttcccggcgaatttaattatggtgtggaagtccgccatccacagtttttcgccaaaggggaagaggaacaaacgcttaatcgcggtttacatcagcgcggcgttaatcgggtgattttagacagccgcccggttcatgcagcacgtccacacagtgaagctattcgcgacgctcaacgaaaaaaacctaaagttccggtacatgctgtactgacggcgacaaatccgctgatccgttttatcggtagtgatgatatgacgcaaaaccgggaattatttcaggtctggttacaaaaattagcgcagtggcatcagaccactacgccttatctttttttacatacgccagatattgcccaggccccggaactggtacataccctgtgggaagacttacgtaaaacgcttccagagatcggagcagttccggctattccacagcaatcttctcttttctga

SEQ ID NO: 9522 - DNA, 396 bp, Escherichia coli
atggtaagcgcgctgtatgccgttttaagtgcgttgttattaatgaagttctcttttgatgtcgttcgcctgcgaatgcagtaccgcgttgcctatggcgacggcggttttagcgaactgcaaagcgctattcgcattcatggtaacgcggtggaatatattcccatcgcgattgtgttaatgctgtttatggaaatgaatggcgcagaaacctggatggtgcatatttgcggcatcgttttgcttgctggtcgtctgatgcattattacggttttcatcaccgtctgttccgctggcgacgttccggcatgagcgccacctggtgtgcgctgttgctgatggtgctggcgaatctttggtatatgccctgggagttggttttctccctgcgttag

SEQ ID NO: 9523 - DNA, 2430 bp, Escherichia coli
atgacattaacaagacgtgaatttattaaacacagcggtattgccgctggggcgctggtggtgacatcggctgcaccgctacccgcatgggcagaagagaagggtggcaaaatcctcaccgcgggccgttggggagcgatgaacgtagaagtgaaggacggcaagattgtttcttcaacaggcgcgctggcgaaaactataccgaactccttacagtctacggcggtggatcaggtacacaccacggcgcgtattcagcatccgatggtgagaaaaagctatctcgataatccactgcaaccggcgaaaggtcgtggcgaagatacctatgtacaggtgagctgggaacaagcattaaaactgattcatgagcaacacgatcgtattcgtaaagctaacggaccatcggccatttttgccggatcttacggctggcgatcttctggcgtgttgcataaagcgcaaaccttactgcaacgttatatgaaccttgcgggcggttattccgggcatagcggcgattattcaaccggggcagcacaggtgatcatgccgcatgtggtcggttctgtagaggtgtatgaacagcagacctcctggccgctgattctggaaaacagccaggttgtggtgctgtgggggatgaacccgctgaataccttgaaaattgcctggagcagtaccgatgagcaagggctggaatacttccatcagctgaaaaaatctggcaaacccgtgattgccattgatcctattcgctccgaaaccatcgaattctttggcgataatgccacctggatcgcgccgaatatgggcaccgacgtggcactgatgttagggatcgcgcataccctgatgacacaaggcaaacacgataaagtgttccttgaaaaatacactaccggatatccgcagtttgaagagtatctggcaggcaagagcgataatacgccgaagagcgcggcctgggcggcggaaatttctggcgtaccggaagcgcagatagtcaaactcgctgaactgatggcggcaaatcgcacaatactgatggcaggctggggaattcagcgccagcaatatggtgaacagaaacactggatgctggtgacgctggcggcgatgttagggcagattggtacaccgggcggcgggtttggtttctcttatcattactccaatggtggcaacccgacgcgtgttggcggcgtgctgccggaaatgtctgcggcgattgccggacaggccagcgaggccgctgatgatggcggaatgacggcgattcctgttgcccgtatcgtcgatgcgctggaaaatcctggcggcaaatatcagcataacggtaaagagcaaacgtacccaaatatcaaaatgatctggtgggcgggtggcggtaactttacccatcaccaggatactaatcgtctgattaaagcatggcagaaaccggagatgatcgtcgtttctgaatgctactggaccgcagctgctaaacatgcagatatcgtattaccgatcaccacatcgtttgagcgcaatgacttgacgatgaccggtgattacagcaaccagcatattgtaccgatgaagcaggctgtcgctgcgcaatttgaagcgcgtaacgattttgacgtgtttgccgatcttgctgaattactcaaacctggcggaaaagagatctataccgaaggtagagatgaaatggcgtggctgaaatttttctatgatgccgctcagaaaggtgcgcgtgcgcaacgcgtgactatgccgatgtttaatgctttctggcagcaaaataaactgatcgaaatgcgccgcagcgagaagaacgaacagtacgttcgttatggtgatttccgcgccgatccggtgaaaaatgcgctgggtacgccaagcggcaaaattgagatttactccaaaacgctggaaaaatttggctataaggattgcccggcacacccaacctggcttgcgcctgatgagtggaaaggttccgccgacgagaagcagttgcagcttctgaccgcacatccggcacaccgtttacacagtcagcttaactatgcggaactgcgtaaaaaatatgcggttgccgatcgtgaaccgatcactattcacaccgaagatgctgctcgctttggtattgcgaatggcgatctggtgcgtgtctggaacagacgtggtcagattctgacaggcgcggtggtgactgacgggatcaaaaaaggcgtggtatgcgtgcatgaaggtgcatggccagatctggaaaatggcttgtgtaaaaacggcagtgcgaacgtgttaacggcggatatccccagctctcagctggcaaatgcctgtgccggtaactctgcgctggtgtatatcgaaaaatatacgggcaatgcaccgaagttaacggcgtttgatcagccagctgttcaggcataa

SEQ ID NO: 9524 - DNA, 1101 bp, Escherichia coli
atgcgagggaaaaaacgcattgggttaatgtttttgctgatagcggttgtggttggtggcggcgggttattgctggcgcaaaaagccttacataaaacgtcggatacagcattttgcctttcctgccactcgatgagtaaaccttttgaggaatatcagggaactgtccacttttcgaaccagaaagggatacgtgcggaatgtgccgattgccatattccaaagtcagggatggattatttatttgctaaattaaaagcatctaaagatatttatcatgaatttgttagcggcaaaatagacagtgacgataagttcgaagcgcatcgtcaggaaatggccgaaacagtatggaaagaattaaaagccactgactctgcaacgtgccgtagttgccattcttttgatgccatggatattgcctcgcaaagtgaatctgcgcagaaaatgcataacaaagcacaaaagggcggcgaaacctgtatcgattgtcataaaggcattgctcattttccgccagaaataaaaatggatgacaacgcggcgcatgagctggaaagtcaggccgctacttcagtgactaatggcgtacatatttatcctttcaaaacttctcgcataggcgagctggctaccgtgaatcctggtaccgatctcatcgtcgttgatgccagtggcaaacagccgatcgttctgttgcagggttatcaaatgcagggcagtgaaaacacgctctacctggcggcaggtcaacggctggcactagccacattaagtgaagaaggtatcaaggcgctcacggtaaacggggaatggcaggctgacgaatacggcaatcaatggcgtcaggcgtctttacagggtgcgcttaccgatcccgcattagcggaccgtaaaccgctatggcaatacgctgaaaaacttgacgatacctattgcgctggttgccatgcccctattgcctccgaccattacaccgtcaatgcatggccgtccattgccaaaggaatgggggcgcgaaccagcatgagcgaaaacgaactggacattttgacgcggtacttccagtacaacgccaaagatattaccgagaaacagtga

SEQ ID NO: 9525 - DNA, 504 bp, Escherichia coli
atgggaatgattggctattttgcagaaattgactcagataagattaaccaactgcttgagtctactgaaaaacccttaatggacaatattcatgacacgctttcaggattacgccgactggatattgataaacgctgggattttttacactttgggctgacaggcacctctgcttttgatcccgcgaataatgatccgctgagtcgtgccgtgcttggtgaacacagcctcgaagatggcatagatggcttcctgggattgacctggaatcaggagttagccgcgacaatcgaccgactggaagctctggatcgaagtgagctgcgtaaacagttttccattaaacgactcaatgaaatggagatttaccctggtgtgactttttcagaagagttagaggggcaactctttgcttcgatcatgcttgatatggaaaagctgattagtgcgtatcgacgtatgctgcgacaagggaatcatgcgctgacggttattgttgggtga

SEQ ID NO: 9526 - DNA, 462 bp, Escherichia coli
atgattgaatggcaagatctgcatcactctgaattatcggtttcccagctttatgccttattacaactgcgttgcgcggtgtttgttgttgagcagaattgcccttatcaggatatcgatggtgatgatttgacgggggataatcgccatattctcggttggaaaaatgatgaactggtggcgtatgcgaggattctgaaaagtgatgatgatcttgagccggtcgttattggtcgggtgattgttagtgaagcgttgcgtggcgaaaaagtggggcagcagctgatgaataaaacactcgaaacatgtacgcgtcactggcctgataaacctgtttacctcggggcgcaggcgcatctgcaaaacttctaccagagttttggctttatccctgtgacggaggtctatgaagaagatggtatcccacacattgggatggcacgcgaggtaattcaggcgtaa

SEQ ID NO: 9527 - DNA, 1071 bp, Escherichia coli
atgccaaatacatctattcacttatctccctgtaatattttacaaaataataaattgcaaccaacagaaatttacaaagaatcacaacaaaccgcgaaacttgagtttttttgcgatgagtttctaaaaatatctcaaagtagatacgggttatcaacttcagcagacagcatagctaatttattggcttttttcacgaaagcctcagatgcaattgatagtatcaagacccaaaaaattgacgttcacagttatggtttcgtaccaataagacattttgtcgaacatgtcataacgtataaaaatgaatttgcagcggattatgaaccctatacccttacctttacccgaggtgaaaacaacgaaggtattttgagtgtcgaaagcaaagaagggtttatttcacaaagaacaataaacttaaatgaatatgaaactgcaattaacatcatcaatgaacatgttataaaagaaaatatccacaacacggtccagtcaccgacagaaaaagacatttcaaaaataaacagctctgataaatcttataaaaccagcagtgagaaaagtattaaaagtcaactttacagcgatcaaaaaaaatatacagacctgctactacattctgagaaaaatacagaatggtacaaatacgcatcctccgtggaacgctatgataaattcaagaattcttctaaggaaattaaaaatacccacaagcaaattgtacaagcgcagaaaaaattgaaccaaatgaaatacatcaataaattaagtggtgagcttatcgatatcgccgacaaaaagttagcaccattaataaatgatagtttcagctatacacgagatttctttgcttactcaaaacaggaaaataacatcttcacgtttgataattctaagtttgaagatccaaaggaaaaaaaaggtttaatggtacaacacagcaatggacaactggttattactggtgaatattatcctgaaggtgtgcaaatagcattcactcaagaacaatataataaattaataagatacattaatattttctttacttttccgaaatgcgaataa

SEQ ID NO: 9528 - DNA, 132 bp, Escherichia coli
atgactccaggtagaaatcggtatgaagcgcccgactcactgtcaaaaccgatcgttgagagtaatgacactccggcgaacagtacacagtttactctggagccattctcaatcttcaagtgggatacctag

SEQ ID NO: 9529 - DNA, 651 bp, Escherichia coli
atggcagtttcagcaaagcacgacgaatttaatcactggtgggcaacagagggcgactgggttgaagagcctaactatcgccgcaatggtatgagcggggtgcaatgcgtcgagcgcaacggcaaaaagctatatgtaaagcgcatgacgcatcatctgtttcattccgtacgttatccgttcggccgaccaacgattgtccgtgaggttgcggtaattaaagaactggaacgggccggtgtcatcgtgccgaagatcgtttttggtgaagcggtgaaaattgagggggaatggcgcgcgttgctggtgactgaagatatggcggggttcatcagcattgctgactggtatgcccagcatgcagtaacgccctattctgacgaagtacggcaagccatgttgaaagcagtggcgctggcgtttaagaaaatgcatagcgttaatcgtcagcatggctgttgctatgttcgccatatctatgtgaaaacagaaggtaaggcagaagctggatttcttgatctggagaaaagtcgtcgccgcttgcgtcgcgataaagcgattaatcatgacttccgccagctggaaaaatatctggagccgatccccaaagcggactgggagcaggtgaaagcgtattactacgccatgtaa

SEQ ID NO: 9530 - DNA, 3681 bp, Escherichia coli
atgattgcatctcttttctctgctaacggtgtcgcggcggtcattgattcatgtcagggatatgatatcaaagcgagttgtcacgccagcaggcaaagcctttcaggcattacgcaggactggagcatcgccgatgggcaatggctggttttttcggatatgaacaataacgccagcggtggggccgtatttttgcaacaaggagcggagttttctctatcgccagaaaatgaaactggaatgactctgtttgccaataatactgtctcaggagaatataataacggcggggcaatatttgctaaagaaaactcaacgctgaatcttactgatgttattttttccgataacgttgcaggtggctatggtggcgcaatctattcttctggtactaacgataccggtgtcgtcgatttaagtgtcactaacgccgtgtttcgcaataacatcgctaatgacggcaaaggtggtgcaatttataccatcaacaatgacgtctatttaagtgaagttatttttgataacaaccaggcatatacatcaacaagttacagtgatggcgatggaggggcaatcgatgtcaccgataataatagcaatatcacgcatccgtcaggtttcacaataataaataacaccgcatttacaaataactctgctgagggatatggtggggcgatttataccaatagcgtgacggctccctatcttattgatatttcagttgatgacagctacagccagaacaacggcgtgttagtggatgagaacaacagcgcagcaggttatggggatggtccttccactgcggcgggcggctttatgtatctcggcttaagtgaagttacctttgatattgccgacggaaaaacgctggttatcggcaatacagagaatgacggagctgttgactctattgctggtaccggggtaatcaccaaaacaggttccggcgatctggtacttaatgcaaataacaatgactttactggcgagatgcagatagaaaacggtgaagttaccctgggccgcagcaactccctgatgaatgtcggcgatacgcattgccaggacgatccgcaagactgctacggtctgacgatagggagtattgatcagtatcagaatcaggctgagctaaacgttggctcgacccaacaaacttttgtgcacgcattgacgggctttcagaatggcactttaaatatcgatgctggtggcaatgttactgttaatcaaggcagttttgctggcaccatcgaaggtgctggtcagctcaccattgcgcaaaacggcagctacgtgctggcaggggcacagtcgatggcgctaactggcgatatagtcgttgatgatggcgcggtgcttacgctggaaggcgacgcggcagatcttgccgctctccaggacgatccgcagtcgatcgtgttaaacggcggcgtgcttgatctctctgatttcgccacctggcagagcggcacatcatacaacgatggccttgaagtcagcggcagcggcggtacggttatcggcagtcaggatgtggtggatctcgcaggcggcgacaatttgcatatcggcggcgacgggaaagatggcgtctacgtggtgatcgatgcgggcgacgggctggttagcctggcaaacaataatagttacctgggcaccacgcaaatcgcttccggtacgctggtggtgagcgacaactcgcagcttggcaataccgacgaaaaccgtcagctcatctttactgatagccaacaacaaagtgagatggaaattaccgctgacgttgatactcgttcagaggcagcaggtcacgggcgtgatattgaaatgcgcgccgacggtgaagtggcggttgatgcgggggtagacacgcagtggggcggactgatggctgacagcagcgggcagcatcaggatgagggtagcacattgactaaaacgggggcgggtacgctggaactgaccgccagcggtacgacgcagtcggcggtacgtgtcgaagaaggcaccctgaaaggcgatgttgcggatatcttcccttatgcttcgtcgctgtgggtcggtgacggggcaacgttcaagactggcgcggatcaggatattcagtcaattgatgttacttccagcggcactatcgacatcagcgatggtacggttttgcgcctgaccgggcaggatacttccgtcgcccttaatgcctcactgtttaacggcgatgggacgctggtgaatgccaccgatggcgtgacgttgacaggcgagcttaacaccaaccttgaaactgacagcctgacttatctttccgacgtaacagttaatggcaatctgaccaatacgtccggtgcggtcagcctgcaaaatggcgtcgccggcgacacgctgacggtaaacggtgattataccggcggtggtacgctactgctcgatagcgaattaaacggcgatgactcggcaagtgaccaactggtgttgaacggtaatactgctggcaacacgaccgtggtaattaatcccattacgggtattggtgagccgacatctacaggcattaaagtggttgatttcgcagccgatccaacgcaatttcaaaacaatgcgcagttcagtctggcgggcagcggctacgtcaatatgggagcgtatgactacacgctggtggaagataacaacgactggtatctgcgatcgcaagaagcaacgccaccatcgccacctgatccagacccgactcctgatccaacacccgacccggaacctacgcctgcctaccagccggtgttgaatgccaaagttggtggatattttaataacctgcgggcggcaaatcaggcgtttgtgatggagcgacacgatcacgctggtggcgatggtcagacgctgaatttacgtattatcggcggagattatcattacacagcagcggggcaactggctcagcatgaagatacttctacggtgcagcttagcggcgacttgtttagcggacgctggggcgcggatggcgagtggatgcttggggcggttggtggctacagtgataaccagggcgacagccgctcgaatatgaccggaactcgcgccgataaccagaaccacggttatgccgttggtctgacctcaagctggtttcagcacggtaatcagaagcagggggcctggctggatagctggctgcaatacgcgtggtttaacaatgatgtttccgaacatgaagatggcgtggatcattaccactcatcggggattatcgcctcgctggaagccgggtatcagtggttaccggggcatggagtggtgattgaaccacaggcgcaggtgatttatcagggcgtgcagcaggatgattttaccgccgctaaccatgcgcgcgtgtcacaatcgcagggtgatgatattcaaacgcggctgggtttacacagcgaatggcgtaccgctgttcatgtcataccatcattagatctgaattattatcacgatccccatgcgacggaaattgaagaagatggcagcactatcagtgacgatgcggtgaagcaacggggtgaaataaaagtgggagtcacgggcaatatcagtcagcgagtttcgctgcgcggcagcgtggcgtggcagaaagggagtgatgattttgcccagacggcagggtttttgtcgatgacggtgaaatggtag

SEQ ID NO: 9531 - DNA, 1689 bp, Escherichia coli
atgagtggtgaaaaaaaggcgaaaggctggcggttctatggtcttgtaggtttgggcgcaatagtactgctttccgctggcgtctgggcgttgcaatatgctggcagtgggccagaaaaaacgttgtcgccgctggtggtgcacaacaatctgcaaatcgatctcaatgagccggacctctttctcgacagcgactctctgagccagcttcccaaagacctccttaccattccgtttctccacgatgttctgagtgaagatttcgttttctattatcagaatcatgccgatcgtctgggcattgaaggcagcattcgccgcattgtctatgaacacgatctcacgctgaaagataagctcttttcgtcactcttagatcagcccgcgcaggcggcgctatggcacgataaacaaggccatctttcacattacatggtgctgatccagcgcagtggtttaagcaaactgctggagccattgttgtttgccgctaccagcgacagccagttaagcaaaacggaaatcagtagtattaagctaaatagtgaaaccatcccggtttatcagttgcgctataacggcaataacgccctgatgttcgcgacttatcaggacaagatgctggtgttttccagtacggatatgctgtttaaagatgaccagcaggataccgaagccacggcgatcgcaagtgatttgttgagcggtaaaaaacgctggcaagccagctttggcctggaagagcgtactgccgaaaaaacgccagtacgccagcgcatcgtggtcagcgccaggttgctggggtttggctaccagcgattaatgccttcttttgctggcgtacgcttcgaaatgagcaacgacggctggcatagctttgtggcgttaaatgatgaatccgcaagcgtagatgccagtttcgattttacgccggtatggaacagtatgcctgccggggccagcttctgtgtggcggtgccgtattcgcatggtattgccgaagagatgctttcgcacatcagccaggaaaacgacaagctgaacggggcgttagatggtgcagccgggctgtgctggtatgaagactcaaaattacaaaccccgctgtttgtcggtcagtttgatggcactgccgaacaggcacaactgcctgggaaactgtttacgcaaaatattggtgcgcacgaaagcaaagcgccagaaggtgttttgccggtaaaccagactcagcagggcgaagcgcaaatctggcgtcgcgaagtgagttcccgatacggccagtatccgaaaacacaggcggcgcaaccagatcaactaatgtcggattattttttccgcgtgtcgctggcgatgcaaaacaaaacgctgcttttctccctcgatgacacgctggttaataacgcgctgcaaacactgaataaaacccgcccggcaatggtggatgtaatacccactgacggcatcgttccgctctatatcaatccacaaggcgtggcgaaactgctgcgtaacgaaacgctgaccagtctgccgaagaatctcgaaccggttttttataacgccgcacaaactttattaatgccgaagctggacgctttatctcaacaaccgcgttatgtcatgaagctggcacagatggaacccgatgccgcctggcagtggctacccataacctggcagccgctatga

SEQ ID NO: 9532 - DNA, 1923 bp, Escherichia coli
gtgcgactggaagcgccggggcgtgattatcggcgctatcagatggaagagtacggcggcgtggacgttcgcctgtatcgtattcctgacccgatggcatttttgcgccagcagaaaaacctgcatcgcattgtggtgcaaccgcaatatctgggcgacgggctgaacaatacgctgacctggctgtgggataactggtacggcaaatctcgccgcgtgatgcagcgtactttctcttctcagtcacggcagaatgtgactcaggcgttacccgaattacagctcggcaatgccattattaaaccttcccgttatgtacagaacagccagttttcaccgctgaaaaaatatccactggtggaacagttccgttacccactatggcaggctaaaccggtcgagccgcagcaaggggtaaaactggaaggcgcatccagcaatttcatctcgccgcagccgggtaacatctatattcctctcggcaaacaagagccgggactgtacctcgtcgaggcgatggtcggtggatatcgggcgacgacggtggtatttgtctctgataccgtggcgcttagcaaagtgtcgggtaacgagctcctggtgtggaccgcgggtaaaaaacagggtgaagcgaagccgggatcagagatcttgtggactgacggtcttggcgtgatgacccgcggtgtgaccgatgacagtggtaccttgcagttacaacatatatcgccggaacgttcatacattctgggtaaagatgctgaaggcggcgtttttgtctccgagaattttttctacgaaagcgaaatttacaacacccgcttgtatatcttcaccgaccgccctctgtatcgcgcaggcgatcgtgttgatgtcaaagtgatgggccgcgagttccacgacccgttgcattcatcccccatcgttagcgccccggcgaagctttcagtgctggacgccaacggcagtctgttgcaaaccatcaatgtcacgctggatgcgcgtaatggcgggcaggggagtttccgcctgccagaaaatgccgtcgccggaggttatgagttacgcctggcttaccgcaaacaggtctatagcagcagttttcgcgtagccaactacatcaaaccacattttgagattggcttagccctcgacaaaaaagatttcaaaactggcgaagcggtcagcggcaaactgcaactactctatccggatggcgaaccggtaaaagatgccagcgtgcagttgagtttgcgcgctcagcaactttcgatggttggtaacgatttgcgttatgccggacgtttcccggtgtcgctggaaggtagcgacgctgtttctgacgataaaggcaatgtagcgttaaaccttcccgccgccgataaaccgagccgctatttactgaccgtctccgccagcgatggcgcggcatatcgtgttactactaccaaagagatcctcattgaacgcggtctggcgcattactctctaagcacctccgcacaatacagtaatagcggcgagtcggttgttttccgttatgccgcgctggaatcttcaaagcaggtgcctgttaagtatgagtggctacgcctggaagaccgaacaagccacagcggagatctaccttctggtggcaaatcctttaccgtcaatttcgataaaccgggtaactacaatctgacgttacgcgataaagacggcttaattctcgccgggttaagccatgcagtcagcggtaagggcagcacgtcgcatactggtacggtagatattgtggcagataaaacgctgtaccagcctggcgaaaccgcgaagatgctgattaccttcccggagccaattgatgaagcattattgacgctggaacgcgatcgcgttgaacagcagtcgctgctatcgcgcatccggcaaactggctga

SEQ ID NO: 9533 - DNA, 1470 bp, Escherichia coli
atgggttccgaaactaaaactacagaagcgccgggcttacgccgtgaattaaaggcgcgtcacctgacgatgattgccattggcggttccatcggtacaggtctttttgttgcctctggcgcaacgatttctcaggcaggtccgggcggggcattgctctcgtatatgttgattggcctgatggtttacttcctgatgaccagtctcggtgaactggctgcatatatgccggtttccggttcgtttgccacttatggtcagaactatgttgaagaaggctttggcttcgcgctgggctggaactactggtacaactgggcggtgactatcgccgttgacctggttgcagctcagctggtcatgagctggtggttcccggatacaccgggctggatctggagtgcgctgttcctcggcgttatcttcctgctgaactacatctcagttcgcggctttggtgaagcggaatactggttctcactgatcaaagtcacgacagttattgtctttatcatcgttggcgtgctgatgattatcggtatcttcaaaggcgcgcaacctgcgggctggagcaactggacaatcggcgaagcgccgtttgctggtggttttgcggcgatgatcggcgtagctatgattgtcggcttctctttccagggaaccgagctgatcggtattgctgcaggcgagtccgaagatccggcgaaaaacattccacgcgcggtacgtcaggtgttctggcgaatcctgttgttctatgtgttcgcgatcctgattatcagcctgattattccgtacaccgatccgagcctgctgcgtaacgatgttaaagacatcagcgtcagtccgttcaccctggtattccagcacgcgggtctgctctctgcggcggcggtgatgaacgcagttattctgacggcggtgctgtcagcgggtaactccggtatgtatgcgtctactcgtatgctgtacaccttggcgtgtgacggtaaagcgccgcgcattttcgctaaactgtcgcgtggtggcgtgccgcgtaatgcgctgtatgcgacgacggtgattgccggtctgtgcttcctgacctccatgtttggcaaccagacggtatacctgtggctgctgaacacctccgggatgaccggttttatcgcctggctggggattgccattagccactatcgcttccgtcgcggttacgtattgcagggacacgacattaacgatctgccgtaccgttcaggtttcttcccattggggccgatcttcgcattcattctgtgtctgattatcactttgggccagaactacgaagcgttccttaaagataccattgactggggcggcgtagcggcaacgtatattggtatcccgctgttcctgattatttggttcggctacaagctgattaaaggaactcacttcgtacgttacagcgaaatgaagttcccgcagaacgataagaaataa

SEQ ID NO: 9534 - DNA, 549 bp, Escherichia coli
atgtttaggttgaaccctttcgtacgggtcgggctgtgtttgtccgctatttcttgtgcatggcctgtgttagcggtcgatgatgatggcgaaacgatggttgtcactgcatcttccgttgagcaaaaccttaaagatgcacccgccagtatcagcgtcattacccaggaagacctgcagcgaaaaccggtacagaatctgaaggatgtcctcaaagaagtgcctggcgtacaactgacgaacgaaggggataaccgtaagggcgttagtattcgtggtctggacagcagctacaccctgattctcgtcgacggtaaacgcgttaactcccgcaatgccgtcttccgccacaatgatttcgatctgaactggatcccggtcgattccatcgaacgtattgaagtggtccgtggcccgatgtcgtcgctgatgatggcgaaacgatggttgtcactgcatcttccgttgagcaaaaccttaaagatgcacccgccagtatcagcgtcattacccaggaagacctgcagcgaaaaccggtacagaatctga

SEQ ID NO: 9535 - DNA, 948 bp, Escherichia coli
atgcgtgtgttactggcaccgatggagggtgtactcgactctctggtgcgtgaattgctgaccgaagttaacgactacgatctgtgcatcaccgagtttgtccgcgtggtggatcaactgctgccaataaaagtctttcatcgcatttgccctgagctacaaaatgccagccggacaccttccggtacgctggtgcgcgtgcagttgttaggtcagttcccacaatggctggcagagaacgccgcccgtgcggtggagttaggttcctggggcgtggatctcaattgcggctgcccgtcgaaaacggttaacggtagcggcggtggggcgacgttactcaaagatcccgaactcatctaccagggtgcaaaagcgatgcgtgaagctgtaccggcgcatttgcccgtcagcgtgaaagtgcgtctgggatgggacagcggtgagaagaaatttgaaatcgccgatgcggttcaacaggctggtgctacagagctggtggtgcatgggcggacgaaagagcagggttaccgcgcggagcatattgactggcaggcgattggcgagattcgccagcggctgaatattccggtgattgccaacggtgaaatctgggactggcagagtgcgcaacaatgcatgacgatcagcggatgcgacgcagtgatgattggtcgcggggcgctcaatattcccaacctgagccgggtggtaaaatataacgaaccgcgaatgccgtggccggaggtagttgctttgctgcaaaaatatacccgtctggaaaagcagggcgataccgggttatatcacgttgcgcggattaaacagtggttgagttatttgcgtaaagaatacgatgaagcaacggaattatttcagcatgttcgggtgttgaataattcccctgatattgcaagggctattcaggcaattgatatcgagaaactctaa

SEQ ID NO: 9536 - DNA, 216 bp, Escherichia coli
atgaaatccatggataagttaacaacgggtgtcgcctatggcacctccgcaggcagtgctggctactggtttttacagttgctcgatagagtaactccgtcacagtgggctgcaatcggtgtgctgggtagtctggtatttggcctgctgacgtacctgacaaacctttatttcaagattaaagaagataagcgcaaggctgcgagaggtgaataa

SEQ ID NO: 9537 - DNA, 543 bp, Escherichia coli
atgatttacccaacaaatacaggcaaaagcggggaacaccttcgtctcaccacgctggaaagtgtctggattcagggaaaactgcgcatgtgggggcgctggtcgtatattggcggcggtaagacggggaatatgttcaaccagttgttggcctctaaaaagctgacaaaaacggcaattaacgaggcgctccggaggatgaaaaaagcaggtctgaacaagtctgaacttgaggcttttttgcgggatatgattaacggtaagcaaaagagctggctggcgcattgtactgatgcagaggcgttatgtattgatcgggtcataagtgaggtgctggcagagcatccaggattgattagcgtccttcggcaacggtatgaggggcgggggatgaccaaacgcaaaatggctgaattgctaaatgatgcacacccagagtggtgttttagcacatgcgaaaagcgaattgctaattggttggccgttgctgagtatgcgctatacattcccatgcgagaatcattcgctcaaaaaacggcttga

SEQ ID NO: 9538 - DNA, 291 bp, Escherichia coli
atggtggatttacgtaaagcggcgcgggggcggatgtgcaccgtcagaattcttggctactgcaatcacgatccggaaacgtctgtgctggcgcattaccgactggcgggaacgtgcggaacagcgacaaaaccacacgatatgcaggcggcgattgcctgtagctcatgccacgatttaatcgacgggcgggtaaaaacaagcgattacaccaaagaagatttacgcctgatgcatgcagaaggtgtttttcgcacgcaagaaatctggagaaaggaaggttatttatga

SEQ ID NO: 9539 - DNA, 600 bp, Escherichia coli
atggcgcatatacaactggtcaaacaaacctcttccggattacttctcccggcgacgccggagagttgtgattttctgcatcaaatcaaaataggcgagtggatacacgcagactttaagcgtgtgcgtaactacgcattccacaagcgttttttcaaactcctgcaactgggattcgattactggactccggtcggtggggcgatcacgcctcgcgaacgagaactgctgtctggtttcgttgattacctgtgcgaatcagttggtcgggaacacacgccagccctgagtgatgccgcagagcaatatctgaatacagttgcgacacgcagaacccgggatacggcattgctaaagtcgtttgaggcttttcgcgagtgggtaaccattcaggctggattttacaccgaacatttttatccggacggtagccgcgggcgtcgggcaaaatctatcgcttttgcgaatatggacgaaaccgagtttcagcaggtttataaatctgttctgaatgtgctgtggaactggattctgttccgtaaattttcctctccggaacaagtcgaaaatgtggccgcgcagctgctggagtttgcgtaa

SEQ ID NO: 9540 - DNA, 174 bp, Escherichia coli
atgctaataactgggctcactatccattgcctgctcgtgtgccagtttccgtataacaactatataaatcaaacccgctgtagcgggtttgatttatttgtgggtgtgttttataaaaataccgcccatacacaacaaaatacaaaaagtattatagataaaaaaggaacgtaa

SEQ ID NO: 9541 - DNA, 2265 bp, Escherichia coli
atgagcagaaggggtacacagtttagtaacgcaaaagttacaaacccaatgttaagaatccctttttccagtagtgacttgggtgcaatagtaaacgctggcggtggggcaaaggtattggttgatgtaacagccgaatatagacaagggctagtaagaaatttaacaaccagtaaacattatttagaatccaaactttcagagtaccctggaagcttgggtactttggttttcaaattaagagaccagggaatagccaaaacgcataggccgaacaaaattgctcaagaggctggattgcaaaatgccggtcatgccaaaatagatgaaatgttggttgctgctcatgccggctgttttgacgtattagagtcagtcattttacatcggaatattaaagcgattttggctaatctaagcgcgattgagcgcattgaaccttgggatgagaataggaaggttccaggaggcactgatggtttgtttgaatcatcaaacatccttgtacgactatttgagtacacaggtgaagatgcaacttacaacaactatgaaaacgttatttctatattagaacaacacggagttaaatatgatgagattagacaaaaatgtggtcttcccttattaaggataatggatttatccccaaatgatagatatatattagacattctcattgattacccgggtataagaacgttaattcctgaaccaaaatattcagcattcccggttagtgtaagtgattctgttggcattgaaacaaatagctttcccgtaccatcagaagaattacccattgttgctgtatttgacactggggtaagccccatcgcggcaacaattactccttgggtagtgagtagggaaacatacgtaattcctcctgatacgagttatgaacatgggactatggtgtcttcattgatatcaggcgctcattttttaaatgacaatcatccatggattcctgatacaaaatctaaaatccatgatgtttgtgccttagatgaaaatggatcttatatatcagatttaattctgaggctagcagatgctgtaaataaaagaccagatataaaagtctggaatttgtctttgggaggcggaccatgtaatgagcagacgtttagtgattttgcgatggagttagatcggctcagcgataaatttggtattttgtttgtagttgctgcaggtaattatgtagatgaacctatacgtacatggccaaatcctgatccgcttggaggtgctgatttaatttcctctcctggagagtcagtccgagcactaacagttggttcagtttctcatatggaagctaatgatgctttaagtgaaattggaacaccgacaccatatactcgtcgtggccctgggcctgtatttactccaaagccagatataatccatgctggcggtggggttcatagaccttggaatgtaggagcaagcagtttaaaggtcgtagggccagataataggctttgctctaattttggtactagttttgctgctccaattgtggcaagtttagctgcgcatacatggcagagaatagccactaatacagactttaatgtttcaccatcattgattaaagcattattaattcattccgctcaattatcttctcctgattactcgccaagtgaaagacgctatttgggagcgggaattcctaatgaagttattgagaccttatatgatagtgatgataggtttactctgattttccaaacattcttggttcctggggtgaggtggagaaaggataactatcccataccatcggcacttattcaaaatggaaaatttaaaggtgagattgtaattactgctgcatatgcaccaccactgaaccctaatgccggcagtgaatatgttcgcgcgaacgtagagctaagttttggcttaattgagaataatactataaaaggaaaagtgcctatggaaggagaaaacggtcaatctggatatgagagagctcaaattgagcatggtggaaagtggtcaccagtaaaaattcatcgcaaggcatttaataaaggaattacttcgggtaactgggctcttcaggctaaaacaacgttgagagcgaatgaaccggccttaatggagcctttacctgtaactattgtagtaactttaaaatcattagatggaaacacacaagtttatgctgatggcgtaagagctttaaatgctaataactgggctcactatccattgcctgctcgtgtgccagtttccgtataa

SEQ ID NO: 9542 - DNA, 1155 bp, Escherichia coli
atggattatttatcagaagtgttaaaaatcattgaaggtgcaacaaaggcaaatgcttcgatggctagtaattatgctgggttgctggcagataagctcgaacaaaaaggggaggtcaagcaagccagaatgataagagaaaggttgcttagagctccccaggcgttggcaggagctcaaagggctggaggtgggatatctctgggctcattaccggtagatattgatagtcgactcaacactgttgatgtcagttatcctaaattagacagttcagagatttttctgcctgcagcaatcagtacccgtgttgaagagtttatcactaatgttcaacgttatgatgagtttgttaaagctgatgcagcattgccgagtcgtatgctcgtgtatggaaagccaggaacaggtaagactatgttatctaagtacatcgctacccgcttagattttccacttcttacagtgcgttgcgatactttgattagtagtttattgggacaaaccagcaaaaatcttagacaggttttcgattatgtaatgcagaggccatcagtgctttttttagacgaatttgatgctttagctggagcaagaggtaatgagagagatataggtgagcttcagcgagttgtcatttcactattgcagaatatggatgcggcatcagaggatacggtaattattgcctcaactaaccatgagcaacttctggatcctgcaatctggaggcgatttagcttcagaattccaatgcctctgcctgacatacatcagagagagttaatttggaaaaatcgtttaaagaatatgatatgtagcgatctagatttaagtgatttatcaagaaaatcggaaggattatccggagcaataattgaacaggtgagcttggatgcacgtagggatgcagttattgaaggtgcaagtgtgataaatcaccataaattgtataggcgtttgtatcttgctcaatcgcttatggaaggtgtaaatttaagcacttacgaagatgaaattcgttggttacgttctaaagataaaaaattattttctatcagagttcttgctaatttgtacaaacttacatcaagagtaatttcaaacattctgaaggagtcaggagcatatgagcagaaggggtacacagtttag

SEQ ID NO: 9543 - DNA, 222 bp, Escherichia coli
atgaatagaacgatgaaggatggaagctacatattctcggtactaagatttatttttctgacacaaaatgaccatttggcgttacataatcccaaaaaaacgtatcaaaaatctcaaaatgcgttacgattagagagtattttgattctgcgtgctcattttttgattgctgtggctttttgttgtgggagtgttgaatggattatttatcagaagtgttaa

SEQ ID NO: 9544 - DNA, 432 bp, Escherichia coli
atggcaaaagtatttacacaagaagagcgggaaaaaattaaagggcaggttgttgagctagtacgccggagtggacgcgagacgttacgacaactggaggccaagacaggtgcgacaagatatctgatgagcgttctcgccagagagctggttgccagtggcgatgtatacaactctggttacgggttattcccgtctgaacaggctcgtaaggactggcaaaatgcccgcaaaaaactatccagggcaaaggtgaagaaaccatctgtggttgatccggaccttatctggtcattaccagacggagaaatacgccgctacgacaggcgtctgaacataatctgtcgcgagtgccggaagagtgaagttatgcagcgtgtgctggcgttttatcagaatggttttcgagagaggcttggagatcagggatga

SEQ ID NO: 9545 - DNA, 762 bp, Escherichia coli
atggagactgtttttgacgcactgaaagcaatgggaaaagccacgtcggtagaactggctgcgcgacttgatatcagtcgtgaagaggtactgaacgagctgtgggagctgaaaaaggctggtttcgttgataaaagcgtatacacctggcgtgtggctgataacaacgttcagcaggaacagccagagcaggcagaaccgccggaagaaaccaccacggcaacagtcgcgaaaatttcggagtgcgatttaactgcgacgattgaacaacgtggaccacaaacggcggatgagttggctacatggttcggtaccacatcacgcaaagtggcttcaacgctggcaatggcaatcagcaaaggtcgtctgattcgcgttaatcagaacggtaaatttcgttactgcataccgggcgataatttaccagcaaagccgaaagctgcatcggtaacggaaactgattttaaagcctttcctcagccagcagatgttgcgttaccagtacaggaagctgcaacacaggaagatattaaaacagaaactgtggcggacattgtgcagtcgctgccatcgtttactgaaacgcgagctgatgacctgattttgccatcgctgcatatggcaaaccgcgaactgcgtcgggcgaaaaatcatgtccagaagtgggagcgagtctgcgccgcgctgcgggagctgaacaagcaccgggatattgttcgacagattgctgattcttcccgccgtgttgtatcggaaaagtga

SEQ ID NO: 9546 - DNA, 747 bp, Escherichia coli
atgaaaaatattgcgacaggcgacgttcttgaacgtatccgcagactggccccgtcacatgtaaccgcgccattcaagacggtagcggagtggcgcgagtggcaactttccgaaggccagaaacgttgtgaggagatcaaccgtcagaatcgtcagttgcgggtggaaaaaattctgaatcgctctggcatccagccattgcaccgcaaatgctcgttttcgaattaccaggtgcagaacgaagcgcagcgatacgcgttgagtcaggcgaaatccatcgctgatgaactgatgaccgggtgtacaaattttgcgttcagcggaaaacctggtaccgggaagaaccacttagcggcagctatcgggaatcgcctgctgaaagacggtcagacagtgattgtggttaccgtggctgatgttatgagtgccctgcacgccagctatgacgatgggcagtcaggcgaaaaatttttgcgggaactgtgcgaagtggatctgctggttcttgatgaaattggcattcagcgcgagacaaaaaacgagcaggtggtgctgcaccagattgttgatcgccggacagcgtcgatgcgcagcgtggggatgctgacaaacctgaactatgaggccatgaaaacattgctcggcgagcggattatggatcgcatgaccatgaacggcggacgctgggtgaattttaactgggagagctggcgtccgaatgtcgtccagccaggaattgcgaagtga

SEQ ID NO: 9547 - DNA, 858 bp, Escherichia coli
atgctgtttgtgcttattctaagccaccgggcagcatcatacggggcaattatggccgcattaccatacatgcaactgtacatagctgattacctggctgacaccatgcatttgtcagcagaggagcatggtgcgtatttgttgctgatgttcaattactggcaaacaggaaagccaatacctaaaaacaggctggcaaaaattgcccgtctgactaacgagcgatgggctgatgttgaaccatccttgcaggagtttttttgcgataacggcgaggaatgggtgcatcttcggattgcggaagatctggcatcagtcagggaaaaattaaccaaaaaatcagccgcaggaaaagcatctgttcaggccagaagaagcagaaaggaagcagatgttcaaacaaaacaagagagaaatttaacaggtgttcaaacagatgttgaagtggtgtttgaacatgatgtcaacacaaaggcaactaataaagatacagataaagatctaaaaacagatccccccctaaatcccccccgggggaatcgaggtgtcaaaaagtttgaccctctggatattgctttgccgaactggatttctgtctcgctttggcgtgagtgggttgaatttcgccaggcattgcgaaaaccgattcgaacggagcagggcgctaacggggcgatacgggagctggaaaaattccgccagcagggtttttcacctgagcaggtgattagacacagcatcgccaatgaataccagggcttgttcgcgccgaaaggtgttcgacctgagacgttactccgacaggttaacaccgtctcgttaccggatagtgcgatcccgccaggcttcagggggtaa

SEQ ID NO: 9548 - DNA, 423 bp, Escherichia coli
atgaaaatcaagcatgagcacatcgaatcggtgttgtttgccctggcagccgaaaaagggcaggcatgggtagccaatgcaattactgaagaatatctgcgccaggggggcggcgaattgcccctggttccaggcaaggactggaacaatcagcagaatatctatcaccgttggttgaaaggtgaaacgaatgcgcaaagggaaaaaattcagaagctgatcccagcaattctggcaatccttccgcgcgagctgcgtcaccgactctgcatcttcgataccctggaacgccgtgcattactggcggcgcaggaagcgttaagtacggcaattgatgcgcatgatgatgcagtccaagccgtttaccggaaagcgcatttcagcggcggcgggtcttccgacgattctgtcattgttcattaa

SEQ ID NO: 9549 - DNA, 297 bp, Escherichia coli
atgaaaaaagagaactattcattcaagcaagcttgtgctgttgtcggtgggcaaacagcaatggctaggcttttaggtgtatcacctccaagcgtaaatcaatggatcaaaggggtacgtcaattgcctgccgagagatgtccagcaattgaacgtgcaacaagaggtgaggtgctgtgcgaagaacttcgtcctgatattgactggtcatatttacgacgttcggcatgttgttcgcagaatatgtcagtgaagcaactaaatgacagtaacaaatcctcatttgatcatacctga

SEQ ID NO: 9550 - DNA, 477 bp, Escherichia coli
atgcttagtggtaaagacttaggccgagcgatagagcaggccattaacaaaaaaatcgcatcgggatccgtcaaatcaaaggcggaggtcgcacgccacttcaaagtccaaccaccatcaatctatgactggattaagaaaggctccataagtaaagataaacttccagaattatggcgtttctttgctgatgttgttggtccagagcattgggggcttaacgaataccccataccaacccccaccaatccagatacaaaaagtgaacttttagatataaacaacctttatcaagcagcctctgatgaaataagagcgattgtagctttcctgttatctggaaatgctacagaaccagattgggttgaccacgatgttcgcgcctacatagcagcgatggaaatgaaagtgggtaagtatctgaaagctctagaatctgaacggaaaagccagaacatcacaaaaactggaacttaa

SEQ ID NO: 9551 - DNA, 135 bp, Escherichia coli
atggtgcattacgaagtagttcagtatttgatggattgttgcggtatcacttacagccaggctgtgcaggctttacgtagcaacgactgggatctctggcaagcagaagcctctatccgcaacaacaagatgtga

SEQ ID NO: 9552 - DNA, 153 bp, Escherichia coli
atgcaaaaaatcgacctcggcaataacgaatccatggtgtgcggcgtgttccctaaccaagatggaacgttcactgctatgacgtataccaaaagcaaaacatttaaaacagaaacaggcgcacgtcgctggcttgccagaaatacttgctaa

SEQ ID NO: 9553 - DNA, 222 bp, Escherichia coli
atgattgcacatcacttcggaactgatgaaataccacgtcagtgtgtgactcctggtgactatgttcttcatgaaggccggacatatattgcctcggcaaacaatattaaaaagcgaaaactttatattcgtaacctgaccacaaaaacatgcattactgactgcatgattaaagtcttcctcggtcgtaatggtttacctgtaaaggcggagtcatggtga

SEQ ID NO: 9554 - DNA, 171 bp, Escherichia coli
atgactaagaaaataaaatgtgcttaccacctttgcaataaagaaattgaagaaagcaaaagtatcaaaagaccacttcatttcatgcgtggagttatccaaacgacggaaatgaaaaaatattgtagtgaaagttgtgccgaaaaagaccagatggcacacgaactttaa

SEQ ID NO: 9555 - DNA, 276 bp, Escherichia coli
atgattaccagttatgaagccactgttgtaactactgatgacattgttcacgaggttaatctggaaggaaagcgtattggctacgtgattaaaacagaaaataaagaaaccccattcactgtggttgatatcgacggtccatcaggcaacgttaaaacacttcacgaaggtgtcaaaaaaatgtgcctggtgcataccggaaagaatctgcccgcagaaaaaaaagccgaatttctggcaactctaattgcaatgaaattaaaaggtgaaatctga

SEQ ID NO: 9556 - DNA, 2652 bp, Escherichia coli
atgagcacaaaaccactcttcctgttacggaaagcgaaaaaatcatccggtgaacctgacgtcgtcctgtgggcaagcgacgattttgaatcgacctgtgccactctggactacctgatcgttaagtcaggtaaaaaactgagcaactattttaaagctgttgccacaaattttcctgtcgttaatgaccttccccctgaaggtgagatcgattttacctggagtgaacgctatcaactcagcaaagactccatgacatgggaactaaaaccgggagcagcgccagacgacgttcaccaccaggataatgctcaagaaaccaacgaactggcgggaggccaggaagaaaacgcgcaggcagacgcccacgaggattgccaggattgcgaagtctctgtagccactttgcggttcacacagcgtcttctgcacatttttacgtatgcggccggggatcggaaatacctgcatcatgccacccgagaacaacgcgaacacattactgctcttgagatggatcaggaaaacagctatgtccagaatctgctgttggccatacgcggcatggcagaaccgacaactctggataatgccgccctgctccgcctgactgatgcaattaaggcagttttctctatcactaaaaaacatcagccctatgaatttaagaatttcatttcagcctggctggataccgaacacattgatcgcggtcttctgacaaaagaatggcgaaaagggaatcgtgtttcacgcatcactcgcacggcttccggtgctaatgctggcggcgggaacctcacagatcgcggcgaaggtttcgtccacgatctgacgtcactggcgcgcgatatagccactggcgtactggcccgttcaatggacgtggacatctataaccttcatccggcacacgctaaacgcattgaggaaattatcgctgaaaataaaccgcccttttctgttttccgcgacaaattcatcaccatgcctggcgggctggattattcccgcgccatcgtggttgcgtccgtgaaagaagcaccaattgggatcgaggtcatccccgctcacgtcactgcatatctgaacaaagtactgactgaaaccgatcatgccaaccctgatccggaaatcgtggatattgcctgcggtcgctcctctgccccgatgccgcagcgagtaacagaagaaggaaaacaggatgatgaagaaaaactgcaaccatctggaacaacggcagatgaacagggagaggctgaaacaatggaaccggacgcaactaaacatcatcaggacacgcagccgctggatgctcagtcacaggtaaattctgttgatgcgaaatatcaagaactgcgggcagaactccatgaagctcggaaaaacattccatcaaaaaatcctgtcgatgccgataaattgcttgctgcatcacgtggtgaatttgttgacggaattagcgacccgaacgatccgaaatgggttaaggggatccagactcgcgattctgtgtaccagaaccagccagaaacggaaaaaaccagcccggatatgaaacaacctgagccagtagtgcaacaggaaccggaaatagccttcaatgcctgcggccagactggcggggataactgccctgactgtggtgcggtgatgggcgacgcaacaaaccaggaaacattcgatgaagagaatcaggttgaagctaaggaaaatgatccggaggaaatggaaggcgctgaacatccgcacaatgagaatgctggcagcgatccgcatcgcgattgcagtgatgaaactggcgaagtcgcagatcccgtaatcgtagaagacatagagccaggtatttattacggaatttcgaatgagaattaccacgcaggtcccggtgtcagtaagtctcagctcgatgacattgctgatactccggcactgtatttgtggcgtaaaaatgcccccgtggacaccacaaagacaaaaacgctcgatttaggaaccgctttccactgccgggtacttgaaccggaagaattcagtaaccgctttatcgtagcacctgaatttaaccgccgtacaaacgccggaaaagaagaagagaaagcgtttctgatggaatgcgcaagcacaggaaaaatggttatcactgcggaagaaggccggaaaattgaactgatgtatcaaagcgttatggctttgccgctggggcaatggcttgttgaaagcgccggacacgctgaatcatcaatttactgggaagatcctgaaacaggaattttgtgtcggtgccgtccggacaaaattatccctgaatttcactggatcatggacgtgaaaactacggcggatattcaacgattcaaaaccgcttattacgactaccgctatcacgttcaggatgcattctacagtgacggttatgaagcacagtttggagtgcagccaactttcgtttttctggttgccagcacaactattgaatgcggacgttatccggttgaaattttcatgatgggcgaagaagcaaaactagcaggtcagctggaatatcaccgcaatctgcgaaccctggctgactgcctcaataccgatgaatggccagctattaagacgttatcactgccccgctgggctaaggaatatgcaaatgactaa

SEQ ID NO: 9557 - DNA, 810 bp, Escherichia coli
atgactaagcaaccaccaatcgcaaaagccgatctgcaaaaaactcaggaaaaccgtgcaccagcagcaattaaaaataacgacgtgattagttttattaaccagccatcaatgaaagagcaactggcagcagctcttccacgccatatgacggctgaacgtatgatccgtatcgccaccacagaaattcgtaaagttccggcgttaggaaactgtgacactatgagttttgtcagtgcaatcgtacagtgttcacagctcggacttgagccaggtagcgccctcggtcatgcatatttactgccttttggtaataaaaacgaaaagagcggtaaaaaaaacgttcagctaatcattggctatcgcggcatgattgatctggctcgccgttcaggtcaaatcgccagcctgtcagcccgtgttgtccgtgaaggtgacgaatttaatttcgaatttggccttgatgaaaagttaatacaccgcccaggagaaaacgaagatgccccggttacccacgtctatgctgtcgcaagactgaaagacggaggtactcagtttgaagttatgacgcgcagacagattgagctggtgcgcagccagagtaaagctggtaataacgggccgtgggtaactcactgggaagaaatggcaaagaaaacagctattcgtcgcctgttcaaatatctgcccgtatcaattgagatccagcgtgcagtatcaatggatgaaaaggaaccactgacaatcgatcctgcagattcctctgtattaaccggggaatacagtgtaatcgataattcagaggaataa

SEQ ID NO: 9558 - DNA, 189 bp, Escherichia coli
atgtataaaattaccgccactattgaaaaggaaggtggcactcctactaactggacaagatattcaaaatctaaactaacgaaatcagaatgcgaaaaaatgctctcaggtaaaaaagaagcagccgtttccagagagcagaaagtaaaactgataaattttaattgcgagagacttcagtcctcgtga

SEQ ID NO: 9559 - DNA, 216 bp, Escherichia coli
atggcacaagtaatctttaatgaagagtggatggttgaatacggcctgatgcttcgcactggtctgggggccagacaaattgaagcataccgccagaactgttgggtggaaggcttccacttcaaacgagtatctcctttagggaagccagacagtaagcgagggattatctggtacaactatccaaagataaatcagtttatcaaagactcatga

SEQ ID NO: 9560 - DNA, 1236 bp, Escherichia coli
atgtctaaattaccaacaggtgtcgagattagaggtagatacattcgcatctggttcatgtttcgaggaaaacgatgtcgggaaacattaaaaggctgggagattacaaacagtaatattaaaaaggccggaaatttaagatcgctgatagttcatgaaataaactccggtgaatttgagtatttaagacgttttccccagtccagcactggggcaaaaatggtgacaacgagagtcataaaaacgttcggagaactttgtgatatctggacaaaaattaaagagacagagttaacaacaaacacaatgaagaaaacgaaatcacaattaaaaacactcagaataataatttgtgaaagtaccccgatatcacatattcgttatagcgatatcttaatctaccggaatgaactgctgcatggagaaacgctttacctggataatccaagatccaacaaaaaaggaagaaccgtgcgcacagttgataactatatcgccctgctctgttcgctgttgcgttttgcgtatcagtcgggatttatatcaaccaaaccatttgaaggagtaaaaaaattacagcgaaacagaataaagcctgatccgttatctaaaacagaattcaatgcattaatggaaagtgaaaaaggacagagccagaacttgtggaaatttgccgtttactcaggacttcgtcacggggaactggcagctctggcgtgggaggatgtggatctcgaaaagggaatagtgaatgtcagaagaaacctgacgatacttgatatgttcggtcccccaaaaacaaatgccgggatccggacagtaacactactgcagcctgctcttgaagcactgaaggagcaatacaaactgaccgggcatcatcgcaaaagcgaaatcactttttatcatcgggagtacggcagaaccgaaaagcaaaaactgcattttgttttcatgcccagagtgtgtaacggaaaacagaaaccttattactcggtaagcagtttgggtgcgagatggaatgcagcagtaaaacgtgctggtattcgccgccgtaatccgtaccatacgcggcatacttttgcctgctggctgttgacggcaggagcgaacccggcgtttatagccagccagatggggcatgaaactgcgcagatggtgtatgaaatttacggtatgtggattgatgacatgaacgacgaacaggtagccatgttgaatgcgcggttatcgtag

SEQ ID NO: 9561 - DNA, 1374 bp, Escherichia coli
gtgaccgctttttctaccctgaatgttttgcctcccgcccaactcacgaaccttaatgagttgggttatttaactatgacgccggtgcaggccgccgcgcttccggcgatccttgccggaaaagatgttcgcgtgcaggcgaaaaccggcagcggcaaaacggcggcttttggcctcggcttgttacagcaaattgatgcgtcgctatttcaaacccaggctttagtgctgtgtcctacgcgtgaactggcggatcaggtggcaggtgaattgcgtcggttggcgcgttttctgccaaataccaaaattttgacgttgtgcggtggtcaaccgttcggtatgcagcgtgattcgttgcaacatgcgccgcatattatcgtggcaacgccgggccgtttgttggatcatctgcaaaaaggcacggtatcactggatgcgttgaatacgctggtgatggatgaggccgaccgcatgctggatatgggatttagcgacgccattgatgatgtcatccgttttgcgccagcatctcgacagacgcttctgttttcggcaacctggccggaagccatcgccgcaatcagcggacgagtgcaacgcgatcctttagcgattgaaattgactcaacagatgctctgccacctattgaacaacaattttatgagacatccagcaaaggcaaaattccgttgttgcaacggttattaagtttgcatcagccatcctcttgcgtggtgttttgcaataccaaaaaagattgccaggctgtctgcgacgcgctgaatgaagtagggcaaagtgcattgtcgttacacggcgatctggagcaacgtgatcgcgatcagaccctggtacgttttgctaacggtagcgcccgtgtactggttgcgactgatgttgctgcgcgaggtctggatattaaatcgcttgagctggtggtgaactttgagctggcgtgggatcctgaagttcatgtgcatcgcatcggtcgtacagcgcgtgcaggaaatagcggtctggcgatcagtttctgtgccccggaagaagcacagcgggccaatatcatttctgacatgttgcagataaaacttaactggcaaacgccgccagttaatagttctattgtgccgctggaaaccgaaatggcaacgttatgtatcgatggcgggaaaaaagccaaaatgcgcccgggtgatgtattaggtgcgctgacaggagatatcgggcttgatggcgcagatattggcaaaatcgccgtgcatccggcgcatgtctatgtcgcggtgcgtcaggctgttgctcataaagcatggaaacagttacagggcgggaggattaaaggaaaaacgtgccgggtgcggttattaaaataa

SEQ ID NO: 9562 - DNA, 1512 bp, Escherichia coli
atgtctatgcgtaaacatattgctttcgccagtatgtgtatgggattatttattgctcagcttgatattcaaattgtatcgtcatccctaaatgaaataggtggtggtctgtccgcaggtaaagacgaaatggcctggcttcagaccagctatttaattgctgagattattgttattccgctctctgggtggctgtcacgggtattttccactcgttggctttttactctatccgcgggaatatttactttaatgagtatcgcgtgtggacttgcatggaatattcagatcatgattttgtttcgtgctttacagggagcggctggcgcatccatgatccctttagttttcacgacggcgtttatttattaccagggtaaagagttggggttggctgctgcggtagtcagtgcgctggcctcactgtcaccgacgctagggccaactctggggggctggatcactgataacctcgactggcgatggctattttatatcaatatattacctggcatatatttagttttgagtattccttttctggttaattttgataaacctgatctctctttactgaaagttgctgattatccgagtattatcctgttggccatgacactgggatgtctggaatatactcttgaagaaggagcgcgctggggatggctggatgataatactattttgctgacatcagttctggcattggtgagttttattttatttgctgcgcgtacacttacaatatccaatccgataatggatcttcatgcttttaaggataaaaatttcacgctgggatgttttttttctttttctggaggggttgggatattctctactgtatatttaatacctgtgtttttggggcaggttcgcggattaaatgccgaagagataggttttgccgtttgcacaacaggtattttccagttattttctgttcccttttacttctggttaagtaaaaaaataaatctgcgatggctgttgatggcggggctgggtggatttgtgttttcaatgtatctttttacccctataacccacgaatggggatggcaggagttactgtttccacaggcaattagagggatttcgcagcagtttgcgatggcccccatcgtaacattaacgctgggaggaattccaaaagaacggctgaagttagcctctggtgtatttaatttaacacgtaatcttgggggcgcgattggtattgccctgtgtggctctattctcaataatcgaactaattttcatttttcgagaatgggtgaaaaaatggtttctgttccccatacggtgaatgacttcatttccagaagtgctttgttttttgatcgcagtggaagtgaccagacatcggaaatactggcttcaaccaaattattgagtcaattgatgctgagggaggcgcaaactatggcattttcggatacctttctgctaatcagtggtctgttatttatcgcatttttgttggttcctgctatgaataaatcatcctga

SEQ ID NO: 9563 - DNA, 1446 bp, Escherichia coli
atgcaggaaatctatcgttttatcgacgatgcgattgaagccgatcgccaacgttataccgatattgccgatcaaatctgggatcatccagaaacacgttttgaagagttctggtcagcggagcatctggcttcggcgctggagtctgcaggcttcaccgttacccgcaacgtaggcaatatcccaaatgcctttattgcttcgtttggtcaaggcaaaccggttatcgccctgctgggggaatatgacgccctggcaggtttaagtcagcaagcaagttgcgcgcaacctacatccgcgacgcccggtgaaaatggtcacggttgcggacacaatttgctgggaaccgccgcctttgccgctgcaatagccgtcaagaaatggctggaacaatatgggcaaggcggcacggtgcgcttttatggttgtcctggcgaagaaggcggctcgggtaaaacgttcatggtccgcgagggggtatttgatgatgtggatgcggcactcacctggcacccggaagcctttgccggtatgttcaatacccgcacgctggcaaacattcaggcatcatggcgctttaaagggatcgcagcacatgccgcgaattcccctcatttgggacgcagcgcccttgatgccgtaacgttgatgaccactggcaccaacttcctcaacgaacatattattgaaaaagcgcgcgtacactatgccatcacagatagcggcgggatctcgcccaacgtggtccaggcgcaggcagaagtgctttatcttatccgcgcccccgaaatgaccgatgtgcagcatatttatgatcgggtcgccaaaatcgccgaaggtgcggcattgatgaccgaaaccacggttgaatgccgcttcgacaaagcctgttccagttatctcccgaatcgcaccttagaaaatgccatgtaccgagccctatcccattttggtaccccggaatggaactgcgaagaactggcttttgcgaaacaaattcaggctacgctcacccccaacgatcggcaaaacagtctgaataatatcgctgcaaccggtggcgaaaacggcaaggcttttgcactacgtcatcgtgaaacggtactggcgaatgaagtcgctccatatgccgccaccgataacgtgcttgcggcatcgactgatgtcggcgacgtcagttggaaactgcctgttgcccagtgtttcagcccctgctttgccgttggtaccccgctacatacgtggcaactggttagccaggggcgaacatctattgctcataaaggaatgctgctggcggcgaaaactatggcagcaaccacacttaatctcttcattgattcagggctattgcaagaatgccaacaagagcatcagcaagttacggacacgcaaccgtatcactgccctatcccgaaaaacgtgacaccgtcacctttaaaataa

SEQ ID NO: 9564 - DNA, 1527 bp, Escherichia coli
atgagtatgtcatccataccgtcgtcctcccaatccgggaagctctatggctgggtcgaaagaattggtaacaaggttccccatccttttttgctctttatctatttgattatcgtactcatggtgacgacggcaattttgtcggcctttggcgtcagtgcaaaaaacccgaccgatggtacgccggtggtggtgaaaaacctgctcagtgtggaaggattacactggtttttacccaatgttattaaaaactttagcggttttgctccacttggtgcgatcctggcgctggttttaggtgccggtctggcggagcgcgtcggcttactaccagcgctaatggttaaaatggcatcgcatgttaatgcccgctacgccagttatatggtgctgtttattgcttttttcagccacatttcttccgatgcggcgttagtgatcatgccaccgatgggtgcgctaatttttctggcggtgggcaggcatccagttgcaggtttacttgccgccattgcaggcgtaggttgcggctttacggctaatttactgattgtcacaaccgacgtgttgctgtcggggatcagcacggaggctgcggctgcgttcaatccgcaaatgcacgtcagtgtaattgataactggtattttatggccagctccgtagtcgtactgacgattgttggcggcctgataaccgacaaaatcattgagccacgtttaggtcaatggcagggaaacagcgatgagaaactgcagacattgaccgaaagtcagcgttttggtttacgcatagcaggtgtcgtatcgctactttttattgctgcgattgcgctgatggtgatcccggaaaacgggatattgcgcgatccgattaatcacaccgtgatgccatccccctttattaaaggtatcgtgccactgatcattctttttttctttgtggtctcgctggcttatggcatcgctacccgcacaattcgacgtcaggcggatttaccgcatttaatgattgaaccgatgaaagagatggcgggatttatcgtgatggtttttcccctcgcccagtttgtcgccatgtttaactggagcaacatggggaaattcatcgccgtggggctgaccgatatactggaaagttcagggcttagcggcatcccggcgtttgtcggtctggcgttgctttcctctttcttatgcatgtttatcgccagcggttccgcaatctggtcgattctggcccccattttcgtaccgatgtttatgctacttggctttcacccggcatttgcgcaaatcctctttcgtattgccgactcatccgtattgcctttagcgccagtatctccttttgttccactgtttcttggattcctgcaacgctacaaaccagacgcgaaactgggtacttactattcgttagttttgccctatccacttatctttttggtggtatggctgctgatgttgctggcgtggtatcttgtcggtctgccgataggtccggggatttacccacgtttgtcttaa

SEQ ID NO: 9565 - DNA, 1542 bp, Escherichia coli
atgcgtctggaagtcttttgtgaagaccgactcggtctgacccgcgaattactcgatctactcgtgctaagaggcattgatttacgcggtattgagattgatcccattgggcgaatctacctcaattttgctgaactggagtttgagagtttcagcagtctgatggccgaaatacgccgtattgcaggtgttaccgatgtgcgtactgtcccgtggatgccttccgagcgtgagcatctggcgttgagcgcgttactggaggcattgcctgaacctgtgctctctgtcgatatgaaaagcaaagtggatatggcgaacccggcgagctgtcagctttttgggcaaaaattggatcgcctgcgcaaccataccgccgcacaattgattaacggctttaattttttacgctggctggaaagcgaaccgcaggattcccataacgagcatgtcgttattaatggacagaatttcctgatggagattacgcctgtttatcttcaggatgaaaatgatcaacacgtcctgaccggtgcggtggtgatgttgcgatcaacgattcgtatgggccgtcagttgcaaaatgtcgccgcccaggacgtcagcgcctttagtcaaattgtcgccgtcagcccgaaaatgaagcatgttgtcgaacaggcgcagaaactggcgatgctaagcgcgccattgctgataaccggtgataccggcaccggaaaagatctctttgcgtatgcctgtcatcaggcaagcccacgcgcgggcaaaccctatctggcgctgaactgtgcttctatcccggaagatgcggtcgagagtgaactgtttggtcatgctccggaagggaagaaagggttctttgagcaggcgaacggtggttcggtactgctggatgaaataggtgagatgtcaccacggatgcaggcgaaattactgcgtttccttaatgatggcactttccgtcgggttggcgaagaccatgaggtgcatgtcgatgtgcgggtgatttgcgctacgcagaagaatctggtcgaactggtgcaaaaaggcgtgttccgtgaagatctctattatcgtctgaacgtgttgacgctcaatctgccgccgctacgtgactgtccgcaggacatcatgccgttaaccgagctgttcgtcgcccgctttgccgacgagcagggcgtgccgcgtccgaaactggccgctgacctgaatactgtacttacgcgttatgcgtggccgggaaatgtgcggcagttaaagaacgctatttatcgcgcactgacacaactggacggttatgagctgcgtccacaggatattttgttaccggattatgacgccacaacggtagccgtgggcgaagatgcgatggaaggttcgctggacgaaatcaccagccgttttgaacgctcggtattaacccagctttatcgcaattatcccagcacgcgcaaactggcaaaacgcctgggcgtttcgcataccgcgattgccaataagttgcgggaatatggtctgagtcagaagaagaacgaagagtaa

SEQ ID NO: 9566 - DNA, 534 bp, Escherichia coli
atgcgtcaaaatcgattcagtaagatgcatttcgatacccaacagatgatcgattttattaacagatttaatatgaataaatggctgattgatcaaaataacaatttttttatccaacttatcgatcaggctctacgatcaacgaatgatacgatcaaagaaaatgcctggcatctttataaagagtggattcgtagtgatgatgtttcacctttatttatagaaattgaagataatttaagaacctttaacacgaatgaattaacacgaaacgataatatctttatcctgttctcctctgtctatgatgggccagttatggtggtaagctcccagcgcttacatgatatgttgaatcctacaaaagataccaattggaattccacgtatatctacaaatccagacatgagatgttgcctgttaatcttactccggaaacacttttcggcaccaaatctcaggataaacatgctcttttcccaatttttactgcgagttggcgagctaatcgtataaagaataaaggtatttaa

SEQ ID NO: 9567 - DNA, 963 bp, Escherichia coli
atgttgaagataatacccggtgcaactggatactttaataaaacactcaattcaaatcaattcgataatgaagatgcaatcaaaggtaaagtaaatagtatatatggtaaatctattgattattcagcgatgcgtcatcgggatataattattgcaaaaatagatttgtttattcaaagaatcactcataatttatggactgcacgtgaaaaaaatgtgacgttaattaagcaaataaatgatctcaaaatgtgtgtcaatgagtatattggagattgtactgatgaggaattaaacgatcgtgaatttattgcatcagttgttgaccgggctatttttcatttcgcgattaatagtatatgtaatcccgaggataataaagatgcgacgcccatagaacgatgtacttttgacgtagaaactaagaatggccttccctccacggttcagcttttttatgaggaatctaaagataatgaacctttagcgaatatacatttgcaagcaataggttctggttttttaacgtttgttaatgcatgtcaggaatatgatgacaacagcttaaaattattcgcttcgctgttaatttcactttcatattctagtgcctacgtagatttagcaggagcagaaagagtgaagattaatgaatataatgagaactatctgacagctcagtttgaagaattatctcaacgtgatatgaagaagtacctgggagagatgaagcgtctggcagatgggggagaaatgaattttgatgactatctggataaaatgtcacttctggtgaatgaaggaaagctcgaacctgatattttaagcaaaatgcgagatgctgcaccgaaattaattgactttgctaagtcgtttgacccaaactcaaaggaaaagattaaaatacttacagacacttctaaattaatttatgatttattcggggttaaatcggagaaataa

SEQ ID NO: 9568 - DNA, 1587 bp, Escherichia coli
atgagtcatcgtgcacgacaccaattactggcgttgccgggcattatctttttagttctctttcccatcatactgtcgctatggattgccttcctttgggcaaaatcagaagtgaatagtcagctccaaacttttgctcagctggcgctggataaatccgagctggtcattcgccaggcagatttagtgagcgatgcagcagaacgctatcaggggcaagtttgcactccagcccatcaaaagcgaatgttgaatattattcgtggctatctttatattaatgaattgatctatgcccgtgataaccattttttatgctcatcgctgatagcgcctgtaaacggctatacgattgcaccggccgattataagcgtgaacctaacgtttctatctattattaccgcgatacgccttttttctctggctataaaatgacctatatgcagcggggaaattatgtggtggtcatcaaccctctcttctggagtgaagtgatgtctgatgatccgacattgcaatggggtgtgtatgatacggtaacgaaaacctttttctcgttaagcaacgaggcctcggcagcaacgttttctccactgattcatttgaatgatttaaccgtacaaagaaatggctatttatatgcgacagtttattcgacaaaacgcccaattgcagccattgttgcgacttcatatcaacgtcttatagcgcatttttataatcatcttatttttgcgttacccgccggtattttggggagtcttgttctgttattactctggctacgtattcggcaaaactatttgtctcccaaacgcaaattgcaacgcgccctcgaaaaacatcaactttgcctttattaccagccaataatcgatatcaaaacagaaaaatgtatcggcgctgaagcattgttacgttggcctggtgagcaggggcaagtaatgaatccggcagagtttattccgctggcagaaaaggaggggatgatcggacaggtaactgattatgttattgataatgtcttccgcgatctgggcgcgtacctggcaacacatgccgatcgctatgtttctattaacctgtcggcctccgattttcatacgtcacggttgatagcgcgaaccaatcagaaaacagagcaatacgcggtgcgtccacagcaaattaaatttgaagtgactgaacatgcatttcttgatgtcgacaaaatgacaccaattattctggcgttccgccaggctggttacgaagtggcaattgatgattttggtattggctactctaacttgcataaccttaaatcattgaatgtcgatattttgaaaatcgataaatcgtttgttgagacgctgaccacccacaaaaccagtcatttgattgcggaacacatcatcgagctggcgcacagtctggggttaaaaacgatcgctgaaggcgtcgaaactgaggagcaggttaactggctgcgcaaacgcggcgtgcgctattgtcagggatggttctttgcgaaggcgatgccgccgcaggtgtttatgcaatggatggagcaattacccgcgcgggagttaacgcgcgggcaataa

SEQ ID NO: 9569 - DNA, 1293 bp, Escherichia coli
atgtgctacaatggtttaaataatatgtttttccctctttgccagattaacaataaccactctgtcacaagtccatcacatacaaagaaaacaaaatcagataattacagaaaacatcataaaaacacgttaattgacaataaagccctctctcttttcaaaatagatgatcatgaaaaagtgataggcttgattcagaaaatgaaaagattttatgatagtttaccatcaggaaaaatcacgaaagaaacggacaggaaaatacataaatattttatagatatagcttcacatgcaaataataaatgtgacgatagaattacgagaagagtttaccttaataaagataaggaagtgtccattaaggtagtatattttataaacaatgtcaccgtccataataatactatcgaaatcccacagacagtaaatggtggttacgatttttcacaccttagcctgaaaggtatcgtgattaaagatgaagatttatccaattcaaattttgcaggttgcagactacaaaacgctattttccaggactgtaatatgtataaaacgaattttaatttcgccataatggaaaaaatactttttgataattgtattctcgatgactcaaatttcgctcagataaaaatgactgacggaactctaaattcatgctccgctatccatgttcaattctacaatgcagcaatgaatagagccaatattaaaaataccttccttgactattcaaatttttatatggcgtacatggttgaggtaaatttttataaagtaatagcgccgtatgttaatttatttagagccgatcttagtttctctaaactcgatttaattaactttgaacatgctgatctgtctcgcgtcaatctgaacaaagcaactctccagaatataaacttaattgatagcaaactcttttttacgcggctgacaaatacattccttgaaatggttatatgtaccggctctaatatggctaatgttaattttaataatgccaatttaagcaattgccatttcaactgttctattttaacaaaagcctggatgtttaatacccgtctctatcgggttaatttcgatgaggctaacgtgcagggaatgggcatttccattctccgtgaggaggaaaatatccccattaatagtgataccctgataacactacagaaattctttgaagaagattgtacctctcatactggcatgtcacaaactgaggataatattcatgcagtcgctatgaagattactgcagatattatgcgagatgcagattga

SEQ ID NO: 9570 - DNA, 2052 bp, Escherichia coli
atgagcgcgctcaactccctgccattaccggtggtcaggctgctggcgttctttcatgaagagttaagcgagcggcggccaggtcgtgtgccgcagaccgtgcaactctgggtaggctgcctactggtgattctgatctcgatgacttttgagatcccttttgtggcgttatcgctggcagtgctgttttacggtattcagtcgaacgcgttttacaccaaatttgtggcgatcttgtttgtggttgccacggtgctggagatcggcagcctgtttttgatctacaaatggtcatacggcgaaccgttgatccgattgatcatcgccgggccgatcctgatgggctgcatgtttttgatgcgcacccatcggctgggactggtctttttcgctgtcgccattgtcgccatttacgggcaaaccttccccgccatgctcgactatccggaagtggtcgtgcgcttaaccctgtggtgtatcgttgtcggcctctacccgacgttattgatgacgttaatcggcgtgctgtggtttcccagccgcgctatcacgcagatgcatcaggcgcttaatgatcggcttgatgatgccattagccacctgacgaacagcctcacaccgctacccgaaacgcggattgaaagagaggcgctggcgctgcaaaaactgaatgtattttgtctcgcggacgatgccaactggcgaactcagagcgcatggtggcaaagctgcgtggcaacggtaacctacatttactcgacgctgaatcgctacgatcccacctcttttgctgattctcaggcaattattgaatttcggcaaaaattagcctcagaaatcaacaaactgcagcatgccattgccgaaggtcagtgctggcaaagcgactggcggatcactgaaagtgaagcgatggcggcacgggaatgtaacctggagaatatctgccagacgttattgcaactgggtcagatggacccgaatacgccgccaacgcccgccaccaaaccgccatcaatggtcgccgacgcttttaccaatccagactatatgcgctacgcggtaaaaacgctgctcgcctgtttgatctgttacaccttctacagcggcgtggactgggaaggcattcacacctgtatgctgacctgcgtgatcgtcgctaacccgaatgttggttcgtcgtatcagaaaatggcgctgcgttttggcggtgccttctgcggtgcaattctggcgctgttattcacgttactggtcatgccctggctggacaatattgtcgaattgctatttgtgctggcaccgatttttctgttgggcgcatggattgccaccagctctgaacgctcttcttatatcggcacacagatggtggtcaccttcgcgctcgccacgctcgaaaacgtttttggcccggtgtacgacctggtggaaattcgcgatcgcgccctgggtatcatcattggtaccgtggtgtccgcggtgatttacacctttgtctggcctgaaagtgaagcgcgcacactgccgcaaaaactggctggcgcgctgggtatgttgagtaaagtaatgcggatcccacgccagcaggaagtcacagctctgcgcacttatttgcaaattcgtataggtctgcatgcggcgtttaatgcctgtgaagagatgtgccaacgcgtggcgttggagcgtcaactggacagcgaagaacgcgctttactgattgaacgttcgcaaacggttattcgtcagggccgcgatattcttcacgcctgggatgcaacctggaactcggcgcaggcgctggataacgcactacagccggacagagcaggtcagtttgccgacgcactggagaaatacgccgccggtctggcaaccgcactcagccgttctcctcaaataacgcttgaagaaacacccgcctcgcaggccatcctgcccaccttattaaaacaggagcaacacgtctgccagcttttcgcccgcttgccagactggacagccccggcattaacgcccgccacggaacaggcacaaggagccacgcaatga

SEQ ID NO: 9571 - DNA, 1986 bp, Escherichia coli
atgaataactctcggttattccgtttgagcaggattgttattgcgttaactgccgccagcagcatgatggtaaataccgctaatgcgaaagaggaagcgaaagccgccactcaatatacccaacaggttaatcagaattacgccaaatcattaccgtttagcgatcgtcaagattttgacgatgcccagcgtggatttatcgccccgctgctggatgaaggtattctgcgtgatgcgaacggtaaagtttactaccgcgcagacgattacaaatttgatattaatgccgctgcgccggaaaccgtaaaccccagcctgtggcgtcagtcgcaaatcaacggtatttctggcctgttcaaagtcaccgataaaatgtatcaggtgcgcggccaggatatctctaacattacgttcgttgagggcgagaaaggcattattgttatcgacccgctggtgacgccgcctgccgcaaaagccgcacttgatctttacttccagcatcgtccgcaaaaaccgattgttgctgtgatttacacccacagccacgccgaccattatggcggtgtgaaaggcattatctctgaagcggatgttaaatccggcaaagtgcaggtgatcgctccggcaggctttatggacgaagccatcagcgaaaacgtgctggcgggtaacatcatgagccgccgtgcgctctactcttacggtctgttactgccgcacaacgcgcaaggcaacgtgggcaacggcctgggcgtgacgctggcaacgggcgacccgagcattattgcaccgactaaaactatcgtcagaactggcgagaagatgattatcgacggcctggaatttgacttcctgatgactccgggtagcgaagcgccagccgaaatgcacttctatattccggctctgaaagccctgtgtaccgccgagaacgccacgcataccctgcacaacttctacactctgcgcggcgcgaaaacccgcgacaccagcaagtggaccgagtatctgaacgaaacgctggatatgtggggtaatgacgcggaagtactgtttatgccgcacacctggccggtctggggcaataagcatatcaatgattatattggtaaatatcgcgatactatcaagtacattcacgaccagaccctgcacctggctaaccagggctacaccatgaatgaaatcggcgacatgattaagctgccgcctgcgcttgccaataactgggccagccgcggctattacggttctgtcagccacaacgcccgcgcggtgtataacttctatcttggctattacgacggtaacccggctaacctgcatccgtatggtcaggtggagatgggtaaacgttacgtgaaagcgctgggcggttctgcccgcgtcatcaacctggcgcaagaagcgaacaagcaaggtgattaccgctggtcggcagaactgctgaaacaggtgattgccgccaaccctggtgaccaggtcgcgaagaatctgcaagcgaataactttgaacagctgggctatcaggccgagtccgccacctggcgcggtttctacctgaccggcgcgaaagagctgcgcgaaggggtgcataaattcagccacggcaccaccggttccccggacacccttcgcggaatgtcggtcgaaatgctgttcgactttatgtccgttcgcctcgatagtgcgaaagccgcgggtaaaaatatcagcctgaacttcaatatgagcaacggcgataacctcaacctgacgctgaacgatagcgtgcttaactaccgtaaaacgctgcaacctgaagccaatgcctctttctacatcagccgtgaagatcttcacgccgtactgaccggacaagtcaaaatggcggatctggtaaaagcgaagaaagccaaaattattggcaatggcgcgatactggaagaaattattgcctgtctggataatttcgatttgtgggtgaatatcgtaaccccaaattaa

SEQ ID NO: 9572 - DNA, 318 bp, Escherichia coli
atgcaaccggtgttttttattaaaaaacgtaccggagcaatgggcggtcatgtcgctggcaccgcaggattctgcgttgctgtgccagccttttattcatggtcaatgagtgaggggattgataaagaaaccaggtcgtcagagcgcactgattatccgcattacgccagtgaagttgcactggcttttggttcacgagtggttggcctcgaactggcaaaaatgattgtggatgcgtggctgggcgcgcagtacgaaggcggtcgtcatcaacaacgcgtggaggcgattacggcaatagagcagcggagaaattga

SEQ ID NO: 9573 - DNA, 1137 bp, Escherichia coli
atgattatcaataacgtcaaactggtgctggaaaatgaagtggtgcacggttcactggaagtacaggatggcgaaatccgcgcctttgccgaaagccagagccgccagccggaagcgatggacggcgaaggtggctggctactgccggggctgattgagctgcataccgataatctggataaattcttcaccccgcgcccgaaggtcgactggcccgcccactcggcgatgagcagccacgatgcgctgatggtggcgagcggcatcaccaccgtgctggacgcggtggcgattggcgacgtgcgcgacggcggcgatcggctggagaatctggagaagatgatcaacgccattgaagagacgcagaaacgcggcgtcaaccgcgccgagcaccgcctgcacctgcgctgcgaactgccgcatcacaccacgctgccactgtttgaaaaactggtgcagcgcgagccggtgacgctggtgtcgctgatggatcactcgccgggacagcgccagttcgccaaccgcgagaagtatcgcgaatattatcagggcaaatactcgctcaccgatgcgcagatgcagcagtacgaagaagagcaactggcgcttgccgcacgctggtcacagcctaatcgcgaatccatcgccgccctgtgccgcgcgcgacaaattgccctcgccagccacgatgacgccacgcacgcccacgttgccgaatcccaccagcttggcagcgtgatcgccgaatttcccaccacgtttgaagcggcggaagcttcgcgcaggcatggtatgaacgtgctgatgggcgcgccgaatatcgtgcgcggcggttcgcactccggcaacgtggcggccagtgaactggcgcagcttggcctgctggatatcctctcttccgactactaccccgccagcctgctcgatgcggcatttcgcgtcgccgacgacgagagcaaccgctttacgctgacgcaggcggtgaagctggtgaccaaaaatccggcccaggcgctcaatcttcaggatcgcggggtgattggggagggcatacgcgccgacctggtgctggcgcatcgcaagggcaaccacattcatatcgaccacgtctggcgtcagggtaaaagggtgttctga

SEQ ID NO: 9574 - DNA, 1356 bp, Escherichia coli
atgatgtctgcacccaaaattacatttatcggcgctggttcgacgattttcgttaaaaatattcttggtgatgtgttccatcgcgaggcgctgaaaacggcgcatattgccctgatggacattgatcccactcgcctggaagagtcgcatattgtggtgcgcaagctgatggattcagcaggggccagcggcaaaatcacctgccacacccaacagaaagaagccttacaggatgccgattttgtcgtggtggcatttcagattggcggttatgaaccttgcacggtgactgatttcgaggtctgtaagcggcatggtctggaacaaaccattgccgatacgttggggccgggcggtattatgcgcgcgctacgtaccattccgcatctgtggcaaatttgcgaggacatgacggaagtctgccccgatgccaccatgctcaactacgttaacccaatggcgatgaatacctgggcgatgtatgcccgctatccgcatatcaaacaggtagggctgtgccattcggtgcagggaacggcggaagagctggcgcgtgacctcaatatcgacccggctacgctgcgttaccgttgcgcaggtatcaaccatatggcgttttacctggaactggagcgcaaaaccgccgacggcagttacgtgaatctctacccggaactgctggcggcttatgaagcagggcaggcaccgaagccgaatattcatggcaatactcgctgccagaatattgtgcgctatgaaatgttcaaaaagctgggctacttcgtcacggaatcgtcagaacattttgctgagtacacaccgtggtttattaagccaggtcgtgaggatttgattgagcgttataaagtaccgctggatgagtacccgaaacgctgcgtcgagcagctggcgaactggcataaagagctggaggagtataaaaacgcctcccggattgatattaaaccgtcacgggaatatgccagcacaatcatgaacgctatctggactggcgagccgagtgtgatttacggcaacgtccgtaacgatggtttgattgataacctgccacaaggatgttgcgtggaagtagcctgtctggttgatgctaatggcattcagccgaccaaagtcggtacgctaccttcgcatctggccgctctgatgcaaaccaacatcaacgtacagacgctgctgaccgaagccattcttacggaaaatcgcgaccgtgtttaccacgccgcgatgatggacccgcatactgccgccgtgctgggcattgacgaaatatatgctcttgttgacgacttgattgctgcccacggcgactggctgcctggctggttgcaccgttaa

SEQ ID NO: 9575 - DNA, 1410 bp, Escherichia coli
atgactacaaaactcagttatggatttggagcgttcgggaaggattttgcgatcggcattgtgtatatgtacctcatgtattactacaccgatgtcgtcgggctgtctgtgggtttggtcggtactttgtttctggtggcgaggatctgggatgctattaacgatccgattatgggatggattgtaaatgctacgcgatcgcgatggggtaagttcaaaccctggatcctgatcggtacgttggcaaactctgtaatcttatttctcctctttagtgcgcatctgtttgaaggtactactcagattgtctttgtttgcgtgacctacatcctctggggcatgacttacaccattatggatattcccttctggtcgctggttccaaccataacgctcgataaacgtgagcgcgaacaactggttccttatccgcgtttttttgccagtctggcgggctttgttacggcaggtgtgacgctaccatttgttaattatgtcggcggtggcgatcggggatttggctttcagatgttcactctggtactgatcgccttttttattgtttcaaccatcatcactctgcgcaatgtgcatgaagtcttttcgtcagacaatcaaccgtctgctgaaggaagccatctgacacttaaagccatcgttgcgcttatttataaaaacgatcagctttcatgcctcttgggtatggctcttgcttataatgtagccagcaatattattaccggctttgctatctattatttctcatatgttatcggtgatgcggatttgttcccctattatctgtcgtatgcgggagctgctaatctggtgacgttagtattcttcccacgcttagttaaatcattatcccgacgcattttatgggccggagcatctattcttccggtgttaagctgtggtgttctcctgttaatggcattaatgagctatcacaacgtcgtcctcattgtgattgcgggtatcttgctgaatgtgggaacggcgcttttctgggtattacaggtcatcatggtggcagataccgttgattacggtgaatataaactgcacgtacgctgtgaaagcatcgcttactccgtgcagactatggtggtgaagggcggttcagcctttgcggcttttttcattgcggttgtgttagggatgattggctatgtaccgaatgttgaacagtctacgcaagccctattaggtatgcagtttattatgattgctctaccgactctgtttttcatggtaacgctgattctctacttccgtttctatcgcctcaatggtgacacgctgcgcaggatccagatccatctgctggataaatatcgcaaagtaccgcccgagcctgttcatgctgatattccggtcggtgcagtgagtgatgtgaaagcctga

SEQ ID NO: 9576 - DNA, 312 bp, Escherichia coli
atggaaatagtgatatacatcactatttccatcctgattttagctatcgcattaataaaacagcggatgttagccaatatcgaaaccagtaacccgtatcacgcccagtacatcctgcgccgccgcgatgattacctggtgctgttcgaccgtgatgccctgagctgccgcttcttttatgacgcctttccgggaatgcgtctgcgccaccaggtgaccggcgataccgacgatgaccgcctggcacacagccccgcagaccggatgtatacagggaaagatcatcagaagtacactttttgtactaaataa

SEQ ID NO: 9577 - DNA, 222 bp, Escherichia coli
atggctcttgacttggctcggcgtgagttagagttaagggaaattccttatattaaaaatagtctacatgccaattacagctataaatctattagtattggttctaagcaaggttggttaatttcagcgaaattaaaagtccctgaaacttttgagcctgatatgatatttattgagatatctgacccagaaggttttattaatattcctgatgtattataa

SEQ ID NO: 9578 - DNA, 1335 bp, Escherichia coli
gtgacagcctcaggcaccgggctgggctatggcgaaggcgatgagtcctatggctatgacagctgcggctacctgaaggcgcagtctgcgggctggcaccggataagtgaagagactgaccagtatgccggaggccaccggctgaaacaggccggaaacacgcagtatgactatgacgccgcaggccggatggtcagccgcaccaaacaccgtgacggctatcgcccggaaacagagcggttccggtgggacagccgtgaccagctgaccgggtattgcagcgcacagggtgagcagtgggaataccgccacgacgccagcggcagacgaacggaaaaacgctgcgaccggaagaaaatccgcatcacgtacctgtgggacggcgacagtattgcggaaatccgggaataccgcgatgataaactgtacagcgtacggcacctggtgtttaacggctttgagctgataagccagcagttcagccgggtacggcaggcgcatccgtccgtggccccgcagtgggtgacacggacgaatcatgcggtgagcgacctgacgggccgtccgctgatgctctttaacagtgaaggtaaaaccgtctggcgaccgggacagaccagcctgtgggggctggcactcagcctgcccgcagacaccggctacccggacccgcgcggggaactggacccggaagccgaccccggcctgctgtatgcgggacagtggcaggatgcagaatccgggctgtgctataaccggttccggtattacgagccggaaaccgggatgtacctggtgagtgatccgctggggttgctggggggtgagcagacttaccggtatgtgccaaatccgtgtgggtgggttgatccgctgggattggctgcaagttctaaaatcagcagtttgatggactatattggcgatggtcgtcgtgttagtgggcatacgggtttcctggatggggttcgtttatcacgtagtcaaataaacaatattgctaaagaaatggagaagctaggaattaaagtaataaggaaagcagataaatatttgccaccaaatgctagggcagcttttgattatggccttcgcaatatttatcttaggaaaaatgctaccttatatgaggtgtatcatgaagtgattcatgctaagcaatttgcgaaaattggacgagaagcatacgaagcactaggacgtttatctagggaggaacacgttctaaatgaaatattaaaaagtaaaaatttattcaatgaggcggaaatagctcatgccataaaatatgttgagggattgagagaaaaattcatgatgggactaataaattga

SEQ ID NO: 9579 - DNA, 888 bp, Escherichia coli
gtgaatgcccttgccgtccgtcacggtggtgcagccgtcaccatagtccagcgtggcgttgtaatagccctccgccccggtgacattcacgcaccggccctgttcatcgtaggtgaaacggctccacgtctggtcgttatcggaccagcggatgatccggtccgcagcgtcgtactcataaaacaggtggtagtccagccgcgcatccgcttctgtcagccgcccccgcgcatcctgttcgtaggtcgccagcgtctgtatgccgttatccgtgcggtgaatggctttcaggtagccgctggcgtggtacgtcagtttaagccggatcccgtcggtgtgactgacacctgtgatccggtactggctgtcgcgctcaaacgtgatgcggttgctggcggtgtcgctcatcccgcccagcatgtacatccggtcattggggctgtgtgccaggcggtcatcgctggtatcgtcagtcaccgggtggcgcagacgcattcccggaaaggcgtcataaaagaagcggctgctcagtgcatccctgtcgaacagctccagataatcatcgcggcggcgcagaatgtactgggcgtgatacgggttaaccgccgtatcactgtcaccgtcgaaggcgaagttcagcgtggctccctggctgatgatatccacccggtttccctgttcacgcacccaggcgtattcgctccaggagtcgctccagcccacgccggtcaggccatgcagcggcagtacagaactgtggaaacgggtgaaggagagggggagggtctggcccagcgtaaagtcggtacgttcgtcgcagtacgcgccggttaccggatcgacaggatctgttacccatctgatgactttattggcaatactttttaa

SEQ ID NO: 9580 - DNA, 462 bp, Escherichia coli
atgcagttcacttttaatgaaggccacattcaactgccgtctcaatggcaggatcagtcaatgcaggtcctggtgtccacagataacagtggcatcaacctggtcattacccgcgaagccgttccacagggaaccctgacaccagagctgtaccaggaaacgctggcgctgtaccagggcaaacttgatgggtacaccgaacatgcctgccgggaaatcactctggcagaggccccggcctggctgctggattattcctggaacggtccggaagatgaggggaatcaggggcggattagccagatagccgtattccagcggcgtggagatacgctgctgaccttcactttcagcacctccttatccctgaagaacagtcaaaagacgatgctgctggaggtgataaagagcttcaccccgttgccaccggagaatgacatccaaaaggaccagccgcgctga

SEQ ID NO: 9581 - DNA, 1902 bp, Escherichia coli
atgtcaaccggattacgtttcacactggaagtggacggcctgccgccggatgcttttgcggtggtttcctttcatctgaaccagtcactctcttcgctcttttccctcgatctctccctggtcagccagcagtttctctcccttgaatttgcgcaggtgctggacaaaatggcctacctgacggtatggcagggcgatgacgtacagcgccgggtgaaaggcgtggtgacctggtttgaactcggggagaacgacaaaaaccagatgctgtacagcatgaaggtgcacccgccgctgtggcgtgccggtctgcgccagaacttccgtatcttccagaacgaggacatcaaaagcatcctcggcacgatgttgcaggaaaacggggtgaccgaatggagtccgctgttcagcgagccgcatccttcccgtgagttttgtgtccagtacggtgagactgattacgatttcctgtgccggatggcggcggaggaaggcatcttcttttatgaggagcatgcttacaaaagtaccgaccagagcctggtgctgtgcgacacagtccgccatctgcccgaatcttttgaaatcccatggaacccgaacacccgtaccgaggtgagcaccctctgcatcagccagttccgctacagcgcacaaatccgcccttcttccgtggtgaccaaagactacacctttaaacgccccggctgggccggacgttttgaacaggaaggccagcaccaggactaccagcgcacgcagtatgaagtgtatgactaccccggacgtttcaagggtgcccacgggcagaactttgcccgctggcagatggacggctggcgaaacaatgcagaaaccgcgcggggaatgagtcgctcgccggagatatggccgggacgacgaattgtgctgacggggcatccgcaggcgaacctgaaccgggaatggcaggtggtggcaagtgaactgcacggcgaacagccacaggcggtgccaggacggcagggagcggggacggcgctggagaaccattttgcggtgatcccggcagacagaacatggcgaccacagccgttgctgaaaccgctggtcgacggcccgcagagcgctgtcgtgacaggaccggcaggcgaggaaatcttctgcgacgaacatggtcgcgtgcgggtgaagttcaactgggaccgctataacccgtcaaaccaggacagttcgtgctggatccgtgtggcacaggcgtgggcaggcaccggttttggccacctggcgataccgcgtgtgggtcaggaggtgattgtagacttcctcaacggcgatccggaccagccgatcattatggggcgcacctaccaccaggaaaaccgcacccccggcagcctgccgggaacaaagacgcagatgaccatccgctccaaaacgtacatgggcagcggatttaatgagctgaagtttgatgatgcgacagggagagaacaggtctacatccacgcgcagaagaacatggataccgaagtgctcaacgaccgtaccaccaccgtaaaacacgatcaccacgaaaccgtaaaaaatgaccagacggtcacgatccaggaaggtaaccgccttcttacggtggaaaaaggccacaagatcaccggagtactgaaagggtctttatctgaggatgtctttcaggacagaggcacgattgccggttcggtgcatgttgacgctgtaaacaatggtggcgaaggcgacggtatacaggcttatacggcgattaaggaaattttgctggccgtggaggaaagcaaaattgcgctgacgccggatggcattcagctacaggtcggggaatcgacggtaatcaggctgtcgaaggatggcatcaccatcgtgggcggttctgttttcatcaactga

SEQ ID NO: 9582 - DNA, 573 bp, Escherichia coli
atgcgtggattacgtccggcattatcgacatttctctttttgttactgattactggcggcgtttacccgctgctgaccaccgcgctggggcaatggtggtttccctggcaggccaacggttcgttgattcgtgaaggtgatacggtgcgcggttcggcattaatcgggcagaatttttccggcaacggctattttcatggtcgcccgtcggcaacggcagaaatgccctataatccacaggcttctggcgggagcaatctggcggtcagtaaccctgagctggataaactaatagccgcacgcgttgctgcattacgggccgctaacccggatgccagcgcgaacgttccggttgaactggtgacggcatcggcaagcgggctggacaataacatcaccccgcaagcggcggcctggcagatcccacgcgtggcgaaagcgcgtaatctcagcgttgaacagctcacgcaactgatcgcaaaatacagccaacaaccgttggtgaaatatatcggccagccggtcgtcaacattgtcgaactcaatctggcgctggataagcttgatgaataa

SEQ ID NO: 9583 - DNA, 2049 bp, Escherichia coli
atgagtcgtaaacaactggcgctattcgaaccaacacttgccgttcaggcgctgaaagaagcggtgaaaaaattaaacccgcaggcacaatggcgcaatccggtgatgtttatcgtctggatcggcagtttgctgaccacctgtatttgcatcgcaatggcaagcggtgcgatgcctggcaatgcgctgtttagcgcggcaattagcggctggctgtgggtcaccgtactgttcgctaatttcgccgaggcgctggcagaaggccgcagtaaagcgcaggccaacagtctgaaaggggtgaaaaaaactgcctttgcccgcaagctgcgtgagccgaaatatggcgctgcggcggacaaagttcccgccgatcaactgcgtaaaggcgatatcgtactggtgaaagctggcgatattatcccctgcgatggtgaagtcattgaagggggcgcatcggtcgatgaaagcgccatcaccggggaatcggcaccggtgatccgtgaatccggcggcgattttgcctccgtcactggcggcacgcgtattctttctgactggctggtgattgagtgcagcgttaaccccggcgagacatttctggatcggatgatcgcgatggtggaaggcgcgcagcgacgtaaaacgccaaacgagattgccctgaccatcctgctgattgccctgactatcgtctttttactggcaaccgccacgctgtggccgttttccgcgtggggcggtaatgcagtcagtgtaacggtactggtggcgctgctggtctgtctgatcccaacgaccattggcggtctgttgtcagcgatcggcgtcgccgggatgagtcggatgctgggcgcgaatgtgattgccaccagcggacgtgcagttgaagcggcgggtgacgttgacgtcctgctgctggataaaaccggcaccatcacgctaggtaaccgtcaggcatcggagtttatccctgcgcagggcgtggatgaaaaaatgctggctgacgccgcacaactggcttcactggctgatgaaacgccggaaggtcgcagtattgtgatcctcgccaagcagcgttttaacctgcgcgagcgcgatgtgcagtcgctccatgccacctttgtaccgtttactgcgcaaagccggatgagcgggatcaacatcgacaaccgcatgatccgtaaaggttctgtcgatgccattcgccgccatgttgaggctaatggtggtcacttccctgccgatgttgatcaaaaagtcgatcaggttgcgcgtcagggagccacgccgctggtagtagtagaaggctcccatgtgcttggcgttattgcgctgaaagatatcgtcaaaggcggtattaaagagcgcttcgcgcagttgcgtaaaatgggcattaaaacggtgatgattaccggcgataaccgtctgactgccgccgcgattgctgcggaagcgggcgtcgatgatttcctcgccgaagcgacaccagaagccaagctggcattgattcgtcagtatcaggcagaaggccgtttagtggcgatgaccggcgacggcaccaacgatgctccggcgctggcgcaggcagatgtcgcggtggcgatgaactccggtactcaggcggcgaaagaagcgggcaatatggtggatctcgactctaacccgaccaagttgatcgaggtggtacatattggcaaacagatgctgatgacccgtggctcgctgaccaccttcagcattgccaacgatgtggcgaaatacttcgccattattccggcggcattcgcggcaacgtatccgcagttaaatgcgctgaacatcatgcgcctgcattcgcccgactccgcaatcctcagtgcggtgattttcaacgccttgattatcgtctttttgattcccctggcgttaaaaggcgtgagttataaaccgcttaccgcttctgccatgttgcgccgtaacttatggatttacggtctgggtgggctgctggtgccgtttatcggtatcaaagtcattgatttactgctgaccgtttgcggtctggtgtga

SEQ ID NO: 9584 - DNA, 1674 bp, Escherichia coli
atggctgcgcaagggttcttactaattgccacgtttttactggtattaatggtgctggcgcgtcccttaggtagcgggctggcgcggctgattaatgatattcctcttcctggtacgacgggcgttgaacgcgtactctttagcgcgcttggcgtctctgaccgcgagatgaactggaagcagtatctctcagccattcttggcctgaatatactggggctggcggtgctgttttttatgttgctcggtcagcactatctgccgcttaatccacagcagttgccggggctgtcgtgggatctggcgctgaataccgccgtcagctttgtcacgaataccaactggcaatcttacagcggtgaaaccacgttgagctatttcagccagatggcgggcttaacggtgcaaaactttctttctgccgccagcgggattgcggtgatttttgccctcatccgtgcgtttacccgccagagcatgagcacactcgggaatgcctgggtcgatctgttacgcatcacgttatgggtgctagtccctgtggcgttgttgattgcattgttttttattcaacaaggtgcgttgcaaaactttctgccctatcaggcagtgaataccgttgaaggagcgcaacagctgttaccaatgggtccggtggcttctcaggaagcgatcaagatgctcggcactaacggtggtggcttctttaatgccaactcgtcgcatccgtttgaaaacccaaccgcactgaccaacttcgtgcagatgctggcgatcttcttgatcccaacagcgctgtgctttgcctttggtgaagtggcgggcgatcgccgccaggggcgcatgttactgtgggcgatgtcagtgatttttgtcatctgcgtaggcgtggtgatgtgggcagaagttcagggtaatcctgatctgctggcactgggcgcggacagcagcatcaatatggaaggtaaagagagccgtttcggcgtgctggtcagtagcctgtttgcggtcgtgactacggcggcttcctgcggcgcggtgattgcgatgcatgattcgtttaccgcccccggtggcatggtgccgatgtggctgatgcaaattggtgaagtggtattcggcggtgtcggttctggtctttacggcatgatgctgtttgtcctgctggcggtgtttattgccgggctgatgattggtcgtacaccggaatatctgggtaaaaaaatcgacgtacgcgagatgaaactgaccgcactggcgattctggtcaccccgacgctggtgctgatgggcgcggcgctggcaatgatgaccgacgccggacgtagcgccatcctcaacccgggcccgcatggttttagcgaagtgctgtacgccgtgtcgtccgccgctaacaacaacggcagcgcctttgccggattaagcgccaactccccattctggaactgtttgctggcgttctgcatgtttgttggtcgcttcggggtgattattccggtgatggcaattgctggttcgctggtgagtaaaaagagccaacccgccagctccggcacactgcctacgcacggcccgctgtttgttggcctgttaatcggcaccgtgttgctggttggcgcactgacctttatccctgccctggcgcttggcccggtggcggaatatctctcctga

SEQ ID NO: 9585 - DNA, 750 bp, Escherichia coli
atgattgaagaagggctgttacttccaatgaatgttttgcttcaaggacagaagttaaccctactggaccctgaaatgtggttcttacggggaaatgaaaacaaggatgtaacccttgttattacgattggtaataaccatcaaaaattaatggtagtggaagacatattactgctcattgaccgaagccaaattgaggtaactgcagggaaagtaatttatcatccacttcgcattgatatcctgagtaaattattagcttttattgatgagtcaacggggagtgtggaaagggaacgccatgagttgtttgctgatgccttgccctttgcatcagaagttgtgctattcagtaaagttgcaagtgaagcctggtttttagccacttatctgagcagcgataatattaatgaaattctgtttcagcatctaagaaaaacagaatgctataaactggttcgctatttattatcgcaatcgctcatacagacttcgctctatgatcttggtgagctttacggcgtatcgtattcacattttcgccgtttatgtagttatgcattgggtggtaaagttaaaacggaattatgtggctggagagttgccagagccgtgttggaaatcattgaaggaaacagtgatatgacaactattgcgcataaatatggctactcatcctcatcacacttttcagccgaagtaaaaagccggttaggaaaaacaccgagagaactatgtaaaaagttatga

SEQ ID NO: 9586 - DNA, 180 bp, Escherichia coli
gtgatcaataaattactgttagcttacctgataggtctggttgtgacatcgaccttaatatttatcttctcggaagaaaaagtaacatatcggttgtttgctgcagtaattacagggttgacctggccgcttagcctcattccatccatcataagtctcatgattcgtaaatccgactaa

SEQ ID NO: 9587 - DNA, 786 bp, Escherichia coli
atgtcttatcagtatgtgaacgttgtcactatcaacaaagtggcggtcattgagtttaactatggccgcaaacttaatgccttaagtaaagtctttattgatgatcttatgcaggcattaagcgatctcaaccggccggaaattcgctgtatcattttgcgcgcgccgagtggatccaaagtcttctccgcaggtcacgatattcacgaactgccgtctggcggtcgcgatccgctctcctatgatgatccgttgcgtcaaatcacccgcatgatccaaaaattcccgaaaccgatcatttcgatggtggaaggtagtgtttggggtggcgcatttgaaatgatcatgagttccgatctgattatcgccgccagtacctcaaccttctcaatgacacctgtaaacctcggtgtcccgtataacctggtcggcattcacaatctgacccgcgacgcgggcttccacattgtcaaagagctgatttttaccgcttcgccaatcaccgcccagcgcgcgctggctgtcggcatcctcaaccatgttgtggaagtggaagaactggaagatttcaccttacaaatggcgcaccacatctctgagaaagcaccgttagccattgccgttatcaaagaagagctgcgtgtactgggcgaagcgcacaccatgaactccgatgaatttgaacgtattcaggggatgcgccgcgcggtttatgatagtgaagattaccaggaagggatgaacgctttcctcgaaaaacgtaaacctaatttcgttggtcattaa

SEQ ID NO: 9588 - DNA, 1479 bp, Escherichia coli
atggaaactcagtggacaaggatgaccgccgatgaagcggcagaaattatccagcataacgacatggtggcatttagcggctttaccccagcgggttcgccgaaagccttacccaccgcgattgcccgcagagctaacgaacagcatgaggccaaaaagccgtatcaaattcgcctgctgacgggggcgtcaatcagcgccgccgctgacgatgtactttctgacgccgatgctgtttcctggcgtgcgccatatcaaacatcgtccggtttacgtaaaaagatcaatcagggcgcggtgagtttcgttgacctgcatttgagcgaagtggcgcaaatggtcaattacggtttcttcggcgacattgatgttgccgtcattgaagcatcggcactggcaccggatggtcgagtctggttaaccagcgggatcggtaatgcgccgacctggctgctgcgagcgaagaaagtgatcattgaacttaatcactatcacgatccgcgcgttgcagaactggcagatattgtgattcctggcgcgccaccgcggcgcaatagcgtgtcgatcttccatgcaatggatcgcgtcggtacccgctatgtgcaaatcgatccgaaaaagattgtcgccgtcgtggaaaccaacttgcctgacgccggtaatatgctggataagcaaaatcccatgtgccagcagattgccgataacgtggtcacgttcttgttgcaggaaatggcgcatgggcgtattccgccggaatttctgccgctgcaaagtggcgtgggcaatatcaataatgcagtcatggcgcgactaggggaaaacccggaaattcctccgttcatgatgtattcggaagtgctacaggaatcggtggtgcatttactggaaacgggcaaaatcagcggggccagcgcctccagcctgactatctcggccgattccctgcgcaagatttacgacaatatggattactttgccagccgcattgtgttgcgtccgcaggaaatttccaataacccggaaatcatccgtcgtctgggcgtcatcgctctgaacgtcggcctggagtttgatatttacgggcatgccaactcaacgcacgtagccggggtcgatctgatgaacggcatcggtggcagcggtgattttgaacgcaacgcgtatctgtcgatctttatggccccgtcgattgctaaagaaggcaagatctcaaccgtcgtgccaatgtgcagccatgttgatcacagcgaacacagcgtcaaagtgatcatcaccgaacaaggcatcgccgatctgcgtggtctttccccgcttcaacgcgcccgaactatcattgataattgtgcacatcctatgtatcgggattatctgcatcgctatctggaaaatgcgcccggcggacatattcaccacgatcttagccacgtcttcgatttacaccgtaatttaattgcaaccggctcgatgctgggttaa

SEQ ID NO: 9589 - DNA, 504 bp, Escherichia coli
atgatatttaaccgcctgaaacttgcggtagaccgcgtcattgccgcgttttctgtcgccgtcatgcttgctctggttgtatgcgtagtctggcaagtatttagccgctacgtacttaaccagccaagtacattaaccgatgagctggcacgctttttgatgatctgggtaggattattaggtgctgcatataccgtcggcgcgcagagacatctctctatcgatttatttgctctcgccctgaataagcgcaagcaattacttcttagtatagtcattaacattctcattttaggttttgccggttcggtcattgtgactggtggcctgaaattaattgataaaacgctggcaacatcacaagtatctgccgctatgcaaataccgatgggatacgtatatatcattctgccattaagtggagtggtgatgatgttttatgccttgtgttttattaatcaaagcattcaacaactgaaacaacctgcgcaggaggccagttaa

SEQ ID NO: 9590 - DNA, 888 bp, Escherichia coli
atggattgttatatcgcgcttacactatttggctgtttttttgtgctggtctttattggtgtgcccatttcgttctcaatcggtattgccactgtagcttcaatgcttttgatgtttccctgggatatcgcggcaatcactgtttcgcaacgactggctaatggactggataactttgccctgttggcaatcccctttttcatctttgccggaacgctgatgaacagcggcggtattgcgatacgtttgattaacctcgcccaggtaatggttggccgcgttcctggttcacttggtcatgtgaacgtcctggcgaatatgatgtttggttccatttctggttcagccgttgcggcagctgctgccgttggtggcacactgaatcccattcagaccaaagaaggttatgatccggcattttctaccgctgtaaacgtctcatcttgtattactggattactgataccgccctcaaacgtgttaattgtgttttccctgacagctggcggcgtttctgtagcatcgctatttatggcgggatatttgccagggatcttaatgggtctcgcggtaatgatagtctgcggcattattgctaaacgccgtggctacccactttcagaaagagcaacctttgctcaggcatgtaaagcgtttctggatgccttaccaagtttgcttctggtgttcattgtaatgggcggcattctgggcggcatttttaccgcaactgaagcgtcagcaattgccgttgtctacacatttattctctcggtgctgatttaccgggaagtaaaatggcgcgatttacccaaactgattctggaatcggttgttaccacttcgattgtattactgttgatcggtttttccgtgggcatgtcctag

SEQ ID NO: 9591 - DNA, 756 bp, Escherichia coli
atgaatgacagattacgctttgaagtgaacgataaccaggggtgtttcgtattcccggacgcctggttcggcccgttgctggatgagtttgacgaactgcttgatgcatacgacgcggatgaaatcagcgaaacaagttatatcaacaaactcaggcgtcttgcccgacaggagcctgactttattgatgtccacgctcacctggcatacgtatttctggaacaaaactctccgcgtaaggcactgaacgctgcgcttaaagggctggtggttgctaatcgccttatacctgaaggtttcagcggtgaaatcatctggatgaatccggaaaaccggccttatctgcgcgccctttatgcaacaattctcgcaaatgtgcacttacagcgtcaccggcatgctgtcatgctcattgaaaaaatactggcgtacaaccccgaagataatcagggagcacgctggttgctggggccggaactgttacgtgctggcgaccatgagcgcgcactccgtgtactgaaatcgcataccggtgaattctcaccctgctggtatgaactcggccttctgcattttctgaacggggaacatgttaaggctgccacagcttttcgccatggctttgtcacaaacacttacatcgcggaaatgctgtgcggaaatctgcatccttttcctcttgctgtatggcataacttctccggctctccggatacggcagaagattactgtgcaacatactcaccattatggtaa

SEQ ID NO: 9592 - DNA, 2277 bp, Escherichia coli
atgcgccaggagcatcgtgccggagaaaagctttttatcgacttctgtggtcctacggttcctgttattaatccggacaccggtgagatacgccgcgtggcaatcttcgtggccgtaatgggggcgtccaactatacctacgttgaagcgtgcgaaggtcaggacatgatgtcatggttaaatgcccacagccgttgtctgaccttcctgggtggcgtaccgaagctgctcatccccgataacctcagaagcgcagtgaaaaaggccgatcgctatgagcctgtcatcaacgacagttatcaggcactggctgagcactatggcacggttatcatcccggcccgaccacgcaaacctaaagataaaccaaaagcagaaaacggcgtcctcatcgtcgaacgatggcttcttgcccgtatccgtaatgaaaccttccacacgctcagggcgctgaatgcgcgccttcgggagttactgacagacatgaataaccggccaatgaaggggtacggcaatcaaacccgtgcagaacgcttccgcatactggatgcgccagctctctctccgctgcctctgactccttatgaatacacggaatacaaagccgtaaaggttggccctgactaccacgttgaatatgcccgtcactggtactccgttccacacgaactggtcggtcagcgtctgtcactgaaggcggggcagtcggtggtacagctctggcacaagggacagtgtgtggcacaacatccgcgcagcacacatgaatataaacacacaaccaatccgcttcacatgccagagcgccaccggcagcacgggacatggacaccggaacgccttatcgggcagggaaaacgtacgggcccgtccacaggccgggtggttgaatccatgctgaaggcaaaaccccatccggaactggcttatcgtgcagttctggggctgctggcacttcagaaagaaagtgatacccttaccggtcgggttgacgacccggccgtgcagcgcccgctgcgtcaaacccgcacccgcaaaccgttccccgaatcactcccccgcgatgaaaaacggctgctgccggcagcgtcatgctgcccggaatgtggaggctcgctgagctgtctgggtgaggatgccgccgaacagctggagctgatgcgcagcgccttccgggttatccggacggtacgtgaaaagcatgcctgtactcagtgcgatgccatcgtgcaggcccccgcgccttcacggcccatcgagcggggtatcgccggaccggggctgctggcccgcgtgctgacctcgaagtatgcagagcacaccccgctgtatcgccagtcagaaatatacggccggcaaggtgtggagctgagccgttcactgctgtcgggctgggtggatgcatgctgccggcagctgtctccgctggaagaggcgcttcatggctatgtgctgactgacggtaagctccatgctgatgacacgcctgtcccggtgctgttgccaggcaataagaaaacgaagaccgggcggttatggacctacgttcgtgacgaccataacgccgggtcaacgctggcgccggcggtgtggttcgcttacagcccggacagaaaaggcatccatccgcagacccatcttgcggggttcagtggtgtactgcaggcggatgcatacgccgggttcaacgagctgtaccgggatggccggataacggaagccgcctgttgggctcacgcccgtcgtaaaatccacgatgtgcacgttcgcaccccgtcagccctgacggaggaagcgctgaaacggatcggcgaactgtacgccatcgaggcagagataaggggaatgacggcggagcagcgccttgccgaacgtcagttgaaaacgaaaccgctgctgaaatccctggaaagctggctgcgtgaaaagatgaaaaccctgtcgcgacactcagaactggcgaaagcgttcgcatacgccctgaaccagtggccggcgctgacgtactatgcagatgatggctgggctgaggcggacaataacatcgctgaaaatgcgttgcggatggtcagtctgggccgcaaaaactacctgttcttcggttcggatcatggaggagagcggggagcgctgctgtacagcctgatcgggacgtgcaaactgaacggagtggagccagaaagctacctccgctatgtccttgacgtcatagccgactggccgataaaccgggtcggcgaactgctcccctggcgcgtagcactgccgactgaataa

SEQ ID NO: 9593 - DNA, 1710 bp, Escherichia coli
atgtctgaagaaaaattaggtcaacattatctcgctgcgctgaatgaggcatttccgggcgtcgtgctggaccacgcctggcagaccaaagatcagctgaccgtgaccgtgaaggtgaactacctgccggaagtggtggagtttctctactacaagcaggggggctggctgtcggtgctgtttggtaacgacgaacgcaaacttaatggtcattacgccgtttactacgtgctgtcgatggagaagggcaccaaatgctggataaccgtgcgcgttgaagttgacgccaacaaaccggaatatccgtccgtaacgccgcgcgttccggcggcggtatggggcgagcgtgaagtgcgcgatatgtacggtttgattccggtagggctgccggatgaacgtcgtctggtgctgccggatgactggccggatgaactttatccgctgcgtaaagacagcatggattatcgtcaacgtccggcaccgactaccgatgctgaaacctacgagttcatcaacgaactgggcgacaagaaaaacaacgtcgtgccgattggtccgctgcacgtcacttccgacgaaccgggtcacttccgtctgttcgtcgatggcgaaaacattatcgacgccgactaccgcctgttctatgtccatcgcggcatggaaaaactggcggaaacccgcatgggttacaacgaagtgaccttcctctctgaccgtgtgtgcgggatctgcggctttgctcacagcaccgcctacaccacgtcggtggaaaacgcgatgggtattcaggtgccagaacgtgcgcagatgatccgcgccattctgctggaggtagaacgcctgcactcgcatctgctcaacctcggcctcgcctgtcactttaccggcttcgactccggctttatgcagttcttccgcgtgcgtgaaacctccatgaaaatggcagagatccttaccggtgcgcgtaaaacctacggcctgaacctgatcggcggaattcgtcgcgatctgctgaaagatgacatgatccagacccgccagttggcgcaacagatgcgtcgtgaagtgcaggagctggtggatgtgctgctgagcacaccgaacatggaacagcgtactgtcggcattggtcgtctggacccggaaatcgcccgcgatttcagtaacgttggcccgatggtccgcgccagcggtcacgcccgcgatacccgtgccgatcacccgtttgttggttatggcctgctgccaatggaagtccacagcgagcagggctgcgacgttatttcccgtctgaaagtgcgtatcaacgaggtctataccgcgctgaacatgatcgactacggtctggataacctgccgggcggtccgctgatggtggaaggctttacctatattccgcaccgttttgcgctgggctttgccgaagcgccgcgcggcgacgatatccactggagcatgaccggcgacaaccagaagctgtaccgctggcgctgccgtgccgcgacctacgcgaactggccgaccctgcgctacatgctgcgcggcaacaccgtttccgatgcgccgctgattatcggtagcctggacccttgctactcctgtaccgaccgcatgaccgtggtcgatgtgcgtaagaagaagagcaaagtggtgccgtacaaagaactcgagcgttacagcattgagcgtaaaaactcgccgctgaaataa

SEQ ID NO: 9594 - DNA, 135 bp, Escherichia coli
atgataccggagttaatcatttcaggggaagaagcgaacggcgagttcttgatgctggttccgggaaagatgctgttttgcagcttttgcgtgatgcttatgaagcaagtacgcaaaattgtatcggttggctaa

SEQ ID NO: 9595 - DNA, 1038 bp, Escherichia coli
atggtcatcaactgcgcctttattggcttcggcaaaagcaccacccgttaccatctgccgtatgtacttaaccgcaaggatagctggcatgtcgcgcatatttttcgccgccatgcgaagccggaagaacaggcccccatttactctcatatccatttcaccagcgatctcgacgaagtactaaacgatcccgatgttaagctggttgtggtctgcacccatgcagacagccacttcgagtacgcgaagcgcgcgctggaagccgggaaaaatgtgctggtcgaaaaaccgttcaccccgacgcttgcccaggcgaaggagctgtttgcgctggcgaaaagcaaaggactgaccgtcacgccgtatcagaatcgtcgttttgattcctgcttcctgacagcgaaaaaagcgattgaaagtggcaagttgggagagattgtcgaagtggaaagccattttgactattaccgcccggtggcagaaaccaaacctgggctgccgcaggatggcgcgttctatggtcttggtgtgcatacgatggaccagattatttctctgttcggtcgcccggatcacgtcgcttatgacatccgcagcctgcgtaataaagccaatcctgacgacacctttgaagcgcagctgttttatggcgacctgaaagccatcgtcaaaaccagccatctggtgaaaatcgattatccgaaatttatcgttcacggtaagaaaggttcgtttattaaatacggtatcgaccagcaggaaaccagcctcaaggctaatattatgccgggcgaaccgggattcgcagcggatgattcggtcggtgtgctggagtatgtcaatgacgagggtgtgacggtcagagaagagatgaagccggagatgggcgattacgggcgcgtttatgatgcgttgtatcaaaccatcaccaacggtgcgccaaattacgtcaaggaatctgaagttcttaccaatctggaaatccttgaacgaggatttgagcaagcctctccctccacagtgactctcgcgaagtaa

SEQ ID NO: 9596 - DNA, 447 bp, Escherichia coli
atgttctatgcgcagaaaaataccgataacacctatatgttaagcgttaatggtgcatgtcatgccaccgcatttaaccagcattccgaccgggatctgaaagacaacattcaggtgatcgataatgcaaccgaccgcatccgtaaaatgaacggctatacatacacgcttaaagaaaacggtatgccctatgctggtgtcattgcacaggaagctctggaagcaatcccagaagttgtaggttccgcaatgaaatatcaggacggtgcgagcggatcggaaggtgaagaaggtgaacgttattacacagtagattattctggtgttactggcttgcttgttcaggtagccagagagtcagacgacagaataacagcactggaagaagaaaacgcagaattaagacaaagattatctgcaattgatgcggcgcttgcgtctaaataa

SEQ ID NO: 9597 - DNA, 294 bp, Escherichia coli
atggatataacacctttccttcatgcgctttgtgctgtggctgcgcagctactgattggtctttttaccgggaactgggcttacggggcgatagccggttgtacgttcttcattgcgcgtgaacacacccaggcagaatatcgctggatcgaaatgttcgggcatggcaagcgaatgaatatgccgtggtggggcggttttgacccacgcgcgtgggatatggcaagcctgatggattttgctgtgccggtggtagcgtgtcttctggtctggttgttggttaatcgagggtga

SEQ ID NO: 9598 - DNA, 414 bp, Escherichia coli
atggctgacattgtcactggtttgaccgcactcaaaaccgcctttgatttagcaaaagatataaaaaatgccactggcgcatacaatgatgcagaaatgaggcttaagtttagtgagctttatagcgcgctatctgaagccaaaatagaactggctgatacacagctagaaatgtatgaactaaagctgaagatcgaagagttgcaagctaagcttgatgcatcggacgagcttgaatatagggaaaacgtatactggagggcctcacctatcaatggcaaaccaaacggtcctttttgcccaagatgttatgaaagttcagagaagaagctatcttcaatgagtcaagtaacggggcatgcaactattgctggaaaatacaaatgtaatacttgtaacgcctacgttagataa

SEQ ID NO: 9599 - DNA, 879 bp, Escherichia coli
atgctgtttaaatattgtcctattaatgagtattcaattaaatctctagtggaaaacaaactatatcttaatcatctcaacatgatgaatgacagtgctgaaggtttttgtaagataataagtggtttcccagattataatgaaaaaactgagagatatgatttgataataaaaacatggtgtggagagtctggctggctaccttctgaatatgaatataacgaatatattgattcaatgagagaactggaaccaaatgtcccgcaattgctggactctgcaaggatatcatgctttacgaatacggcgttaaaccctacaatgtgggctcattatgctaacaacagaacaggtatatgtatagaattcgatcaagacaaaataagagaactagaggatatctatatctttgacgtcaaatataaagatcgccctccgactattgatactgcagtactaacattaatagctgatcaggtgaactataatcatgatgcaatttatgatgattatcaagaaaagttcaaacatctttatgaacaagcatttgacgagggaagaaatttgcttttggaaatttacaatggaatattggcaactaaatctcaagaatggtcttatgaacaagaaaaacggctaatatatattttatccttctcacaagaagacaaattggcaaaaaaatataaaactggcataaacatatcactccctgaaggatgcattaaaagtgttatcctaggtgagaagacaagtgagcatgataaaaaacttatagtttcagctataaaaaaacattctaaacacattaagttgaagagagctacaataacacaaggcgaatatttattatctattcgtgatgaagtttttagctga

SEQ ID NO: 9600 - DNA, 441 bp, Escherichia coli
atggcaccagaaacgatcgatcactcaaccttacataaactggttgaatctggcgtagtggatgcagcacacgttattggcacccagggaggctggtcgttgaccgtgaaatacggccacactgaacggcctcttgcagcacaacgcagtcggcaaatccgcctgttcaaacggctggaaacggttgtcaactacctgaaagatgttggtattgcccggtttgaagtcgacgcctctaattacgacccggacggtcagaagaaaacgacccgaccagacagggctgaggcattaaaacgagctcatgaagctgccgcgtatgatgcctggtttcgagagcaggtgcaggccgccattgacgatccacgcccggcactctctcatgaagaggccaaaagtctatttgctgcccgtaaaaaagccttgctgaagggggattaa

SEQ ID NO: 9601 - DNA, 282 bp, Escherichia coli
atgcgtctggaatggaagccaatgtccctgtctgacagggagcaaatcatggaatacatcagtaaagataatccgctagcggcaatagcccttgataatcaatttgaagccattgcggaacaggcctgtgaacgcccggagatgtaccgggccggacgagtcgctggtacacatgaagccgttgtcaggccgcattatgtgcttgtctatcaagtggagggcgatacgctctcggtactgcgtgttttacataccgctctgcaatggccgccagcggaataa

SEQ ID NO: 9602 - DNA, 1302 bp, Escherichia coli
atgagtcagggtatcaataacgatatgactgccagtaaaccgcgccatatcgtcaaaaatctgcgttggtggatactggtcctttttttgctcggtgttactgtcaactacatcacgcgtaactcgctgggtattctcgcccccgaactgaaaagcaacctggggattaccaccgaacaatattcctggattgtaggtgctttccagctcgcctataccctattccaaccgttgtgtggatggctgattgacgtcattggcctcaaactgggctttatgatctgcgcgggactgtgggcgctggcctgtctgatgcatgcgggggcgggaaactgggtacatctggcgctgttgcgcttctttatgggcggtgcggaagccgcggcaaccccagcaaacgccaaaaccatcggtgaatggtttccaaaatcagaacgcccgatcgccgcaggctgggcaggcgtcggtttttccatcggtgccatgctggccccaccgattatctattttgcccacgcttcattcggctggcagggtgcatttatgttcactggcatcctggcgatgctgtgggtggtgctgtggtgggcgttctatcacaacccggataagcatccgaacctcagcaaagccgagctggactttatccgccaggataacgaagcgcccccgattaaattaccctttctgaccgcactgaaaaccgtgggcaaaaataaacgcttttacggtatcgctatcccggcctttatggcagaaccggcgtgggcggtgatgagtttctgggtgccgctatacctgtccaaaacctatggcatggacctgaagcagatcgcattattcgcctggttgccgttcctcgccgctgatcttggcagtattgccagcggctatctgaccaaactttacacccgcctgtttgggctgagtcgtgtgaactccgttgtcgcatcatcggtcagtggcgcattcttgatggtttcgctggcggtgatggcctttaccaataacccgtatatcgccatcgtccttatttccatcggcggcttcggtcaccagatcatctcctgcatgctgagcgcactggtggtggaatccttcgacaaaggtcagatggccactgttaacggcatgcgcggttctgccgcgtggatcgcaagtttcctgttctccctgattatcggggttaccgctgacaaaatcggctttaaccccctgtttatcgccatgggcttctttgacctgattggcgctttcttcctggtcacctttattgctgaacgtcgcgcaaaacgcgcctga

SEQ ID NO: 9603 - DNA, 981 bp, Escherichia coli
atggtgacaataaataacgcaagaaagattctacaacgtgtcgacactcttcctctttatttacatgcttatgcctttcatttaaatatgcggctggaaagagtgttgcctgctgatttacttgatatcgcaagtgaaaataatctacgtggcgtcaaaatccatgttctggatggcgagcgtttttctcttggtaatatggacgataaagaactctctgcctttggggataaagcccgccgtctgaaccttgatattcatattgaaaccagcgcttcagataaggcatctattgacgaagccgtcgccattgcgttgaaaactggggcatcgtccatacgtttttatccacgttatgaaggtaatttgcgcgacgtattatcgatcatcgctaacgacattgcctatgtacgggaaacgtatcaggacagcggcctgacttttacgatcgaacagcatgaagatttaaaaagccatgagctggtgtcgctggtcaaagaaagtgagatggaatctctttccttactgtttgattttgcgaacatgatcaatgcaaatgagcatcccatcgacgctttaaaaacgatggcaccgcatattacccaggtccatatcaaagatgccttgatcgttaaagaagagggtggcctgggtcataaagcctgtatttcaggtcagggtgatatgccgttcaaagcgttattaacgcaccttatctgcctgggtgatgatgagccgcaggtgacggcatatggcctggaagaagaggttgattactatgcgccggcgttccgctttgaagacgaagatgataatccgtggatcccttatcgccagatgagtgaaacacccctaccagaaaatcatttactggatgcgcggttacgtaaagaaaaagaagatgcaattaatcagataaatcatgtgcgtaacgtactacaacaaatcaaacaagaggcaaaccatcttctgaaccactaa

SEQ ID NO: 9604 - DNA, 1266 bp, Escherichia coli
atgctcacgaaaaagaaatgggcgttatttagtctattaacattgtgtggcggtacaatttataaattaccgtcgctgaaagatgcgttttatatcccgatgcaggaatatttccatttgaccaatggtcaaattggtaatgctatgtcggtaaactcatttgtcacgacagtgggcttttttctgtctatttattttgccgataaactaccgcgcagatacaccatgtcattctcactcattgcgacaggattactgggtgtttatttgacgacaatgccggggtattggggcatcctctttgtctgggcgctatttggcgttacttgcgacatgatgaactggccggtcttgctcaagtcggtaagtcgattgggcaatagcgaacaacaaggtcggttgtttggcttcttcgaaacagggcgtggcattgtcgataccgtggtggcattttctgcgttggcagtatttacctggtttggcagtggcttattgggttttaaagcaggcatctggttctattcccttattgtgattgccgtaggcattatcattttctttgttctgaatgacaaagaagaggcaccgtccgttgaggtgaaaaaagaagacggagcatcgaaaaacaccagtatgacctcggtgctgaaagacaaaactatctggcttatcgctttcaacgtcttcttcgtttacgcggtttactgtggcctgacattcttcattccattcctgaaaaacatctatctattgcccgttgcgctggtgggggcttacggcatcattaaccaatactgtctgaaaatgattggtggaccgattggtggcatgatttcagataagatcctgaaatcgccgagtaaatatctatgctacacctttatcatcagtaccgctgcgctcgtactgttgattatgctgccgcacgaaagtatgccggtatatttagggatggcatgtacgctgggctttggcgcgatagtctttacacagcgagccgtattttttgcacctatcggcgaagcaaaaattgctgaaaataaaacaggcgcggcgatggcgttgggtagctttattggttacgccccggcgatgttctgcttcagtctgtatggctacattctggatttaaatccggggattattggctacaaaatcgtgtttggcattatggcctgcttcgcattctgtggtgcggtggtttccgtaatgctggttaagcgtattagccaacgtaagaaagagatgctggcggctgaagcttaa

SEQ ID NO: 9605 - DNA, 1815 bp, Escherichia coli
atggttgccaatattaatctcattaaacaagaaagttattctattgttaatttagaaaaacaactaatgagtaatgaatcaccgaagcaaacgctattaaatgatttttcacatcgccttaaaatggaaggtgaggagcaactgtgcgattgtgttaacgaacttaaactcgggttgtcgagtaataataaatatgacctgtttaaaaataaagaaacctcactgtggaaacgcaaagtaccagaaagtgcagcgctggcaatgacgggaacagtatataaattatttggtagtcgcttactcaacgcccgcaatcagttagataaaaatctcctcgaaatggctatgcaaatggtttatggcaaagatatggtgacaaagtccggggatatattgattgatatacaattaaacaaggatggcagcctccagagtaagcactacacatttgatgtaggtgaagtcataaacagttataatattgacctctttgtgaatgcttcgagtattaatcaaacttacttacatgataaaaatcctggtgacgttattagcctgtatggcactttagataacattcctcttgtagttaaggaatgcacgggtaaaaatcatcaaattaacgttaaagccaaattgcctcaagaacgaagtgaaaaagttgagggtatgtgtgaaagaatgagaggtggcatctctatgtttaatcacactacaaaaacagctggtaatatagagcataatttgcagctaagttttctcgtggattcacgaccatcgatcacaaataaatactcagccaaagatgtaggggaagatatacttgcattgcccgtcaacgtatatcatgcagattttaaaattaaaatcaataacgcagtagagaaggcttcgtcaattgtgttatgtgctgtgcaaaaaaatctccatgcagcaagaaaggttcttagcgggataataggaaatgtgccaaaaaataataaaccaaaaacaatcatttttgatttacgttttcttagtgcaattaagcagaaagtttttttgggcagtgaaaaaacgttgtttgtaaagcataccgcaatgatgagggaggcatgtaaggaattaccgcagtcagtggaatatgttcctttagcctgtgaagcgcatagccatcgcagcgtcgcccttgccaaaaccgtagctgcgcccatcatggcgacaggcgtgggatcggctttaatgtatgcaacatcatcaggaccgtattatgcgcaaagtctttctggttcgccggatatcgagatgataaaaaatcgcatggctgaattgtttaaccagttggatatttctgcgcgcaacaaatatcgcccggcttttgataaatggaatgagctggtagataaattaaatcacgaaagaaatacagttccgtttgcgtgtttgaccaccattttagcgacggcgataaatgaaactcctgagggggatacgaatgttgccgttgtgatggggtgtaaatctgcgaaagatcgtacgatatccattgtccttggcaactcgatgttgcaaacactccttgaaaaacgcctcgccgatggtagagaaatagaaaagctttttgatcaacagggatattttagttgcgattcattaacagccaaagaattaatgatgttaaaagacctttttgatattcgagttcttcatctctctaacaaatttaatgttgggttgcaaggtaatatcaacacggatgttttacaagattcgttttttaaaaatgtcgatttcattcatgaatctaactcgtataccgtagggatgggagtctga

SEQ ID NO: 9606 - DNA, 222 bp, Escherichia coli
atgacccgtaatcgtgctgaacgtcgccatcatatggcgcgattaaaaaaatccgctgccgttatcgcactgcaggcgatggaagcaaaaaagcatcaggtatttgctttcgtactccctgtatttgttcttgttggatgtgtgggcatcgacgctatcataatggtccccgcgtatcggaaattcgtgcaaaagcacgctatgcgaattaagggaaaatga

SEQ ID NO: 9607 - DNA, 129 bp, Escherichia coli
atggtgtcgaataccagcgtaagctgcgcgaggaatggtaatggcaaaaagatttggctatttgatatcgatattgttatcgatttgttcagtgtgaaaattgaggcaaaacaggcactggcagcatag

SEQ ID NO: 9608 - DNA, 246 bp, Escherichia coli
gtgatcactaaaaatgaacttaacgtgctgaacgttatgactgagaaagatataaactggaactggatgaatctcgatcgcacactatccataaggcaaattccaggattcgggaatgttgttaacattgttaacaaattagctaacgaaggtttggttattattgaggatagcgggaataagtctatgcctcactaccacgttagtgaaaagggatacaatctcgtgcaacgtgagaataaataa

SEQ ID NO: 9609 - DNA, 534 bp, Escherichia coli
atgacaacctgggtggaagttgttgatacggctgtgaagattggatttggtggtataataacgctgacaggtacatttattatttcaaaaatgaatcataaacatgaatttgataaagataaaagtcgtcgctattatgattcattagaatctgtaagcactcaaattgaggatatgacacatatatccttacgctattgggctttgataattgaatgggttagaaataaggaacaaaagggattggatcttaccagagaaaggcaagaggagttaaataaaacaaaattagatttatttgacaattttaaaagcttgacagttgcagagtcgaagcttttgcttttaggtttaactgacacatcagttgctttaagagactacggtgattatttaaaagcaatgcggagaaattattatgatggcaaacctgatattaaggagtcagatcttgaaaatgtaagggttacgttactttacaaacgtaaagtcctgtttgattttttgtctagggattataaaaaaggaatatag

SEQ ID NO: 9610 - DNA, 924 bp, Escherichia coli
atgccatcactagatactatagttttaaacctcctaagaggggctgttcctgagaatgctgatgaactttgtcagacctggaagagctataaacacacggtcgaacttgcagaggatgccctaggatcaacaatgaatgcaactagtaggcgcatcgagtttgactctaaaactatcgatttcttttggttatttgggtttagtacatggtttacgattgagacatatgctccagccctagtaaaagcatgcttactaggtgtgacgttagagtcggctttagaatctgatgaagaacgtggccaatttgaactaaattataaacagcatttgtatatttcaaagtctttgctaagcgttgcgaatacggctgatattacatggcctcaagatattccttttccaacagatgcgcgagatagtttgaataatattcaagaacaggctgtttttgatctagtagcattagcattgtctttttctatacttcatgagtataaacatgttcaagcacgagccgaagaaaaaaaacatgaaaatccccaagagaaggatgaagaagagttagcctgtgactcttgggctcgtgaatatataactaagggcgtcggagtctatgctaaaaaagctgggcatacctatgaagaggtcatgcaaaaacgagcaatggggataacacttgccgcctttactatacacgctttaacatcagatatcgataaatggggtggtgaagagtatccatctatagcagtaaggattcaaacaatgataggggggtacaacctttcagattcatcgcccttctggtgttttacagcttgtcttctcatcgcggtgatgagacaggaaaaccgtaagcttgattataaagctacaacatataaagagtttgttactaggctcctttcggaattacactaa

SEQ ID NO: 9611 - DNA, 1380 bp, Escherichia coli
atgtggaaagataagtatatttgtcataaatgcgtgaacgataaatatgtcatgcagcatataataaaaaccggaaataatgttcggatttgctcttactgcaaaaggaagcgtaaaaacatccacctcaaatatattctcaagatgatgaatgaggtttttgagtactactatgatatgtatgaggatatctatgattccgggcgcggtgatagcgcgcaggatgtcatctgcggagaactgggcgtcgaatgggacgtagctgaagatatttatgaatttctttgtgatgaatataatccgcataacgattatgactacatccggtataatgatgggtttgtttatcggcacataaatcactatagcggagagcttgcgcatacctggagtaaagccactgactcccttatgaaagaaacacgatattttaaccgtgaagttaatgatttcctggattcacttttcagtgatatcgataaactaaaaaacagagacagtaattcaccgataaaaactctgactgatgaggttcatctttttcgtgcaagggtctttgaggaccaagaggaagtaaagcaagccttggagcagcccgagaaaaattttggacctcccccatcaactttggctcggtcgggccgtatgaacgcacaggggatttcagtattttacggtgcaacctcagtgaatttggcaattgctgaagtaaggccgcccgtcggcagtattgtagtaacggcctgttttgtaccgttacgcgagctaaaagtgctggacatttctgcccttgactcgattagtttcggctcaggtagtaaatttgatcctcagactcgcaaaaccagtgagcgcgcgatttttttcagtacgctttcccgtaagttgacgcttcctacttttggaaaaaggcaggacagtgattacctcatcacccaagtggttgccgattacctaggtgaccgaaataaatttaagcttgatggtgtcagctttaaatctacccaggtagatgccaacggtgaggatgctgagataggatataatgtcgttctgtttaataagtcttccggcgtcaggcatgccgcagataaatctcgccgatataatgttgagatgtatgaacacatcgaagatgaccagtatgcttttgttccggaaattcagttaatagttgaggaacaaataaaaccgagacatatgggttcattttcatcctcgcatgacaaaaatgatgcactactgttgaaaaccaacagtatgacttatcataaaattactggtgtaaaataccaaacaagtgagacggagattcatcagggagatagtgttcgaaaacaagagccacctcagaaattcgatgacctgatggacttctga

SEQ ID NO: 9612 - DNA, 1122 bp, Escherichia coli
atgtcaggctcccttattccgaacgcccaccgcgcccatcccgcacataccagcaacggatctggaggtaacgtgcggatattacttcgacctgttctggtaccggaactcgggctggtggtccttaggccgggccgtgaatccatgcaagtatttcataaccctcgagtgctggtggagcctgaaccgaaaagcatgcgcggtctgccgtccggagtcgtccctgccgttcgccagccgctggcggaggataaatcattactgccatttttcagcgatgagcgggtgattcgtgctgctggcggcgctggggcactgtctgactggctgttgcgtcatgtcaaatcctgccagtggcctcatggtgactatcatcacagtgaaatcgtcatacatcgttacggtaccggcgcgatggtgttgtgctggcactgcgacaaccagttgcgtgaccagacatccgaatcactcgggcaacttgctcatcaaaacctgtcagcatggatgattgacgtcatacgccatgcaatgaatggcacgcaggagcgggaattgtcgctggctgaattatcctggtgggcggtctgcaatcaggtggcggacgcgcttccggaggcagtattacgtcgttctctggggttacgtgcggaaaaaatccgctccttgtaccgcgaaagcgacatcgtaccgggagagcagaccgccaccagcatactgaagcagcgcacaaaaaatcttgcgccgttgcctcatgcccaccagcaacagaacccaccacaggaaaagacggtggtatgcatcaccgttgatccggagtctccggaatctttcatgaggcgacctaaacgtcgccgttgggtaaatgagaaatatacgcgctgggtgaagacacagccgtgtgcgtgttgtggtcagccagccgacgatccccatcacctgattggtcacggtcagggagggatgggaacaaaggcccacgatattttcacgctaccgttgtgccgggaacatcacaacgaacttcatgcggatccgctggcgttcgaagaaaagcatggttcccaggttgatttaatttttcgttttcttgatcacgcctttgcaaccggcgtgctcgggtaa

SEQ ID NO: 9613 - DNA, 360 bp, Escherichia coli
atgcgtatagagtttgttttgccttatccgccgacggtgaatacttactggcgacgtcgtggcaacacatattttgtatcaaaagtcggtgagcgttatcgccgtgatgtggcactaattgttcgccagcagcggttgaaattaaacctgtccggaaggctggcaataaaaattattgcagagccaccggataagcgccgccgcgacctggacaatatcctgaaggcaccactggatgcgctgacgcatgccggacttctcatagacgacgagcagtttgatgaaatcaatattgtgcgcggactgcctgttcctggtggtcggctggggataaaaatcacagaactggagtgcgcatga

SEQ ID NO: 9614 - DNA, 1428 bp, Escherichia coli
gtgagcgaaacagcggcggcgaactcggcgaaagcatcggcagcaagccagacggcagcaaaagcaagtgaagatgctgccagagaatacgcaaaccagacagcagagccgtacagatatgttttacagccgctgccggatgtgtggataccctttaatgattcgctggatatgattacgggctattctccgggttataaaaaagtgaagattggtgataatgtggttcaggttgccagtgataaacaggttaatttcagtcgcgcatcaacggcaacatatatcaacaaatctggcgaactgaaaacggcggaaattaatgagccgcgatttgagtgtgatggcctgcttattgagggacaaagaacgaacttcttccagaacagtacagacccttcgaagtggaataagtcaacttcactggacgttacagaaacaggcacagatagtttcgggtttaattatggtcggtttgtcgtacaggattcgattgttggtacaagtaaagcgcataccattatcggactgtattcgagtaccggaggggttgatacttcaggggacgaaaagcatgtaactatatcctgtcgggtaaaaagtgaagttgataatatcgccgttcgtattttatttgaacattatgatggggaggtaaggacatcaataggagcagcaaacctgaaccttaccacccgcataattagcaagacaggtcagacaagccgtgttacagcaaggtctgttaaggatgatgcaactggctggatattttttgaggctacattaaaagcagatacaacagaaaatacggttggtggttttgtccagtattctccggatacagggcagatggttacatcaggggattatctcgatgtaaccactccacagattgaggctggtacaggcgcatcatcttttattgttacggggacggcaccggcaacgcgggcaagcgatatggtgacagtcccaatcaagaataacctttataatcttccttttacggttctttgtgaggtacataagaactggtataaaacgccaaatgtagcgccgcgtgtttttgataccggcggtcatcaaaccggagcggggatcgtaatggggtttggttcatcaggtgggtacgacggttttccgtattgtgatataggtggttcaaaccgacgaataaatgaaaatgccgggctggaaaaaatgcttattggtatgcgggtaaagtccgaacggtccacatgtgtagtcagtaacggtaagttaagcagcgaaactaaaaccaaatgggaatatatccggagtacagcaaccattcgcattggtggacaaactacagcaggattacgccatttatttgggcatgtgaggaattttcgtctctggcataaagagctaacagatgcgcagcttggggaggttgtggagtga

SEQ ID NO: 9615 - DNA, 288 bp, Escherichia coli
atggatatcacgtcgatacttcatgcgctttgtgccgtggcggtgcaggtactggctggtctttttaccggaaactgggcttacggggcgatagccggttgtacgttcttcattgcgcgtgaacacacccaggcagaatatcgctggattgaaatgttcgggcatggcaagcggattaacatgccgtggtggggcggttttgatccgcgcgtgtgggatgtggcaagcctgatggattttgctgtgccggtggtggcgtgtctgctgatctggatgttgatccgttaa

SEQ ID NO: 9616 - DNA, 183 bp, Escherichia coli
atggggagagatttagtgatgtggaatattatggtgctgatgaatatttatatcccggattggcagagaaaaagcttttttcatgcactatttttgcaaatatttctatatggacggcggttttgttgcggattaattcataaagaaatgcatttgggtgttggctggaagagacgctggtag

SEQ ID NO: 9617 - DNA, 1188 bp, Escherichia coli
atgaaaagaaaagttctggcaatgctggtcccggcgttattagttgctggcgcagcaaatgcggctgaagtctataataaagatggtaataaactggatttgtacggaaaagtagcgggcctgcactacttctctgatgatgctggcagcgatggcgacatgtcatatgcccgtatcggtttcaaaggtgaaactcagatcgctgaccaattcactggttatggtcagtgggaatttaacattggcgcaaacggtcctgaaagcgacaaaggtaataccgcaacgcgtctggcatttgcaggtttaggctttggtcagaatggtactttcgactatggtcgtaactacggtgtcgtatatgacatcgaagcatggaccgatatgctgccagaatttggtggcgatacctatgctggtgccgacaacttcatgaacggtcgtgctaatggtgttgcaacctaccgtaacaatggcttctttggtcaggtcgatggcctgaactttgctctgcaatatcagggtaataatgaagatgatggattattcggtcaggaaggttctggtaacggtaatggccgtaagttagctaaagagaacggcgacggcttcggtatgtccacttcctatgactttgactttggtttaagtctgggcgctgcttactctaactctgaccgtaccgacaatcaggttcacaaaggtactcataacactcgttatggagatcgcttcgatgcaactgctggcggtgaaacagcagaagcatggaccgttggtgctaaatacgacgctaataacgtttacttagcagctatgtatgctgaaacccgtaacatgactggttacggtgatgctgatgcgatcgctaacaaaacccaaaactttgaagttgttgctcagtatcagttcgacttcggtctgcgcccgtccatcgcttacctgcaatctaaaggtaaggatttaggcggtgtaaatagtgataacttcgacagccagggcaatcatcattacaccaacaaagatctggttaaatatgttgatattggtatgacctactacttcaacaaaaacatttccacctacgttgattacaaaatcaacctggtggacaacgacgacgacttctacaaagaaaacggcatcgctaccgatgatatcgtagctgtgggcttagtctaccagttctaa

SEQ ID NO: 9618 - DNA, 303 bp, Escherichia coli
atggaatacggttcgacaaagatggaagagagactctctcgcagccctggcggcaaattggctttgtgggcattctatacatggtgtggctatttcgtctgggcaatggcgcgttacatctgggtgatgagccggatccctgatgccccggtgtcgggatttgaaagcgatttaggctctaccgcgggaaagtggttaggggcactggtcggatttttatttatggctctggtcggggcattgttaggcagcattgcctggtacacccgacctcgtcccgcacgttgcagacgctatgaataa

SEQ ID NO: 9619 - DNA, 1695 bp, Escherichia coli
gtgcagcacgagacaaaaatggaaaaccagagctggttgaaaaaactcgcacgccgcctggggcctggtcatatcgttaatctctgctttatcgtggtattgcttttttccaccttgctgacctggcgtgaagtggtagtgctggaagatgcctatatctccagccagcgtaatcatctggaaaacgtagccaacgcgctcgataagcatttgcagtataacgtcgacaaactgatctttttgcgtaatggcatgcgcgaagctctcgtagcgccactggatttcacctctctgcgtaatgccgtaaccgagttcgaacagcatcgcgacgagcacgcctggcaaatcgaactcaaccgacgacgcaccctgccagtcaatggtgtgtcggatgcattagtcagcgaggggaatctcctgtctcgcgaaaatgaaagcctcgacaatgaaattaccgctgcactggaagttggttacttgctgcgactggcacacaactcctcgtcgatggttgaacaggcgatgtatgtctcgcgtgccggattttacgtttcgacgcagccgaccttgtttacgcgcaatgtaccaacgcgttattacggctatgtcacccaaccctggtttatcggccattcgcaacgagaaaatcgtcaccgcgcggtacgctggttcacttcgcaaccggaacacgccagcaatactgaaccgcaggttaccgtcagtgttccggtagacagtaataactactggtatggcgtgctggggatgagtattcccgtgcgtaccatgcagcaatttttaagaaacgccatcgataaaaacctcgatggtgagtatcagctctatgacagtaagctgagatttttgacctcttccaatcctgaccatccaacagggaatatttttgatcctcgtgaactggccttgctggcgcaggcaatggaacatgacacgcggggcggcattcgtatgaacagtcgatatgttagctgggaacgtctggaccatttcgacggtgtgctggtgcgcgtccatacgctaagcgaaggcgtgcgcggcgatttcggcagtatcagcattgcattaaccctgctgtgggcgctctttaccaccatgttactcatctcctggtatgtgattcgccggatggtcagcaacatgtatgttttgcaaagctcgttgcagtggcaggcgtggcacgacaccttaacgcgtttatataaccgtggcgcactgttcgaaaaagcccgtccgctcgctaaattgtgtcagacgcaccaacatcctttttctgtcattcaggtcgaccttgaccattttaaagcgattaatgaccgctttggtcatcaggcgggcgaccgtgttctttctcatgctgccggattaattagcagttccttgcgtgcgcaggacgttgccgggcgggtcggtggtgaggagttttgtgtgattctgccaggcgcgagcctgacgcaggctgcggaggttgcagaacgtattcgcctgaagctaaatgaaaaagagatgttgatcgccaagagtacgacgatacgcatcagtgcctcgctgggggtaagcagcagcgaggaaaccggtgattatgattttgaacaactccagtcactggccgaccgtcgactttatctcgctaaacaggccgggcgcaatcgggtattcgcgagcgataacgcttaa

SEQ ID NO: 9620 - DNA, 345 bp, Escherichia coli
atggcacaatttaccgcgcgtcttaacgaactgggcttgcagtttatgcagggtgcgcgcttctggcacgtcctggatgcctctgccggaaaagatcaggctgccaactggattatcgcgacctatcaacaattgtcaggcaaacgcccaaccacacttggcctgggcgatggaccaaacgatgcgcccttactggaggtaatggattacgcggtgattgtgaaagggttaaaccgtgaaggggtgcatctgcatgatgaggatccggcccgcgtctggcgaacgcagcgtgaaggaccggaaggctggcgtgaagggctggaccattttttctccgcccgttaa

SEQ ID NO: 9621 - DNA, 1374 bp, Escherichia coli
atgaccacgcgcctgactcgctggctaaccacgctggataactttgaagccaaaatggcgcagttgcctgcggtacgtcgctatgggcgattaactcgcgctaccgggctggtgctggaagccaccggattacaattgccgctcggcgcaacctgtgtgattgagcgccagaacggcagcgaaacgcacgaagtagaaagcgaagtcgttggctttaacggtcaacggctgtttttaatgccgctggaggaagtcgaaggtgtcctgcccggcgcgcgtgtttatgccaaaaacatttcggcagaagggctgcaaagcggcaagcagttgccgctcggtccggcgttattaggtcgcgttctggacggcagcggtaaaccgctcgatggcctcccctcccccgatacgacggaaaccggtgcgctgattaccccaccatttaacccgttgcaacgtacaccgattgaacatgtgctggacaccggcgtgcgcccaatcaatgccctgcttaccgtcgggcgcgggcagcgtatggggctgtttgccgggtcgggcgttggtaaaagtgtgctgctggggatgatggcacgttacacccgcgccgatgtcattgtcgtgggtttgattggtgaacgagggcgcgaagtaaaagattttattgagaatatcctcggtgccgaagggcgtgcacgctccgtggtgattgccgctccggcggatgtttctccgctcctgcgaatgcagggtgccgcctatgccacgcgcattgccgaagattttcgcgatcgtggtcagcatgtgttgctgattatggactccctcacccgctacgcgatggcccagcgtgaaattgcgctggcgattggcgaaccacctgccactaaaggttatccaccgtcggtgtttgccaaattaccggcactggtcgagcgtgccggaaatggcattagcggcggcggctcgattaccgcgttttataccgtgctcaccgagggcgatgaccagcaggaccccattgccgactccgcgcgggccatcctcgacggtcacattgtgctgtctcgccgactggcggaagccgggcactatccggctatcgatattgaagcgtcgatcagccgcgcaatgacggcgttgatcagcgagcaacattatgcgcgagtgcgcaccttcaaacagctgttgtcgagttttcagcgtaaccgcgatctggttagcgtcggtgcgtatgccaaaggcagcgatccgatgctcgataaagccatcgccctgtggccgcagctggagggctatttgcaacaaggcatttttgaacgcgcggactgggaagcgtctctccaggggctggagcgtattttcccgacagtgtcataa

SEQ ID NO: 9622 - DNA, 804 bp, Escherichia coli
atgtttccattaaatgatctgtcgttaaaagctcagtcggttcaattaaataaaatcacatctaatactgagtctacgataaaacaacaagatttagtatctgatgatgcaatgataaatgaattatcaagtgagttagtcagttgtcttggaaatggtaggtttacaccaattagtgaagacagcaaattactgaatatgctgtcagaatttaagttgttgcactcagaatatttcggatggggtgattatagtctctggtttcaaggtttctcgatttatgataagacaggttttatcatgatagaaaaaagtcagggagctggtaatccacccattcggcatacattagagtttatatcgactaatattgcagagtttctagacaagttaacgaaaattacagatgccagactttgcaaaggtttcagtgactgggctaattcagtcaaagaaggcgcatcgaatgacttcaaagaaaatgtggatatagcattggtgagattgtttaaatgtgttgaactccacaatagtaaacttgacttaacagatcttcacttggggtctttgccacctcttccagactggattgaggtgctttctcttcgtcataatggccttgccacaatacagattcccaaattctgcaaagaattagaactcgattttaataattatatggtatttccaaaagtatccgatggaattacccaggtctccgtagataataatctgatatcgcgtgttgactcatctccgtcaaaggctatgaaaatttttatttatcgcaataaaatatggtaa

SEQ ID NO: 9623 - DNA, 480 bp, Escherichia coli
atgttcacgattaaaacagatgatctcacccatccagcagtgcaagcattagtggcttaccatatttccggcatgctgcagcagtctccccccgaaagcagtcatgctttagatgtgcaaaaattacgtaacccgacagtgacattctggtcagtatgggaaggcgaacaactcgcaggaattggtgcgctgaagttgctggatgataaacatggcgaactgaaatcaatgcgtaccgcgccaaattatttacgtcgaggtgtcgccagtctgattttacgccacattttgcaggtcgcccatgacagatgccttcatcgcctgagcttagaaacgggtacacaggctggatttacggcctgccatcaactttatttgaatcatggtttcgttgattgcgaaccgtttgctgattatcaacttgatccacacagtcgatttttgtcattgacgctatgcgaaaataatgaattgccatga

SEQ ID NO: 9624 - DNA, 669 bp, Escherichia coli
atgtgtggacgctttgcccaatcccaaacgcgtgaagattaccttgcgcttctcgcggaagatattgaacgcgatattccctacgatacagaacccattggcagatacaacgtcgcgccgggaaccaaagtccttctgctcagtgaacgtgatgaacaccttcatttggatccggttttctggggatatgctcccggatggtgggataaaccgccgctgattaacgcccgtgtagaaactgccgcaaccagtcgcatgtttaaaccgctctggcaacatggtcgggcaatctgttttgccgatggctggtttgagtggaaaaaagaaggcgacaaaaagcagccttattttatctatcgtgctgatggacaacctgtttttatggccgcgataggtagcacaccgttcgagcgcggtgacgaagccgaaggatttttgattgtcactgcagcagcagaccagggtctggtagatattcatgaccgccgcccactggtactgtcgccagaagctgcgcgggaatggatgcggcaagatattggcggtaaagaagcctcagaaatcgctaccagtggctgtgtgccagcaaaccagttcacctggcacccggtatcgcgcgcggtgggtaatgttaaaaaccagggcgcggagttaattcaacctatctga

SEQ ID NO: 9625 - DNA, 1602 bp, Escherichia coli
atgtttaatcgtattcgaatttcgaccacgctgtttttaattttgattctctgcgggatcttgcagattggcagtaacggcatgtctttttgggcatttcgcgacgatttgcaacgactgaatcaggtcgaacagagcaatcagcaacgtgcggctttagcgcaaactcgggcggtaatgttacaggccagtaccgcgctgaacaaagcgggcactctgacggcgcttagctatccggcggatgacattaaaacgttgatgacgacggcgcgcgccagtctgacgcaatccaccacgctgtttaaaagttttatggcgatgactgcgggcaacgagcacgtcagggcgttgcaaaaagagacggagaaaagttttgcccgctggcacaacgatctcgaacatcaggcgacctggcttgaaagtaatcaactttcggatttcctcactgcgccggtgcaggaatcacagaatgcgtttgacgttaactttgaggcctggcagctggagatcaaccatgtgctggaagctgccagtgcgcaaagccagcgtaactatcacatttcggcgctggtgtttatcagcatgattattgttgcagcgctctacatcagcagtgcgctgtggtggacgcgcaagatgattgttcaaccactggccatcatcggtagccattttgacagcattgctgcgggtaatctggcgcgtccgattgcagtgtatggtcgcaatgagatcaccgccatttttgccagtctgaagaccatgcagcaggctttgcgtgggacggtaagtgatgtgcgtaagggaagccaggagatgcacattggtatcgcggagattgtcgcaggcaataacgatctctcaagtcgtaccgaacagcaggcggcatcgctggcacaaacggccgccagtatggagcaattaaccgccacggtagggcaaaacgccgataacgcacgacaggcgtcggaactggcaaaaaatgccgcgacaacggcgcaggcgggcggtgttcaggtcagtaccatgactcacaccatgcaggagatcgccaccagctcgcaaaaaattggcgacattatcagcgttatcgacggcattgctttccagaccaatattctggccctgaatgcggcagtggaagcggctcgcgccggagagcagggtcgtggttttgcggtagtggcaggtgaagtgcgcaatcttgccagccgtagcgcccaggcagcaaaagagatcaaagggctgatcgaagagtcagtcaatcgtgtccagcagggttcgaaactggtgaataacgccgccgcgaccatgactgatattgtcagttcggtgacccgcgtgaacgacattatgggagaaattgcttcggcctcggaagaacaacggcgggggattgagcaggttgcgcaggctgtcagccagatggatcaggtgacacagcagaacgcctcgctggtagaagaagcggcggcggcaacggaacaactggcgaaccaggctgaccatctttcgtcgcgtgtggcggtatttacccttgaagaacatgaagtagcacgacatgagtcggcgcagttacatattgcgccagtggtatcctga

SEQ ID NO: 9626 - DNA, 861 bp, Escherichia coli
atgacttcatctctgccctgtgggcaaacgtctttattgttacagatgaccgagcgcctggcgctttccgacgcgcattttcggcggataagtcaattgatctatcaacgagccgggatcgtcctggccgaccataaacgcgacatggtttacaaccgactggttcgtcgtttgcgttcgctgggactgacggatttcggccattacctgaacttgctggaatctaatcagcacagcggtgagtggcaggcgtttatcaattcgctgaccacgaatctgacggcatttttccgtgaggcgcatcattttcctctgctcgcggatcacgcccggcgtcgttctggcgagtatcgcgtatggagcgcggcggcttcgaccggcgaagagccgtacagcattgcgatgacactggctgacacattgggcaccgcgcccggacgctggaaagtgtttgccagcgacattgacaccgaagtgctggaaaaagccagaagcggtatttatcgccatgaagagttgaaaaatctgacgccgcagcaactgcagcggtacttcatgcgagggacgggaccgcatcaagggctggtacgcgtgcgtcaggaattggcgaattatgttgattttgccccgctgaatttactggcgaaacagtacaccgtgccggggccgtttgatgcgatcttctgtcgtaacgtcatgatctacttcgatcaaactacccagcaggagattttgcgccgctttgttccgctccttaaacccgacggattgctgtttgcgggtcactctgaaaactttagccaccttgagcgccgcttcacgctgcgtggtcagacggtgtatgcgctaagtaaggattaa

SEQ ID NO: 9627 - DNA, 2079 bp, Escherichia coli
atgagtaatctggccgcgatgctgcgcctgcctgcaaacctgaaatcgacacaatggcagatccttgccggaccgattttgatcctgttgatcttgtcgatgatggtgctgccactgcccgcattcatactcgacctgttgtttaccttcaatattgccttgtcgatcatggtgttgctggtggcgatgtttacccagcgcacgcttgagtttgctgcgtttccgaccattctattgtttactacgttgttgcgtctggcacttaacgtagcttcaacccgcatcattttgatggaagggcataccggcgcggcggcggctgggaaggtggtcgaagcgttcggtcacttcctcgttggtggcaatttcgctatcggtatcgtggtgttcgtcattctcgtgatcatcaactttatggtcattaccaaaggtgccgggcgtatcgcagaagtgggggcgcgctttgttctcgatggtatgccgggtaagcagatggcgattgacgccgaccttaacgccggattgattggtgaagatgaggcgaaaaaacgccgctccgaagtgactcaggaagccgatttttacggctcaatggacggggcaagtaagtttgttcgcggcgatgccatcgccgggatcctcatcatggtcattaacgttgtcggcgggttgctggtcggcgtgctgcaacatggcatgagcatgggacacgccgcggaaagttatacgctattgaccattggcgacggtctggtggcacaaatcccggcgctggtgatttctaccgccgcgggggtcatcgttacgcgtgtcagcaccgatcaggatgttggcgagcagatggtgaatcagcttttcagtaacccgagcgttatgttgttaagcgccgccgtgctcggtttactcggcctggtgcctggaatgccgaacctggtatttttgctgttcactgccggattgcttgggctggcctggtggatccgcggacgtgaacaaaaagcgcctgccgaaccaaaaccggtaaaaatggcagagaataataccgttgtcgaagcgacgtggaacgatgtacaactggaagattccttgggaatggaagtgggttatcgactgatcccgatggttgatttccaacaagatggcgagttgctgggccgtattcgtagtattcgtaagaaatttgctcaggagatggggtttctgccgccggtggtgcacattcgcgacaatatggatctgcaacctgcacgttatcgcattttgatgaaaggcgtagagattggcactggcgatgcctatccggggcgctggctggcaattaacccaggtaccgctgccgggacgttacctggtgaggcgaccgtcgatccggcatttggcctgaatgctatctggattgaaagtgcgcttaaagaacaggcgcagattcaggggtacaccgtggttgaggccagcacggtggtggcaacgcatcttaaccacctcattagccagcatgccgcagagctgtttggtcgtcaggaggcgcaacagctgttggatcgcgtcgcccaggagatgccaaagctgacggaagatctcgttcctggcgtcgtcacgctcaccacactgcataaagtgctgcaaaatctgctcgatgaaaaagtgccgattcgcgatatgcgcactattctcgaaacgctggcggaacatgcgcccatccaaagcgatccacatgaattaaccgccgtcgtgcgcgtggcgttgggacgggcgattacccagcagtggtttcctggcaaagatgaagttcatgttattggcctcgatacaccgctggaacgtttgttgctacaggcgttgcagggcgggggcggactggagccagggctggcggatcgtttactggcgcaaactcaggaagctctatcccgtcaggagatgttgggtgcgccgccagttttattggtgaaccacgcgctgcgaccattattgtctcgcttcctgcgccgcagcttgccgcagttagtggtgctgtcgaatctggaactatctgataaccgacatatccgcatgacggcgacaattggcggtaaatga

SEQ ID NO: 9628 - DNA, 693 bp, Escherichia coli
atgatgactaaaataaagttattgatgctcattatattttatttaatcatttcggccagcgcccatgctgccggagggatcgcattaggtgccacgcgtattatttatcccgctgatgctaaacagactgcggtatggattagaaatagccataccaatgagcgctttctggtcaattcgtggattgaaaacagcagcggtgtaaaagaaaagtcattcatcattacaccgccactgtttgttagtgaacccaaaagcgaaaatactttgcgtattatttacaccggtccaccgctggcggcagatcgtgagtctctgttctggatgaatgttaagacgatcccttcggtagataaaaatgcattgaacggcaggaatgttttgcaactggcgattttatcgcgcatgaaattatttctccgtccaattcaattacaagaattacccgcagaagcgccggacacactcaagttttcgcgatccggtaactatatcaatgttcataatccatcacctttttatgtcaccctggttaacttgcaagtgggcagccaaaaactggggaatgctatggctgcacccagagttaattcacaaattcccttaccctcaggagtgcagggaaagctgaaatttcagaccgttaatgattatggttcagtaaccccggtcagagaagtgaacttaaactaa

SEQ ID NO: 9629 - DNA, 618 bp, Escherichia coli
atgggttgccagaaagatattgcagagaagatacaaaaacagggaggtgattatttattcgcggtaaaaggaaaccaggggcggctaaataaagccttcgaggaaaaatttccgctgaaagaattaaataatccagagcatgacagttacgcaatgagtgaaaagagtcacggcagagaagaaatccgtcttcacattgtttgcgatgtccctgatgaacttattgatttcacgtttgaatggaaaggtctgaagaaattatgcgtggcagtctcctttcggtcaataatagcagaacaaaagaaagagccagaaatgacggtcagatattatattagttctgctgatttaaccgcagagaagttcgccacagcaatccgaaaccactggcacgtggagaataagctgcactggcgtctggacgtggtaatgaatgaagacgactgcaaaataagaagaggaaatgcagcagaattattttcagggatacggcacatcgctattaatattttgacgaatgataaggtattcaaggcagggttaagacgtaagatgcgaaaagcagccatggacagaaactatctggcgtcagtccttgcggggagcgggctttcgtaa

SEQ ID NO: 9630 - DNA, 954 bp, Escherichia coli
atgatgacagtctcccgggtgatgcataatgcagaatctgtgcgtcctgcaacgcgtgatcgcgtattgcaggcaatccagaccctgaattatgttcctgatctttccgcccgtaagatgcgcgctcaaggacgtaagccgtcgactctcgccgtgctggcgcaggacactgctaccactcctttctctgttgatattctgcttgccattgagcaaaccgccagcgagttcggctggaatagttttttaatcaatattttttctgaagatgacgctgcccgcgcggcacgtcagctgcttgcccaccgtccggatggcattatctatactacaatggggctgcgacatatcacgctgcctgagtctctgtatggtgaaaatattgtattggcgaactgtgtggcggatgacccagcgttacccagttatatccctgatgattacactgcacaatatgaatcaacacagcatttgctcgcggcgggctatcgtcaaccgttatgcttctggctaccggaaagtgcgttggcaacagggtatcgtcggcagggatttgagcaggcctggcgtgatgctggacgagatctggctgaggtgaaacaatttcacatggcaacaggtgatgatcactacaccgatctcgcaagtttactcaatgaccacttcaaatcgggcaaaccagattttgatgttctgatatgtggtaacgatcgcgcagcctttgtggcttatcaggttcttttggcgaagggggtacgtatcccgaaggatgtcgccgtaatgggctttgataatctggttggcgtcgggcatctgtttttaccgccgctgaccacaattcagcttccacatgacattatcgggcgggaagctgcattgcatattattgaaggtcgtgaagggggaagagtgacgcggatcccttgcccgctgttgatccgttgttccacctga

SEQ ID NO: 9631 - DNA, 1434 bp, Escherichia coli
atgacgcaatctcgattacatgcggcgcaaaacgcactagcaaaacttcacgagcgccgaggtaacactttctatccccattttcacctcgcgcctcctgccgggtggatgaacgatccaaacggcctgatctggtttaacgatcgttatcacgcgttttatcaacatcacccgatgagcgaacactgggggccaatgcactggggacatgccaccagcgacgatatgatccactggcagcatgagcctattgcgctagcgccaggagacgagaatgacaaagacgggtgtttttcaggtagtgctgtcgatgacaatggtgtcctctcacttatctacaccggacacgtctggctcgatggtgcaggtaatgacgatgcaattcgcgaagtacaatgtctggctaccagtcgggatggtattcatttcgagaaacagggtgtgatcctcactccaccagaaggcatcatgcacttccgcgatcctaaagtgtggcgtgaagccgacacatggtggatggttgtcggggcgaaagatccaggcaacacggggcagatcctgctttatcgcggcagttcattgcgtgaatggaccttcgatcgcgtactggcccacgctgatgcgggtgaaagctatatgtgggaatgtccggactttttcagccttggcgatcagcattatctgatgttttccccgcagggaatgaatgccgagggatacagttatcgaaatcgctttcaaagtggcgtaatacccggaatgtggtcgccaggacgactttttgcacaatccgggcattttactgaacttgataacgggcatgacttttatgcaccacaaagctttgtagcgaaggatggtcggcgtattgttatcggctggatggatatgtgggaatcgccaatgccctcaaaacgtgaaggctgggcaggctgcatgacgctggcgcgcgagctatcagagagcaatggcaaacttctacaacgcccggtacacgaagctgagtcgttacgccagcagcatcaatctatctctccccgcacaatcagcaataaatatgttttgcaggaaaacgcgcaagcagttgagattcagttgcagtgggcgctgaagaacagtgatgccgaacattacggattacagctcggcactggaatgcggctgtatattgataaccaatctgagcgacttgttttgtggcggtattacccacacgagaatttagatggctaccgtagtattcccctcccgcagggtgacatgctcgccctaaggatatttatcgatacatcatccgtggaagtatttattaacgacggggaggcggtgatgagtagccgaatatatccgcagccagaagaacgggaactgtcgctctatgcctcccacggagtggctgtgctgcaacatggagcactctggcaactgggttaa

SEQ ID NO: 9632 - DNA, 924 bp, Escherichia coli
atgtcagccaaagtatgggttttaggggatgcggtcgtagatctcttgccagaatcagacgggcggctactgccttgtcctggcggcgcgccagctaacgttgcggtgggaatcgccagattaggcggaacaagtgggtttataggtcgggtcggtgatgatccttttggtgcgttaatgcaaagaacgctgctaactgagggtgtcgatatcacgtatctgaagcaagatgaatggcaccggacatccacggtgcttgtcgatctgaacgatcaaggagaacgttcatttacgtttatggtccgccccagtgccgatctttttttagagacgacagacttgccctgctggcgacatgccgaatggttacatctctgttcaattgcgttgtctgccgagccttcgcgtaccagcgcatttactgcgatgacggcgatccggcatgccggaggttttgtcagcttcgatcccaatattcgtgaagatctatggcaagacgagcatttgctccgcttgtgtttgcggcaggcgctacaactggcggatgtcgtcaagctctcggaagaagaatggcgacttatcagtggaaaaacacagaacgatcgggatatatgcgccctggcaaaagagtatgagatcgccatgctgttggtgactaaaggtgcagaaggggtggtggtctgttatcgaggacaagttcaccattttgctggaatgtctgtgaattgtgtcgatagcactggggcgggagatgcgttcgttgccgggttactcacaggtctgtcctctacggggttatctacagatgagagagaaatgcgacgaattatcgatctcgctcaacgttgcggagcgcttgcagtaacagcgaaaggggcaatgacagcgctgccatgtcgacaagaactggaaagtgagaagtaa

SEQ ID NO: 9633 - DNA, 1248 bp, Escherichia coli
atggcactgaatattccattcagaaatgcgtactatcgttttgcatccagttactcatttctcttttttatttcctggtcgctgtggtggtcgttatacgctatttggctgaaaggacatctaggattaacagggacggaattaggtacactttattcggtcaaccagtttaccagcattctatttatgatgttctacggcatcgttcaggataaactcggtctgaagaaaccgctcatctggtgtatgagtttcattctggtcttgaccggaccgtttatgatttacgtttatgaaccgttactgcaaagcaatttttctgtaggtctaattctgggggcgctcttttttggcctggggtatctggcgggatgcggtttgcttgacagcttcaccgaaaaaatggcgcgaaattttcatttcgaatatggaacagcgcgcgcctggggatcttttggctatgctattggcgcgttctttgccggtatattttttagtatcagtccccatatcaacttctggttggtctcgctatttggcgctgtatttatgatgatcaacatgcgttttaaagataaggatcaccagtgcatagcggcggatgcgggaggggtaaaaaaagaggattttatcgcagttttcaaggatcgaaacttctgggtttttgtcatatttattgtggggacgtggtctttctataacatttttgatcaacaactctttcctgtcttttatgcaggtttattcgaatcacacgatgtaggaacgcgcctgtatggttatctcaactcattccaggtggtactcgaagcgctgtgcatggcgattattcctttctttgtgaatcgggtagggccaaaaaatgcattacttatcggtgttgtgattatggcgttgcgtatcctttcctgcgcgttgttcgttaacccctggattatttcattagtgaagctgttacatgccattgaggttccactttgtgtcatatccgtcttcaaatacagcgtggcaaactttgataagcgcctgtcgtcgacgatctttctgattggttttcaaattgccagttcgcttgggattgtgctgctttcaacgccgactgggatactctttgaccacgcaggctaccagacagttttcttcgcaatttcgggtattgtctgcctgatgttgctatttggcattttcttcctgagtaaaaaacgcgagcaaatagttatggaaacgcctgtaccttcagcaatatag

SEQ ID NO: 9634 - DNA, 933 bp, Escherichia coli
atggacaacgacaaaattgatcaacacagcgacgaaattgaagttgagagcgaagaaaaagagcgcggcaaaaaaatagaaatagatgaagatcgactcccctcccgggcgatggcaattcatgagcatatccgccaggatggtgaaaaagagctggaacgcgacgcaatggcgctactgtggtcagccattgcggcgggtctgtcgatgggcgcttcgctactggcaaaagggatatttcatgtcgaactggaaggcgtgccgggcagcttcttgctggagaatctcggttatacctttggttttattatcgtcattatggcccgccagcaattatttaccgaaaacaccgtgactgcggtactacccgtcatgcaaaaaccgacaatgagcaacgttggcttacttatgcggttatggggcgtcgtgctgctgggtaatattctcgggacaggtattgcggcgtgggcatttgaatatatgccaatcttcaatgaagaaactcgcgatgcatttgtcaaaatcggcatggatgtgatgaagaacacccccagcgagatgtttgccaacgcgatcatttccggctggctgatcgccactatggtatggatgtttcctgcagcgggtgcggcaaagattgtggtgattatattgatgacctggcttattgcactgggtgacaccactcacatcgttgtcggttctgtagaaatcctctatctggtgtttaacggcacgctgcactggagcgatttcatctggcccttcgcactacctactttagcggggaacatctgcggcggcacctttatcttcgcgttaatgagtcatgcacagattcgtaacgacatgagcaacaagcgcaaagcagaagcacgccaaaaagcagaacgtgcggaaaacattaagaaaaatgataaaaacccggcataa

SEQ ID NO: 9635 - DNA, 1278 bp, Escherichia coli
atgctaccatctatttcaatcaacaataccagcgcagcttacccagaatccatcaatgaaaataacaatgatgaagttaatggattagtacaagagttcaaaaacctttttaatggtaaggaaggaataagcacctgtattaaacatttgcttgagcttataaaaaacgccatgcgagtaaacgacaatcctgatagatttaatattaataattcctcagttacttatattaatattgattccaatgatacagactatattactattggtatcgataaccaagaaccaataaaattacttgcgagctataaagacaaagaactcgtccgtactatcattaatgagaacatagttgagaaggctcatgatgatataaataatgctgaatttactgatggtattattgttagtggtattgatgatcgtagtgatattggcattgactccaatgatacagacgatattacttttgatattgatattgatattgatattgaaaatcaagaaccaataaaatcacctacgaacgatgaaaaaaaactcggccaaaccctcatcaatgaaaatgtagtagagaatactcatgatatcaataacaagaaaatgatcttcagcgcaataaaagaaatatataatggagatcctgattttattttcgataaaatatcacgtaacctcatacatacggtaacaaaatccgatgagaacgggataagcaaaccaacggacttatttacctggcacggtaaagataaaaaatacaacactctcgccattgtaattaaaaatacaaacggaaacgattatttatctctcggttactacgatcaggacaactaccatattaaaagaggaattcgtattaatggtgatagtctcacacaatattgtagtgaaaacgccaggaatgcttcagcgtcatttgaaagcaataaagctctcatggcagaattatttgcaacaggtataaatcatcaagttgtaaacgaactcaacggggaaagactgaaagaaccaaacgaagtttttaaacgttatggtcgagcaataagatataattttcaagtggacaatgcaaaatatagacgcaataatgtaaaagaaatagtttctactttattcgataacgaagttaacactgaccattctcaaaatatatatgtgcactataagaaactcgaaggtaaaattgaagaaaggcttcaaaattgccagacggaatatcaaaatgaaattaatcaactatctgcgttaggtgttaattttgatgatgtttaa

SEQ ID NO: 9636 - DNA, 567 bp, Escherichia coli
atgagtaagtttgtaaaagcagcagttgccacggcaatgctcatgggggcgctgacttcagcatcagtcgttgccgcagggaacaacggtacagtgagattttacggcacaattgaagactccccgtgctcaattgttcctgacgatcataaactggaagtggatatgggcagcatcggtacgggttctttaaccggcggcaaaacaaccacaccaaaagatttccagattcgtttacaggactgtaatttcaatacagaaacgacaatggctaccacattcaccggtaatccgtactccactaacgcagataactattctctgtctaacatggataatggaactgaaattccaaacgttagcctggttatcggtgaccagcacggtacaggttatgcactgggagcagagattaagcaacctatcgtgaaggacagttcaacgggaaaaggcaagcctaaacaaactctgaactttaaagcatggttagtgggtgaaacggatgctgtaacaccaacaccggcaccgtttgaaacgctgacgacgttccagatcacgtatctctaa

SEQ ID NO: 9637 - DNA, 2640 bp, Escherichia coli
atgccagaacattcttttctccgtttacgggggctttcgtggtggattgctctggcaatttctggaagtccatttaatgccctggcagacgataccattcagtttgatggccgatttcttgatttaaaaggcaataccaaaattgatttgggccgtttttcgcaaaaaggctatgtagaaccgggaaaatataacttacgcgttcatgtaaataatcagccgttacctgacgactacgatatctactggtacgcaactgaaaacgatccgaataaatcatatgcctgcttatcgccagagctggttgcccagtttggtctgaaggaagatattgcaaagaatttgcaatggatccgcgatggtcagtgtctgaatacggcacttttagcaggtacagaaattagcggcgatttaggccagtctgcactccttgtttctgtaccgcaggcttatctggaatataccgacagcgagtgggacccgccttcgcgctgggatgacggtatccctgggcttattgccgattacagtatcaacgcgcaaacccgacatgaaaatgggggtgatgacactaacgacatcagcggtaatggtacggtcggcgttaacgttgggccgtggcgcttacgagctgactggcagagcgattatcagcatacccgcagtaacgatgacggcgacactgacgatagcggtacgcaaaaaaactgggagtggagtcgttactacgcctggcgcgccttgccgtcattaaaagccaaactttcgctgggcgaagattatctcaactccgatatttttgatggcttcagttacattggcggcagcatcagtaccgatgatcaaatgttaccgccaaacctgcgcggctacgcccccgatatttcaggtgttgcacacactaccgctaaagtgactgtaacccaaatgggccgtgtcatttacgaaacccaggtacccgcaggtccattccgcattcaggatattggcgactccgtctctggcacgctgcatgtccgcattgaagaacaaaacggccaggtacaagaatacgacgtcagcacggcgtccatgccgttcctgactcgccccggccaggtgcgttataaagtgacaatggggcgtccacaaaactgggaccatcaggttgcaggtagcttcttctcgggcggcgaggcgtcgtgggggatagccaatggctggtcgctctacggcggtgcgttagccgatgaaaactaccagtcggcggcgctgggcctcggtcgtgacctggcgctgttaggcgcgttagcgtttgatgtcactcactctcgtgttcaactcgacgataacagcgtgtatggcaacaaaacgctggacggcaactcttatcgcgtcagctatgccaaagattttgatgaactcaacagtcgggtgacgtttgctggataccgcttctctgaaaaaaactacatgaccatgagcgagtatctggatgcgaacgacgacgaccgggcgcgcaccggtaacgacaaagagatgtatacggtcacctataaccagaacttcacggatgcgcgcgtttcggtctatctcaattattcccaccatacctactgggatcgccaggatcaaaccaactacaacatgatgctttctcattatttcaatttaggaagccttcgtaacttgagcgtttctctgactggttatcgctacgaatacgataaaagtgccgacaagggtgtttatctgtccttaagtttgccgtggggcgacaacagcaccatcagttacaacggcaactatggcagcggtgccgacagcaatcaggtgagcctgtaccaccgcattgatgacgccagccactacacgttaagcgccggaaccagcgaaaaccacagcagcgtggatggctactacagccacgatggcactctggcaaaagttgatctcagtgctaactaccatgaagggcaatacacctcagcagggatctctttacagggcggggcaacgttgaccgctcatggcggggcactgcatcgtacacaaaatatgggcggcacacgtctgttaatcgacgctgatggtgttgctaatgtaccggttgaaggtaatggttccgccgtttataccaacatgttcggcaaagcggtggtggcagatgtgaatgattactaccgcaaccaggcttatatcgatttgaacaaactgccggaaaacgccgaagctacaaaatcagtggttcaggcaacgctgacggaaggcgctattggctaccgtaaatttgcggtaatcagcggtgagaaggcgatggcagtgctgcgcttgcaggatggcagccatccgccatttggggcggaagtaaaaaacgataatcaacaacaagtagggttggttgatgacgaaggtaatgtttatctggcaggcgttaaaccgggtgaacatatgaccgttttctgggagggtgaatctcactgcgatatcagcctgccagacccgttaccgaatgacctgttcaatggcttgttgttgccatgccagcaaaaggggggaagttctcccgtcataccgcatgatattcaacccgtcattcaggaacagacacaacaggtgacaccaatggaaccgccgatgtctgtttcatcgaaccaataa

SEQ ID NO: 9638 - DNA, 750 bp, Escherichia coli
atgactaaatatctctctgccaaaacattgacaacggtactgtcgttactggcagcaacggtaagtttttctgctcaggcgtcagtaacgcccgatcgtactcgcctgatttttaatgaaagcgataaatctatcagcgtgacgctgcgtaataacgaccccaaactgccttatctggcgcaaagctggattgaagatgaaaagggcgtcaaaatcagctcgccgctggcggtattgccgcctgtacagcgcattgaagcaatgatgaatggccaggttaaaattcagggcctgccggatattcataaattacctgccgatcgggaatcgatgttctatttcaacgtgcgcgaaattccgccgaaatcgaacaaatccaacacgctacaaatcgctcttcagacgcgtatcaaacttttctggcgaccgaaagctctggaaaaaaacaccacgcaaaacccgtggcagcataaagtgaccttaacccgcaacggtcaggaatttactgtcaataacccgacgccgtattacgtcattttcagtaatgccagcgcacagaaaaatggcaatccggcagccggtttctcgcctatagtgatgtcgccgaaaacctctgcaccgctgaatgtgaagatggggagtgtgccggtactgacctatgtcaacgactatggcgctcggatgccgctctttttcacctgcaacggcaatagttgccaggttgatgaagagcagagccgcaaaggctaa

SEQ ID NO: 9639 - DNA, 507 bp, Escherichia coli
atgaaaggatcttgttctgtctgggcggtaactgggttactgatatgttgtgttggtagcggctttgcagttgcagcgagtaagtcagtaagtatgaatttacgggtacttgttgatgcccctcctccttgtacggtaaatggtgcggcagttgagtttggtaatgtattcattaataagatcgatggggtgagttataaccgtcccattgactactcgcttgtttgcaacaatttggcaatggatgacttgcgtttacagatgcaggcgacaacggtcgtgattaacggtgaaacagttatcagcacaggtattccagggtttggtattcgggttcaaaaaagtagtgatcactcaatactcgacttaacgtctggttcatggttgccgtttaatttttcctcgggcatccctgcacttgaagccgtgccggtgaaacagagtggtacaaccttagcggcagcggaatttaacgccagcgccacaattgtggtggattatcaatga

SEQ ID NO: 9640 - DNA, 471 bp, Escherichia coli
atgaaacggatctcacttcttgtgctgtggggcttttgctcgatggcactctcaaatgtctcttttcacggctatttagtgcagccgcctaactgcactattagcaacgctcaaaccatagaaatcacctttcaggatgtgtttgttgatgacattaatggcagtaattatgagcaaacggtgccgtattcaattacctgtgatacggcggttcgcgacccatcaatggaaatgaccttgagctggagtggcacacaaagcgattttgatgatgccgcagtaagcagcaatatcactggattaggtattcagcttaaacaggctgggcagcgttttaggatcaatacgccactcgtggtgaatgaaaccgatttaccggtgttaacggctgtgccagtaaaaaagagtggtgttgatctgcctgaggcggactttgaagcctgggccacgttacaggtggattatcaatga

SEQ ID NO: 9641 - DNA, 525 bp, Escherichia coli
atgaagaaaaagtgtgcgttgatttttatcaatagcctgctgttgctgaacagcggcaccacaacagcggtagataatctgcactttaccggcaatttaatcagtaaatcgtgtacaccagtgatcaacggtagccagttggcagaggtacattttactgccattgccgccagcgatttaatgaacattgggcagtcagagcgagtgccgttggtcattcaattgaaggattgtcaaagttctacatcgctgagtgtcagagtcacgttaacgggaacagaagatagtgaactgcccggatttctggcttttgacgcctcgtcttctgcgtccggcgctgggattggaattgaaacagcggcaggtataccagtgccagtcaacaatacaacaggcgtcacgctcccgctgactcagggaaataacagcctaaattttaatgcctggttacaggcgaagagcgggcgaaatgtaacgtccggtgactttaacgccactgtgacggcaacctttgagtatttataa

SEQ ID NO: 9642 - DNA, 855 bp, Escherichia coli
atgaaaaaatggaccctatttttcgcgagcctgatgctgcttgtcctgaatgttgtcggcacacccaggagctatgctggggataaacttatgagttcaagtttcgacagtgtgagagtttattatgcgatggacacggtaacaggggtggccgcgagtatcgttttcaatgttacggtgttaacaccaggggaggtcgcgtatgggaaatataattctattgggcgtaaaggagatactctgaggctgatttcctggacgggttcgggcccggcaccaactctggttataacggattatgatacgattaataattcacattgccccggtattgatacggatcttttccgttgtgcatatatgacatttaaagtcaccgttgcatctgataattatggttgcccgtggatcgcgtccttttattcatatacaaacttacccggatattttgatggaagctacacgagcccgactgtgcataactcaatatgcccaacgataccggtcgcctcctatgatatctcctggagtgaaaattatgtcagtcataataaagcgctacagctacagtccacggggtcgacaattaccaccacgctttcgacctacctgatggaaaacggcaaactctgtgacggcagcgtttttgatagtagaggtgcatactgccgtgcggtatcagaactgttaacctttacctcttatggctgcgacaaatcaacggtaacggtgacccccacacgtcatccggtaaccgataaagagttacatgatatcgtggtgaaggtgaataccagcagtcggcaaccgattgattctacgtgtcgttttcagtatgtattgaatgagttatag

SEQ ID NO: 9643 - DNA, 1530 bp, Escherichia coli
atgttactaccctggctaatattaattccctttatcggcggcttcctgtgctggcagaccgaacgctttggcgtcaaggtgccgcgctggatcgcgctgatcaccatgggattgacgctggcgctgtcgctgcaactgtggttgcagggcggttattcactgacgcaatccgccggaattccgcagtggcagtctgaattcgacatgccgtggatcccgcgttttggtatctctatccatctcgccattgacgggctatcgctgctgatggtcgtgctgactggtctgctcggtgtgctggcggtactctgttcgtggaaagagatcgaaaaatatcagggcttcttccacctcaacctgatgtggatcctgggcggcgttatcggcgtgttccttgccatcgacatgttcctgttcttcttcttctgggaaatgatgctggtgccgatgtacttcctgatcgcactgtgggggcataaagcctctgacggtaaaacgcgtatcacggcggcaaccaagttcttcatttacacccaggcgagtggtctggtgatgttgatcgccatcctggcgctggtttttgttcactacaatgcgaccggcgtctggaccttcaactatgaagagctgttgaatacgccaatgtccagtggtgtggaatatctgttgatgctgggcttcttcatcgcatttgcggtgaaaatgccggtggttccgctgcatggctggctgccggatgcgcactcacaggctccaaccgccggttccgtggacctcgcggggatcttgctgaaaaccgccgcttacggtctgctgcgtttctccctaccgctgttcccgaacgcgtcggcagagttcgcgccaatcgccatgtggctgggtgttatcggcatcttctacggtgcgtggatggccttcgcccagaccgatatcaaacgtctgatcgcctacacctcggtttcccacatgggcttcgtgctgattgctatctacactggcagccagttggcctaccagggcgcggtaatccagatgattgcgcacggcttgtcagcggcgggtctgtttattctctgcggtcagctttatgaacgtatccatacccgcgacatgcgcatgatgggcggtctgtggagcaagatgaaatggctgccagcactgtcgctgttctttgcggtggcaacgcttgggatgcctggcaccggtaacttcgtcggcgaatttatgattctgttcggcagcttccaggttgtcccggtgattaccgttatctctacctttgggctggtctttgcctctgtttattcgctggcgatgttacatcgcgcttacttcggtaaagcgaaaagccagattgccagccaggaactgccagggatgtcgctgcgtgagctgtttatgatcctgttgctggtggtgctgctggtactgctgggcttctatccgcagccgattctggatacctcgcactccgcgattggcaatatccagcagtggtttgttaattccgttactactacaaggccgtaa

SEQ ID NO: 9644 - DNA, 1458 bp, Escherichia coli
atgacaataactccacaaaacctgatcgcactgctaccgttgctgatcgtcggcttgacggtggtggttgtgatgctctccattgcgtggcgacgcaatcatttcctcaacgctacgctctcggttattgggcttaacgcggcgctggtttcgctctggtttgtcggccaggcgggcgctatggacgttacgccactgatgcgcgttgatggtttcgccatgctttacaccgggctggtattgttggcgagcctcgccacctgtactttcgcctacccgtggcttgaaggctataacgacaacaaggacgagttctacctgttggtgttaattgccgcgctgggcgggatcctgctggcgaatgccaaccatctggcgtctttgttcctcggtattgaactgatctctttgccgctgtttggcctggtcggttacgctttccgccagaaacgttcgctggaagcaagtatcaaatacaccattctctctgccgcagcgtcttctttcctgctgttcggtatggcgctggtgtatgcgcagtctggcgacctgtcgtttgtcgcgctgggtaaaaacctcggcgacggtatgctcaacgagccgctgttgctggcaggtttcggcctgatgattgttggcctcggcttcaaactctctctggtgccgttccacctgtggacgccagacgtataccagggcgcgcctgcgccggtttccactttcctggcgacggcgagcaaaatcgctatcttcggtgtggtgatgcgtctgttcctctacgcaccggtgggtgacagcgaagcgattcgggtggtgctggcgattatcgcctttgcctccatcatcttcggtaacctgatggcgctgagccagaccaatatcaaacgtttgctcggttactcatctatctctcacctcggctatctgctggtggcgctgattgcgctgcaaaccggcgagatgtcgatggaagcggtaggggtttacctggccggttatctgttcagcagcctcggcgcgttcggcgtggtcagcctgatgtccagcccgtatcgtggcccggatgctgattccctgttctcttaccgcggtctgttctggcatcgcccgatcctcgcggcggtgatgacggtgatgatgctgtctctggccggtattccgatgacgctgggctttattggtaagttctacgtgctggcggtcggtgtccaggcacacttgtggtggctggtgggtgccgtggttgtcggttcggcaatcggcctctactactacctgcgcgtggcggtgagcttgtatcttcacgccccggaacaaccgggtcgcgatgcaccttcaaactggcagtacagcgcgggcggtatcgtggtgctgatctctgcactgttggtactggtgctgggtgtatggccacaaccgctgattagcattgtgcggttggccatgccgctgatgtaa

SEQ ID NO: 9645 - DNA, 1344 bp, Escherichia coli
atggcgaacagcatcacggcggatgagattcgggaacagttttcgcaggcaatgtcagccatgtaccagcaagaagttccgcagtacggcacgctgctggaactggtagctgatgtgaatctggctgtgctggaaaacaatcctcaactgcacgaaaaaatggtaaatgcagacgagctggcgcgactgaatgttgaacgtcatggggcgattcgtgttgggactgcacaagagcttgctactcttcggcggatgtttgccattatggggatgtacccggtgagctattacgatctctcgcaggcgggggtgccggtacattcgacagcatttcggcccattgatgatgcttctctggcgcgtaatcccttccgcgtttttacttcattactccgccttgagcttatcgagaacgaaattttgcgccagaaagcggcggagattctgcgtcagcgcgatatcttcaccccacgttgtcgacaactgttagaggaatatgagcagcggggcggttttaacgaaacacaggcacaggagtttgtgcaggaagccctggaaacgtttcgttggcaccagtcagcaacggtagatgaagaaacctatcgcgccttgcacaacgaacatcggttaattgctgatgtggtctgttttcctggatgccatatcaaccacctgacgccacgtacgctggatattgaccgggtgcagtcgatgatgcctgaatgcgggattgaacccaaaattctgatcgaagggccgccgcgccgcgaggtaccgattttactacgccagaccagctttaaagcactggaagagacggtgttgtttgcagggcagaaacagggtacgcataccgcgcgctttggtgaaatagagcagcgtggtgtggcattaacgccgaaagggcgacaactgtatgatgatcttctgcgtaacgctggaaccgggcaggataatctcactcaccaaatgcatttacaggaaaccttccgcacttttcctgacagtgagtttttaatgcgtcagcaagggttggcatggttccggtaccgtctaacgccttcaggtgaggcgcatcgtcaggcgattcattccggagacgatccacagcccttaattgaacgtggttgggtagtggcgcaacccattacctatgaagatttcttgcctgttagcgcggcggggatcttccagtcaaatctgggtaatgaaacgcaggcacgcagtcacggtaatgccagtcgcgaagcatttgagcaggcgttgggctgcccggttttggatgagttccagctttatcaggaagcggaagaacgcagtaaacgtcgctgtggtttgctttaa

SEQ ID NO: 9646 - DNA, 1962 bp, Escherichia coli
gtgaccgtatcttctcatcgacttgaactgttaagcccggcacgcgatgccgccattgcccgcgaagctattttgcacggtgccgatgctgtttatatcggcggccctggttttggtgcccgtcataatgccagtaatagcctgaaagatattgccgaactggtgccgtttgcccatcgttatggtgcaaaaattttcgtcacgcttaacaccattttgcatgatgatgagctggaacctgcgcaacggctgattaccgacttctaccagaccggcgtcgatgcgctgattgttcaggatatggggattctggaacttgatattccgccgattgaactgcacgccagtacgcagtgcgatattcgcacagtagaaaaagcgaagttcctctctgatgttggcttcacgcagattgtgctggcgcgagagctgaatcttgagcagatccgcgcgattcaccaggccacggacgcgaccattgaattctttattcatggcgcactgtgcgtggcctattcgggtcagtgctacatttctcatgcgcaaacagggcgtagcgccaaccgtggcgattgctcgcaggcgtgccgtttgccatacacattgaaagacgatcaggggcgggtggtttcctatgaaaaacatctgctgtcgatgaaagataacgatcagactgccaacctcggcgcgctgattgatgctggcgtacgctccttcaagattgaagggcgttacaaagatatgagctacgtgaagaatatcaccgcccattatcgccagatgctggatgccattattgaagaacgtggcgatctgacgcgtgcttcatcaggtcgtactgaacatttctttgttccatcgacggaaaagactttccaccgtggtagcacagattattttgtgaatgcccgtaaaggcgatattggcgcgttcgattcgccgaaatttatcggcctgccggtgggtgaagtattgaaagtggcgaaagatcatctcgatgttgccgtttccgaaccactggcaaatggcgacggcctgaacgtgatgattaaacgtgaagtcgtcggctttcgtgccaatacggtcgagaaaaccggagaaaatcagtaccgcgtctggcccaatgaaatgccagcagagttgcacaaaattcgcccgcatcacccactaaaccgtaatcttgatcataactggcagcaggcactgacaaaaacctccagcgaacgtcgggtggcggtagacattgaactgggcggctggcaggaacaactgattctgaccctcaccagtgaagagggtgtcagcatcacgcatacgctggacgggcagttcgacgaagccaataacgccgaaaaagcaatgaacaatctaaaggatggtctggcaaaactggggcaaaccatctattacgcccgcgatgtgcaaattaatttgccgggtgcgctgtttgtaccaaacagtctgttaaatcagttccgccgtgaagccgccgacatgctggatgctgcacgtcttgccggttaccagcggggcagccgtaaaccggttgctgatcctgcgccggtttatccgcaaacgcatctgagtttcctcgcgaacgtatacaaccagaaagcgcgtgaattttatcatcgctacggtgtgcagctgattgacgcggcgtatgaggcacatgaagagaagggcgaagtcccggtgatgatcactaagcattgtctgcgctttgccttcaatctgtgcccgaaacaggcgaaaggcaatatcaaaagctggaaggcgacgccaatgcaactggttaacggcgatgaagtattaacgctaaagtttgattgccgcccatgcgagatgcacgtcatcggcaaaattaaaaatcacattctgaaaatgccgttaccgggaagtgttgtcgcctccgtaagtccggatgagctgctgaaaacattgccgaagcgaaaagggtaa

SEQ ID NO: 9647 - DNA, 177 bp, Escherichia coli
gtgaaacaaagcgagttcagacgttggctcgaatctcagggcgtcgatgtagcgaatggcagcaaccatttaaaactcaggtttcacgggaggcgcagtgtcatgccgcgtcaccccagcgaagagattaaagaaccattgcgtaaagccattctgaaacaactcggtttgagttaa

SEQ ID NO: 9648 - DNA, 438 bp, Escherichia coli
atgcgagagacagtcgaaattatgcgttatcccgtcactcttacacccgcgccggaaggcggttatatggtttcttttgtggatatccctgaagcgttgacccagggcgaaactgtcgctgaagcgatggaagcggcaaaagatgctttactgaccgcatttgatttttattttgaagataacgagcttatccctttaccttcgccatcaaatagtcacgatcactttattgaagtgcctttgagcgtcgcctctaaagtattgctgttaaatgcttttttacagtcagaaatcactcagcaagagttagccaggcgaattggcaaacctaaacaggaaattactcgcttatttaacttgcaccatgcgacaaaaatcgacgccgtccagcttgcggctaaggcgcttggcaaagagttatcgctggtgatggtttaa

SEQ ID NO: 9649 - DNA, 1407 bp, Escherichia coli
atgaaaaaataccagcagcttgcagaacaattacgcgagcagattgcgtcgggtatctggcaacctggcgatcgtttgccttcgttgcgtgaccaggtggcgctttctggcatgagctttatgaccgtgagccatgcctatcagttgctcgaaagtcagggatatattatcgcgcgaccgcagtcgggttattacgttgcgccacaggcaataaaaatgccgaaagcgccagtcattcctgtcactcgagatgaagcagtcgatatcaacacctatatttttgatatgttgcaggccagtcgcgatccgtcggtagttccgtttgcctcggcctttcccgacccgcgacttttccccctccaacaactcaaccgctcgctggcgcaggtaagcaaaaccgccacggcgatgagcgtgattgaaaacttaccgccaggaaacgcagaactgcgtcaggctattgctcgtcgctatgccttacagggcatcactatttctcctgatgaaattgtcattaccgccggggcgttagaggcattaaacctcagtttacaagcggtcactgaaccgggcgattgggtgatagtagagaatccttgtttctacggcgcgttgcaggcgctggagcggttacggctgaaggcgttatcggtggcgacggacgttaaagaagggattgatctcaaggcgctggaactggcgttgcaggagtatccggtgaaagcgtgctggctgatgactaatagccagaatccactcggatttaccttaacgccgcagaaaaaagcgcggctggtagcgttgctcaatcagtacaacgtaacgctgattgaagatgacgtgtacagcgaactttattttggacgggaaaaaccgctgcctgcgaaagcgtgggatcgccacgatggcgttttgcattgctcttcgttttcgaaatgtctggtgcctggttttcgtattggttgggtcgccgccggaaaacatgcacgtaaaattcaacgcttgcagttgatgagtacgctttccaccagctcaccgatgcagcttgcactggtggattacctttccacgcgccgatacgacgcccatcttcgtcgcttgcgtcgccagcttgcggagcgtaaacaacgtgcctggcaggcactgctgcgttatctgcctgcggaagtgaaaattcatcataatgacagcggttattttctctggctggagctccccgcgccgttagatgcgggcgaattaagcctggcagcactgacgcatcatatcagtattgcgccgggtaaaatgttttctaccggtgaaaactggtcacgttttttccgttttaataccgcgtggcagtggggcgagcgcgaagaacaggcggttaaacaattaggcaaacttattcaagaacgactgtaa

SEQ ID NO: 9650 - DNA, 795 bp, Escherichia coli
atgcactctgaacgcgcaccgtttttcctcaaactggcggcctggggcggcgtggttttcctacattttcccatcctgattatcgccgcctatgcgtttaacactgaagatgcggcgtttagttttccaccgcagggcctgacgctgcgctggtttagcgtggcagcacagcgtagtgatattcttgatgccgtgacactgtcacttaaagtggcggcgctggcgacattaatggcgctggtgttagggacgctggccgctgccgcgctgtggcgacgagactttttcggcaaaaacgccatttcgctgttactgctgctgcccattgcgctgccgggcattgtcactggtctggcgttgttaaccgcctttaaaaccatcaatctggagccgggatttttcaccatcgtggtcggtcatgcgactttttgtgtagttgtggtgtttaacaatgtcatcgcccgttttcgccgcacctcgtggagtctggttgaggcgtcaatggatcttggggccaatggctggcaaaccttccgctacgtagtgttgccgaatctcagttcggcgttactggcaggaggaatgctggcgtttgccttgtcgttcgatgaaatcatcgtgacgacctttacggcaggtcatgaacgaacgttaccgttgtggttgctcaatcagcttgggcgaccgcgtgatgtaccggtaaccaacgtggtggcactgctggttatgttggtaacaaccttgccgatcctgggggcctggtggctaacccgcgaaggcgacaatggtcaataa

SEQ ID NO: 9651 - DNA, 1425 bp, Escherichia coli
atgcaacataagttactgattaacggagaactggttagcggcgaaggggaaaaacagcctgtctataatccggcaacgggggacgttttactggagattgccgaggcatccgcagagcaggtcgatgctgctgtgcgcgcggcagatgcagcatttgccgaatgggggcaaaccacgccgaaagtgcgtgcggaatgtctgctgaaactggctgatgttatcgaagaaaatggtcaggtttttgccgaactggagtcccgtaattgtggcaaaccgctgcatagtgcgttcaatgatgaaatcccggcgattgtcgatgtttttcgctttttcgctggtgcggcgcgctgtctgaatggtctggcggcaggtgaatatcttgaaggtcatacttcgatgatccgtcgcgatccgttgggggtcgtggcttcgatcgcaccgtggaattatccgctgatgatggccgcgtggaaactggctccggcgctggcggcagggaactgtgtagtgcttaaaccatcagaaattaccccgctgaccgcgttgaagttggcagagctggcgaaagatatcttcccggcaggcgtgattaacgtactgtttggcagaggcaaaacggtgggagatccgctgaccggacatcccaaagtacggatggtgtcgctgacgggctctatcgccactggcgagcacatcatcagccataccgcgccgtccataaagcgtactcatatggaacttggaggcaaagcgccagtgatagtttttgatgatgcggatattgaagcggtggtcgaaggtgtacgtacttttggctattacaatgccggacaggattgtactgcggcttgtcggatctacgcgcaaaaaggtatttacgatacgctggtggaaaaactcggtgctgcagtggcaacgttaaaatcgggtgcaccggatgacgagtctacggagcttggacctttaagctcgctggcgcatctcgaacgcgtcagcaaggcggtagaagaggcgaaagcgacagggcacatcaaagtgatcaccggtggtgaaaagcgcaagggtaatggctattactatgcaccgacgttgctggctggcgcattacaggacgatgccatcgtgcaaaaagaggtatttggtccggtagtgagtgttacgctcttcgacaacgaagaacaggtggtgaactgggcgaatgacagccagtacggacttgcatcctcggtatggacgaaagatgtgggcagggcgcatcgcgtcagcgcgcggctgcaatatggttgtacctgggtcaatacccatttcatgctggtaagtgaaatgccgcacggtgggcagaaactttctggttacggcaaggatatgtcactttatgggctggaggattacaccgtcgtccgccacgtcatggttaaacattaa

SEQ ID NO: 9652 - DNA, 204 bp, Escherichia coli
atgtatctgcataacaaaaacaatatgagccatttttgcattactaataagaaaaagcaaaaaacatcgatattcatttttgatcaatggattttctggcatatcgttattatcgtgatactggttatcattttcatcttgccaggttcgcacgtaatcacgttattcggggattttatctgcgggatattacccttcaggtaa

SEQ ID NO: 9653 - DNA, 2868 bp, Escherichia coli
atgggcatcaaacaacacaatgggaataccaaagccgatcgtctcgctgaattaaaaatccgttcgccctccattcaactgataaaatatggcgctattggtttgaatgcaattatcttttcccccctgctgatagctgctgatttaggaagtcaaaatggcaccactattactattagtgatggtgacagaattacaggagataccgccgatccatcaggaaacctctatggtgtaatgaccccagcaggaaacacgcctggcaatatcaacctgggtaatgatgtcaccgtcaatgtcaacgacgcctctggatatgcaaagggaatcattattcagggcaagaacagctccctgacagctaaccgactcacagtagatgttgttggtcaaacctctgccatcggcattaatttaattggtgactatacccatgctgacttaggcacaggcagcaccattaagagtaacgatgacggcatcattattggacatagctcaacactaacagccactcaattcaccattgaaaactcgaacggtataggcctaaccatcaatgactatggcaccagtgtcgatcttggaagcggaagtaaaatcaagaccgatggaagtacaggtgtttatatcggtggtctcaacggcaataacgccaatggtgctgcgcgttttacggcgacagacctgacaatcgatgttcagggctacagcgccatggggataaacgtacagaaaaactctgttgtcgatctcggaacaaacagtaccattaaaaccaatggcgataatgcacacggcctctggagctttggccaggtgagcgcgaatgcactcactgttgatgtaactggagccgtggcaaatggcgtcgaagttcgtggtggtacaaccactatcggtgctgatagccatatttcttccgcgcagggcggtggcctcgtaaccagtggttcagacgcgacaatcaatttttctggcacggcagcgcaacgaaacagcatcttttccagcggttcttatggtgcctcagcccagacggcaacggctgttatcaacatgcaaaataccgatattacggttgatcgtaatggcagtctggcgctgggtttgtgggcgctcagcggcggtagaataaccggagacagtttggctatcaccggcgcggcaggagccagggggatttatgccatgaccaacagccagatcgatctcacgagcgatctggtcattgatatgagtacacccgaccagatggccatcgcaacgcaacatgacgatggttatgccgccagccgcatcaacgcttcgggtcgtatgcttatcaacggtagcgttctctccaaaggtgggctaatcaatctggatatgcaccctgggtcgttttggacaggttcttccctcagcgataatgtcaatggcgggaaactggacgttgcaatgaataacagcgtctggaacgtaacaagtaattctaatctcgacacgctggcgctgagccattcaactgtcgattttgccagccacacgtcaactgccggcacatttaccacattaaacgtagagaacctgagcggtaacagtacctttattatgcgtgctgatgttgttggcgagggtaatggcgttaataataaaggggatttattgaatatcagcgggagtagtgctggtaatcacgtattggctatccgtaaccagggcagcgaggccacaacgggaaatgaagttctgacagtggtaaaaaccactgacggcgcggcctcgttcagcgcgtcttctcaggttgagttgggaggatatctgtatgatgtgcgtaaaaatggcactaactgggagctttatgcttccgggacaattccggagccgactcctaatcctgagcccacaccagctcccgctcagccccccatagtcaaccccgatcctacgcctaaccccactcccacacctaaacccaccacgaccgcagatgctggcggcaattatctcaatgtcggttacttattgaactatgttgaaaaccgtacgctgatgcaacggatgggtgacctgcgaaatcagagtaaagacggaaatatctggctgcgcagttatgggggaagtctggactccttcgccagtggcaaactgagcggctttgacatgggttacagcggtatccagtttggtggggataaacgtctctctgatgtaatgccgttgtatgtcggtctgtatattggctcaacacatgcatcgccggactatagcggaggcaacggtaccgcacgttcagactacatgggaatgtacgccagttacatggcacaaaacggtttttacagcgatctcgttataaaagcatcgcgccagaaaaatagtttccacgtactggacagtcagaacaacggcgttaacgccaacggcactgcgaatggaatgagtatctccctggaagccgggcagaggttcaacctgtcccctactggttatgggttctatatagagccgcaaacccagctcacatacagccaccagaatgagatggctatgaaggcgagtaatggcctcaatatacatctgaatcactacgaatcgctgctggggcgtgccagcatgatactgggatatgacatcaccgcaggcaacagccagctgaatgtctatgtgaagactggcgctatccgcgagttttcaggggataccgaatatctgttgaacaactcccgggagaagtacagtttcaaaggtaatggctggaataacggcgtgggagtcagtgcacagtataacaaacagcacacattctatctcgaagcggattacacgcagggtaacctctttgatcagaagcaagtcaacggaggatatcgcttcagcttttaa

SEQ ID NO: 9654 - DNA, 1437 bp, Escherichia coli
atggccagcattaaagacatccgcccattcgcccccggcattcccccatcttccgttaacccaggcgtacgcccaccagggcagttcttcctgccggtggaactcaagaatgaaattttgcggaacatgaagtatatcggcccgcaaatatttagctggggtgatgaccaccggcagatcattgacctcagtaccgcgggcgaagtgaaaatacatatggtagacaataccatcatcacgttggagcgcctgaatccgaatccgcaacataacgagttcatgatggtcgccgaatggtgccaatgggctatggagcgggatggtttgcaagaaaacctgcaaaaaaacctgtacgaaatcctggaagaaaaccagcaaaacaaacagtcagaaattccccaagaagacctgaaagaaagtctggaagaaatcaaggaaaatatcctggaagaaaacctgccagcaagccggattgaaaaccgggcagaagcattgcgcagaatgaaggaatgtctcattacaagacagagtatgctcaatcttagcaacctgggattgacttcactccctgagaatttgcctccacatctgattgaattttactgcagtaaaaacgtgttgaccgcgttaccgaaggtgatgccaaagtggctgctggtgcttgactgtacagataacgtcttgatcttgttaccgaaggtgcagccctcaaaactgatggtactgaagtgctatgaaaactgtattatctggctgcctgagctgtcgactaacctgagagtgattaactgttctgaaaacttcttgcaatttttaccgccgtcgatgccccagtacctgtataaactatcctgtgccggcaacaatattcactcaatacctgatgagatgctggagaacttgactcgcctgaaagtatttgactgttctagtaacgatttgatctctgcaccacggctgccgcccaaactaataatttactactgtggagaaaacaagtttaaaacggtacaggtgccacagccccagagcctgaaggtgtttgactgtaatggtaacccgtgggacaaagacaatttaccgacgctgttcaaagccgtcgagggcctgaaaaaacagcagggcctgaaggaccttttgggctttttgcacaaggagggccagatgaagctggagaagctggagaagctggaggatctggatgaccttatggatctagagctcctggatgacccggtactcctggagcgcgtgaaggtacaggaggacctggagctcctgaatcagcagttgggcctgttgattctggaaagacaacaggactcgcagcctgttaatcaacattctgaacatgaacccgaatctgcatcaagggtgaagcgtgatttatctgaagtcgagttcgagtcaacaatgaaacgtaagcgttttatgtag

SEQ ID NO: 9655 - DNA, 912 bp, Escherichia coli
atgttacccaggatcagacacaataattttattggtgcggtggagttattcgtaaaatcatcgcatacaaaaacatattcaaacaatttttataacaatatccagcatgcatttaataaaaaagattggatttcaaattatgatagcctgttaactttgagggagttctttcgttgcgcaactcagattgataaaaatagttatcaggtactttcatcaaaaaatgaaactgttaacgccatggataagtttcttatcagtttcagccttaaagataacggtgccgaatatataatgacattgcgaggcagtggatttgaatacgaagaaattcccataacaataaatgagtataactcattcatggatttcaaaaaccgcgagtttccgttagaacaaaacagaagattgtatgcctgggatattctgcagaaaaaacagtctgacataccggaaaggattaaaggttatattcgccaggcgtttggtgacgtgtctttaggttatgctgtattggatgatatagtaagtaaattaaaacggggtaaatttgacctccaaataccaggaggtggaattaaagaatgcgatggatggtatatttacgaaaaaataattgatgataattttgccatagtcatagaatctttgggctttgcgcttaaaatctatggaggggatgaacgttttcgtaatggttcctctgttgttttggaggatgaagattactctcttatttataattttctggttaatgcaggttgccaacaagtcgaattagccgaacaagtggatgcgatagtaagtgcgaatctggccgcagatagtgatattaccgaagaaaagatttgcgagaaatataaatcgaccattgaggcgtttaaaaaaaagcaactagcgttaccagtatga

SEQ ID NO: 9656 - DNA, 243 bp, Escherichia coli
atggccacacttaacgtccgcctggatgacaaactgaaaaatgaggcttatgcggtgctggaaaaattaaatatcacgcctactgaagcagtgcggctgctgtttcagtacgttgcggaaaatggacgaatgccggtaaaaacgctcactgtcagtgatagtgaagaagccttgttacgcactgtcagggaacgactggccaacccacaagaggccattaaggtccgactggatgaactatga

SEQ ID NO: 9657 - DNA, 291 bp, Escherichia coli
atgaactatgagctggcgtttgatccgcgggcgctgaaagagtggcaaaaactgggcgtgacagtccgggaacaatttaaaaaaaagcttgaggatgtgctgaaaaggccgcgcaatccatcggctaaactgcgggatttaccggactgctacaaaattaagctgcgcacacagggatatcgcctggtttatcaggttaacgataaagagttgctcgtgttggtgatagctattggtaagagagagaactcagccgtttatgaagacgcgactaaacggctggatgagtga

SEQ ID NO: 9658 - DNA, 1422 bp, Escherichia coli
atgatgagcaaaataaaccaaacggatatcgatcggttgattgaactggtcggcgggcgcggcaatattgcgacggtgagccactgtattactcgtctgcgctttgtcctcaaccaaccggccaatgccagaccgaaagaaattgagcaactccccatggtgaaaggctgtttcaccaatgccgggcaatttcaggtggtaattggcaccaacgtgggtgattactatcaagcactgatagcgtcaaccggacaggcgcaggttgataaagagcaggtaaaaaaagccgcacggcagaatatgaaatggcatgagcagttgatctctcatttcgcggagatcttcttcccgttgctgcccgcgttgattagtggtggtttgatcctcggttttcgcaatgtgatcggcgatttgcccatgagcaacggtcagacgctggcgcaaatgtacccttccctgcaaacgatctacgattttctgtggttgatcggtgaagcgatcttcttctacctgccggtcgggatttgctggtcagcggtgaaaaaaatgggcggtacaccgatcctcggtatcgtgcttggcgtaacgctggtttctccacagctgatgaacgcttatctgctcgggcagcagctgccggaagtatgggactttggcatgttcagcatcgccaaagtgggctatcaggcgcaggtgatcccggcactgttagccgggctggcgctgggcgttattgaaactcgtcttaagcgcatcgtgccggattacctctatctggtggtggtgcccgtctgttcgctgatcctcgcggtgttcctcgcccatgcgctgattggtccgtttggtcgcatgattggcgatggcgttgcctttgcggtacgtcacctgatgaccggcagctttgctccgattggcgcggcattgtttggcttcctgtacgccccgctggtgatcaccggcgtacatcagaccacgcttgctattgatttgcagatgattcaaagcatgggtggtacgccagtgtggccgctgattgcgctgtcgaatatcgctcagggttccgccgtgataggcattatcatttccagccgcaagcacaatgaacgagagatctccgtgcctgccgctatctccgcctggcttggagtcactgagcctgctatgtacggcatcaacctgaaatatcgcttcccgatgctgtgcgcgatgattggttctggtctggcaggattgctatgcggcctgaacggcgttatggcgaatggcatcggcgtaggcggcctgccgggaattctctcgattcaaccgagctactggcaggtgtttgcgctggcaatggctatcgccatcatcatcccgattgtactcacctcgtttatctatcagcggaaataccgcctgggcacgctggacattgtttaa

SEQ ID NO: 9659 - DNA, 1452 bp, Escherichia coli
atggttgcagtgactgcactgactcccgccgtctggctggtgacactgatttccaccgtgccgtccggctcggtgatcaccgtcggggcaaccgttgcgccgttgtccgccatcacgctgaccgtctgtccattcagcgcattcccgaacgcatcggtgaccttcacccgcagcgtgttcgccattgcgccgtcagccactgagttatcccgggtaacctccagactcgctatctgcgccgtcctgacatccgcgacaaacgttacgttccggatcaggctgctgctgttaatgctggcagtgacagtactgactcccgccgtctggctggtgacactgatttccaccgtgccgtccggctgcgtggtgaccgtcggagcagtcgtggcaccgttgtctgccaacacgctgaccgtctgcccattcagcgtattcccgaacgcatctgtgaccctcacccgcagcgtgttcgccattgcaccgtctgccactgagttatcccgggtgactaccagatcagcgatcttcgccgtcctgacatcggcgacaaacgtcacgttccggctcaggctgctgttgttgatactggcggtgatcgcactggttccggcggtctggctggtgactgagatctccaccgtgccgtccggccctgtgatgaccaccggagcaaccgttgcgccgttgtccgccgtcacgctaaccgtctggccggcaagtacattcccgaacgcatcggtgaccctcgcccgcagcatattcgccattacaccatctgccactgagtcgtccttaatgaccaccagatcagcgatcttcgccgtcctgacatccgcaataaacgtcacgttccggctcaggctgctgttgttgatgctggcagtgcctgtactggttccggctgtctggctggtgatactgatctccaccgtgccgtccggctctgtagtgaccgtcggagacaccgttgcgctgttgtctgccatcacgctgaccgtctgcccggcaagcgtattcccgaacgcatctgtgaccctcacccgcagcgtgttcgccattgcaccgtctgccactgagttatcccgggtgactaccagatcagcgatcttcgccgtcctgacatcggcgacaaacgtcacgttccggctctggctgctgttgttgacgctggcggtgaccacactggttccggcggtctggctggtgactgagatctccaccgtgccgtccggctctgtaatcaccgtcggagcgaccgttgcaccgttgtccgccaacacgctgaccgtctgcccggcaagcgtattaccgaacgcatcggtgaccttcacccgcagcgtgttcgccgtcgaaccgtccgcctctgaaccatccttaatgaccaccagctccgcgacctgcgccgtgctaacatcagcaacaaagttcaccgttttactatcgctgctttga

SEQ ID NO: 9660 - DNA, 1470 bp, Escherichia coli
atggttagtgtgacgagttatacatatccaacggaaacagagaatgataatagccagtttcagagtcaaactcagagtcagggcctgagccagagtctaagagatagtatcgagggtaatattgctgcatttgatgcgatggagcaaagcggcctgctcgataattgtagaacattgtctaaaaatgcctcttttcgtgaaattttccgaagtttattgttatacatcttagattccttacatatctatcgacatgatattagtgataaattggtttcttattttcatgttacgcctgaatcagcgaatgcgaattataaaacatggatcgctaccacaggcatggatagctatataaaaattgagcagaccggcagtgataaatttaaagtcactgatgtgtatcgtgagttaaatggcaagagtttggaaaaaaagagtagggatagggattttagtggtcgaaatgtgaaagagtttatagggttattatcagagcacgatgtattggaaaagtatcaactctcaaaagtaacagttgctgcaaatgctcttaagttagaagttgttaataataattttaaaaatgaactcagcagtggagttactgatgctgagcaccaattaaaaaaagcgttatatgaacaaactcaatcaactccagataaatcaatccaatatgaattgattccagataaattaattccagatgattgtagttataaatcagacataaaaaaactagatgttcgggagggagagtttagtgcacttcttgctgatgcatcaagacatgttggagaggctagctcatttattgcatgttgtggagttaaaataaatagcactatccatgaattactgaggagtaaaaccatggctttgtctggtcatggaggtgttagaaaatataaagatttcgaaaaactttttagtgaaattgtatttacgccagatgaatgtaatattgtgagaaactctctacagaaagatggtgttgagaaaaaaaccagagaaaatattatttcttgcctctccagtatttcaggaataggtaacctgtattatgcttgttcacaggcatttcctgtcgcgcttgataggggggatattaatgcaatacaggcaagtaattctatttctgccgggtttaatagtaacccagggttttgtgctttgatgggaaaaacaaattttctttttgctgacttttcactgcatacatttacacaaactcattatattgtaaaagccgaaataaatgaagctggtaacgattttaatattgctaatttcatttatcgaacatacggtgaggattatattcataacgactcagtggatgactctcttaatgagcgttccactgaagattataggtttctggatgactctttgttacctgaaaacgatttccgcaacaggaggagaaatttttcaggcaatattgcaatcgcaacctacaaataa

SEQ ID NO: 9661 - DNA, 1284 bp, Escherichia coli
atggcaagccctataaacagcggaacaatgatgtcaaatccctgcccctccacctttttggataaaaatagaattattgctgctgagcttaatatcacaaataacgagaaaaaatattcacctggcagtaatttcgcaaaatggatgttacaggaaataaaacgcttaatagcaaatattatgtccggttctcgcagtgttaataccgaaatacttaactattttcaccctatgccaggcactgaaaataatggcaatcgtacctggatggcggcaactggagaggatgagtatatcgaaatcaaacaaacaggtgataagtcatttaatattactctggttggtagagataaacgtttacgaaaagaaactccatattcaggagtggctgtagcgactattatcaaatcgttgtctgaaaaaactgctgcgttagaaacacattccgctgacacggttttgagaaagaaattagttaatagtattgttatcaataatacagactttaattacgaaattcctgcgggaattttaagtaatatatatgatttattaagcctgcgagttcaaaaagatgaaggatatgtacctgttcaggaaagttttaaaagaacagatgttttttttgattccataattatggatgctcatagaactataaaagaacaaaatcaacaaaatggtgctactaaaataacttgctgcggtgttgagttaagtaaagatattcttaaaatatttgcagagaaaattgaaataattgaacaagatacaaagaatagtcaaaacacacttgaacaaatggttgaactggtttactttaatgataatgactgtgctcgggcaagggaattattaaagaaatcaaatggtaacattgcggatgataagattgatgaaataatcgcttgcttatccagtcatcaggggattacatgtttttattattcttccgtacaaggctatcagagctatttaaaaaatacatctcaagatgttagcgagttactctcaaagagtttggatggtgccatttcatcaatatcgggtttaaaaaactcaggaaataccttttttgggactgggaaatatattaaagaaattgattttactataaatgggtttagtcagaagatgtattcgatggcggttaataatgttggaaatgaagttaagcttcagtgttctcgttattttactaccggtagggtcgacgaacaaaactccaaaatcgataaagtcacttttacatttttcggtgccgcaacaactgctgatttatga

SEQ ID NO: 9662 - DNA, 2169 bp, Escherichia coli
atggttgataacgtaactgttggcagtgtatgtgcacaatctccttctttcatgcctgagttggatggaggaaaaaataaaactcaattaatcgttgacgatatagtggcgtatcttaaaaatccttcagtttattcacttgaaaaagagggtccgttaaattatttttttaataattgtagcgagattgaaccatgggttttaattggtggtggacttattattattgtctccacatctgagcaagaccctgaaagtctgattgtaactgtgggggatattgaaggaaagtatgctacacagattcccgtaccaccctcgcttacaacatcactcaaagatatttttattcgtcctcatacgaacgcagatgatgagagttttactaaagagcagaaaaaagctaatagtaaatatgatattgtagattataactgtaaggtttattttaatgaaaaaccagaagatttagtcgtgtgcaggcatatttcgctgcagtattgtatagattcaatgaatgaaaatacaggtaaagttccattaaaggaatgctattcaactccagaagggatacagcaacattttccatacgaacttgatcagcaatttgataatctaataaacaatccaccaccaggtacatgcgtcgttgccagtgacaagttcggggagatattatctgtcttctttcacagaatggaaaaagagaagttaacgcatatggcggcaatcgttaaatctcaaaaacatgctatggccgtccgcttgaggataaaacaaacgcctgccggagaaactgaatatgttgtatccttttatgatcctaatgcaaccaatactgcagtacgctataaagcaaaaaactgtgattcttttgggtcattacaatcatttataaatattgagttggcgaatataaaatgggtaaaaacagagatttgctccgagtgtgtaggcataattccttatctccctcgagagcaggcccatttattaagtggtatagacaatgaattgcaaccaccattatcaccatcagcattatatctattaatgcaaatggggacgtatgaaaatattgttatttttttcgataagttaagaaattcccaagaaatgacagtatcaaaggttcttgagattcttgctgctaaaggaccagggggaacatatgggttatgtatgtcactgcaacacgataatcttaataagattaatgaatatataaaaaatttaaaagagttggccagaaaatttaactttagccgggaagacctggaaactctactccttgcgaaagataaccgtggtgtgagcgcgatttctgtagctttatcaaaaaataaaaaagaaagtgtcaaggtattgttcttggcgatagatgaatttgagaaagagtttggggtaaataaaaatgaaatgcttttttatatagggaaaaaaacatgctcaacttatgatttaaatagcgctattaaaaccaataattataatgttgttaatatattgctcgccaatataaaagcccggatgtttaaaaatgaaataaataaagaagatatattgaaactgatggcagcaagagaatgggcgggggagtcagacaaatggacgaaggcatcaggcttatattctgcgatagtgaaagggtatacggagattgttgccgcctggatggagacagctgatgtgatagccagccattatgaaaatgataaagatgtggtgagagaactactgtcgctgagcagaaataatgccgtctgctctttgcatattgcaagctttaagaaaatgagtaaacaggtcattgacgtatatctgaatgcggcgattcgcctggcgttgcaacacgggttcactttcgatgaaattgtggagcagtttacccgtgactttgatggcaagccattctctcatgtggtaaataacggggatgatatacatatgggactctggctgaaaatattcaaaattgtggttggtgaaaatgaaaattaccttaaagatgtgatgatgcagctggaagaaaagaataatgaaggtaaatctgtaataagtcaggcaaatggcaatcctgtacttaaagaactattctggaaagcagtagacgaatttaactttccgcaagaggagcttaataggttaaagcaatatcgttctctgtaa

SEQ ID NO: 9663 - DNA, 1482 bp, Escherichia coli
atgcagtctttcgttcaggattgtataatccagggaggatgttgtcctggctcgagtatacttctgagtcatttttataactgtaatataatagggcttgatgctcatggaatggattttttggcaaattcgttcaacaagtctaattatgatgaaatcaggggtccggatacggggactgtgttttataattgtaatttgaagcatattaaaataaacgatggtcttcgtgaagatggttcagatagatctatgtttaaccccaaagagtatttttctgattacattgaaagaagatcgagaaatcttaagttagatgataatttttcgaaatgcgtagagagtataaagaaagggaccgattcttcatttagcaagaaaaatacagagaacaataatgtcttctttaaaaatagtaatttgattggggcaaatttaggctattattacagtggagataggtgcaaagactgtgctattgatccaaatacaaattattcaaaagatggtcttacagcgcaaaaatacatgtatatggatctggacggagctataagtaaagaacaaatatctgatttcttaaaaaaggtaagtgctatcaatatcgatgtaataaatttttataattccgagtcaaagactaaggaaaaatataaaaacgcatttttagagttagagtcgtttttatcaacactttatgttgaaaataaatcgtacgagggaaaatatcattttgataatagtaggattgagttttttattttcaaagatatgcaggtaaaagcacaaaatatcattagcaatatgatagaaaatgatcgaattaagtttgttgaatctataataaataaaatgattccgccgccagatggaacaatacttactgaaaatccaaaagaatatgtccaaaagcaaataaaggagtctcataaagaatctgctacaaatgtaacatttgattataaggaacttgcacccatttttgaaggtgttcaaaaaaaacaaattgaagcgctatcaaaccaactggaacatataaaatcttttaagacagattacgattcaaggctcaataagtttgctcgcgattttcaatatttatccagtgcattttcaattaacaggcaggatttattaaaaaactatcaggaaataagagcttccattacagattacgatgacttattgcgagaaattaaagagttgaccataagtcgggataaatcagtagatgataaaaggactttatttgataaaaaaagggacaactggaatagtcaagaagtacagggtgaagtaaaggcattaaatgaggatattgctgactctgacaataagatacgttctaagcttactattgttcaaaatcatagacgcgagaatcaatataaagcgaataaaaatatcagtaacgcgatgcttaatattctggattggttcgaacggtatcccgatattgtaaaaaatataacccaggcttaa

SEQ ID NO: 9664 - DNA, 1284 bp, Escherichia coli
atggacgttgatgtgtcaaccagtgttgcgggtaataaaccgcaacggattcgtcgtattcagacagtgaccctggttttattatttatggcggggatcgttaattttctcgaccgttcgtcattgagcgtggcaggcgaagcgattcgtagcgagttaggattatcggcgacagagtttggttttttgctttctgcattttctctgtcttatggtttttcacaacttccttccggtattttgctagaccgctttggcccacgaatagttttaggcgcaggcttaatattctggtcattaatgcaggcattaacaggaatggttaattcttttagccactttattttaatgcgtatcggtctgggtattggcgaagcgccatttatgcctgcgggagtaaagtcgatcaccgactggtatgcacaaaaagaacgcggcacggcgctggggatttttaactcatctaccgttatcggtcaggctatcgcgcctcctgctcttgtgttgatgcaactggcatggggctggcgggcaatgttcgtcatcatcggcgtggcggggattctggttgggatctgttggtacgcgtggtatcgcaaccgggcgcagtttgtcctgactgacgaagaacggacgtatctctccgcgccggttaaaccgcgtccacagctgcaatttagcgagtggctggcgctgtttaagcatcggacaacctgggggatgattttaggtttctctggcgtcaattataccggttggctctacatcgcgtggttacccggttatttgcaggccgagcaaggtttcagtctggcgaaaaccggttgggtggcggcgattcctttcctcgcggcggcagtcgggatgtgggtaaacggtattgttgtcgatcgactggcgaaaaaaggctacgacctggctaagacgcgtaaaacggctattgtctgcggtttgatgatgtcggcattaggcacgttgctggtcgtgcaatcttcctcgccagctcaggctgtagcgtttatctcaatggcgctattctgcgtgcatttcgcgggaacgtctgcatggggactggtgcaggtgatggtgtcagaaacaaaagtggcttccatcgccgggattcaaaactttggcagttttgtttttgcttcctttgctccgatcgtaaccggttgggtagtggataccacacactcgtttaatctggcgttggttatcgcggcctgtgtgacgttcaccggggcgttgtgttacttctttattgtcaaagatcgcattgagtaa

SEQ ID NO: 9665 - DNA, 1215 bp, Escherichia coli
atgaaaattattgctgcagatgtttttgttacttgcccagggcgtaatttcgttacgcttaaaataaccactgaaagcggactttgtggattgggagatgccacattaaatggtcgcgaattgtcggtcgcttcttatctgaaagatcatctttgtccacaattaattggccgcgatgccaaccgtatcgaagatatctggcaattcttttataaaggtgcttactggcgacgtggccccgtcacgatgtcagccatttctgccattgatatggcgttatgggatatcaaagctaaagcggcaaatatgccattgtatcaactgcttggtggtgcttctcgtgaaggcgtgatggtttattgccacaccaccgggcgtacgattgatgaagtccttgaagactatgcaaagcaccagcagatgggctttaaggcgattcgtgtgcagtgcggtgtaccgggtatgcaaaccacttatggcctggcgaagggcaaaggactggcgtatgaaccggcaaccaaaggcctgtggccagaagagcagttgtggtcttcagaaaagtatctcgattttacgccgaagttattcgaagcggtgcgtaataagttcggttttaacgaacatctgttgcatgacatgcaccatcgcctgacccccatcgaagcggcgcgctttgggaagagcattgaagattaccgcctgttctggatggaagatccgacgcctgccgagaatcaggaatgttttcgtctgattcgtcagcataccgtgacgccgattgcggtcggtgaagtgtttaacagtatctgggactgcaagcagttaatcgaagagcagctgattgactatattcgcacgacgattacccatgcaggcggcattaccgggatgcgacggattgctgattttgcatcgctttatcaggtacgtaccggttcgcatggcccttcagatttatcgcctgtttgccatgcggcggcgctgcattttgacctctgggtgccaaactttggcgttcaggagtacatgggctattccgaacaaatgcttgaagtcttcccgcatagctggcgcttcgatgaaggttatatgcacccaggcgatgaaccggggctgggtatttctttcgatgagaaactggcggcgaaatatccgtatgacccggcgtatcttcccgtcgcacgactggaagatggcacattgtggaactggtaa

SEQ ID NO: 9666 - DNA, 1479 bp, Escherichia coli
atggagcggtattttattggtgtcgatttaggtggtacagaaaccaaagcgggaatttatacggcagaaggacgtgaaataggtgtctcttcgcaagtgttacctctgttaagcccatgtcctggtttttgcgaacgcgacatggaggcgttatggaaggtaacgtgccaggtcatttcactgtcgatgtcagagaacaatattactgcgagtcagattgatggcatcagtttttctgctcatggtaaaggtttgtacctgctcgaccggcaaggtaagcccttacgacacggcattgtttcctctgattctcgcgcacaacaactggttgcaagctggaaagaacaaggaattgaccgcgaaagctatcaccgtagtctgcaacagctctggccatcgcaccctgtagcactattgcattggttgaaaaaacatgagactgacaattatggccgcatcggaaccattttgatggttcatgattacatacgttcacggcttactggcaaactggcttgtgaagaaaccaatatttcaggcagtaatttttataatcaatataccagtgcttatgatgctgaactttttcgcctatttgagattaaggaagttgcgggtaaggttcccgatattattggctccgctgatttagcaggggttgtgacatctgaagcagccagccaatgtgggcttctcgccggaacgcctgtttttggtggtgtttttgatgtcgttggtgcggcgctcacttctggcatctatgacagtacaacgttaagtgcggttgctggcacctggtcaattgcaacgcgaatctttgatcgcattattccttctgattatccctatgtatgggggaaatttagcattccaggtacatttttcgcccatgagggaagccctacatcagccagtaatttgacatggttcttgcagcaatttttaccggatcttcctgacagctatcgggtgattaatgagtgggtggaacgagggtatgagaagcagaatgatattctctttttcccgtggttgtttggctcgaattaccatgaggcattaagcgggggatttttggggctgtgtgggcatcataaaagagaagatttggtgtacgcgatttatcagggcattgtcttttctcatttgttgcatcaggaccgtcttattgagattgataagtcattgcaaacgattcgtttctctggcgggccaacgcattccagaatctggatgcagatgttttgtgatgccagcaacatgcctcttgaaattgtcgatattgaacagtcaggttgtagagcggctgcaatgtgtgcggcagtaggaggaggggcttattctggattcaaacaggccatgaaggccacgcatctcaacgtgattcgtcttgaaccgaatgtagaaaaagcacacatgctcaggcgacggtttgctcgctttaaacaggttgccagtgcgctgagttccgttgtttga
